United States Patent Application Publication US 2007/0083945 A1 - sequence listing, part 7

SEQ ID NO: 41527 - DNA, 604 bp, Glycine max
gcttttgtgctgcatcctactgctgatttttttcaagaaatgatcctctaaaaccattaagagattgccacctggggtatcataaagcctaatattattccctatagaccttaatagggcacgacaacactctgcggccatttttacctgcctgctaatatatatccctttgctatgtcaagaaatatcatactgggcattcacctttgtttttcatagcatccttggtctgcttaacctttgttcaaccacgagggcctgttacttttaaaaactcttgggactttctccctaaaattttctaaagggacaattcccgacccccttctaatacacctggtatacaacttagccttaacctccccctaaaatgattttatttccaattgtctctttacacaggaacaatcaccgcagagtctacctcagggtaacttaatcccccccttagattgggggtatagaccttcatcatttttcctaatttcgaaatttaagtacttgaagattcaaaaaccctgttattcctattcaaaacctttaagtcattggaattaaaactcccttgaaaatgagatatttagtcctggggaaaaaacacttt

SEQ ID NO: 41528 - DNA, 558 bp, Glycine max
ctcagcttcacatcagaccacttccagggtgctggaactacttcacatggatttgatggggcctatgcaggttgaaagccttggaggaaagaggtatgcctatgttgttgtggatgatttctccagatttacctgggtcaactttatcagagagaaatcagaaacctttgaagtattcaaagagttgagtctaagacttcaaagagaaaaggactgtgtcatcaagagaatcatgagtgaccatggcagagagtttgaaaacagcaggttcactgaattctgcacatctgaaggcatcactcatgagttctctgcagccattacaccacaacagaatggcatagttgaaaggaaaaacaggactttgcaagaggctgctagggtcatgcttcatgccaaagaacttccctataatctctgggctgaagccatgaacacagcatgctacatccacaacagagtcacacttagaagagggactcctaccactctgtatgaaatcttgaaagggaggaagccaactgtcaagcacttccacatctttggaagtccatgtta

SEQ ID NO: 41529 - DNA, 399 bp, Glycine max
tgttccatgttgctcatgtctttgtttccttatgtctaacacagaaagctgattaaagaccttgtatgcctagtttagcaccttggataaaaaccggttacatgggaagcttagtgtgcttgaggctaatgagtgagctaactaccttgccttgcagtttactccacggacccattatttgccttaaatctgccatgaaaggtattataggattgctggcacgctaacgcttgatgtcgttatgaccggctaacaatgatatattctgacagcatgtagtggatttcaagacggtccttcggttaaagtgattctataagccgctgaaatcactcattttgaggcagcaatagatgtctataatgtattgtgcgcggttctaggagacattttgaacct

SEQ ID NO: 41530 - DNA, 575 bp, Glycine max
tgatttgtgagttgattttagccttagtttcactttggttattagtttattgatccaagaaaacttccaaagaaaaatgtctgattgatttttttgattattttattcaaagatattttgattattttattattattttgctttttttggtttaaccgaggttacagtgtgaacgatcggttagattttattttaacagtgattaaacgagattacaacgcaaatgatcggttgaaattgattttatcatttattatgcgagataacggcttaaacgattggttaaagctcgttaaaaacggaagaaaaaaaaaccaaaaatgaacgaaatgaagatgcatgctataaaacaagaaatgaattgaaagtctcggattcgaaaacttacccgttgaagaacgaagaacggatgaataacgatgaagaacgacggataaccttcatagattcgctcacgaaaacatctcggaagcgttactgaagcacctcggcttgattttattcactgaacaattttttcaccaaacagctgaattatatcccgggaggagggatcttataatacccctttttgc

SEQ ID NO: 41531 - DNA, 412 bp, Glycine max
tcgtgcggtgccatgaatggcgcaactccagaacgatcgcgcatctctttcaaatgagcaggcaaccaatcttctatcttggaggagtgcatacgaacctcttaaaccctaaccccccagtttgtccttatggcgacactctagaatgccaaccagatgatcctcgagaatctctgttgaacaaaaaaaaatggctctttttgctatgtgcctaccaacagaagatgcttattgataatggacaaactatttataccctaataagagcgtgttggatctctcagccggattcgtgcactgccattacacatgatcacaacttttgtatactgtcgccaaaagaacaggtatataaatcgtgatagctgaaaacgcttgcagcagtggcgtatctaactaccatactctaatt

SEQ ID NO: 41532 - DNA, 677 bp, Glycine max
agcttttagtttagaagttcaatagagtaacgataacttattatcaactgagttacaaggttgttaattaccttttgcttttttttagcaatccggcggtctttctctatgtatccttgttaactgctgaaatattgtttggaaaggataaatagggattccggcatttactaaaaacagcatattttcaagtttggatgtgacatttacttaaaggatgctataattaaaattcaggatgtagtacttcaagcatattatcatgcataacatatctttcagagtgctgtttctcattttcgtgtttccaagttttgccaatttgaacaaggttccttgggttccctcatatattttcttctggacatgttaaaggcttagagtctataatttcaatctgatggcaatgcaattttccggagtaatctcatcccatttctttttgtgtgatatagagttaaaaaaaaatgcacagcaaggacctcaaagcaagttcctatatataactttaaaggaacagtaacagagacctaaaaactgccaattctaccatccaaggcccaaaattatttgtagaaaaatatttttttgtaaagattggaaaaattatacaatgacggtgattaaactttttgcgactgctttttcagatttagggtaaataagggagcttcttt

SEQ ID NO: 41533 - DNA, 367 bp, Glycine max
  unsure (1)..(367): unsure at all n locations
tcccgcatccgtacttggaaggatctgatcactgcctttcttatgctatatcagtacaattgcaatatggctcccgatcgcactcagttgcataacatggttaaaaaggaaggtgagacctttaaagagtacgcccaacggtggagggacctggcagcacaagtggcccctcccatggtcgaaagggagatgattaccatgatggtagacaccttaccggtgttttactatgagaagttggtaggctatatgccctctaacttcgcggacttggtatttgccggngagagaatcgaagtaggtttgaagagagggaagttcgattacgtctcctccacaagtaccaatgctaggaggatcggagcaa

SEQ ID NO: 41534 - DNA, 386 bp, Glycine max
  unsure (1)..(386): unsure at all n locations
cacactggggcgattttctcgctttaaaaacctgttattcctttatttctgaaggtttttctatgagagagtgatgcttcaataaccgaacatggtcctctatttgggagaatggtggaagagagcggaacatctgtagtgaggcgccctgtccctctatgagtgggngacatgtacccctatggtggtaccgttatttaacttccaaatcattacttgtctgaaggcgaatacctccataataaaataattgtgacgtctgagttggaattactggtcgtcttatactattattagatcccatgttgacatccctatatggcattgtatattgcggatttatttaataattcatatgtttgtagatggtacattttttaactgtt

SEQ ID NO: 41535 - DNA, 502 bp, Glycine max
taatgtgaacatcgagctttttccgtaaagaacaaaaccaaagtacaatattgtctcgtgaacacaaaacaagaagttgccaatgtgccctaaaagtcaacaaaatcaaattattttacttttaatgcaaacacattgataacagtctcatggattcacttactgattcaagtaaggtcctaagtatacttctcgatgtgattccttgacccagttggcgatgtactgttcacattttgtacgtttgtcctttgcacagtgtattgcctgtggctcaaggaaaccataaactggagccaatcctctgcttgtactacaatcattcataaacctatttcatgcacggtaaacaatattgttagccatatattgtaaggacaatttacttagacttacataacgggtaacaataatttacttacatcatccacaactgtagtatagatatgtttagaaacgtattccctggaatgattttagtcacatctgcatgtgtgatgaa

SEQ ID NO: 41536 - DNA, 660 bp, Glycine max
agctttcacccattaaaacttaacgtgaaattaaagctgaacataaacatagatctaaagactgaagcgttaacataaatctaaagactgaagcataaacataaatctaaattattaaatgtgctaaagacatgataataataaaactgttcaaaacacagggaattaaaaatcctgatcctgccaatgatcctgtgcagagtctatggcatgctcattcagatccaaagcaggagtgcctgatgatgaatcctgaggaaggggtaggtctggcactggtgcatatgactcatgctgagaagaagacatgtccaacactgtaatggaaagctctggtgacacttgtggggtagctgctactagataaatctaaaaaatgaaaagctctggtggagtgggctctgaagcctctaaaatgtcatcctcctattttggcagaggctcttgggatgtaaaggcctcaccccctccaaaagagaaagcttgactcttggcaggccactttctaaagagactccttgatgctcataactggtccgtgttggaccacaatctgtaaacttttcatgattcagagctggccccgatccaggctttgcaacataaacaaagaaaagctctaagctcctgatggaaggacctaaaataacttgtactggt

SEQ ID NO: 41537 - DNA, 532 bp, Glycine max
tggtggagttcgctgagaatcatggaaggttcgggttgggttagaaaccttcacatgccgacaagaggaaagtcgccctatataagaaggagagaaacctggctcatctacaagggtgaggactacaagtggaaagggtgcccatttgtcatatcattgaaacctttgttagtgcggggtggatgcacgatgattaagttgtggtgatagatgaagaaacccctcaagatcgaccggattgggtgcagccatgtcctccgggctttgaattgggtaattggcaaatcgtcgaacgacccaagattttcatgagctattcaatgtaatccaataataccaaccctattgctaagcctacactgtatggtctgcttctttagacgggcatacctctttctttaatgggctcacaattataaatacacaaccctttttcatttgatgtgttgcctttcacactttcttctatttgcattctttgtgcatatttatttttgttgcgattaaatgatttgacgcagatccaacaatg

SEQ ID NO: 41538 - DNA, 490 bp, Glycine max
tatgcactcaacatgaagcctcaaccaacattttctttttggggtgattccttttttttgtagtatggaccatgatggataaatccaaaccctatttttgttgatgatgtcagtcttgtcactcttctactcattgttgttcttcctcctaaatcttttatcaaagcttggagagcaccttctttagattgttcttttctcaccattcttcttttttcttgtgccttttaatgcatttaatagttatattaaggtaatattagacagatctttaatattttctaaagaatggattgtggcttgaaatctctcaagaacagtaataagtattttcttaaccattttagaattagaaaattcaaagccatgcaatcttacttatttgtgtggaaacaaagcttcatgatgaatcaaaagtgattcaaaggtgttttgatgataacaatgatgacaacaaaagatgatgaccaatgtgatgaaacaaaagctc

SEQ ID NO: 41539 - DNA, 485 bp, Glycine max
  unsure (1)..(485): unsure at all n locations
aaaaaaaagttagatttttaagggagaaaggtggtattacaattttggcatttaaaagctttgctgggtgcaccaagcaacactcattaaatcctgcctaggttagncttgctattcttagccggtcccaagcccggataaaaggagagggttgtgttatgctttcgacggccaacgtaaaactttgtcgaatctctatgacatggatcaattacgtaataatgtgaatgctatgtcgttgcccggaagcaacgcgctgtatggctcgagtacagtgtcaaaagagcaagggccactgcatccccgcccggatgtagtgaaaagtaagcaagggttcccacattttcgtgaacgggtgtgggtaaagaagctagttcatgacaggaggattcgctttggtacatgaaatatatgcacacttactggaaaatctatggaaatagtggatgttatggtgaggaggaagatcaattttatgtgcctac

SEQ ID NO: 41540 - DNA, 533 bp, Glycine max
agcttgtaagaatatggggtacccatcacatgtggtactatggggcgggcgggcgaaggtgcacaacaagttttccacatccacaatgcgcgcataaacccaccatcccctgttgcccacctccaactgagctcacgcactcccacgtagcccatatcctcgtttatctcaacaccgggtccccatcaatcctcccaagcttccacaacatccaagtaaaacaacattcaaacagcacaagctatcacagccaagcaaaacagagcaaaggcagaaaactctgctcaacacatcaaccaaaatcacagcttttctcactcaaagaccacagtaacaattccttcgatccaattcgttaaccgctggatcgactccaaaatttactggaagtctatagtgcataagcctacatgtgaccgttgggaatctactaacaaacatccagaactcattctgcactactcttttcacaggcaaccacgcacaagcatttttctgggcaagccaaaattctggtgcacccaatttgacag

SEQ ID NO: 41541 - DNA, 574 bp, Glycine max
  unsure (1)..(574): unsure at all n locations
accttgaatctcagcttctgatgatgaatcaagttgattcaagttgttctgatgatgacagctcgcccaagagaatgatgtcgagattgagtcaccaagttcaagatcacgatttaatcgagattaatttcgggattcgagaaatgacatcaagagagaatcaagattgaagagaagatgatttcacaaggggaagtagttgacaacgaatttttcataaaccacgcctagcatagttctgttttacaagagaagtttttctcaaaattttctaagttaccagagttttactctctggtgataagttaccaatttcctgtaattgattactagtggcaaagcttgagtttcaaagctgttaactgaattttcaacgttccaattgatttttaatatggtgtaatcgagtacaatatattggtaatcacattaccagtgtatctgaacgttgaaattcaaattctattatgaaaagtcacatcctctcataaaatgctttgtttaatcgattacatggttttggtaatcgattaccagtgacaagtnttgcataaaaagtcatgagatgtcactc

SEQ ID NO: 41542 - DNA, 928 bp, Glycine max
  unsure (1)..(928): unsure at all n locations
tcttcctcactttatctcttttctctttacctcattcattctatttctatactccttctctcctctccatccccgcccnnaagggttgaacccgtagaccttcctttagccgcctcttaaaaccccngcttctccctgctaatgactcgctaaaaatataaagagcgggatttttcgttctattatgtgaatagaaacctctagttgtggggtctgctaatagggcttcagttataggcccaccgcaacaattattatttcagtctaaggatcccattgtaataccccactcattgaattcagattgaactcattactccactttctctttttctcaaatcaattattttaacagtgacaacatcagacaatttggccaccaccattaaactatagaatgaaggcaccaccatcaatccttccgaagatggaacactctcattggaacaaattataaagaccgccaaaccatcactttctatagggctactggaaaccacccattagtttaactcggacgtagccccatccattggggccggacccactaaaacacttcgcgttctccctccccttaatcctttttgtaatggccttccccaaaatggtctcaaccttcgcgtcccccccgagttttcttgtacaagaaatgagggaactctccacttaaagacccctcgggcccggcctttaaatgaggagctcaaacccaaatcgcggcggaatcttcccttgggaatcgacacgagaatatatcctaaaaagttcctcgcctccccgggattccacaaccgtcacccaaaaaaagctccgcgttattcgtcttcctccgaataataaatttcaacatcatctatactcgccacaacaactccggcgcatgacaggtttttcctacacagaaccccgcccgccaaattcatcttcg

SEQ ID NO: 41543 - DNA, 149 bp, Glycine max
catcctccgttaaacatatttgggacggggaagggacaacactgatgcacaaaggggcaggcctggccgggggagacaaccgaggcggtttaccattaaggtatggctcgccaagtactgacgcacctgtgttagtagaggatgcgggc

SEQ ID NO: 41544 - DNA, 486 bp, Glycine max
  unsure (1)..(486): unsure at all n locations
tcgtctgcaaatccctcttgtaagactaggtctagactaaacaacattattgtaacagcataattaaaaccaaaacttaatccgtagatccctcttgtaagattaagtttcgatcctgcttcaatcaaatttaaggcaacagtagatccctattgtaagactaagttacctaactatgcacacaaatggatgatcaaaccaaaagcatacaaacattatgcattgaaggaagtattgaacacataaaacataatcaattagatattatgatntacatcagttgttcattagaaatcccaaactagggtgcttatccaaccattacaaagaaacccccaacaataataatcttacaaaaactaggtttatatgcacaagctgctcctcttgatgcttctaaggctcttttcccccaataggcactatggtgtgctctggaatctatgccgtttcttagcctacaatctgtctaaaagtctgtaaaag

SEQ ID NO: 41545 - DNA, 534 bp, Glycine max
  unsure (1)..(534): unsure at all n locations
ttgagccaattcaaacgacaataactttttactccgatgtctgattgagtcccttcatatatcgagacgctcgaaattgaatgttgaagctctgagccaattcaaacgacaataactttttactcggatgtctgattgagtcccgtaatatatcgagaccctcaaaattgaatgttgaagctctgagccaattcaaacgacaataacgttttactcggatgtctgattgagttccgcaatatatcgagaccctcgaaattgaatgttgaatctccgagccaattcaaacgacaataactttttactcggatgtctgattgagtcccgtaatatatcgagacgctcgaaattgaatgttgaacctctgagccaattcaaacgacaataactatttactcggatgtctgattgagtcccgtaatatatcgagaccctcgaaattgaatgttgaatctctgagccaattcanacgacaataactttttactcggatgtctgattgagtcccgtaatatatcgagacgctcgaaattg

SEQ ID NO: 41546 - DNA, 660 bp, Glycine max
gctatatagttcttaaaacaagaaacgtgatatttgacttaacagacttcaaaaatcacataaaaattgtacttaacatcttttgagaatgaccaagttaatgtcctttggattatgaaaaaccataaatcaactatcgctatgaggatcccacctaggattacaaagttttatcacaataacgcatcaataagaacctttttaaccacaaataacaatatcattaataaaatctagggccaacgggtactctaacccatatacaatgcaattataggagttaacactccagtttgcaaaacaaaaaaaatcccctcctcccacaaaagatcctaaaattggcacttagtttcccacatattaatcatagctaaaggcgaacatcatgtacttaaaaataagagatctaaccactcttaattaaaaattggatccaatttaaaccgtaaaaaatatctttgattaataagccagaagttgcccactatttataataaaaaccattacgggtataatacgaagaagggggggatctccaacagctatactacgcatgagggagaacatacaacttaaaagtgtgcgcattgtggcataatttggttcaaaaataaaaaaaccctcttacttataaaaaaacatccaatgtgaaaattcatt

SEQ ID NO: 41547 - DNA, 552 bp, Glycine max
  unsure (1)..(552): unsure at all n locations
tgngaggattgatggngacccggtgttgagagaaacgaggatatggtctacgtgggagtacgtgagctcagttggaggtgggcaacaggggatggtgggtttatgcgcgcattgtggatgtggaaaaacttgttgtgcaccatcgcccgaccgccacctagtaccacatgtgatgggtaccccataatcctacaagcttgagatgaggaagtgttgaagggtgaaacttcctgcttttattgttgaccacagagtggtacctggagatatgtcgcgggggtcaggagaccttggggacgtcaggtggggtgctattgcccaaaaccaagcttgaccaatcccgacccaacccgggcatagtcggtcagtgagaacctgtgatgtacctaagcaggcgagctcctggcagtcaacagataaaaggaaaacaagaccacaaagcaaggaggcttgtggtggctggccagctgtgaaatttgtataatatgtggattgtggcctctcgtaatcgattactaagggtgggtaatcgattacaaggcttaaaattga

SEQ ID NO: 41548 - DNA, 793 bp, Glycine max
tgcagcatgcagcttgtcaataagaatcctatggtgggctgaattttatcttcttgtttctttgtctaactcatttgttcatgaatgtatgaaatttttttaacctattatttgagttgaggcaaaacctgcatttttattattccttaacatggtcatgaattatttttataggctttgattcttaaccctttcttggactgtaccgttccttatgattgtgtctattctacaattgagttctggtgattgaactgctggctgaaattttgatcctaagagaattttcaactcctaaaactatggtaaacaagcctactgagtttaacatacatttgaaagtttgaagtcagccttatgcactcaacatccctgcttaaaattcaaagtctgaaatccctggttgtggccgcatgaacatttggagctgtaaaatttaataggatttggtcactacgaatttgaagcttaaacttttactgaattttttagacttctgggaaaaaattattaaaggaacccgtgatttgattaaagggaaaaataagaaaattttacaggtgcgtttaacatcacggccatgaaaaaaaaaaaactaaaagggaatgtcctgttttttggatcaaacctttgtctatatttgggctatttttaccaattttgtgtgaaattcatttgaaaattaggggataccatgtccaaaataaaggttttgaggcttttttggtttttaccacccctcaaccttcttggtttttttgaacccaacttctgtttggctttattgcttaat

SEQ ID NO: 41549 - DNA, 516 bp, Glycine max
tcctcgtggcttctttgagaagctttctcaagaggcttctttgataatctacatccttatctatccacccctctattaactaaattaacttccttaaaaataattacggatgaaaataacgcaacaaataatcaaacatctaacataattactaataatatatagatatatatatcagggtgttacactacctgcaatttggagccctaaatacaagaaccaaaagtaatgaaaccttaatctaatatgtacaaagataaatgggctcatacttagcccatgagctcgaaatctaccctaaggctcatgagaatccaagtgccttctcttgcatctctagcccaatctactaggagtcttctatccaatgcccttgcagggtagaattgcatcattccctccgccttgaaaaggatttgacctcaaatccagaggttcttgaaactcttggcttttttcctcaacacctagatgaagatgctcttgatactacatgatgtaaactccattggagct

SEQ ID NO: 41550 - DNA, 975 bp, Glycine max
  unsure (1)..(975): unsure at all n locations
cacactgcaccacgacagttgctcnttactccaccttacacttacctnatacatacttagtagattctttcttttntcccctcctnccaaaaagcaggattgtgatgacgtcgatcttacacccanntannaanancnnnacgctnnctcagggccatatctgcgaagcaaagaggaggataattatttttaccaagacaatctattcttaaaacgaaaatggcatacgaccttcccccaaaacacaaacattcacgcaaatttatagcgaacacctgcacatacctccttaccaacattcactcgcaccacatatactttctactaaaaaacatgccaccaggcacaatcaaagcaccttccctacctagatcacttaatatgacttacaaggaggatatgctacctacaacaacagcacttcctttgctaaattcacatacatgcatactccaaacattgtggctaccaaaaattgcaaacgtgcacaatccgcgattttaaaacctatacacacaccaacctatgcaagaatcctgatacctaccaaaaaaggcaacctctccggcctattcaagagtatttctacctaaagcccatgcaaaacacaaaatttactttgcgacacaaatgcaccaaaataaaaggacctttggaaggatttctttacaaaaaaaccgacaaataaatttcttgggaaacatatggacaccaaaattcacagtccataacaacaagattttcgctcacacccaaagagatatgcgaagacgatctggcattattaacctacatcatgtcatgaaacacaaccctcaaccaccacgggaggaactaaggtcccggcaactactcagtcatgccacaaggacatctccccaatgacaccaactatggccactcgcataaacatattccacaccctggtaactaagggcgaacacatcgctacaagagcatggatcgcctacaacc

SEQ ID NO: 41551 - DNA, 839 bp, Glycine max
  unsure (1)..(839): unsure at all n locations
gaagcgcagtatgacccctcactttcacatcatatggaagacgtacgaatattcgttccccagagaggattgactgctcacaccacccnnatagaaacacacccggctgccacaacacagaaaggaggactttttctcacaccacgcatcaccacccaacacgtatacgctcctagagaccgaccgacgtcgaccatcaccgatcagcacatggacaagcgcacagatagtcaacccacgaagccgatggcgccatcccgaacccaggcacacaatcaaccgcccgaggcggaaatcaaaccagacacgagcccaccaaaggagcaaacttatccccacgaaatgacacgacctaacgggacagacaaccaaaggcatctgttgtctcaaaccacaacaataacaccagtcaaacacagcccggcagcgtgaacaccaactccactactgctacataggcgatgcacctaaccgaggacaccggctctgcaatgagccatcacctcatgagaagaccagtaaccaccgcgcaacaccaaagagacgaggcgaaccgacactcatcaaggactcccaccactagcacaaactgcccgccgagaccagcacctccgacacaccgcccacgacctaacaatcaagaacctactcccagaacaccgaaccagtcaaactaactccaaactgaagacacataaggaaatcgtattaacgccgacaactctgataccacagtacccacaggtgcagggcaacagacacccatgtcccctcgccaccgcaagcccagcacgtcgctacgcaaaacgtagacctccagcaccaatacatcagagccg

SEQ ID NO: 41552 - DNA, 419 bp, Glycine max
acgctttatctacccactctcttctaataatgacaactcaccttctggaaaatataacgcagatgatgacgtcacaacccatataagtcccgcatcagatataattacgtactaatatttcgtgggtgtcacataacctcatgtgtaaaaacccctgtttatgccattaagatcatcgaagatatgtactccagcccttataacaactcagtggatatgaggattatgaagagagatgccaaccacgtggagaaagatgattcccaaactagaatgggaaaacatatgcgagctctaacactgaagattgtgacactcatgagagctcatgcccatgtgcccatctctaacacctttattcctacctatgatagatgtgggattgtgcatgggcctttagaaatacacttttggttaca

SEQ ID NO: 41553 - DNA, 578 bp, Glycine max
  unsure (1)..(578): unsure at all n locations
tggttcgctccacacttaagcttganatctagtagctcattgtcccttactagtcatctcgcttaagcctggctcaacctacgcttaagcttggtcacttttaagcttggttccaaccacacttaagcttaaaaaccagtggcccattttcccctacaggtcctctcacttaagcaagagcaactattcactttagttccacaaccttgcaaagctttgaaaaaggagttttcactttcaatggcttccaaatcaacccaaacggaatccccaacctatcgaacatgttttcacacactaaacacccaaaataatagcattttacaagttctaacaaccttaacatgaaatctaaaggaaaaggacctaaagtgttgatttatggagagataacttgctatgctcctacaacacatctaatggagaatactccctgaacaagcaaagcatgaaagataactcctctatatcttaagctttgaggaatcttgtacgtatagcaagatacaataagcacttggtgtcaagagcaccaacgttaatggaagaactcctttcaagaactcaacattttctct

SEQ ID NO: 41554 - DNA, 529 bp, Glycine max
agcttcagcccaagccttttggaaatgcctgcattgcatttaaatgtatatacagatgctcctattacaagggacaacttggcaacttccacaaaaaataataagtgtaatgaaaaaatacaataccaagttccaacgttagataacaatttaattagaagtatttaactggcattcaattacaagatgcgaagtgaagtaaatttatcattttattattcaaaattatcaatttttatcataatcactataaaagttatgtttatgatgatttctaattgattgatattataaactttttaacacttaaatgtgtgggcatataatgtatagaatttaaaaacataatttatttgcatatttaatagcttcacaattaaaatacgttgtctatacgttaaaaagatactatattaaatactacgtggggctgaaatcactgattccagacttaggttggcctatttggaaaaacatagcttaccagcctttagtgtgctataaactaaaaatagctgttaaagtggga

SEQ ID NO: 41555 - DNA, 607 bp, Glycine max
  unsure (1)..(607): unsure at all n locations
tctcccncagttttctataaatagggggagaagtgaagtagaaaatgtgttcagccccttaggcacttctctctctttcgaatttgcttagaaaaattgtttccatgaagaaaatccaagccgaggcgcttccataacgtttccgtaagtgatttcgcgaaggttttcgaccgttcttcgacgttcttcattcgttcttcatcgttcttcagtcttcaacgggtaagtacctcaaaccaagctttttaattcattctatgtacccgtggttgtccacatttggtttcatgtatttttattctcgttttcatttactttttatacccccttttgacgtgcttaagccatttatttaagtcatttctcgcttaatctaaaaataaaataaatttccaccgatcgtttgaattgtatcatccattaatttcggttaaaatgaattccgaccgttcggtcgtgccgtaaccacgttgtgaatcaaaaaagatgtaaaataataatataataacaaaaaatatatcttttagtaaagtaaaagcccaaaaatcaatcggacgtttggaatttctcattcttaattgaattgactaataactaaagtgaaact

SEQ ID NO: 41556 - DNA, 1101 bp, Glycine max
  unsure (1)..(1101): unsure at all n locations
tactacaacagtaacatataccgactccatcaaatcaccctcaacccacagcatcangatatgttaactantcataccncncnncagcaggnatgaggttctcgaacagcgacccanannaaactcagctctatactgtaatcacgacaacgactctcaaaaagaagaggaagacttctatctatgactgacgcacgccatgtgaacagttaatgttgcacctagcctacacggtattctcatgcgtgaacaccatatatactccacttccagtatcaagcctggtgagactgatcatcatgcctaatatataaacaggggtggtaaatcactcatcaacacgattcgaagaaggagttgtgaatcacaatatatactgcgtgcaactgcagctctcttggatagggcaaaagccacacaatcgcgatgtgtctttctgactcttagctgacaagatgttggccaggatctatgcgaccaaatagacgatgaatcgccggcataacacttgtatctatcacaagaccacatcgcgaagcaacacatcgacattgctccaatcatccatatgcaccaatgggctctacaaactcttcacgcaaacaatcttgcaattggctccgtgaagtaaaacacaacacaagtgactggtcctcctaccaatgatggcatcgcaaaaagttacctccctcatattgctacgtcaaatgttgtcccactatatactcggcagctacgcgagaatataagcttcacacccttcactccatgcctacaagaggatccgctgtgataaggggcgataaccgagaccatccaccacaatcccgtatgtcctcacacacgacaatcaagcatatcgtccggctcgaagaaccactcaaaagacataaccatgagtgccctctacaagtaccacgtcctagaagggacgcacgtctctatagatatgccacatgggtgcggcgtatctgcacataagaaataacgagaggcgcttagcaaccgccttacaaacacgacaagattataatattcgccacggaatgtccatcctccacgacatcgtcgtacatacatgaagcacataactcctcgccg

SEQ ID NO: 41557 - DNA, 502 bp, Glycine max
agctttcaacaaatgtcttcacgaataatcatcacacatcagaaacctagcaagactacccatcatatctgcccaaaccccatacccacgaaaattaaaggagaaagaagtccacccaaacctgaattttcgaagtcccactcgtagccacgcacttcacgactccaaaaatgctctcctttcgcgatttggagcacaaatgatggccaaaggttgaagctttgtgtggagcttcaatggtgaatgaagaagaaaaaagctacgtgagagagggagagaaaaggcttctgaatttctttcttttggctgagtgaggagagagaacaactttttggtttttaaatagaaaggcttttctctttttctattattttattcaagctctgccacatgtccctatttgaggggagcaaaagggcccactttccctttttactgtgacccacactcaaccagaatagtgagaaaaacctgacctttgaaacgctaaaatcctgcctcg

SEQ ID NO: 41558 - DNA, 473 bp, Glycine max
tgtaattatgaaattgagatgcccgaagaaacactatttcctagttaaccatgcattaggtaccatgttcaattattttgttttgttgttgtgtgttttttttttttttagaaatgggtttatgatcccaacatggttggctcatggtgcctaacacatgcaactaagaatgtagtgtgaagtttcacgcttcccctttttttgtttttgttttgtagaggaaaacgcaaggatgagcaaacatgaaaacaaatggtatgcaattttgcagatcaaaaagtttgttgaacgcatatgcatgatgatgccatgactcatgcaaaatgtgaggctggaatatgataatggacaaatgcaggaacgatatgttcattatgatgttatgaagagatgcttatgcgatgcatgatatgaatgcattttacggacacgagagcccggaaaattatctcttcttacttgcgcatttgggg

SEQ ID NO: 41559 - DNA, 263 bp, Glycine max
taacttttgcagcgttgtctcacacagactcttattcttcaaagataccacaagtgttacacatgcttctattttagcctaggaacttccttgagaaactattggtacacccctccaaaagcttaaactcacccccatgccaaaatacatgaaggaagaaagctttctttagaaactttccttgggaaacaagtgttacacccctctcataagctaacctcacccccctgggaacacacaccccattggtaaactcacccccc

SEQ ID NO: 41560 - DNA, 597 bp, Glycine max
  unsure (1)..(597): unsure at all n locations
tgtccacatgacactctcacttanggaaactaggcagcaagtgtcgatgtcaccctgtcgtgcacaggcaactccccccctatggtgatcaacttgagtctcaaggaagttccaaaccaagtgacatgcccccaagtacaagtatttttcctcatgaaaaactacgagtacttactgacaaagtttgtactatttccatgcaatatgaagtatgaaacatgaacatcatcaatgcactgaccattaatagttaaagattctaagccatcccctttctctctccaagaatgcttaaaactctttaaaacactcgatttccccctctagggatatccaacatgatcactacaccccctatgtacatacataacatacatcatcacaataacatcatcaacatcaacatcatcatcaacatcacaagaaatcacattccacatacatacatataaattcatgaccgagattcacatttctcaggtcttcaagcaacataaacctcatactacaacaatctataatatcataagaaacatanttttaatgaaaattctanattatatgggaaaactatgatattcaaaagaaactcttatg

SEQ ID NO: 41561 - DNA, 431 bp, Glycine max
gagaggaaacctgtttgcttgttgattgacggacaaatcttctttcaacttggccaagcatcctactttgcatggctgaagcaaacatattgaacttatgtttcactatattagagaccaagttttgaaagggaatgtagatgtataatactgtcaagcagaataacaactagctgatatgatgacaaagccaatccaagtctcaagattcaagcagatttgtaatagattgatcaatatcttgaaggatctgaattgagagagagtgttggattttggagttagttcaaagtcaatttagaccttgatgagttgtatctgaagttggtagtttgtttttctgttattttcagttataacgacgggtctgcaaagttagttttgttgaataattacataatggttcctgtgatggctgattaaatggaatc

SEQ ID NO: 41562 - DNA, 624 bp, Glycine max
  unsure (1)..(624): unsure at all n locations
tcgatgttaatgtcacattagataatgtcaaaaaccatatcaaattatggagatcgtggtatggtattgtaagtgacatccttggccagagtggatttgattgggatggaactaagcacatgatcacagttgagaatgaaaatgcttggaataaatattgcactgtaagtattctttaatatgttgctatttgttattcaaagtagattggatttgactttttctttgttttccagtcgcataaatcggctaaaccgtttcgattcaaggtgcttcaaacttgggatgatatagtggatttgtgtgctaaagatagagtcaccggtcatggagctgctatggatgctgatgaagcgatgagtagagaaacaaatgaagtggaattcatggggttaggtgctactgccatagatttagaagaaccaagctctaatacaaaaggaaaaagacaaggttcgacttcttctgngagaaaaagaaggaataacagcttctttggataaaatggcgaactctcttaaccgaatggtggaaaaaatggatggttaagttgatgatgaatatattctagaagtattacgtgaggcagctttgataccagatcttaatagacaacaatgggct

SEQ ID NO: 41563 - DNA, 403 bp, Glycine max
ggcgtgcgcgctcttaaccatagatattccggtgtagagagacttttttggattcaaatacaacacttctcttcattaggcctccattatcttaatcaccgggacctattgggaataataaaaaacgccgcatattccgaccaattttgcgcgggtctttggcccacactatataaaatcataaacaacctaatttatcttgttacggactggaatatggatctataaggcaaaactgccccctatctacgtacactaaactcatacccccctcttctgtgtctaatttgcattccatcgttctttaacccccaatgttgcaacccctcttttatttcaatggcgttttcttttggaaaatatgtgcacaagtagagtggaacattgtatttaaagtcacctg

SEQ ID NO: 41564 - DNA, 291 bp, Glycine max
caacatctttgactccaaagcgtttaagaatgacactgacaccaatgaaatgcagttagtggcacctaaatatttgacgcgggatggaaacgttggcaagcacaaaatttccttgcaatactccaccgacagaatgtgcaactctctaagtataataatgcgttcacgcaatcttttcacatagctttcatctagccttagtacctgtaattgtgataagccactgaagttatccgggagtgcaactaatcgactcatattcttctatatgcagaatttgtagggaccatt

SEQ ID NO: 41565 - DNA, 52 bp, Glycine max
  unsure (1)..(52): unsure at all n locations
ttcatctctctctcnttnncttctctctcctcctcttctctccgctcatgta

SEQ ID NO: 41566 - DNA, 860 bp, Glycine max
ctcaatgaggtcctaggatggtgactaaccaccacggcagatgcttcttttttacatacgacaccaggagagacgaagcagcactcactatggaataagccttggaagaaggagcttcaccaccaagaagagccttggagaagacgctccaacgcaagaatagacagagggagaaagagacagacgggggagcaccaaccccgcagaagaataagggaaagaagacgaactatgtgataagtctcacaagactctcagtacaaaaacacacgccccgtgaaaaacagcgacgagtacatacacaatgaatctcgcctaataagcccgccagcaaaacctactggagaagcatctatgagaaacttccgcgataacctagagctgagctacacacacccatcgaataaccaagctcacctacttaagaaactcccttaaaagactcccaaggaaactagagactaaacacacgtaccacactagtagccaggcccacccccttacgacgagaaacaagaacatagctaacacgacctagaatagctaacgccaccctccgacgcaaccattggaaaacaaaagaagtgcatacttcaacaaccgctcacaattcgccgaatacaagggggaaccccaccctccataaggcgaaattcatgcccaaccacggcaaacacaatctaatgttgcgacaaaaccaacgcatactaagcccgagaggcgaacataacctagagccacgcaaaaccaacgccctccttggagtccataccacaccagttggatactccacacaagccttgcccttcggaagctacaacccaaagaaaacgtcgttcccactaataaggggacacccc

SEQ ID NO: 41567 - DNA, 573 bp, Glycine max
agcttctgcaccaagataccataattggtggggtgtatattactatgactatagtgagcttaattaaaaaaactatcttttggcatctaattaaagagtctttaaataagaaactcaagtctttatcttgggggattcaaaattctttagacattttaagaaccaccagagctttttagaagagaactgctccacgaacaattgggggttgaaaaaataaaggttttcgctctcttttttttctaatgccatattggatgtgggttatttattctatgaccatgattagcttaacccttataactccgattgcgatgtagttgtacccctgtactctagttcctctttttaataaaggacttttgatgttattcaagtaaattggattctttctatcactttcacttctatattgggaatgatcactttgattattagttaattgcatctcagtgacgtcttcttgttattaaatgacctattgaatgatagagttataaagcttgcttgaccaactggcgaaatgaatcccttttacaaacttttcactattcttccttacacctattaaat

SEQ ID NO: 41568 - DNA, 634 bp, Glycine max
  unsure (1)..(634): unsure at all n locations
tgatttatatttaatttccacttgtgtaataggtacatttttaatgttcatattatcatagttttgcattttttgttatttaatttattttattttattaaaaggcatggttagagaagatccatcaataaaagtttctttgattcaagaaaggataaacagtggatttggctataaggtttcgtacaaaaaagcatgatgacgaagcaaaaagctatttcaattgaatatggagattgggaagagtcatatgccaaactttcattgtggctaaaacacatgcaaaataattcttctggaccctattttcaaatattgcatgatgattttattgttgggaatcgggtgagtcgtgaacaccgtcaatttcataanagtatttgggcattcggtcaatgtaaaaagacttttaattattgtaagtcaatcatacaagttgacgacacacatttatacgggaaatatcgtgggacccagttaatggccacatcacaagatagaaatggtggtgttcttcctctagcattcgtcgtagtcgaaggtgaaacgttaacagcgtggtcatgggttttgacacatttacatgaacacgtgacagataanaatggtatttatctcatatttgatcgtcatg

SEQ ID NO: 41569 - DNA, 383 bp, Glycine max
catgcgagctcgggacattttcaattctaactattaccctgttttttagctctccattgattttgtttgggggataagtatatagagtctatcacactgacgggtacatatgataagatttattcggatgtagcggggcgcgcattttgggacttttctagaccgaccacccaattcttcttgaatgacaaaactagattgccaaacgatgctcctgttctacttgggaaaaagggatctggtgattggtaatagaatggcaagcgtactccattttatcacaagtggaaagactaaatggaatctcaagatccaatccacaacgacttatggtggactttattgattctaacccaaatattattcaatgagaaaaactagaa

SEQ ID NO: 41570 - DNA, 631 bp, Glycine max
  unsure (1)..(631): unsure at all n locations
tgtcaaaatatttttttccagtaaacttcacactcaagtttacaaataagctctcatttgattagaacttatagaataaatgcttagttaatttgtttaccaaaacacgccataagtctgaattacaaaacctggaaaagaagctataaagaaattaaaaggtcagtcacctgtaatttagtaaaaagtcatataaagcatgtacattgttgttgccactaaaaaccagcaaagattctgggctattatcaacatcagataatgaccttaatcgccgagtctgttatttcaaataacaagcaccgattaatataaatgatgcacagggaaaaaaaagcattcgaattaattgatagacaaactcacagaacaccataatatacacaaaagagacagccaattattaacatgaagtgcaagacaataaccaattcaaataacttttgcacgcatcttattaatgaaaacttatccatcaactagttgagtttaagttagatatacatgtaaaacttaattcttttagtaatgtaagaagacatagntagagaatagagtaataacattttacacacaattctgaattaacaccaaatagttcaattaatgctaactangagccaacagtaac

SEQ ID NO: 41571 - DNA, 538 bp, Glycine max
gcttaataaatcaatctatggcttgaaacaagcctcctgccaatggtatttgaagtttcatgatgtcgtcacttcatttggctttgaaaagaacatcatggatcaatgtatataccaaaaggtcagtgggagtaagatttttttcttgtgttatacgtggatgacattttgcttgcaactaatgataagggtttgctatatgaagtgaaataatttctctcaaagaactttgatatgaaggatatgggaaatgcattttatgtcattggcattaagatccatagggaaagatctcgaggaattttgggtttgtctcaagagacttatattaacaaatttttagagagatttaacatgaaagattgttcaccaagtgtagctcccattgtgaagggtgacaaactcactttgagtcagtgcccgaaaaatgattttgagcgggaacacatgaaaaatacttcatattcttcagcttgtggaaccttatttatgctcatatttgccccaacctgacaatgcatatgttgggggagtttgg

SEQ ID NO: 41572 - DNA, 588 bp, Glycine max
  unsure (1)..(588): unsure at all n locations
tgaattctagatgtgtgcttaaatgcatgggcataaagttatcatcctatgtctagcaatggtttccttatgatatcttttctttttattctattagaagttatcctctgtcgagcgtctaacccctaaaattaatgcatgcataccttctttatatctttattagaggttatcctctgtcaagcacctaacccctaaaagaatgtaaagatgaataatgcatatgagataaatagaaaaaacaataggatagaaaacacatgttgcattgataaatagtgaggagtacaaaatacatagttttggctttttaggtctgccagaccctaactaggggtttagcctttcatggccattgagggccttacactggaatgaggtataagaactgatggaagaaaaggggtgaaagaaagaagagaattccttaggaagagttctcaggctttgggtagtagtaagaatgctctgcgactcggagtgtcgtttccccttggcctgactctctatntatagttgctgaagtggacttggaccgtcgtgcgcatgcttagcgtgctcctcttgctcagcacangtgctgaatct

SEQ ID NO: 41573 - DNA, 568 bp, Glycine max
aagctgaactcactatttgctgctacaaaccctatggttcaatggcctcggaataattaagaaggggggttgaattaaatattagtgaacctttactaattaaaaaaaaaaacttatccttcttaatgttactagatttaattaggcttttactacaaagttaagaaagtatataacagaaatataaacttaaccaaaagtaaaaagcgataattaagatgcatagcggaaattaaagagtgtagggaagaagaagacaaacacaagaatttatactggttcggcaacaacccgtgcctacatccaatccccaaacgacctgtgatccttgagatttcttttcaaccttggaaaagcctttacaagcaaagaatccacaaggctgtaccctcccttgttctctttgaacaaccaagtggatgtaccctccacttgaactgatccacaagagatgtacccctctcttggtcttcagttacaacaaccccaagtagaatgttccccttccaatttgttaaaacaaagttctcaggcgggtatgtctttgaaactttgtaaaggggaaaca

SEQ ID NO: 41574 - DNA, 699 bp, Glycine max
  unsure (1)..(699): unsure at all n locations
taggatcagcataaaaaatgggtagggtcgctgcagtgcagaaatatgaaaaatttcgtttggtatatatatattaaaaatgattaatattaatcgatagatttaaaaaaaattaaatatatatcttaaaaattataatttgacatcctaaaatatttcaaatttataattactatatcattattaattattacatccataactatcatcatcatgatggtcaaccgtctttattatcgtgtctatatatatattgaaaaaaagtaaataaaatgaaatgagataatatttattttgttatttgattattttaaaaataaatagaaaatgttgttttatttaaatttaaaaatatgagataaaatagggataattaaataatatcatttactagttatttgtgttatgcctttttccaaataataaattcaaaaatttattctatcttaatantaaaattaaaaccaatatgataattntattaattatccctttatttttttgtttcgttcattattaaatattccaaatattaaatataaaaacttaaagaagataattaaccacaaaaatgacatttgtataaatacatgggacgccaaaaaaataataatacatgatttgctctaaaaagaaaaaataaatacattaatatcaactctaattactaaatctgaatatattattgtattagtaatt

SEQ ID NO: 41575 - DNA, 539 bp, Glycine max
ctaagcttatgaagtttctggtttctaaccttgaaactgtgcattcatctttcattctcttctcctttgccaaaagaattcgccatgacaaccgcctgaatccttgtggtctctcttttcctcttccaaaaaacaaggactaaccacctgaattctttttgtctcccttctcccttgtcaaagaatccaaaatgacacactctaaaaattcttttgattcttccctttccctatacaaaagtgttcaaaggactaaccgcctaagaatacttttgtatccccattcacaaagtatcaaaggtttaaccacctgagatctttgtcttaacacattgtagggtacatcctttgtggtacaagtagagaggacatctacttgggtttgactgagaacaagagagagtacatctcttgccgatcagttctagtggagggtacatccactaaggtttcaaagagaacaaaggagggcacatccccttgggatctttgcttgtaacacgatttttacaacgttgaaagaaaatctcaggactgca

SEQ ID NO: 41576 - DNA, 431 bp, Glycine max
cttttgcccatggtatatgaagtttcatgaaggcctcacttcatttggctttgtaaagaacatatggatcaatgtgtttaccataaacgtcaatgggagcatagacttttatcttgtgtaatacgtggatgacattttgctgcaactatgatagggttgctatatgaggggaaataatttctatcaaacaactttgatatgaaggatatgggaaatgcatttaatgcattggcattaagattcatagggaaagatctcgaggaattttgggtttgtttaagagacttatattaacaaaatttttagagaaattaacatggaagattgtcaccaagtgtaccctccattgtgaagggtgacaaactcactttgagtctattgcccgaaaaatgatttatagcggtgaaacacatagaaaaatacttcttatg

SEQ ID NO: 41577 - DNA, 1288 bp, Glycine max
  unsure (1)..(1288): unsure at all n locations
acgcgagaagttntactacgattacttatttttaccttctgatactactatctgcagattgtatattgtttttncctnnccnccnncaagaatgggattgagatcgctgtcgatgcgacactacaccaaannnnaannnngagtaatttatattctttttanataagatgaaacacgctgaagtgagataggatcttataattatgtttatagaaatcacatagtgagtctacagactcaatattacacgtaatctctattgccgaagggatgtagctaaatatcaatataatgccacgcatacttatatatacaggcagtacttggtatagatacgtctatagtacattaccatctacttacatatcaccaatatacaagcatattattttattgttacagaaaatatcattcttaacaagataaaataagaacaaatatttgaagtagtaaatatcgttcatctcgtagaagaataacacgctacaatatacgtggcacactgctttgtacagatacgtcgcgccgctcgaatactggaagagagatacaattcgacgggagtatatctctataattatatatcaatattacatgggaacagtctgtatacatatagatcaagtgtaatatacatgctcggtcgcgagtatataacagcctcattatctgttataatgtacaaggatagtttaatctctatgtgtgatgcaatcgtgtgatctataaacatgcgttagggagcaacgatattatatagtgtaaacaaataaccctacacaacttgtcgaagtagttaaaataccctcacccagactactctcatgtcatcagagtatctgtacacagagaacacaagatacacatatactactatttggacctaacaaagaatatcctcactcatgtacatcttcttattatataagaataaaagaacacacctcactcttttcaatatagacctaatgtttattatatataaacagaatatagcaacccattcccttaaatcattcttcttctattatgtgagaatggtatataaaacaactatactttcttgtcacggcgcaatttctagagtggcataagcacgaataattcaataatttatagacttcctatcgtaatatgataaacttaaataaataatagtgtattatatttagaagataatgaatatagtgccatacccctagactattcgatcgggtgctcatttattcatttgcaagaacgtctccatatataatgattagttcatatacttttttataacactgcc

SEQ ID NO: 41578 - DNA, 501 bp, Glycine max
tgggctgagcataggtatgtgtactgtgagttatcatgctcacttttttattattgacattactttgatctaaggattctatatatcctgttatcttgattttgaagaagtacactaatcttgttcaagccataagtatcattgtctacaattttattccaaaaaagtatgatatctatggattaataaaaattaaaaaattgatccaggtgttgtgtgtaaaaaattataatataccttattgcttaaataagaaaagtatttacatttattgtggcaacaaaaaatgtaaagcaaaaagtattatctgatatatatatatatatatatatatatatatatatatatatatatatatactatatatatcgcgaaaaaaaaaaataagaagatccgggctactcttgtaattttcaaacatttacactcattttttctctattctcccgacaaaactttataaataaggtcaaaatattgagactcacatttgtatatgac

SEQ ID NO: 41579 - DNA, 699 bp, Glycine max
agcttggtcttatccttattatggaatatgcagcacctatatattgctgagatacatgcgtgtaacggaatgcaaagatctaacaaactcctaacagctttatcagcacgtgctttaatgggtaagaagcatgcatgcatgcatgtgtaactcgtgaatgtgtgagttgactcgggagtgtatgtgtgagttaactcgtgaatgcatgagtagctaactaacataatcctgtaagtatctaggcttaattatagcacgtgcgggtctcgtgggcacaacagaagcatcttcatgagtgttatctacttcttcgtgaacctggatgctaacaaattcttttgtagactgtatttaaatatgaccttaaggtcactattgaaagatttatgttgataaagtgccatatctaattattgactcttaagatactgctgattaatatctcgcaacaatattgtctcgggtttatttctccattattttaaccgtacatactttactttatttaatctgaccaatatattggttgtaggtctctaaatccatcctataaagggcaccccaattgaaaagtgcagatattttttcaattaactggatctttaaaaatttttttaaaaactgccttaattacaaaaattaaaatttaaaaccattccagcgttttctccttgcttggttcaaaaaacaaaccttttt

SEQ ID NO: 41580 - DNA, 508 bp, Glycine max
tatacatattaattattgtacgagtattctgagctaaaagaagaattttgcatctgaagtctttgggtggaagctaagaagcattattgagtgctatactgattctggagagaaggatcctgttttatttctgtaaatggaaatatatggttgtattgtatctatctttaattgctaataagcctaattaactctgaatatttggaggtggtgcaacctatacactgtcaaagtctatctccttgcttaatgttgggaacccagaatcagattctgagttctcagagagactggtgaataaaaataaaatagggaaagggaaggaatactcttgtaatgttttattgaattatagagacttaaagagagaattctccattcaggagtttctattttattatagttaatgctcaattccccactgctaacaagttgaatgtcccctcttctattatctaatatgctaatgccctacctcctatcagctttaactgcccaatcataacta

SEQ ID NO: 41581 - DNA, 554 bp, Glycine max
tgttatgaagatgaaaaacctatctcttactagatgtcagtctatttgtagagttgtatccataaactcaatgtcacaatcacctttgtgaatatgatccctaatgaaatgatgcttaatatttatacgctctgtcctagaatgcatgataggattcttagtgatactaatgacactagtgttattacatcttaaaagaatatgttctaaatgcaattataaagtcagatagttatttgttaatacacaagatttgtgcacaacaacttcacacaacaatgtactcatccttatctgtaaacaaggcaacacatgcttgattcttactattccatgaaaccaggccattacctatcaagtggcaaatactactagtggttttcctatctagtgtaaatctggaaaaggttgaatctgagtattcaagtagaaagatctcagcaccttttatggtaccatctaccaacatctacattgccttttaggattttattatccttctttatataaagaagtaagacttcctacgactggattgttagtgtgcacacatg

SEQ ID NO: 41582 - DNA, 662 bp, Glycine max
  unsure (1)..(662): unsure at all n locations
ctgttaaatcaaaagtaatagccatggaaaacaaccccccaatgaaaacccttaaaatggacttaaccctgngtgctttccctaaaaaggcccccaaaacagcatcatactcaaactatatatgcatgattatctatatcttaatatgcacaaaggcattagtgtatcataaccccaaaagcttcaggactgaaaatgatgagaaatacattaccttaagcatgttgctcagaaaattaaagcaatagaccagtcaaatacaataaaaaaatatataccttaactttgagtagcttgcagcaagtccatttgtgttacatgatgatttacctacttaccaatgaaatatttaaattgtaggcactatttatcatgatcacgacattggttcctggacactatactgatcatcatcacaggtacaaaagtttgcaatcaattttgatgcttaattttgttatgattggttttatantgttgtgtatgtcattaatgtactttgctntagatacaacattttgttcataaaatgagtgaaccttagaatctccatttgagactaaattcaatgatttttgcggacagtttacattaatcattgtattcaatcctgaaatgtccatttggacaatgtatttctaagttgtctctgagtgcatact

SEQ ID NO: 41583 - DNA, 535 bp, Glycine max
agctttgtgtaatcgattacacttatttggtaatcgattatcagtgattgtttctgataaatcaaaagatgtaactcttcaaaaaggttttgactttttcaaatgagtcttaagtttttctaaaagtataactcttctgaatggtcttcttgaccagacatggagagtctataaaagcaaggctttgttttgcatttcaacaatcttgaatactttacttttccaatcaatcctttacaagccttgactctcttttaacttcttcttcttctttgtaccaaaagctttctgaacttttctggttttccaaaccttgaaaacttgtgctattcatcttatcattcacttctccctttgccaaaaagaatttgccaaggactaacaccctgaattctttgggtctctcttctcccttttccaaaagaacaaaggactaaccgcctaaaatcttttgtgtctcccttctcccttgtcaaagaattcaaaacgacccactcctgagattcttttggattccttcctttcccttatacca

SEQ ID NO: 41584 - DNA, 514 bp, Glycine max
accttttggtcctcctcatagttgttgcatgagaaaacatgctctattttcatcttccactccaagtaggcctccggatcattctttcctttaaagggaggaatgttgagtttaataccatcaattcggttttgtctaggaacaccatcattccctcttctcctcctttcttcttcattatgatctctattctccatttgatccaacctctcatggagtgcatcatctcgttgtttcattaacctctccatatgttgcatcaaagcttgcatttggaattgcgaaagcccccctccatcattacgatttgttactgccatctcaaaaaaacaaatcatacgtaacaagacaattatagttgctgtttgaatacctcacccactcaagtgtttcacacaattatggcttttctctaatgaaacactcttgccgtttaccactctaattcccctttgagtcttatgcaattcaagagatgatggccacaacaaagaacaattcaccaatatgtgta

SEQ ID NO: 41585 - DNA, 499 bp, Glycine max
tgttcagaaacgtgcatttgtgtgcaatacacaattcccggttctctacatcaaaatggtgtatcagaaaggtgtaatagaactttaacagatatggttaagagtatgttcatcaattagactttacccgtatctttgtggatgtatgccttgaaaactgccatgtatttgttaaacagggttcctagcaaggtagttccaaagagaccttttgaactgtggacaaataggatacctagtataaggcacctgcatgtttagggttgccaggcagaaataatgatttataatccgcacgaaagaaaattggatgcaagaacaatcagtgaatatttcattggttatccagaaaagttaaaagggtatatgttttattgttctaatcatagtatgagaattgtcacaactggaaatgcaaggttcattagaaatgatgaaatcagtgggagtacagttccacgagaaatggaattaaagaagttagagtgtaagtcctttt

SEQ ID NO: 41586 - DNA, 636 bp, Glycine max
cactgattgttggggtgagttatgtctttgaacataaattctaagatggcattaaagtccaccatagattgttattaggccacccatgtttggctgtggtctaaatgtatattcttaggcgtgaagaaatgtagttattgggtcatgggtgtgaggggggagttgatatcctacatcaactagagaatgagcaatgtaatacttttaaagcttgggcagtcctcaccatacaagctgtttttttttaaaaaaaaaaaaaaagcttaccaagctggattttaaaagtccattttgtaaaattgagttttatttttaagcccaaattttaaaatggggtttgagctcatcccaaattcatttttggttaattgcagtcctcaaggggggtgtcttagttcaaaattatctccagatatggtttaaatagagaatattttatctaaaccttcttacctttcaagttgattttttggggttgaattagtgaaacctgttgtgcaatagcatatttttgtattaagacatattagaatatcactttccccccctttagtactcttcttgagtgaacaattgaaaattgttatcttcgagttttgtggggagaagcctaactgtggatttatattggttggg

SEQ ID NO: 41587 - DNA, 559 bp, Glycine max
agccattattttagtcgtcttgctttaccacatggacatgaccattttcttgtattaatttcttggtattatagaaaaatagaagaaaggatcaattggtcaagaaatatgttgagaatcccacattatatggttaatgaagatgataagtgcttataatagttgcataaatcactacttatgaactaatttttaagaagatcgatcgggtgatggatagtaccactagtcctcacttgttgtgatatataaaaaaaatgtacatttcattgtctattcatcatttttttttcttttcctttctctccttccactattttttttttttttacttttttatcctaaatcaaatatacctaacgcacgaaattttctcatgagggaagtaacatattgaaaaggaaaatgttttaagaggtgttacaataaaaggttgtccttctattctaagatgcttgcttataaaaaaaataaaaataggtagatgataaaaaataatctatcagtaatcataataataatgataatgatcatcataatagtaataataataatcgtc

SEQ ID NO: 41588 - DNA, 489 bp, Glycine max
agctttaaacttgcaacaaaggagttgagcaagtatatttagattcgtcttcaaactcttagaggtgactttgagcgtttgtttatggaagagttcgagtcaatttctgattatttttctcgaatattggccgtaatcaatcaacttaaaagaaatggtgaagatgttgatgaggtgaggtcatggaaaaaatacttcgaactttaaatccaagttttgacttcattgttaccaacattgaagaaaacaaggatttaaagaccatgactattgagcaactcatgggttccttacaagcatatgaagaaaaacaaaagagaaaaattaaacaaaaggaggctacggagcaactactacaactcaacgtaaaggaagcaaactatgcaaattacaatagcccaaaatgacgatgtcgcggccaatatcgtggacgtggacgaagacatggatgagaaagaagaggtggttacaacaaccactccaacaaat

SEQ ID NO: 41589 - DNA, 658 bp, Glycine max
  unsure (1)..(658): unsure at all n locations
tgttcttcactcatcttctccttgaagtggcatctccaatcacctttcctccttctctattctactatcattgatcttcaagaagaaaaggactccattgatgaagaagtttcaaggcgtacaagctccacatggggctacatcagacagcgtcgactgcgtcacgtcaccagaaaccaccaagtcctcggcagcatccaggtggaacctcccattcgtcggcgagaacgagtgtgctagcatccccaagctcccgtcgaacggctccccctggctgtggtcaccactgaagaacccgatcctaatgtcggtgcttgtttataaataagtgcaacaagattttctttcattgtgtctctcttgtgtgccttttccatctgcaacaaagcttgttctatatccatttggtttgattaggttttctctttttctgaaacttggttttcttcttcattggtttattctttttcattttcgcatatggatcatgtgatgagaaaaaatttgcaacaatatgattggattcgttccatgattcatagtatttaagtctctgatgattaactctccttttntagaattaattttgagtccttttgggtttctaaatatcatttttttcctagtgttgatagagtgacaaccagagagacatgat

SEQ ID NO: 41590 - DNA, 529 bp, Glycine max
  unsure (1)..(529): unsure at all n locations
agcttgtangattatggggtactcgtcatatgtggtactaggtggcgattgggtgatggtgcaagtcaactctccacatccacaaatcacacataaatccaccatccctagttgcccaccttcaactgagctcacgtactcccatgtagcccttatcctcgttcctctcaacaccgggtccccatcaatccctccaagcttccaaaacatccaagaaattcaacatccaaacatcatgaactatcaaaaaccaagaaaacagggcagaggcagaaaactctgcccaaaacacaaaccaataccataactttccttactcaaataccccagtaacattctcttcgttccaattcgtttaccgttggatcgactcgaaaattttactggaggtccctagtacataagtgtacattttgaccgttgggatctgctaaaaaatatccgtaaccgaatatatacaaccctttccacaaccagccatgcctaagcatttctgcacaagcacaaaatctgctgcatatttaacaac

SEQ ID NO: 41591 - DNA, 557 bp, Glycine max
  unsure (1)..(557): unsure at all n locations
tcaacctgatctctaagcaatagcttgtccttggctaagcgtgacctaatgtcgccaagcgcaattccttactgccataagtggggttcataaagctaagcaccagtcatggcagctaagctgaattccttgcggcaatatgagcgctaagggagaccttattagctaagcgcatgctcctctgtacttaagatgcatcattttagctaagccagccatagcctggcttagcgagagttgcagcttttcggatctgcaaacctcactaagcggttttatcctcgcgctaagccaagcctgtgttcaaaaaaaaaacttgaatttcaaagttggctaagcgcacggtacctctaagcgaccatcttcaaaaaaccaaacgtcactttgagaaagcaaaacatcttatgtgagtgtaatggcaattacactcacatttngtggaaactgctgatcggcttgcatcttctctctcgcactcatctgccaagcattgcgctttcttctgtatcaaagcatcatcgatacgagtgaggttcttactcccttcattcttttaa

SEQ ID NO: 41592 - DNA, 557 bp, Glycine max
accttaagtcacctgcagcatgcaagcttgaagattatgggacccatacatgtgtacttgttgcgtgcgggcgatggtgcacaacaagtgttccacatccacaaagcgcgcataaacccaccatcccctgttgcccacctccatctgagctcacgtactcccacgtagcccatatcctcgtttctctcaacaccgggtccccatcaatcctcccaagcttccacaacatccaagcaaaacaacattcaaacagcacaaactaccacagccaagagaacagagcaaaggcagaaaactctgccaaaacaccaaccaaaatcacagcttttctcacttaaagaccccagtaacaattccttggttccaattcggtaaccgttggatcgactcgaaaattttactggaaatctctagtacttaagcctacattgtgaccgtggggatctactagcgaacatccacaactcattctgtactgctctttccacagccaaccacacaagcatttttctgacaaagccaaaacctgctgccctatttgcagcaaagtctggtaa

SEQ ID NO: 41593 - DNA, 594 bp, Glycine max
  unsure (1)..(594): unsure at all n locations
ngagcacctcttccttcattgatggggttaagcttcttttgggctgtctgactggtttgtaatcttccgccatcattattgtgtgcatatagtaaacaaggttgattcttttgagatctgatatgtgccaccttattgctcactgtcaatgtacatccccttcttggtgaagatgtccttcatgaatatggcgtagagtggcatctactgcaaggcttccccaaatggcatggttatctttagccccttgaactaaaagatatgggggctcctttaaaggggctgatggctcttctttcctagccactcgagctagctggcttttggtcttagaggttaagaccttatttctcttcttccttcttatctttttcctttttctctccttctttgtctacctttccttcctcagactggtctccttcaactttctcttcttctccttatgctctcctctggctgtaagtcaacaccgncatgcattcctcctttgggttcttcttcgtgttggcgccaaagctactaatgggtctttcagccatttgtttggctaatagttccacttgtatctctaggttcttgatggataactct

SEQ ID NO: 41594 - DNA, 474 bp, Glycine max
gcctgctgtttaggcataactgagaaaggtaaatagctttttttacaacaactctaaaggtaatttggcaattgattgttccaacttctaacaaaaccaaattttttccagaatgccagtaaattggtggcaatggaatacaaataattattctctcgtttacatattgggtgaacaaatggaaagttatgagcactaccaaaagggcaaaaaaacttcccatctcatactccaaattggagaaagagacaaccgcgctttggatgaaacggaatataaagcattctatgatggaacttactaatattccattccattcatttctatcactcccaacataacataatatatgtctggtatatcagacttataaagcatgcgatagaattggaacacaaaatacatagtttaaaaaatgtcaacgccgttttaaatttcctcgcccttgggcttggtgatttcccatgaccccaa

SEQ ID NO: 41595 - DNA, 668 bp, Glycine max
ttaagtgaaaggttcgggagttgtatttacacacggtgaaggtattatcaccccacgcggccgtcataagaaacggcaacctttaatcaaatgtgcaaatatgacttcaatttatattcttttccctttttacgttcttatgtttttttatgcctttttatgtttttatctttttgtggtcgacaagggcgtttccctttgctcctacgtattcctcgattttgatgagaaaatcagacctacgtagttcttttgtgaacaaaacgttttggtgaaattattctttatccttttttgcaagatatgtttttattgaatgaaaggtcatttaaggcgttggaccgttagacaatctttcgattcttttgaaaagtgagaaaacattaaggcattggaccattaatgatttctttatttttttgaaagaggtagcaaagctacatattgattttaggctttttagaaatctacactcttccaataaaagaggaagagaccatttctaggcgttggacctttgaaaatggctttttatgcgatgacaaaagtttggttatgaatgaatttaacctaatttcctttgggttatagtcgattctttttagaaaaaggaatcccacgaaaaacgcccgctgattttttgattttttactagaaacaatttgata

SEQ ID NO: 41596 - DNA, 300 bp, Glycine max
tgtgaccccttttatctggataatcttatataatgcggttaccctctaaggtgacgcctccgaaccttgtcgtttcccgttatgactccgcacggtatattgattattacttacatattatatcggcgggggtggcattcaatcactgtctatatatacattgatgagccggttctgtattattcgtgtgtctgatacttactatatacaattctttatatacaatcatgactcttatatgtggcaccctgttttcatctgcagctctcgacacgaatcttcttatatgtcacttgttcg

SEQ ID NO: 41597 - DNA, 477 bp, Glycine max
tggacttggtattacctctgtagccatttggagccacagcctccatgtcttttaactaaagccaatgagtgtttgtgaactctcagcaaaatcttggccaagtttattgacagcaattcagcactgcaacccattccactcaggttgacactctttacgttgctccggaatccgaacttgttaatgatcattgatgtaatggatggtgtaggacaaaataggctacagtttgacacaaggatatcaatgcttttaggatgcactttgtgttttgaaaggaggtctttgacaattctgaatagaaccgattcaacttctgcctgtgcacgcttcatggaatcatccggagggagctcatgaactgattctggcacacaagcctccacgccaataccggatctttccaatactttcaattcaaagcctatgagttcatggtcaaaattgcacaattcaaagtgttctacaatatgagag

SEQ ID NO: 41598 - DNA, 611 bp, Glycine max
  unsure (1)..(611): unsure at all n locations
tgcaacttgaaattggaaaaccgtagtgcatgaggaaattctaatgggtcataaactttttcacttccggatgtacgaantcacgccccatatatttaatcggaaacgcttggaaatatgaacaatgggaaagcttcttggttccaagttaaagaccgccataaactttatacatggatttaccaatgaagcccatgatatatcgacacgctccaaattgaaaagtggaagttctcgagaaattcaaatgatcataacttttcactcggatgttcaatttaggcacataatttatcgagacgctctaaattgaacatggaagctctggtccaattcagacagccataacttttgacatgggtgtaccattaaagcacatgatatatacagaccgtcgaaattggaaaattgtattcttgagaaattaaatgggctaacatttcactcggatgtccaatcacgcacgtaatatattcagacgcttgaaattgacacggagctttggtccattaagtcggcataacttttacatggatgtaggaatgagcctatatatttgagaggctcaaaattcaaaatgtggttttcgaaaatcaaatggcacacaattt

SEQ ID NO: 41599 - DNA, 384 bp, Glycine max
tgactctttccatttaccatatacctggtcgagggcccattgatttcccaccttgttttacaaaatgtgatggtgcattcaaactcttgttttacggaatgcgatgaaagtaagaatgattagttgctcgttttcttcaaccatcgcaaggatattttctcctacaagttgtgaataccatcttattgtgatcttgtgaaatatttggcatgacacatgtgcgatacttttttatcattgtaaattcccaaatttttagattctttctttcggacgctctcagttttcattggcatcctccaactgggcaacataatacccatgtatcctttgcacacctcttggctttgaaagggacctggttcttaatgggtcacatttttt

SEQ ID NO: 41600 - DNA, 618 bp, Glycine max
  unsure (1)..(618): unsure at all n locations
ttttcccaanagcttgatgtaaaaatgtacttattgagttcttatttatcaaacttacggtagggtaaggccacttggaatgtgattgccaccaagctttatgaacagaagttgtgtcaccaggaagtttcccagctcttctcttgcgcaagatttcctctcttatatctacaattttctccttataaccctgtatgataaaaattaaaaaagtaaaaagaggtcaatcatatgggaaaagatttgagaaggggaaatgaacaaccatcaacaattcaacatcccttacctgtttcagttcatgctttaattcttgtcttactcgctccatgagggacctctcgctctctgtaggaacaagagggccaaaccccatgccatctgccccatcgaaactactatcaaagagattggcgtcactatctacttggtcatcttcatcatcagacattgttgcccctgtaccttctccaggtgaaactcctgtntatcatgctgcatgtgagaacatttatatggttacttgctgtggctaattgaaccaagagtttgaagattttcttcaacactagaactatcatcatttatctgttgcanagtgcaatcttgtgggttagt

SEQ ID NO: 41601 - DNA, 442 bp, Glycine max
agctttaattacgggtctctggcagttctaccgagttcctgtccccttccacaaaggcatcttgccccctactaatctaacctttatcaataaatactgcttccccaggcatgcgcacggcgaaacacaccaaccgcctggggattgccagcagcgggcaacatacgcaccggcatcacctttaaagttcaactcagctcattcacaaaaaggttacaacggtgcttaccacccatgtccgacacataagctaccaagtccaaagccaaaagtgatcaaaatacttagtccgtgaccgaaaagccatcatgcgtccagaacaagaactttaaaaaacgcttctatgaggcaacctaatgacgtttaaatctctgcttgtttgaacaacctttggttctcaagtaattattagacacacctcgttgctcatgaacctaggaat

SEQ ID NO: 41602 - DNA, 301 bp, Glycine max
taaaaaaaacaagaaatgaattgaaagtctcggattcgaaaacttacccgttgaagaatgaagaacggatgaagaacggtgaagaacggacgaaaaccttcacggatttgcttacggaaacatctcggaagcgttaccgaagcacctcggcttggattttcttcacggaaataatttttttcacccaaaacagctgaaatacatagccagggggctctcagatccttagaacaacccctttcagcctatttataagaaaaaaggggaggaggttgccgcccagctcgcccaggcaagctgg

SEQ ID NO: 41603 - DNA, 641 bp, Glycine max
  unsure (1)..(641): unsure at all n locations
aaataacttgggtattctttttacatctcttgcaacgcctccactgagttatcattaaaagtgttcaggaattaatccaaactattaaattgatccaataaaattgataatcgagcaaattgttataaaaaatactaaacactcaatgcagttcggtttgtgattctcatgttcaaaattgaactgagtcaaattggaaacgtaactaaatttatattagtcttattttgtcttctttttttactgcaattcctatatatttatcttgaaataaattttaaccttatttgaacttatattattatttctgaataacttgaagataatttgcaatttagtttgtgatttagatcaagttgtggttttatgaccagatttaatagtttgaaatgatattttgttatatgcattatgtatttaattattttatggtttgatgcgatgatgatactgttctggactatctatcaacttttctgatgattaatctatgtcggaaaaattgatatattaattttataaaaatttttntaattatgcgttttaatcataacattcaaatttaaactttacttaagaaatagagtccatttcccttaaaccatgaatgggtgataaaggttacttacctacaaaattat

SEQ ID NO: 41604 - DNA, 728 bp, Glycine max
tcagaagcaagcttccatcataatatgccaccttgtgctgtgaagacacacaaccaaatcattgttgcttgcatggcaatacataacttccttcaaagaaatgacgagagtgacagagaatttgattcacttgatgaagataacgaatatatagatactgatgaggatgaaaataaagttgggcctagtactacaacatgaaagaaccggatgctcaaagtactctacaattggaacgctttagagaatctctaaagaatatgtttccaacacgtatttaatttctatatttgttaataatacaagtttgcatgtttatggtatggatacatttgaataattttatattggaagacattattgatcatattattactaggttaatgatattttatattatgctataaattataattacatagacaataattaaattataaactaaaatgtatgtgataacattactaaaacaataggataattacatgtttaatatgaaaatttattatgtagaaagacatataattatattgttatgagatacatttattttatttttgtagcagaattaattcttaatcaaaatttcttaaaatatatacaatattttaacttaatgatgaagtacatattttataatgaaatagaagagaaagacattttattattttaataatatgtattattaacgaacttataatatttaaaatggtgaggattagtataat

SEQ ID NO: 41605 - DNA, 435 bp, Glycine max
agcttctcgatatattatgcgcctgaatcggacttttttttgataagttatgaccatttgagtttctggagagcatccgttgttcaatttcaagcttcttgatatattatgggccagaatcagacttctgtttgaaaagttatgaccatttgaatttttcgagagcattcgttgttcaatttccagcgtctcaatgtattatgcgcctgaatcggagttccgtgtgaaaatttatgacccttggaatttctcgagaggttccgatgttcaatttcgaggctctagatatattatgcgcctgaatcgtactttcatgtgagaagttatgaccatttgaatttctcaagagcatttggttgttaatttccaacgtcttgatatattataccgcttgaatccgacctacgtgtgatatgttttgaccatttgagtttc

SEQ ID NO: 41606 - DNA, 502 bp, Glycine max
tgaaattgaacaacggaagctctccagaaactcaaatggtgataacttatcacacggaggtccgattgaggcacataatacatcgagacgctcgaaattgaacaacgaatgctctcgggaaattcaaatggtcataacttttcaaacggaagtccgacttaggcgcataatatatcgagaaggttggatttgaaccacgaatgctctcgagaaattcaaatggtcataacatttcacacagaagtccgatttaggcgcataatatatcgagaaggttgaaattgaaccacgaatgctctcgagaaattcaaattgtcataacttgtcacacggaagtccgattcaggcgcatactatatctagacgatcgaaattgaacagcgaatgctctcgagaaattcatatggtcataacttgtcacacgaaagtctgatttaggcgcataatacatcgagacgctcgaaattgaacaacgagtgctctcgagaaattcaaatggtca

SEQ ID NO: 41607 - DNA, 501 bp, Glycine max
agcttgtccacaaaaaagtcactaaaaagggtttgaaagtttatcgtctcagttttccttatcaagtaaatggatcatttttaaggtccaacgcctttaaatgatcacccttcaagtaaaaagaattgcttaattcactcttaaagaagaactacgtaggtctgatttcctcttcgatggagggtacgtaagagcaaaagccccgcttttgtcgacctcaaaaaaaataaaaagaaataaaaattaaggtaacacaatttccacaattctaaaaataggctattgtcctttgagacaaacgtgagaggtgctaataccttcctcaaacgtaaatacaactcccgaacttagaattttcattttgaccggtttccttcggttttttcgacggtttccacaaataaacgttggtggcgactccgcgcatctttcctcctttggaaagcgcacccatgagctttccctctctcgcccgcaaaagggcatgttgcgacagttggc

SEQ ID NO: 41608 - DNA, 560 bp, Glycine max
  unsure (1)..(560): unsure at all n locations
tcctcggggccatttcctgcgaaggcaaacatttggagagttagttttaccaagaaattctattcttaaaacgaaaatggcatacgacctcccccaataacacaaacatcaatgtaaatttagagcgaactcatgcacatacttcctttcgaacattcactcgcaccagatattcttctaactaagaaaaatgcacccaggcacaatcaaggcaccttcgttacctagatcacttatatgtacttccaaggtgtatttgctacctacatcacatgcacttcctttgctaaatttacatacatgcatactcaaaacattttggctaccaaaaattgcatacgtgcacattctggtatttctaatacctatacatatacaaactttgtgatgaatcttggatacctacacaataaggtgctacatttcatgctttattcaagtgtttttgctacctaaagccgcatgcaaattcaagtatattttcttttgctgactaanattgcattcaaattaaaaggtatctttgtaaggtattttcttacataacatgcaacatatat

SEQ ID NO: 41609 - DNA, 483 bp, Glycine max
agcttacctgcttaacgagctctttataggcatcactttccacaatcactatgagccatttttaaagctagattctttcctaggctctcttagtgactactcttgaggctgaagctctagatttctccatatcaatctttgtaccccaatattcacaaaaagaatctaaaatatcttgtgcaacaccaacttgagtgcttgtagccttcgcaaataacaacacatcatctacgaagaaaagatgcatgtgatatgctacggcccaaacgtgaaacttgaatatgagtccatctctatttctcaacctctttaaccatcatagaatccagcctttccatactaggtatgaataaataaggcgatagaggggggccttgccaaagccctctttttcacatataactatctaacctgtccccattttacaacactaaaaatgttgttgaatgaatccgaagcctgataaacaaactatcacttttt

SEQ ID NO: 41610 - DNA, 650 bp, Glycine max
tattttgatgatgccaaaggctcaagtcaagaatcaagattcaagcttgtttcaagaatccaagagtcattcaagtcaagaatcaagattcaagtgaagactcaaaagaagactccagatatgcaagaacttcaagaaaagcatcaagataagtataaaaagattttttcaaaagaaaagattgaatagcacaatttgtccaaaagaatttttcaaagaaaaatcttttaccagagtttttactctctggtaatcgattaccataaggtagtaattgattaccagaagcccaaaataattttataactgttttataaagtagtaatcgattaccatgagaaaaatgggtattttagaaatcaagatattatatttactaagttttgttttaaaattaagcacgagttcaaaaagaaaaggggagaaagagatgagtgaatgatagaacaaatcttgcatgtattctcttgatttctggtttgtcatcatcaaaaagggggagattgtggaagcaaagcttccaagcttattttgatgatgccaaagactcaagtcaagaatcaagattcaagcaagtctcaagaatcatagagtcattcaagtcaagaatcaagattcaagtgatgactcaaaagaagactcaagatatg

SEQ ID NO: 41611 - DNA, 462 bp, Glycine max
agcttatgctgctaacatctacaatagaccttctctatctcagcagcaaaatcaaccacaatagaataattatgacctctccagcaacaagtacaatctcggatggaggaatcatcccaaccttagatggtcgaatagcagcaacaacaacaacaaccttattttcaaaatgctgctggcccaagcagaccatacgttcctccaccaatccagcagcagcaacaacaatagccccagaaacagcaaatagttgaggcccctccgcaaccttcccttgaagaacttgtgaagcaaatgactatgcaaaacatgcagtttcaacaagagaccaaagcctctattcagagctaaactaatcagataggacaattggctacatagttaaatcaacaacagtcctaaaattctgatagactaccttctcaatctgtccagaatcccaaaaatatgagtgccattaca

SEQ ID NO: 41612 - DNA, 582 bp, Glycine max
tgcacacaatttcttgaatctttcccaatactcatacaatctctcttctctcagttgcctgatgcctaaaatgtcttttctgatggtagtggtcctagatgcagggaaaaatttctccaagaacaccctcctaaggtcatcccagctgaaaatggacttgggagcaaggtagtagagtcaatattttgccactccctccagataatgaggaaaagcctttagaaagatatgatcttcttggacatcagggggcttcatggtggaacaaaaaatatggaactccttaagatgcttatgaggatcttcacctgcaagaccatgaaacttgggcagcaaatgtattagtccagtcttgagaacatatgaaacaccctcatcaggatatttaatgcacaagctttcataagtgaaattaggtgcagccatctccctaaaagtcctctcatgacgaggaggttgagccatgttctcggtatgaatattagtattggaatgctcaaaattagaatattcacaatcactctcaacagaatgcttatatgcacagaatgaccaggatgcatattatgctctacttatcta

SEQ ID NO: 41613 - DNA, 525 bp, Glycine max
acctgcagctgcagcttgggctatgattatatgctccatcttgaggtggattgttgaatgtcgaatattcctttgtatttaaactttgtttggtagcttaatctgggagccatattcggaacgcagtagtgagatgtcactgtcatctctcctctctctcttttttgtatcctatatatatgtaacattttgaatctaataaagctgtgagagaaagtgaggttttgattcctcctcaccttcatttcaaggatttcattgaaaaacttgaccctaaccggactcgttgactcggacctggaatcaagctgcatacttttaaccagtccactttgagtctgttcgattctgctcaaaaagtgagtttactctcgagtggactcttgacagggaactattctcgcaaactcagctgagtgtacgagttgactttcaaggttgataattatggtaggaatatacactgggctacgaacaaatctatacttttagctataagatgaaagctcttaaaagacacttttt

SEQ ID NO: 41614 - DNA, 652 bp, Glycine max
  unsure (1)..(652): unsure at all n locations
taaaattcattatggatgcatatgctaagagcattctaatggcttctaatatatcaactggagcatatgtttcctcataatctataccttcttcttgattatatccttttgcaactaatctatccttatttctaatgattattccatgttcatctaacttatttctaaatacccattttgttcctatgatgggataatttttaggtttctctacaagttcccacacattgtttctttcaaattgattcagttcttcttgcatggcaataatccagttatcatctactatggcttcttttatatttttaggtgcaatcatagatacaaaagccatattattgcataaatctttaagagaatgtctagttgttaccccttttgagatatcaccaataatgttgtcaaggggatgatctttngaagctttccattcttatggaagttcatcattggatttgacttcttctggaggatcttcattgcttcctttaccttttcctttagaatcttgaccatgaatatacaatctgttctaaagattctgcaatatcatctatcatattctttctttgaaaagatagcattaaattcatcaaacgttacatgaatggattcctacatattcatagatcctttattatatatcctatat

SEQ ID NO: 41615 - DNA, 478 bp, Glycine max
tgcaagcttgtgagagatagtggggtgaaacatatcatcttttatggagggcagatagggccaacctctccgactatgtttacttctttccctttgcttgatttgatacgcgagcgggctctgaacttactctctggaccactcattaaaatggacgccgggcgattttttattcaaggcacaatgatgctgatcaccaatgctattccacgcaaaaaataaagtgaactcaaacaaaatcaaatctatgtaaacgtacagacccttccaggctcgtatgcttaactagattcagcctgagtctatggaactcatgatcggattcttacgcgagcatctcctatatattgcatgaacctttatttatgttgactttccacacgagcacgggaggcatctaataatgctgatgtatcccattaacagattgatggctaaaatttaaaaatgtagttacaaattctgccttttgaacatg

SEQ ID NO: 41616 - DNA, 846 bp, Glycine max
  unsure (1)..(846): unsure at all n locations
tgcgactgcattagacacgtgtagcgaccttaaatctagctgacccctgctgtcagcgttagcaaattgcggctgtgtttttntaaccacactatcgcacaccgttgtgcttaaaccatgggggcctatatggttcccatatgcgggttggaatagtggcagtcccacaaatgttgctaacttgtcttgcgcaagaagatgtactgctactcatatagaaggaacatatgaatcgcccttgattaatcgtttgtttcagacaccttcaccttatatgcggagtctttcctatacatcacgtgttaacaacatatatcatcatctagcagcgcctcagcggggataaatattttgcctatctttcacacttcaaggcctattaaaacataccttgcgtctttttatgcttaggggaagacttattataccatgatatatgattgcctgcggtctttcaaataaaactgctaaaacagtgttgcccaaatgagacaataatggcaagctaataactatgtgcattgctatccatcacccgggaaaaaatattttatttacattctctcgtgacctccttaccggttcacctgctggttgggtgtaatttggtgagcctgccaagagtataacctcatctcttatacttctacatcgtgagtgataattgggttcaattattgcacaatgattattttaatatacgtgtccttttgttgtacataccatagcttaccctttttttttatgttctataacccattcttttatcattgcgcttcctctttccaagtatattttaagtaacagtgtaacctcatcttttcccattttattcttctgtatacg

SEQ ID NO: 41617 - DNA, 484 bp, Glycine max
gtgtggaaactacacccaagcctattttatcatgctgttctgcataattaagatacccaaggaagtgatccatgcctttaatcatgtcgggaattctgtcgtctccaaatgcactcatcctcaaaaaggagtgttgactctctacccgtcgtattgatcctaaaataaaaacataagaggtgagtatttctgcttcgttaggtgagtatttgtgcttcgttagtcaaaacacaaaaaaccctaacaccagtcaagatatacaaggctaacaaccattgtgtaaatggtatctactgggtcacacatgcatcctatggcattacaatctcactatctcaacatacataacacactggccaactcaagggtcttacaatttttacttttgatgaattgcaaaaatacaccctatgaattgatggacattttttggggttggaatgcatcactaagaatccttccaggaggttattccttccatttt

SEQ ID NO: 41618 - DNA, 374 bp, Glycine max
ttttccaatgcttggaagcattcacaattcttatttgaaaagaactccatatctatgaattatgggtctacaacggcacgagatgaaaagaagtctgtgtaacatatatgttgttcctctgatgaaaaccatgatccacactgaattgggggaggaattggtggttcctgtgaccccgaatgtcgttgactccgactcgaggatcctttccgcttcttcgatggttccgccattcgaagagtttttccacatgtcaatcgattcctatgaaaataagtgaaaaaagatgaggcttgggctctgctgcgagtgatgtgaacacaattgagtgagatatggctggaaaaaaacaattgtggacgagggttctctat

SEQ ID NO: 41619 - DNA, 494 bp, Glycine max
gctttttcttgattcttgaatagcctttgcgtgatttttgaatcttgagtcttgaacgttgatctcttgaatcttgaatcttgattcttgaattcaactttcctcttgaatcttgaagtgttcatgattctattttgaacatcttgaactcattctttgaatgacctttgagctttttgtcatcacctttgtcatcatctttgttatcatcaaaacatctttgaatcactcttgattcatcatgaagctttgcttctacaaattggtaaaacccaaactcacacagtcaaagcatacttctccatcaaaatcagggcattggatatgagtagccctggtttaaatatttaatagccctacctagataaaacactttgattgtaaacttcttttgactcagaagagtatcactaattcctatggatagcgagtgttggcaactttttggtaccgtcttcaatttctatgggataaaaataaaatgcctatgcttg

SEQ ID NO: 41620 - DNA, 573 bp, Glycine max
  unsure (1)..(573): unsure at all n locations
ctaagcttcataaatcactagtaaaatttaaagatgatatgaagttcaacttattttctcaatccccaccttcccccttttttgttttgctcatgttcttatttacgtttaatgtttttgtagactgtgtgatgcaatcctccctaggaagggaccagtcactagaaccatgagcaagaggctccaagaagattgggctagagctgctaaagaaggccctagggttctcatgaaccttatggtagatttcagaggccatgggccaaggttgggtccaattatctttgtacatattagattaggatgtcattatatttggtccttgtatttanggctccatattgtaggtagggtaccctataaatataggatttttcagcccttgtattttatggcacctagactagtttttgtattagtggtagttttgtaatttcacatgcactaagtgaatatttgatgtgtgtgggtggaataaatttaattgaattgcagaagcccaactcattaaatttagaggtgagggtgagcatgtgcttactacaccccattgtctcatcatatagtcacact

SEQ ID NO: 41621 - DNA, 351 bp, Glycine max
agcttcatgagagagtcaaagatcaaattgagaggaaaaataaaagctatgctaaacaagccaacaaagggagaaagaaggttgtcttctaacccggagattgggtttgggtgcacatgaaaaaagaaaggtttccggaacaaaggaaatcaaagcttttaccaaggggagatggaccatttcaagtgcttgaaagaatcaatgacaatgcttacaaagttgagctgcccggtgagtataatgttagttccaccttcaatgtctctgatttatctctttttgatgcagatggagaatccgatttgaggacaaatccttctcaagagggagagaatgatgaagacatgttca

SEQ ID NO: 41622 - DNA, 594 bp, Glycine max
  unsure (1)..(594): unsure at all n locations
tctccctgttagtgactgttagaatataagttcgggttgttgcgtactaatatgtgaatagaaaactttagttgtggtttctgctaatagggcttcagttataggccaactgcagcacttctattttcagttttaagtatcttattgtaatatcccattcattgaattcagtattgaactcattactcaactttctctttctctcaaatcaattattttaacagtgacaacatcagacaaataggctcacatccattaaactaaagaatgaaggcaacagcattagagcttcaagagaatggaagagcatcaattggaacaaattaataaagaccggcaagaccatcatctttctatagggtctattggaaaacacccaatagttgtagtcgtggacgtaggcacatacattgtgtgctgaaccacattaaacactntgtcttttctctcttccctttaattccttttgttattgctcttccccaataattggtatcagagctntcggttactccacgggatnttcttagtataaaggaaatagtgggagtcttctcagtttataggagccagtgggagcaatggcattagaag

SEQ ID NO: 41623 - DNA, 504 bp, Glycine max
ggggcgagccacttgagcgtggggaagaaagtgcggaattttttttccctccttctagataaaacagcgcggagtcagaaggttccgcttcccaggtgagacaccagaagaacccagtggggaaaggctggaagtgattcgaaacattcgcgacaaaaagacccaagcacgggtatgatgaaggtacccagcaaagcatattttgcaatggtctagagcctaaaactaaaataattctggatgcaatcgctagaggaacaattatgttgggacatgctgaaccagccacaaagataattgatgcctttgcttcaactgatcaccaatctgcacctaacagacaatcgatacagaaaaagagggaggtgggatctcattccacgggggatctcaaaggaagagtacaaacatttggtggggggacctacaacaacaagagaccccgtaagaagcccaaactaactcaaaggaagacacataagtcaagaataccccagaaaaact

SEQ ID NO: 41624 - DNA, 556 bp, Glycine max
tgagatgaggaagtgttgaagggtgaaacttcctgcttttattgttgaccacagagtggtacctggagatatgtcgcgggggtcaagagaccttggggacgtcaggtggggtgctattgcccaaaaccaagcttgaccaatcccgacccaacccgggcatagtcggtcagtgagaacctgtgatgtacctaaacaggcgagctcctggcagtcaacagataaaaggaacaaagaccacaaagcaaggaggcttgtggtagctggccagctgtgaaacttgattgatatgtgagatatggtctctggtaatcgattaccaagggtgggtaatcgattacaaggcttaaaaatgaagacagggggctaagatggtctctggtaatcgattaccacgggatgtaatcgattaccacgcttgaaaacggagtcatgaagctaagggagcctctggtaatcgattaccagcctgtgtaatcgattacacagagggatgggtcactggtaatcgattaccaggcatgtgtaatctattacacagtgcattattgcttatttc

SEQ ID NO: 41625 - DNA, 52 bp, Glycine max
gcggccacgcggcaaattatacttatcaagccatgaaagccatgactcccct

SEQ ID NO: 41626 - DNA, 469 bp, Glycine max
ctgcagcttatgatgtccaatcacgatggagtcgagttgttttgatgataacaaacatgatgacaaaaggccaaagagaaatttgatttccagattccagaaaagatgagttccacattcacgagaagaaatccaaagatttccaacggaagtcttgaaaatatttttccaaaaacaaacgttgcacaagttttgtgcttcaaatataagttctcacagaattttctaagttaccagagccttactctctagtaatcaattaccagactcctgttatcaattaccaatggcaaagtgtgttttcaaaagctttcccttgaatttacgatggtcccattaatatcagaatggtgtgatcgattaccagaattttgctcatcgattacccttgtttgttgaacgattaaattcaaattctcttgggaacaaggcacatcccctcaccaaaaatgctttgcgtaatccattc

SEQ ID NO: 41627 - DNA, 583 bp, Glycine max
tgcctaattaacctgaaattaagagaaaatgattattaaccgcacttattggaagtactaagtatttattacctatacttgacagaaaatacttataacactacaaaataaccataaattggaggagtttgatacaatttacacaagttttatacacaaaagttggtcgttttcacagactaacaactcccccaaatttacagttttgcttgtcctcaagcaaaaagagaacagctcacttgtcctcaagtgacaatgacatgcagtgactatgtacaaaggtgtatgaaacaaaagttactgattgcatgataagagaatggagtaaaaatgccctcatcacttgtctttcacaaggtatgcagttatccaaagagaagaataaaatgtatctgaacaattagatggagctaatgataagatatatattaatgacagtagcttaaaccataatcttatggctactgtttcactcaagcataagtgtttaagctattcattaataacaactagctagaggtctaatctttggaattcatctcatgccataaaagctgaaatgtataaacagaatcataaggac

SEQ ID NO: 41628 - DNA, 967 bp, Glycine max
  unsure (1)..(967): unsure at all n locations
tgcacgccnnngtttgttcgaccatccactnccaaccaaccnantnnannanntnnntgactgcttgngagtgcaaatcccacaccacgtgaaacccggcgagcgaggctgtatgtttctttctctatcaaccggcctacacaactctcatgtcggaatcagatacacttcctataactatgcgagcacgccatggctcccaccaatatatattattctttaacctctcctcgaccacccacaggatcaccccggccttggcgcctacgcggcttctcaggcaagcaagatgaccgaactctagacggcgtgcaaacgaatacggcggaaggcggatagccatacgcctccaaccacctacggcgcgtgaccaactcaccgcggtttgcctcccgaaacccctatggcaaagaactgcacgcgcgggcacattagcccataaacataatgttctgacgccttcccttcagaataagaaccaaaatacagcctgcacgaacaatcctcgcaaacgctgctgcataaagacaagtaggaacccccaccgctactgccatcttgaactcgcaccaatccgcgagacctcgccgtttggggcacaacacaccgaatatccggtggcagcctttctctcccgaccgccacccctctttcgggactcactgacaaacgggcacactgtcatcccgaaagcgacagggacccccgccgctaacatgagcgatatatctgcggtcgtgactgcaccccaccatacaacggtcagccgcacgcaaacggtgagcgtcaccccccgctcccctatcactgcgctcccaagaccctcccactctctaacagtcgacgcgacaccccaacgccctacatctcggttacatctacaccaaacctccacaacccctactccttaccccactctcgggctacccaccagaggacgcggcattcaccgccacccgcgtccacg

SEQ ID NO: 41629 - DNA, 596 bp, Glycine max
agctttatattttgggaaatggattaactactttttttttctatgagccagaccaagctgatttatccaagttttttatatgtctgacttaccattcaaatatttaatttgtaggcactatttgtgttggggtttgcatcgtcatcaagatattcgttgtttgacattatattgatcatcatcacatgtatgaaaagtttttcatcaacttttgatgctaatttttgttaccaatgcttttctacattgttgtctatgattaatgaccaatgctttatatacaagttttgttcatcatgagtgaaccttagattcccgtttgagattgaatataatgattcttgcgaacagtttgcattaatcgttgtattgaatcttgaatttttccgttggacaggttgtgaagagtcatatctttatgatagattcacgcattaaggttaagaataatttgttgaatttgatgaaatttcggtacaatgatttctaattggttcgtgagtgcatacttgattgtcggggaataaattcaccggtttcattcgtgtcctggagaataatgggaaatgttgccaaaattcctccaatttaacaaa

SEQ ID NO: 41630 - DNA, 556 bp, Glycine max
ctctacctttattcggtgcaccgttgccttttttatacatgcaacttggaagttaacataataaccactacatggaagttaatatgataaccactacatgccactacatgctataataaccactacattaactatttctagaatgataattatccctatgacagtttccatgacagagcatctttttcttaacaattaagcatatgtcttactttgtattttttctctcgaacctggaatatgtggagaagaaaaaaataagagtaaagacatcaataaaacaataatatgtactgaaaaggattgacgaagaagaagcagagcatacttaaaggtgataataggtgataataactggaaaagaaatgcttcaattagaagtagcataacatatctatcaggattgacgaggaagcatttatgattcacatacaataatgtatggcggaatctaaaaaatgtttaccttgctcacgtctctctttcttgaatcagatatgtgcggagaaggaattcataaactctttgataattgttgaacagccatacaaaatat

SEQ ID NO: 41631 - DNA, 453 bp, Glycine max
agcttgaaccaaaaccggtgagagtgtgaccttaaactgtgagtgaacgactagctatgagtaataatctttgcatgaatctctaaattttagaatgaaatgtataaatgagaacatgatgaaggccatgattgtacatgctcaagccttttgaccaaaaaccttaccatgaatgataattatatcttttgcacccttttttgagctgaaggatattgtcaaaattttgaaccctgaacttaaataagtatctcttgataccttgtttagattctaggagagcatatggttcaaggaaaatataccccaaatctgggggagtggaactaattgggatgcaaagaaagagagaaagcatcatcacacacaacaaataagttgtatgttaaaaaaaagaataaagtgtgtcaatgtaacaagggtcaaagcaaatgaaaagtaaaagctagtgag

SEQ ID NO: 41632 - DNA, 501 bp, Glycine max
  unsure (1)..(501): unsure at all n locations
ntgaaggcatctacctcttgaagaggcagaggtaagggcatatggattattggtagaggtagaggacggggagatcaaacactattagaaaatacactttcaacatcggttatttggggccttctacatcggttgtaaaaccgatgttgaaagcatcgatgttgaatgtattgttgttaacatcggttttaaaaactgatgttaacataaaaatattaacatcagttttataaataaccgatgttataaagaaagaagtacaacaaaataagtgtatgcgtgagggacgttggcatcagttttctgtaaaaaccgatgtgaatatgttatattaacatcagtttttagaggaaaccgatgtgaacgttcatcattcatgcacctatnnttgctatagtaattatgtataacattggttatttataaataaccgatgttattgcatacagtttaacaatcggtattttataaatattcgatgttaacctatgtacattaaca

SEQ ID NO: 41633 - DNA, 423 bp, Glycine max
  unsure (1)..(423): unsure at all n locations
agcttttaactaaaactatnnctcttatatgtagattctatgcattgggatcgaccgcataaatnacactttctacatagagacgataaacttaaatctagaagcatttcagatctaataagcagagattaaaataaatntatgaatgaatgaataagaaggaaccttcgttgcgtcctctcttgagcggcctcacgttctccacttctccttgactgagaggttgagagctgcagtagctgtagcggcgcaaaataagatttaggtttagcaatgtgaggaaataattgaatccttatgagcaaatgatcatggatcatgctggaccatcaattgaccaatacagagaacaacagggtgttattgagacagaatgcatgaaggagaatcctaatcctgaagctcaaaagttcttngatatgc

SEQ ID NO: 41634 - DNA, 454 bp, Glycine max
  unsure (1)..(454): unsure at all n locations
ttgagccaaaatcctgactcaccataaaccttgacttatgtgagtttgccaatccttatcctcggaagcaaaaaaagaagagaaggaaaatttccaatcaaaggaaaaaggagaaggaaaatttccaatcaaagaacaagagaaagaaaatttccaatcaaaggaaaaaaaggaagcaaagaaattcccaatcaaagagtgggagaaagaaaaaaagaaaagaaaggaaattcccaaccaaagaatgggagaaagtaaaaaagaagaaagctcctgatcgaaagaaaacagaagaaatgtgcagagaggtctttggaccanacaatatctgaacaatacagaattgtcaccaaatgaacaaaagaaagaaaaggaaaccacgacctanaatggtcttccccctttaattgccaaccaaaatcttgtgcgctagcgactntntcgccccgcacta

SEQ ID NO: 41635 - DNA, 356 bp, Glycine max
  unsure (1)..(356): unsure at all n locations
ctctgttgtgcacgttacagcccccctcccataggagatcagcgttgggtagctcctaagtgtggttccactacctaggttgacaaagcccccttcantacagcagtacacttcacccatagtaactctatttcctgtgtcgaatgagctatgatcacgaccaaaagtaagtgccaaaaaccatggaccaattaaagcgcctaagcatcccctcagaaatgcttagattctctaaccacactaatcacccacgtctgggcaattcgactaggtcagtgcactctacccaccatgatatacactccattcgacgtatgaacgtggccaaaagctagtgccaaatataatgtcagtgc

SEQ ID NO: 41636 - DNA, 415 bp, Glycine max
  unsure (1)..(415): unsure at all n locations
agtttccaagtgccaattcgncttcttctttatttcagtctttttctggcttcaatncatcagagggctttccttctgtgtccagcatcttgggatgttcccagcctttgatgacagctttccaggttctgctatccagtgatttgaggaaggccaccatccttgctttccagtattcatagttggttccatccagaataggtggtatgttcactggtcctccttctttctccatgttcatcagaatttatctccctagatctcactcagtgatttcgagtgcccgctctgataccaattgaaattctgatactggggacagatgtcgtacaggatgtcacgacatcacgcttcagaacatgcagattgtatttgacagtgtgcacagtttaagcgagtaaataacacaagagaa

SEQ ID NO: 41637 - DNA, 68 bp, Glycine max
cccgcgaggcggcaggatggaacaaaacaagcaaaaacgcccaggcgccacgccgtatcggagacgcg

SEQ ID NO: 41638 - DNA, 456 bp, Glycine max
aactcaagcttgtagaccttctcttcttcaccctttcgaacatatttcggtggttgttccacatacacgtcctctgtcaattctccgtgaagaaatgcgcttttgacatctagttgatacacattccatcccttttgtgctgcttgagctaaaaccatccggattgtgtcccaccttgctaccggggcaaacacttcgttgtagtcaatcccttgttgctgagcatagcctttagctactagtcgggctttgagcttatcaacttcaccattctcatttaacttggttctaaaaaccatttcactccaatcttcttagcacctttgggcaaagttgtaagctgccaggtttcattctttttgattgcttcaatctccaaatccattgcctttctccatttctcatctctttcagcttcttcaaatgagcttggatcttcatgagaggtaaacattg

SEQ ID NO: 41639 - DNA, 393 bp, Glycine max
  unsure (1)..(393): unsure at all n locations
aaagcggagncgaaagactcctctgcggcttccacataaggcataaaagatgggcagctcaccaagatgtcttcttcgcctgatacgatgaccatatgcccttccactacaaatttcaacttttaggggagagtcgagggaacaactcctactgagtggatccacgggcgccccaacagacagctgtagaggggttaatatccattatttggaaggcaacttaacaggtgtgagggcctatctgtactgngagatcgatctctcccctaacctctcggcgggtgccgtcgaaggcactaaccaccattgaactcagctttaagtgggaagcattgaatggtaatctctcccaagttctcttacgcatcacgtttacactggaaccattatcga

SEQ ID NO: 41640 - DNA, 409 bp, Glycine max
agcttgtaggattatggggtacccatcacatgtggtctatgtggcggtcgggcgatggtgcacaacaagttttccaaatccacaaagcgcgcataaacccaccatcccctgttgcccacctccatctgagctcacgtactcccacgtagcccatatcctcgtttctctcaacatcgggtccccatcaatcctcccaagcttccaaaacatccaagcaaaacaacattcaaacagcacaagctaccacagccaataaaacagagcaaaggcagagaactctgccaaaacaccaaccaaaatcacagcttttctcacttaaagaccccagtaacaattccttcgttccaattcgttaaccgttggatcgactcgaaaatattactggacatctctagtacttaagcctaca

SEQ ID NO: 41641 - DNA, 415 bp, Glycine max
  unsure (1)..(415): unsure at all n locations
ctcaagcttagcgcanatccttgcgacacatgttcagcttatctttcgctnttttactaagccaattctgcagaatctaaaaattctgcaacttccactaagcgactccacatgtcgctaagtgatggtgttttttttacaaaggccagttaagcgaaccatgtctcactaagcggccagtgtctttttcaattntatttttcagtttttaaaattttgaataactgtgtcctgattaattgtttggttcctctgtgtacagatggcttctagaaagagaaagagcattggtacaaggcccacatctcagtatgacacaaggagattntcttcattagatgctnggaccagatacactgacaatgttctgggaagaaacattttacctganaggaaagtatagttgtatcacact

SEQ ID NO: 41642 - DNA, 340 bp, Glycine max
agccaaagaactcggaaaccaacacagatatgacagaggagtagaagaatatataaatatcagagtataaaacacaagaagccaaactcacaaagaagaaataatcaaaccagaatccaaataactgaaaatgtcaacaaccacaaaacatccaagactgaaatttaaaaaccacacaataagcgaagtacttagcataatagtgtagattctaagagactaaaagccaacatacacggcttataaaagatgaataatcagagactaaaatctaagaagacggaggtggtggtggaagatcgaaactctgacgaatgtatccgacatcctcttcaagctg

SEQ ID NO: 41643 - DNA, 370 bp, Glycine max
  unsure (1)..(370): unsure at all n locations
aggcctttccagcaagcaagctaccaattttagttatccccttaagaaaattctgtctacaatacatatnttntcttttccttttgaaaatgatctttatattagagttagagttctatgtatagagggttttagcgcaacagtaaggttgtggccagtggcggatctatgcatgagtgtgggggcaattgtccccacaagattttatttttttatttgtatatgggtaataaaacaaaattttgtcccaataaaaaaataggtattggcctcataagatattttttcttannatgaatgccaaataaatataagaaattaacaaaaaaagaatgaagggttactacatttactattttgtactttttat

SEQ ID NO: 41644 - DNA, 388 bp, Glycine max
  unsure (1)..(388): unsure at all n locations
gtatggnatatagattgccttgggcttactttcaaccttcctatgtatgttgaactcactagcattgtttaccacagttttaggagttcaatattcacttaggatcaacatttcagccagcaattcaatcaccaaaactcaaattcacaatagacacaatcataaggaaacctaaaagttcaagaaaaagttcacaatcaaagactctctaagaattttgcatgaacatgttaaggactaattaacatgaaagatttgactcaaatcaaataataggctaaaagaatttcatacactcatgaacaaatgagttagacaaagaaacaagataataaaatctaacacaacataagaaatcttatgtgacaagtttcatgactagacatga

SEQ ID NO: 41645 - DNA, 408 bp, Glycine max
  unsure (1)..(408): unsure at all n locations
tctgagtagctttggcacaanncatttgtncnnactttctcacttaaaannccacngattaagaaaggggattaataatcaaagttaaaacttatggtgttatctgaacacaagtacagagatgaaaaattgagcggaaaaaatatatcatcaagctacctagtgtttccacgcactttttcctcattgactggaggacaactgagaacaatgatacgtatcttttcagagagaccctgacaattaataccctcttattaaattacaaataataatttcccttttaaaaatgcattttttgatcatcatagtaggcaaaagatcatcatatttaagattcattcttcttcaatatagaagttacaatctgctgccgttcctgcataactgcaaatatttttcactatg

SEQ ID NO: 41646 - DNA, 318 bp, Glycine max
  unsure (1)..(318): unsure at all n locations
atgcactacattanggtacgttagtgtaacgttaagttagtggaaccttanggtacaaaacgaaacctacggtataagacgagaggggagaagacgagaggacgccggaaaaaatggcggaaatcgctgacggaggagtcttccggaagaccaccttagggttcttccggaagttccggaagaacgttttnnaaaccatttcactccaatcttcttancacctttgagcaaagtagtaagctgccaggttgtattcttattgactgcttcaatctccaaatccatagcctatttccatttctcatctctttcagcttc

SEQ ID NO: 41647 - DNA, 480 bp, Glycine max
  unsure (1)..(480): unsure at all n locations
aggacggannagnnatttgagcccttgaatgaccactttgaagccacggcacctnagatcacctggggcatcaaaccggacgtttatgttnggcgtatttgccgcgcagctgcgccctgggagaaattggaaggcgctcacaacatccacaacatgccacccgcacactataccagcccagcctgtggtgcctaagagaggagctcacgaacactgaaagggtggccctcaccgccccacggccaattcggacacgtgcctcgccatgtgatatgatgaacccgtccacaccaaccccttgctgacgacacagcacgagcccaaagcatactgatgacgagatataactaactagtgacatctaatcgcataccatgaaacaggacagccacacgaaccgacccaccaaggcaacaaatacttgacaaataagcgttcaccacgccctgccactgttgccaatagtgcagttagccattg

SEQ ID NO: 41648 - DNA, 427 bp, Glycine max
  unsure (1)..(427): unsure at all n locations
ntagaagatgatgaacattggnttttattctaatnattatagaaccaatcccaactgtccttcaaggagcattgttacccatcaaaacattacctccaaattttgttgtggactcatatgattaaaacaactcaagtccaatacccattgttcaaaatgatgttgttgatgatcaacaaccgagaataccaaatcattttctgatgaggaatacaatagaatctttcttgattttcttggtataatctttcttccaatgaccaggttctttgatgtaattacatatatcttctggatcaagttttcccttcttgaatccttttcctttcttcttttttctgcccttttgcagaattggttattgataatctagaggaaaatacctcatcaccatttctaanagctntgtgccaatgctttcttgaat

SEQ ID NO: 41649 - DNA, 413 bp, Glycine max
agcttcatatttattaagaggcccattaacattctctttaactctgaaaactcacttgcacccaattgtttttctatttgatggaagaggatccagatcccaggtctagttttgaggtaatgctaaatattcttgttgcatggcttccttctacttaggataagctaaagcctattttacaccttttggttcacaatgagtaagtatagaaggatgaagtctaggttgatagttaccagactttgacctagtctgcataggatgagcattcactattctaggtggtgaagtagtttcaaaattttgaggactggtttttgcagtaggtgcagagtgaacaatggtttgaacatggctagaagaagaaggtggatcaatagaaacataactggacaagggtagtgaggaacaat

SEQ ID NO: 41650 - DNA, 420 bp, Glycine max
  unsure (1)..(420): unsure at all n locations
tactcaagcttatgaaagtcttggaaactntgcataattgngcatgctaangacacacctatgcaagtttcaaattttccaaattttgaagttaggacctatacacctagaaattaactctagaatgagatattaatgaaataatttggcaaaggttaaattaattaaattaggatgatgtgtcatttagaaaattaataattgcattttaggtccaaatttataagaagaaaaaggattgtattgcaatttattaaaaattggtagaaaatgacataaaatggatatttgcaatatggtccctattgggagccctataaaactcaaactaaggctccaaacttagtttttgtgtcaaccctagcttgaaagagaaagagaagttnttgtgttctaactaanaaaggaagggtacctatt

SEQ ID NO: 41651 - DNA, 373 bp, Glycine max
ttcttgaagaggatcttattggactcttgacacttcacaagacataagtgaggatgaaattcaaagagaatagagttatctttggcaaattaactcacttaacaaattcttcgaaattgaaggaacacataataatttgagaagcttaaatgtcatgccagcatcattacgagacacaaaggatgaagaaccagtattagagatacttaaaccttcaccattgcctttgaaaatctgatcgggtccatcacaatgggtgaattgcttaatattctgagtcatcactcacatgaaaactggctccagggtgtggaatccaggtagagccagcaagaccattcccatgagaggaagaatttgtgagcatagcact

SEQ ID NO: 41652 - DNA, 323 bp, Glycine max
  unsure (1)..(323): unsure at all n locations
tgtaacgaccttagcctatctacggattattccactcttgcgtacnagaagccaacacgtaggtagctaccatgacaagcttctccacgaggatattggccttcttatgagcctagacatacatgcctacatacgtgctgtgtcatcgatccctgggtgcttgatatgctaatccattgaccagtcatgatacaacagcataaagatgttcctcctttcaagagaaacaagaggatctcatacgccctactctcatcaatgatatgttgacagacttagaagagtacctataagccagacctcgtcgtgcgatattctaactc

SEQ ID NO: 41653 - DNA, 325 bp, Glycine max
acacaccccctataatagctaagctcaccccatgacaaacaacatgaaaatacaaaaaaaaaaagtccttactaccaaaactactcaatagaatggccaaaatacaatgcctaaacgaaggataaacctattctaatatttacaaagataatcgggctcatacttagcccatgggctcgaaatctaccctaaggctcatgagaaccctcgggcctttccttggatctctagcccaatctacttggagtcttctacccaatgctcttgcggggtatgattggcatcagtcagtttctaaaaacgctattatatcaaaaatcgtctt

SEQ ID NO: 41654 - DNA, 461 bp, Glycine max
  unsure (1)..(461): unsure at all n locations
naatgatacctttgttganaccattgattacctaagacnnccggngnggngtnnanagtgcccatgagccccaccgctatagcagagaatgtgtggtttcaangccgccgagggcgagacttatgtgttcaacatctctggagagcccgcacctttgatgacagctgaccaggttctgctatccactgatcagacgaaggccgcgacccatgattttcctatttatagcagcgtccgtacacagttaaacgtcacgtctcaggaccgactgctttcttctcgtgcacaacgaacaatctccctatatatactctgtatgtcgagaggtcatcagagcccagtacagcagaacaagagacagatgtccccaagatgtcagacatcctttcacacgtgcggaagctaacacgagtaacgacaagccggtcatccacataaaccgttcccctcttggcaacaag

SEQ ID NO: 41655 - DNA, 419 bp, Glycine max
agcttgagattatgtaaggagtaatgttattagcacctacttcttcttgaaaaaggatcttattggtctcttgagacttcacaagacataagtgaggatgaaattcaaagaaaatagagttatctttggcaaattaactcacttaacaaatttttcgaaattgaaggaacacataataatttgtgaagcttaaatgttatgccagcatcattaggagacacaaaggatgaggaaccagtattagagatacttaaaccttcaccattgcctttgaaaatctgatcgggtccatcaaaatgggtgaattgtttaatattctgagtcatcactcacatgaaaactggctccagggtctggaatccaggtagagccagcaagaccattcccatgagaggaagaatttgtgagcatagcactag

SEQ ID NO: 41656 - DNA, 448 bp, Glycine max
  unsure (1)..(448): unsure at all n locations
ttaaaaactcanaaccttgtcgnttcctctcattttcacatcattttctatttgagnnnagagcaacaaaacttcttctctttcttgttcttgagggttggtctagaaaccttgaagcttaaaattgttggtaagcaagttcacccttcaatctagccttgttcattcttctttatcatctgaatcttctctcatgttcttgagttttgttgaagcttgttttctactcaagagaactgcattcttggttgcacccttctctttcacgtggagactacaagaggtaagggggtctctccaactcttgagttctatgcttggttttaaacttctttgaacatgttgttgtcatcaattttttgagcttgcttccctattttggatctatgtgctgagatcttttcctagagtttttgatgccaaaaatgggttcgttgagtgtaaaaac

SEQ ID NO: 41657 - DNA, 433 bp, Glycine max
  unsure (1)..(433): unsure at all n locations
agcttgtctcagcatttatgcgagtctgataccaacangttatctatcatcgccaagtaccaagaagagttatgtctagccgcggcccacgagcataggattgcggacgaatatgcccaagtatacgcggaaaaagaggctagaggaagggtgatcgactctttacaccaagaggcaaccatgtggatggatcggtttgctcttaccttgaacgggagtcaagaacttccccgattgttagccaaggccaaggcgatggcagacacctactccgcccccgaagagattcatgggcttctcggctattgtcagcatatgatagacttaatggcccacataattagaaatcgttaggaaacttgtatggtctctcagaccttgactggatacgacttctttttttgaaataaaatgagttggtcccatgtttcta

SEQ ID NO: 41658 - DNA, 421 bp, Glycine max
agcttgccacccagctcgcccaggcgagcagggctgctttcttcaaaagttttagccttctggaggaatcttttggagggcccaagtgggcctggttgctatctgcacctctatttttactaaatacaccccctttgccctttgtttggagattctttattcgcaaagttacgaaaacttacggatttcgcaacaatacttgttgtctttccgtaatgttacggaaccttgtggattacataatcatccccttttttgacttacgaaatgttacggaaccttactaattgtgcaacgatgcttccttttgatttccggtgtgtcacggaaccttacggattgtgcatcaataccttcttttgatttctggcatgtcccggaacttcacaaatttcccaatgatgggtgccaagcacctcac

SEQ ID NO: 41659 - DNA, 430 bp, Glycine max
  unsure (1)..(430): unsure at all n locations
acctgtggatgccccttattgaaactcgacattaaattagntttgatttttttacgagactggaattgtaactgtaatgtaattctggtcttatttatttcacaattttaattcccaaattttaaaaatgtaatttttgtcaatttattttttttatatgttaaccattcaattaaatggtggattaatgatgtatctgtattgtgatggcaaaaaaataacatttaacaattaaaaacaatttaattaattaaatagaaaataagaacaaattacactaattatccttgaaatttcatgaaattacaattttttatcgttttctctatctttaaactaatcttccttaattgtgtgaaaaatattacacggaaataaggttgctataaatgtttaaaaaatatgaagagtttatgtaatttcacaaagt

SEQ ID NO: 41660 - DNA, 435 bp, Glycine max
  unsure (1)..(435): unsure at all n locations
ntggagtttccaagtgccaattcgtcttcttcttttttccagtcttcttctggcttcaattcttcagtgggctttccttctgtgtccagcatcttgggatgttcccagcctttgatgacagctttccaggttctgctatccagtgatttgaggaaggccaccattcttgctttccaatattcatagttgcttccatcgagaattggtggtctgttcactggtccgccttctttctccatgttcatcagaatttatctccctagatctcactctgtgatttcgagtgttggctctgataccaattgaaattctgataccaggggacagatgtcgtacaggatgtcacgacatcacgcttcagaacatgcagattatatgtgtccgtatgaacagattaaacaagtaaataacacaagagaattgttacccagttcg

SEQ ID NO: 41661 - DNA, 373 bp, Glycine max
caagctctttaagtggagtctgaaaactgtgtctatgggtggaatggttacctagatacaaactgttctgagtgcactccctatatagtctactatcttccttcacaatcccccaaagaatattcggtgagaagatgaccctccaaaggctgaaagcgtgggggggaactcaacaccatatcagaatgccctgggtccagcgtgctgacatcagcaatccgaaaactgatgggggattgggaatcatagacctcgccaacactaatgcaaacttaaagggaggatggatctggagattaactgctaatcacagccagctatgggcctcacttcttgcctacgagtatggaagtaccgcagacgcgcagagcat

SEQ ID NO: 41662 - DNA, 364 bp, Glycine max
actgtttttactgctccagctttgctgctccagtctaaagttgctgtaaccagagaaacctcagaacagttgaccacagataatttgtcagctgcacctgtcaaaactggaatcattcccgagaaatctattaccatttatcgggatccagggaagcgtccatctcagactggggttcagcctactcagtctggtaggcctaccacattaatctcttcagggtctgctgtggcatcaccatcttcattagatcctctgcataatgatccatctacactgggcaaagaacctaaaggaaaggctggacaaccaccacagaggctttctactcaaccacctgcttgctctaatgatagcagatcct

SEQ ID NO: 41663 - DNA, 430 bp, Glycine max
actcagcttgagcaattcaacgacatactttttactcgtagtctgatttttcatgtaatatatcgagatgctagaaattgaatgttgaagctccgagcaaattcaaacgacaataacttttcactcggttgtttgactgagtcccgtaatatatcgagacgctccaaatggaataccgaagctctgagcaaattcaaacgacaataactttttacttggatgtctgattgagtcccgtaatatatcgagagggtcggacttgaatgccgaagctctgagcaaattcaaacgacaacaactttttactaggatgtccgattgagtatcgtaatatatctaaacgctcaaaattgaatgttgaagctatgagcaaattcaaacgacaatcacttttttactcggatgtctgattgagtctcgtaatatgtgg

SEQ ID NO: 41664 - DNA, 443 bp, Glycine max
  unsure (1)..(443): unsure at all n locations
cgggattcttaagtcacctgcggcatgcagcttatctgtttgttangggttcattgngtnancggctagtcccatggctattttcaggatgaaacgggtttagaagagtaaagagaaacgccttaattaactctaactgcgattagtgtttttgtttgaaaagttatacctaatttacttattttggattataatatacatacttctcgtactttttatatttgaacctacacaaaacctctaacataataaggaaatatataacaatgttctcaacgaaaagtgtaattttaataagcagtagaatttaaaaaagtactaattattcctcagtctaactctaaactttaaaagcaaccaaattccaaacttcctttccccgtctagaccccagcccagtttgtcacatctctcagcaaaatttttatactctctactcctaa

SEQ ID NO: 41665 - DNA, 382 bp, Glycine max
  unsure (1)..(382): unsure at all n locations
tgccgccacggaattntccgactctgctctagngatgtggaacaagctacaaaaggagagagcaaganatgaagagccaatggttgatacatggacggagatgaaaaagatcatgaggaagcggtatgtgccggctagttactcaagggacttgaaattcaagctccaaaaactaacccaaggcaacaagggggttgaggagtatttcaaggaaatggatgtgctcatgattcaagcaaatattgaagaagatgaggaggtaactatggctcgatttcttaatggtttgactaatgatatccgtgatattgttgagctgcangagtttgttgaaatggatgatttgcttcacaaagcaatccaagtggagcaacaattaaaa

SEQ ID NO: 41666 - DNA, 413 bp, Glycine max
  unsure (1)..(413): unsure at all n locations
agctntanaatctatctcttcttactttcttgataaccgagataagttcgtcgattatttctcttaccaattggagaaagtatagagaagagaaaaagggatttgtatattgaaatgaagaatattacaaagccactgtaatctcttacaagagcagtatttatactgctgatattcagttgtaactgaaatctaactaatgacaactgtcaactaactatagttataaaactatcagagttatttactcatatacacttacaccacccggcaaactcaatggggctgagaaaccaaaggtagctcagcaacattgagattggaactcaaataggcaaaactagtaggagacaagggcatagtaagtaaatctgcccattgatctgtcccagatatatgttgaaccactaact

SEQ ID NO: 41667 - DNA, 384 bp, Glycine max
aaaaccccttgaactacttcaaaaccccttgaactacttcacatagacttatttggtccctctagaactatgagtttgggtggtaattactatgacttagttatagtagatgattactcaaagttcacatggactttgttgttgaaaaccaaaaatgaagcttttgatgcttttcgcacacttgccaatattattgaaaatgaaaatggtctcaacattgtttcacttggaagtgatcatggaggtgaatttcaaaataagtcttttgaatagtgttgtgaagaacatggaattcaccacaattgtttttgccccaagaacacctcatcagaatggtgttgtggagaggaaaaatagatccctctgagaaagaacaataactct

SEQ ID NO: 41668 - DNA, 410 bp, Glycine max
  unsure (1)..(410): unsure at all n locations
agcttcttgaatttgtgcattaacatttttttcgtccgggaatatgcccccatccttcggcaatacatccgaagatgactctttggacacgttgtccctttatatttatcgaagtctggtaccttgaacttgggaggaatgatgatgtcaggtactagacacagatcggctaaatccgagaaaggatagttgtcgaggccttccaccgctctcaatctcttttcaagcaaatcgatctttcctttgtcttttgaaatgggaaggagttccttaatgggtgcggattgagacggngcatggcggattatgtttggttggggcaactcatggtgggccggttccttgaggggaagtagagggcctaaatgggcatctccttcatcatcttcctacagaggatagtcgacatg

SEQ ID NO: 41669 - DNA, 419 bp, Glycine max
  unsure (1)..(419): unsure at all n locations
ntaacctcattgtctctcacagtctttatatntattaccaatccaatccttgggtccggactctcagccacttatgatagccaccgatgatcccattactgcttcccctaagctctctgtcctttcttcatgccgcatcccatgccttgcgaactccttggagtacctttgcattggggtcactgaaaccccgtgtaatgaaaggcgtgatgctttcgtctaatggcgctcctctcatggggtagccaagttgtcttatggcgaggacgggattataattaatacaaccccatgttcccatccagggaacatttggacatccttcgcatgaagatacaatcctgattcttccttccttctagcgagggaaccaattaacagacgcccctccatgctagccaagagttggtcccaattcg

SEQ ID NO: 41670 - DNA, 413 bp, Glycine max
  unsure (1)..(413): unsure at all n locations
agctngntgccttattccattgctcttgctttttaaaaagttatttttaaaaggtatagaaaaagttatatatttatttaatgattttataaaaacaaatttattcttctttagtaatttatatgatacgttttttctttaacatttttataaagttataacggtgagaagatagaactttttattttgaaagctagttataattgcaatacttcttttagaaagtactcaaaacagcttctcaaaataattaataagaaatctaattttttaattttatttttaaacttcaaaaacactaaaaaaaattcaaaagtggaattttcgtgaaaaataactgacataaaatgaaatctaatctactcctattctgaaaatgtgaatgagaatacacaaattgctaagtgtatcac

SEQ ID NO: 41671 - DNA, 433 bp, Glycine max
tgtaactcggccttcatcgccttatcccagcagtcttggcgagttgcttcggcgtatgatgaaggttctgtggctgatgaaatggtcatcacgaagttcctatgagcaggtgagaggcgtgagtatgaaagtacggagcttagtggataacgaacaatcactgaagcttctggtgtagatgaagcaagaactctgtggtaatcctgaaggtatgttggggaatgtcttgatcgtgttgaacgtctaaggtgtgaagggtctggtttggttgaatgttcatcacaagagtgtattggctttgtgggttgagatgagtggctttcttctggttggtcatggtctttgccggagaaggatgtcagagatggagacggaatggtgttatctaagtttagatgttgtgtattacgtaagtatggaaaatgaatttcgt

SEQ ID NO: 41672 - DNA, 410 bp, Glycine max
agctcacgattatttattgtataattttcttacactctcaatttattaaagatgatcatatataataaatttagtaaattttataataattattttaaaaatcattcatgattatgagttatcaaccatcacataaaggaacttgacaccacactttaactcaaagtcttaagattcatgtttatgaatcttctcctcgtgctcaactctttttcacttctacgactccacctcacacttgtactagatttggatcttttaattaagatttcagtttaaatttgtgttgataaaaaaatataattaagagaaaagattctattaaagctcaccaactagattttctaataaattagttatcaataaagttggtgattatatacttcctattaatgttatagtgacaaaaa

SEQ ID NO: 41673 - DNA, 416 bp, Glycine max
tctccctatattgctataaagaggtttgagaagtgatgattaaaagagttcagcctctttgccacttctctctctctcgaaatcgctgaggaaaattatttccgggaagaaaatccaagccgagacgcttccgtaacgtttccgtgagtaattacgcgaagattctcgaccgttcttcaagattcattgttcgtgcttcgttttctatcaggcttcaacgggtaagtacctcaaaccaagcttttcaactcattctatgtacccgtggtggtccacattatgtttcatgtattcttattctctcgtccatctgctttttatacccctttgtgacatgcttaagccatttatttaagtcatttctcgcttaatctagaaataaaatatatttccactgatcgttgaaagtatatcat

SEQ ID NO: 41674 - DNA, 386 bp, Glycine max
aatctttcttttttttaaaaaaaatttgattatcaggtacatgtacaaaaactgttccacgttcaaggacaactgagcagtgttctctagatatatttcacataaatggtgattgtgtatcttctacttgttttgtggagctatttagaagtggtgcaatggattgttatggttggaagcctgaaaaggtgcacatctatggcgtgatgaatacatcacctactattttggatttcaatcgcacgcaacccatgtttttttaaaagataaatttcatgtgatgaaaaagatatagacaaacagtgatgtataaatgattataagaattgttatatatatatatattacatctcctttctatacaccagaatgtaagtatcggctga

SEQ ID NO: 41675 - DNA, 416 bp, Glycine max
  unsure (1)..(416): unsure at all n locations
nttaaagaatgatactttataggggcatcctcaagtcgttgtaaaacttcatgaagagattcatactttaaatacaaccttagcaaaatttgttagaggtttctaatgacttgaaaagctattaagatacaatagaagtcctatggacaaatctagtaatgggtacaaagggaaaaagtatgttcatgataaggataaaattgtttgttatttctatggccatgttggacacatgacatccaaattcaaagacctaccaaagaagggtgtgtgtccaatgcattcagcactaacaagagaggacccaaaaatatttgggcacctaaggagtaaattattcttgtcgcatatatccttgacaaacaagaaagaaatacctatcatgctacttanatagtggctgctcacgacacatg

SEQ ID NO: 41676 - DNA, 498 bp, Glycine max
  unsure (1)..(498): unsure at all n locations
agggtgaggganaggggntttgannaccttttgaattgcgnacnttngaannacctgataccttcngaagncnccgngannctntagagacgacccggaggtttgcagccnactatatattataggnggggtttgtgataccggccaaagaaaagggacgccatcaaaacaacgccaccgncctctttaaaacatgccntagtatacctagaaattatcttaaaatacactaacaatataacttgctaacatactcggactaaagaacaagaggatatatatatatatatatatatatgtatatatatatatatatatatatatatatatatatatatatatatgagtaaggaaataaaaaccaatcttaattcaacatatagattcttcctcacacaagccatcggtgcctcctgcgtgtggaccccacgcgcatcatgtcaaatttgagcgcccctcaaccgcaagcgaagagactgttctgttttccgccgctgg

SEQ ID NO: 41677 - DNA, 447 bp, Glycine max
  unsure (1)..(447): unsure at all n locations
ggaactatagaaactaagcttataaaacaaattgttaaacattttaaatatcttgtgaattangaagcatcaacaagaatcaagccaaggctattgtgcaagcaatcaatggggtaaaacacaacaaaactaacaaaattaaactaatttaacacgactaacaaaaccaaaaccaaagaacacactcccccccatacttaaacaacacattgtcctcaatgtggcacaattaaaagattaaaagcaattaaaccatcaaatagaatcagaaaaatgtaataaaagtaaagaaggagataagaaagaaaaactccctaagtcatggtagaggaagagtagggttgagtaaggaagtctcttccaccactacgtccactaaagaanggtttgtgaggaatggcttaagtcggtgtccattgaccttgaagctcttgtttgtggagtcac

SEQ ID NO: 41678 - DNA, 418 bp, Glycine max
  unsure (1)..(418): unsure at all n locations
gacttgagtcatcaaaagattataaatatgggtctatggcatgttttntaaatgatgagancaatcatctatctttcaatcttctctcaacatcattcaatatctttcaactgtttctatagaattttctgattctttttctcttcatctttctaaaagattttgttcaaaactttctcttccaagaaaagttctttgttaaaaaacttgtgttattcatttgtttcattcttttctccctttgccaaaagaacgaaggactaaccgcctgaattcttttgtctctctcttctcccttacaaaagattcaaaggactaaccgcctgagaattcttttgggtcttccctttcccttaagcaaaagatttcaaagaactaaccgcctgagatatcttttgtttcccctttacaaagattc

SEQ ID NO: 41679 - DNA, 429 bp, Glycine max
agcttcatatggacatcgcttcattttggtcgccattgtttacttcaccaaatgggttgaagcggcttcatacgccagtgtgactaggagtgtggtggttaggttcatcaagaaaaagataatttgctggtatggtttgcctaggaagattatcactgataatgccaccaatctgaacaataaaatgatgaaggaaatgtgtgaggatttcaagatccaacaccataattctatgccttgcaggcccaagatgaatggggcagttgaggctgctaataagaacatcaagaaaatagttcagaagatgatcgtgtcatacaaggattggcacaagatgctcccttttgcactacatggttattgaacctcgatacgcacatcaactggggcaaccccgttctctttggtgtatggaatagaggttgtgct

SEQ ID NO: 41680 - DNA, 153 bp, Glycine max
gagagcagacctagcgcaatttcgagcgtatcgacatgagatgaacacgaatcggaccggcgcgcgataaggtacgaacccctcaaatgctagagagctaccgacgctgacctacaagcctcttcattatggataagccagatgcccaccgcc

SEQ ID NO: 41681 - DNA, 487 bp, Glycine max
  unsure (1)..(487): unsure at all n locations
atgagaggtcaaaaatagttttatctggaaagtatatgataaagaccttatattgtttttatattnngctagtggagagggagnntggaaaacntatataaacataccaagaaaaaaaatttatgtaccgaaacanantcgactgggtagtangaaaanaaagtggnngtgtccctttttaagctcgcgaagccgaannnaccaatggttgtggaagggtgaaaggggactggtgaannngttaataaatgtgaatagtnncgtaatcattgccattannacgaagtnncattcattgannacatccatatgttggttgaactgactagagggatgaaaagattatntattggtgatatgacaaagtcaatggtcaaaccaaagaatattcttcttactgtgaaggagcacaatgtcaacaattgtacaacaatgaagcaaatatacaatgcaagatctacatgttgttcttctataagaggcaata

SEQ ID NO: 41682 - DNA, 445 bp, Glycine max
  unsure (1)..(445): unsure at all n locations
cttgaaagaaatgtatncaataattttcatctttcgttatgctcccattttcctgtttacacctttaggtgattcttggggcaagttgcccctttgtatttattgaagttcggtaccttgaacttcggaggaatgaccacgttgggtactaggcacaaatcttccatgtcagcaaaggcatgatctccgcctccttcaatgacccttagcctttcctctatctgatccaacttttccttttcagccatagcaagaagggctcttcccacagcaaaatgcaagggttgtggttgtgggcaaaactgagggcccttcaaagtgtttggcaggggtacaccaccaatttcttgtccctcagtggcatatccgagcaaggctcgaagtcggctaggttgtggtggngtatttcatgtgtctcccccaagggttgagagacatgtgaatg

SEQ ID NO: 41683 - DNA, 408 bp, Glycine max
  unsure (1)..(408): unsure at all n locations
gctttctcacaaggcctaaatgacagtccaaactaggattatctcactnattatctgcgattaccactaaatccagagtcagcttgtcaaaaccctcaaagcctcacactttggccattcgtatcactaccattctcactttttaaccctaggataactctacccttcatctttatcagttttctataagaaatttcaacacacaaacatcacagaacatcatcgtaaaaccctaaaacagaatgggtaagcttgactcacatcaaacatgacaagttgagcatgctttcaacaaagatcacaaatagctaccataagacataaacctagtacaactacccatcatatctgccaaacacccaatacccacgacactatgtgagagagaagactacccagtacctgaaa

SEQ ID NO: 41684 - DNA, 420 bp, Glycine max
agcttacggtaaaatctgggacctattttggtagatgtccccatagaggccattgcctccctcgcccagtattatgatcagccgttgagatgctttacctttggggacttccagctgtcacccatggtggaagaatttgaagagatcctaggatgtcctctagggggaaggagaccatacctcttctcagggttctatcccttattagctagaatttcaaagatagtccaaatctcgatgtaggaattagaccatggaaagcaagttagaaatggggtggttggaataccgagaaaatgtttggaggcaaaagcaagaaccttggcaggtagaggcgaatgggccccgttcatagacattctcgcactgttgatcttcggaggagtcctctttccaaatgtggatgggttggtggatcta

SEQ ID NO: 41685 - DNA, 455 bp, Glycine max
  unsure (1)..(455): unsure at all n locations
actccagcttaacagttccttcacaaataatcattacacagctgataactattttaaccacccatcatatctcccaaaaccccatacccacgaaatttaagagagaaagaagtccacccaaacctgaaatttcgaagtcccactcgtagccacgcacttcacgactccaaaaatgctctcctttcacgatttggggcagaaacgggcactaaaggttgaagctttgtatggagctttaatggagaatgagggaggaagaaaggcaacgtgagggagagagaaagctgtctgaaaaaaaaaatgaaggctgagtgaagagagagaaaagctttttggttttaaataaaaggttttcctctttttctattattntattcaagctctgccacatgtccctanttgattggagcaaaaagggcccactttctctttntgactatgacccatactcagtc

SEQ ID NO: 41686 - DNA, 498 bp, Glycine max
  unsure (1)..(498): unsure at all n locations
agaaacggagganaatgaaaccttggatgacnactttgacngactggngacctctagagtcacctgcaagcatgcaagctggctgatgttgtgttgcgatctttttgggagcgcagagtgatatgggggtttaattcgcgggagcttgtgtcttgtaagttggtttgtgagaagccaaaggaataatatatatatatatatatatatatatatatatatatatatatatatatatatatatatatatatatagatatatgaattgatagacgcaacacgagtctgatggaaggcacttgaatatgtcagccacaaaatacaggtgcaaatgaagctcggaatattactatatcagagactatatccaatacgctcgggtataaacatgcttgtcacaagacgctacgtagatatcctcccggcactagtgacgtgcacgactcgttatcaggcgcatagcgaacatactcgtgcatggaatagaggtcttctctcacn

SEQ ID NO: 41687 - DNA, 411 bp, Glycine max
  unsure (1)..(411): unsure at all n locations
tgttcgcacatcgntcgcgngnatgttatccactctcattgtttgaagnagaggagaccttcaatcctattatgcaacgtggcaaaaaaaagtgggcagttaacttgaatggtcattattgtcaatgcggaaggtattctatgcttcactatccatgttcacatattattgcagcttgtggttacgtgagcctgaactactaccaatatatagatgttgtttatacaaatgagcacatcttanaagcttactccgcataatggtggcctcttgggaatgaaccggttattcctccttctaatgacgcatgaacacttatccctgacccaactacaattcgtgcgaaaggtcggccaaaatcaacaaggataaggaatgagatggattgggtcgaaccatctgagcaccgat

SEQ ID NO: 41688 - DNA, 409 bp, Glycine max
  unsure (1)..(409): unsure at all n locations
agctngccaacctatgtaagctccttatatctcccacactgtttgttgtgggccattcttggatggccttgattttctcagggtccacttggaccccatttctaccaactacaaaccctaagaaaactatattatctacacaaaaaagtacacttctctatatttgcatagagggtgtttttcctaaagactgaaagaacttgcctaagatgtcctaagtgatcatctaggctcctactgtacactaaaatatcatcaaaataaacaactacaaatctacctatgaaatcccttaagacatgatgcataagcctcataaaggtgcttggtgcattagtgagcccgaaaggcatcactagccattcatacaaaccaaacttggtcttgaaagcgggtttncactcatcac

SEQ ID NO: 41689 - DNA, 373 bp, Glycine max
  unsure (1)..(373): unsure at all n locations
actcaagcttcttcaactcgcacgtggctccctgttgcacagccttgatacgtgtgaaccgagnccgcgccgagccgcctccctcgcattcggaccggaacgccctcgaccgggacatctacccgaaccggagccacgtcatcgcgaggaagcaccagcatgaccgccacgttacggctcacaagaaaacgtgcaagtgttctccgacgacgcatcccgaggcgtgccggtgcagcctccacaagaacaataaccagaacgcgcaaaccgggtcgtttccgtagaaccggctcaacatgctgcggtccgcgatgaacaactcactcgtgagaatcggaggcgtcaaaagcgagagggtgaaacgcgccctcac

SEQ ID NO: 41690 - DNA, 412 bp, Glycine max
agcttatcctatattcaacaacaaagtaatcaaacttgtgcagaatatacacatacatgcaccaaagataggcaggataaggaaagtaatgcagttctatcgtaaatacaatacagagagtatacttttaacaatgtccataatccctgctgttaaagtgacaacatgatctgcccaaggcaaaaacatgtaaactagctgttttatgagttcattcttttttggtcatcaaaattgttattcaaaatttgaatgggtacttacaaaatcaaattcatccaactcatataagagaacacctacaataaaccatatgagtaaggcaatcacaatctaacaccatataattttctgtaaaaagagagcatcatctagaaagggaaaaataaaatgaagtataattgagtaatat

SEQ ID NO: 41691 - DNA, 436 bp, Glycine max
  unsure (1)..(436): unsure at all n locations
cttcacctttggtcctcctcatagtttttgcatgagtaaacatggtttacncncatctaccactccaagtaggcctccggatcattctttcctttaaagggaggaatgttgagattaataccatcaattcggttttgtctaagaacaccatcattccctcttctcctcctttcttcttcattatgatctctattcttcatttgatatcgttgcttcattaacctctccaaatgttgtgtcaaagcttgcatttggacttgcgaaagccccactccatcattaggattattacctgccatctcaaacaaacaaatcaaacgtaacaagacaattatagtcgttgtttgaatacctcacccactcaagtgtagcacacaattatggattttctctaatgacaacactcttgccttttaccactctaattccccttgag

SEQ ID NO: 41692 - DNA, 293 bp, Glycine max
  unsure (1)..(293): unsure at all n locations
cgaggcggcagccggcacttttacaacaaatttgctgccagagttttttatacaaggaggaatcccacgcggaccaaggaggaaaagagaatgaaggtcaaaaagggaaaatggccaaatgcataaacgcaacacaacggcctgggatagccccaccactataaaagaactaactcganttagccataaaccgacacaagcggccatgaaaaccccggcgactatggaccaaagtacaggaaaattcacctgcgtttggaaagagcacatacagcggaccgaatcgacacgac

SEQ ID NO: 41693 - DNA, 386 bp, Glycine max
gcgcctctttgagaaggtactagccaattcttctgtaggtttgtgtaagattgtggagttacttctttgacttgatttgcttactcatatttattgaatatgtaaattcttctattattagttgagtttttgttcccaccatgccctatatgtaagataatattgaagactatattacaacaagaattgatttgttgcactttatcatcaggtgctttctctctggtaaaaatgcttctacctgaccagtgatttggatatctgcagggcaatatagtgtctccattttctatgcatcaacagcagcttggcatgctagcacaccaacagtctcttctaatggctgctgcagctaaatctactggtggggatcccaggtatcctgc

SEQ ID NO: 41694 - DNA, 257 bp, Glycine max
  unsure (1)..(257): unsure at all n locations
acactttngtgcgagaaaccgagacgctcgaaattgaacaacggaagctctcgagacataaaatggtcataactgttaaaacggaactccgattcacgggcataatatatcgagacgctcgaaaccgaacaacagaagctctcaagaaatgccaatggacataacatgtcacacggaggtccgataccagtggatagtatatcgagaaggtcgaaattgaacaacggaagctctcgagaaattcaaatgggaataac

SEQ ID NO: 41695 - DNA, 438 bp, Glycine max
  unsure (1)..(438): unsure at all n locations
gcttcaatcaatgacatgctcgcttttattntatttatactggacctttcctctgagcacacttgtatctatcttggctctaggagagctaaaagcaaacatcatattataagccctaatattatgttgttaatttctactttcgtgtgattcttgatcacatagtagttgttgcaaaagcattggaggattcttgagaaaaggaagttgtatccttcccatgctgcaacaaagactatatttggcattagcttgatttctattttttcttgtcctttcttgatacctcatagcaacttggcaatacgcatatgtttcagaagcatctcctagatcaatatatcctacaaaatacatgttacttagtttgacattaataacattngtgaaggtaaaaccactacattgtgagactaaaacatgtgctaatgtcatgag

SEQ ID NO: 41696 - DNA, 411 bp, Glycine max
  unsure (1)..(411): unsure at all n locations
tcatcttcaacccaagattgaagngattttgaagattctattgaaatagacgaagatgatgatcttagtctatttgtaaaaagattcaacaaatttctaagagttagagaaaatcaaagaagatcaaattttaaatcaaagaaaaggacagaagattcatcctctactccaaaatgttatgaatgcaatcaacctggacatctgagggttgattgctcaattttcaagaaaagaatagagaaatttgaaaagaaagtctttaatgaaaagaaggctaagaaggcctatattacatgggatgacaatgatatggactcatctgaagattcagaaaacgaaattgtaaacctgagtctgatggccaaaaattatgaaagtgatgaagaggtaacatcttatgataacaactta

SEQ ID NO: 41697 - DNA, 256 bp, Glycine max
aacacaaatattgcgctatgaacagtgttaaaattctgatgtcattctttttgaattatcagaatagtgtatggtatgcaaattgcttgtaagaacaatgttttgaaggacccaagatctgaaaccctcaaacaaccgagagaggaaaaacggaaagctgatgaagctagtggagatactagaacatggaatagtctgttcatgcgtcctgatacagatgttcttgaaacttgataaattgcaaacccttattcta

SEQ ID NO: 41698 - DNA, 429 bp, Glycine max
ctattagtaagacttcattcttgaattcatttgttccttgcttataacttcttgaaagtctctttactgctatttgttgcccatcaggtaatatcccctgaaattaaaccattattcatgtgaaaaacaaaaatatgaaaataacttttctcacatttactcaccttgtaaacttctccaaatccacctttgccaatacagttctcattggagaagttgttagtcgccgcttcaattacagccaaatcaaattgcaatggctctaaaatggcgctttcatgaccaactagaacaaatatggttagtttgttaaaccaagttttcaaagttttgaggataacaaatacgagtttaaagtacatattttttacatacaattttctttgagaatggtcctaaaactctctcttgcttgtctccttattaaat

SEQ ID NO: 41699 - DNA, 390 bp, Glycine max
  unsure (1)..(390): unsure at all n locations
gtaacacgaggacagcttctgataaacaacacctcaaggtttgggcaactgaaatgcagagacaagtttacaaaaagaagctaaatgctccaatgctatgttttattcacaatggaaggcacaaaccccgcatttaacagacaaattaaaatattggaatttcagaatcaaagtcctaatataaaagaaaaatcatagcatactcttgaaatctcaaaagcaatcagaacgaattatggcatgtttggattcaccttanatgattcaatattacatgaaaatatcagctaatgtaattntaggtataggtaacatttagttccaagttgaagaattgattctcgtccaaaattgattntgagttgaaacaactttttgatactaacatgc

SEQ ID NO: 41700 - DNA, 451 bp, Glycine max
  unsure (1)..(451): unsure at all n locations
taattttaacaagcattgcattcagctgatattggtatganttttcttttttaaaaatagcaagatttattcattcacatggatttctcttgctttatacagaacaacgatttaaatacttttttgttcagatgtagtacatcatttttagcctatagaagttcttaaaaaaataattggaccatgccaatttttaattcaattgaaacacgtaaattaacaatgttttataaatttgatccttcaaaataaacataaaggtgagacttccacgaattgaaatgtgatgtcaaatcaaagtgaccctcagcctctggacaatagaaaagacgagaaagagaaatctttagtacagtattgatggaaggtactcttctttgggcctatggaatggacacttgggccagcgtgaggatccgatccgagtctaatctatggtcatcctcatcga

SEQ ID NO: 41701 - DNA, 331 bp, Glycine max
  unsure (1)..(331): unsure at all n locations
ttttgagaacccagtttctcataaaaccttatctgatactgaagttattaccaagagaatttcgcaacaacagttgtgggatatttcaactgcttatgaatcattgttgaggcagaaatctanggctcagtggatcaaggagggtgaccgaaatacagcttactttcacaaaatgataaatttcagaagaagctcaagtgttgttcatggtatcctcattgatggtgtttgggtccagcagcctgacccttgttagaaagcaggggttaacacttttgttgagagggtcattgagcagaatcatcatatacctactctggatggggtttac

SEQ ID NO: 41702 - DNA, 446 bp, Glycine max
  unsure (1)..(446): unsure at all n locations
tgcctgtccgatgcagtagtaatgatggcccgagttatgttggggaacggttacgaacccggaatgggtttagggaaagacaacggcggcatgactaacctgataaatgccaaaggaaatcgtgggaagtatggtttaggctataaacccactcaggcggatataaagagaagcatcgtgggaagaaagagcggtggtcaaagctcgcggttgaggcaagaaagtgaaggaagcccgccctgccacataagtagaagctttataagcgcgggtctgggagacgaaggtcaagtggtcgcgatatacgaagatgatgttccgagtacattggatttggtacgaccatgccctcctgatttccagctgggaaattggcgagtggaggaacgccccggcatttacgcaacgagcataatgtaaacctttacggttntaaaagctctata

SEQ ID NO: 41703 - DNA, 420 bp, Glycine max
cagctgggaagttgggaagggtagagtgttaaccgacctttttagaattcaatgtaaagaataaatggaagatcgatgtttattttagccaacagagtatacttatggcattttttttttcttttgcatactgcattcacgtggaagatcagtctatatactacttactagttgagaagatgtacgtcatggattaaaatgaattttatattaacaatcagacgtgagtttaatttgagttaaatatattttaaatttatgtaaattaataaattttaattttatttcttataaaagaattgatttttatcgttcaaagagttcaaatttatttttagtccttattattatatgacacttgttaactgcttatatatttagtagaaggcaaaaaacatccttgtctatgatacaatgtca

SEQ ID NO: 41704 - DNA, 427 bp, Glycine max
  unsure (1)..(427): unsure at all n locations
aggagaagaactntgccctcagatgtttagcgnnnatttattcaaacaacagacatatatacggataggagagagacagtttgacaagctttgacaagacagtacacactgctgtcttcttcaacaaaataaaatagggaaatctactctaaagatacatctaataatacccataattataataattaggattaggtaaaataaaataaaaaacattattaggtgctcttgaactattatatttcgattagttttcacgtgatatataattaagagttattgattcttttattagtaacttaaaaaatttcttctgtgaaaaaataacttaaattgtttaaatgtgtcatataaaaagattgattcatatcatgaatacgtgggtggataaagatcacctaatacattctctattcaagagtagtga

SEQ ID NO: 41705 - DNA, 424 bp, Glycine max
agcttatagttattggagggagaattttcaatccaaaatcaattgtacctttttgtaacgaagaattctttttgcagcttttagatgaggagaggtaggagcctccgtaaagcgacacacaactcccaccgcatatagaatatcgggccttgtattggttagataccttaaactccccacaagactcttgaagatcgtggagtctaccttctctccttcatcaaaatttgataacttcaagccaccttccataggtgtgttcacgggattgcaatcaagcatattaaatttcttcaacacttcttttgtgtagctttcttgtgagacaaagataccattcttcgttttcttcacttccattcccaagtaatatgacatgagtctcgtatctgtcatatcaaattcacgagacatggactccttg

SEQ ID NO: 41706 - DNA, 364 bp, Glycine max
gtgcagttcactaaaggagactgggtcctcgttaagcttcgtccatgtcgccagtcaacggcttcaggtggtcaatactccaagttagcaaaaaggttctacgacccatttcaaattgttcaaaggatcggacctgtagcatataaacttgacttaccttcaacctcaagaatccaccctgtcttccattggtccttactcaggccttatcactcttcactgaccacaacagaaacacccattcccttgcccaatgcggatgaagataaccaacccctcctcacccctctcacgatattggataaaagtggcacagttcaagggatgacaagcagttacctcgtttggccaatgggatgttctc

SEQ ID NO: 41707 - DNA, 404 bp, Glycine max
  unsure (1)..(404): unsure at all n locations
agcttccacatacttgttacccattttactattntcagctaacagatcataactacctccaaggccaagatagaccaaattggagagattcccaatctgagatggaatcttccccatgaatccagaagagaggtcgaggtgagtcaaggaggtcattgcacaaagaaaagaaggaattgccataccttcaaaataattgtcgctcaagtcaagatatcgaagcttagagagattcccgatctgagagggtactgttccgtcgtcaacaacagaactcaggtcaagatacaccaaatttgagagatttccaatctgaggaggaatcttcccatggaatccactatcagagaggttgaggtgagtcaaggaagtcattgtcccaaggaaagaaggaattgacatac

SEQ ID NO: 41708 - DNA, 359 bp, Glycine max
acaaattccatagcggagaagtgggcggtggctgcatgtctgaaactcgttttggtcaccaaattatgtacgtgtgaattaatcaacaattaacctttgaaatgatgaaccacaatgtataatggaacctacactcgagggattagttgctgttgttagtttatgattggacttgccatttaaaaaattgggatcggtatacgaagtaacttaaccagaacggcaaaacatgatcctgaaaatttccaaagatcattattggcgcttcctttgatacagcgaataaccaacaagggcagacatcagaaatgtccatagaacctgcccacagtatcaaaataattaagacaagataattg

SEQ ID NO: 41709 - DNA, 414 bp, Glycine max
  unsure (1)..(414): unsure at all n locations
agctnttatnttatatttaangnnttatctttttgngnatagctaggaactaggaattttctctcaaccttttattttattttaattaaatagttataaaaaattaaaaaaagatctaacactattattttaattatgcaataaagcctacaagtttatacttaattttggtctgtaacaaaaagcaatgaaaattagagtcattcgctcttttaattggattaaaaatttatttctaaacaaaatttaggttcagttgcctttaaatattttttatacagttttttaattaaaattagagttttatttccataattaagtctgagtaaagtaaaattttaagttaaactaaagaaacataaaaagtacctaaaatatatattctacttaaattgtggcctttattntatatac

SEQ ID NO: 41710 - DNA, 407 bp, Glycine max
  unsure (1)..(407): unsure at all n locations
ttgagggcgcaccaccacttttatagtggtgntccgataaagngncgaccatcacgattatcgtctccctttccattattgggggtaccacccgggccgccagatccctccaccttttgggcgtgttctttgaaagatccgtccccctttttgcacatgttctgtagttgcatcctattcaaaaccatatcaaaattgtattgatactgcctaacacggcaaccattatgtccttccaagaatggactcgggaagattccaagttagtgtaccaggtaacagctaccccactaagactctcttggaaggaatgtattggcaataactcatcttttgcgtattcccccatcttgtgacaatacatctttagatggatcttgagacaagtaatccccttgtacttgtca

SEQ ID NO: 41711 - DNA, 410 bp, Glycine max
  unsure (1)..(410): unsure at all n locations
agctnttcgatttattctatgcacctttatangtccacattgtgtttagtgcattttttctcgttttgtttactttttataccccctgttgacgtgcttaagccattttacttaagtcgtttctcgcttaacttaaaaataaaataaatttccaccgaacgtttgaattgtattatccattaactttggttaaaatcaattccgaccgttcggtcgtgccgtaaccacgttggaaatcaaaaagaggtaaaaaataatataataatcaaaaagacatcttttagtgaaataaagcggaaaatcaattggacattttctctttgggatttctcattcttaatcgaattgattaataactaaagtgaaactaaaggctaaaatcaatccacctagtcaagctcgtccacaaa

SEQ ID NO: 41712 - DNA, 421 bp, Glycine max
tcttttggaccttgaacaagcaattttctcctctatcagaaccatgctatgtgctcgcgactggtccctttcttcccttcgcaacttgagttcattattgctaccccatagagctccgcgaaatttgttccggccatactcttccttgcgagccctcttggtctctcgttcaagggcccttacggtaattgcattctcttcccgtaacccggcacactccttccgaacgtgtgtagcatccaacttgaacttctccttggcgagtgttgcctttcctaactcgcttttgagagctcggacttcctcgtccttttccggtgcttcaaaattctctttgctgacgacttttaacttggctagccaatctaaacctcgtatgcgaactatcagccattcgtggtacccaccaatgatgccatta

SEQ ID NO: 41713 - DNA, 339 bp, Glycine max
agcttctttgatttatcttcctggagtagctagagcctagctccgcacaccctgtcggatctaagctcacctctatggcaagcttgctgttgcagaaggatgatgacgctagagcttgtgttctctctcatctctaataactaagctctcctgcttgagatgaatagctcgagcttaactacacgcgccctagaatggcttatctcagccctatgcccaagtacatgatcgtgcctttcaagtgcttactgtaggactatcaaaagtgcatctaaatatgtgatctaaccctatactgcttgactgaacaggatactgggcccttacgatagcaaaacc

SEQ ID NO: 41714 - DNA, 396 bp, Glycine max
  unsure (1)..(396): unsure at all n locations
tgccgccacggagttntccgactatgctctngtgatgtggaacttgctacaaaaggagagagcaagaaatgaagagccaatggttgatacatggacggagatgaaaaagatcatgaggaagcggtatgtgccggctagttactcaagggacttgaaattcaagctccaaaaactaacccaaggcaacaagggggttgaggagtatttcaaggaaatggatgtgctcatgattcaagcaaatattgaagaagatgaggaggtaactatggctcgatttcttaatggtttgactaatgatatccgtgatattgttgagctgcaggagtttgttgaaatggatgatttgcttcacaaagcaatccaagtggagcaacaattaaaaaggaagggagtggc

SEQ ID NO: 41715 - DNA, 401 bp, Glycine max
agctcttgagaatatccttaataattgtgacattatccatttatggttccccaaagaagatagtatcatcagcaaattgtagtatgttgactgggatctttttctttcccaccataaaattgtggtagtagtttttggaaaatactgccctcatcatgcctgtcaagccttcagcaactaggtcaaacaaaaagggagccaatggatccccttgtctcaagcctatttgaggtttaaattcagaagtaggacttccattcactagtatagatattgatgctaatgaaagacaccccttaatccagccaatccacttttcattaaaccccattcttctcatcatgtaaaagaggaaatgccaagacacagagtcatgctttttcaaaatcaactttgaacac

SEQ ID NO: 41716 - DNA, 337 bp, Glycine max
cctttttgcaacggcaacattcttaagcagtgaatcttcaggaggccccaagagggcctgtatgctagttgcaccctcctttttactaaagacaccccccttttgtattctatctgaagccttaactcctatcgacacgaaactttaccaactccccatcaaaacttactcgggcttccgcaaagttatgaaccctgacgactcatgtatggactgtttgttcgcatccgcacaagttacgagatattaccgatcgcgcacaaggccctcactttgacttccgccaccatcctgcattgcacggatcggacaagcccgtcttcttttgatctctgag

SEQ ID NO: 41717 - DNA, 248 bp, Glycine max
agcttgatgttgaatccagaagatgttgagttatacatgttcgctaagcacaccactttatctcactaagcgcatagcttcagttcatccgctaagcgagaaatgtgcgctaagccaaaaatcactaacgtgtgctaaggcggccataagtgcgctaagcgcatgagcacaaacaaggccacctatttaagcctgaaatcagattttagaaggatattttggactgggattcagagctttgcatgtct

SEQ ID NO: 41718 - DNA, 352 bp, Glycine max
  unsure (1)..(352): unsure at all n locations
tatgcgcatatngccttactaacgttctcttgcactagacanccgatcaactaagaaaaatgcacccatatacaatcaagggagcttcattacctagattatttacatgtacttccaaagcgtatttgttatttacatcacacacacctccttggctgaatttacatacatacatactcaaagcattttggggtaccaaaaactgcacatgcgctcatcttggtatttctaatacccatacatatacaaacttcacgatgaatcttgactacctacacaataaagtgctacatttcatgctttttttatttttcaagtttttgctacctacaaccacatgcaaattcaagca

SEQ ID NO: 41719 - DNA, 336 bp, Glycine max
  unsure (1)..(336): unsure at all n locations
agctntgtttgttactccgagactgttaatcgatagatgcagcttgcacaatttttcgtttgatggcctgttttgttgcttcagcaactcgctcagcttctaataaagcatcaacagaaccttcttgaattgaccttatattggcaggatcaacctggtaataaacaaccaacatcaacacaacttttaccatgagctatggaataattcaattcacacatagcacaaagagcacacaattgaaaattctctacttgcaagtaacctttcccaggatataataatgcttcctctggttcctttctcaattaaacaaagatcttgagaaaacttgat

SEQ ID NO: 41720 - DNA, 341 bp, Glycine max
gtgagccaattcaaactataataactttttacttttatatccgagagagtcccgcaatataacgagacgctcgaaattgaatgttgaagctccgagccaattcaaacgacaataactttttactcggatgtctgattgagtcccgtgatatatcgagacgctcgacattgaatgtgtgaatctctgagcaaatgcaaacgacaataactttttactgggatgtctgattgagtcccataacatatcgagacgctcgaaattgaatgttgaacctctgagccgattcaaacgacaataaatttttactcggatgtctgattgagtcccgtaatatatcgaga

SEQ ID NO: 41721 - DNA, 492 bp, Glycine max
  unsure (1)..(492): unsure at all n locations
cggacgaacaggaattganccctggattgcaacctcgagnncttgagatcctcgaacgacnccgggaaaccagaggcaccagccgttttgaagccngattgagagaccagaagagttgtgtgcnaacagggcgcnaaacacagccccatatcccactaagcgcatagccccagcgcatccgctcagcgagaaatgggcgctaagccaaaaatcactaacgtgtgctaagcgggccataagtgcgctaagcgcatgagcacaaactaggccacctatttaagcctgagatcagatcttaaaacgatatcttggaccgggattcacagccttgcatgtctagggtttctagagagagaaaagtccacagtctacaaagtcttgggagatattgctttgcaaagatctgcagagaccacagcttgaagcacgagccagcttgagagcgttggatgagttcttggtgattggagatcctcaaagtgaagagacatg

SEQ ID NO: 41722 - DNA, 444 bp, Glycine max
  unsure (1)..(444): unsure at all n locations
ctcaagcttggtgcatatgaattatatgttgcagcttaaaggattatgttagattatagattattataccctattgtactaggctaatgttcttcttttatttttctgtatctactatgttctgagttttctgtagaaagctttctttgcaagctaaggttgatatatataagagaagctcattgtccagaaaacactaaagcatttcatccaaaaatatatctcattattttctactaaaatcattatcataatttagatttattaaatttataatagcattcacatatatcatgtaaaaagatttatagttaaaggtagttttttatgatgaatagctattgtaatactatccttcaaaaaagctattataaatctataatactatatctattattggggggaaacagctntcggtgattgtattacaatatgtcaatattc

SEQ ID NO: 41723 - DNA, 415 bp, Glycine max
agcttctcaaggaggtgagcttagtttttataggggtgtgtgtagctaagctctatcttctcaaggaagttttctcaaagaagcttctcaaggaagctacctagtctataaatagaaacatgtgtaacacttgttgtaactttgatgaatgagagtcttgtgagacatacttcaaagttccacttctctccctactttattccttcaatttcgtgctcccccctctctctttctctccctctttcttttcctccattgaagcatccttccaagcttcttatccaaagctcatcttggtggtgaagctccttcttccatggcttattccctagtggatggcgcctcctctcacctcttctcctttgtcttccgctgcatctccatggtggaaaatcaccattaacggacctcattg

SEQ ID NO: 41724 - DNA, 448 bp, Glycine max
  unsure (1)..(448): unsure at all n locations
ttcgaggtacttacccgttgaagatcgaagaattatgaagatttattgaagaacgtcgaagaacggttcanacctttgcgagattcctcacggaaaacgttacggaaacgtttcggaagcgcctcggcttagattttcttcacggaaacaatttttccaagcaaattcgaaagagagagaagtgcctaaggggctggaccccttccttcttcatttcctcccctatttatagcaaaataggggaggtggttgccgcccagctcgcccaggcgagcagggttgcttcctccagaagcaaccgccttctggaggaatcttctggagggcccaaatgggcctgggtgctatttgcacccccatttttactaagtacacccccctctgctggtttttggtgattcctttntcgtaaagttacggaaacttacgaatttcgtaacgatacttg

SEQ ID NO: 41725 - DNA, 464 bp, Glycine max
  unsure (1)..(464): unsure at all n locations
aggatggnnagnntttgaaccttgaatgacncgtagaanactgagacctgggaaccagcgtagaaagaagcagcngacgttttgagcccatcttttctctgccnggatgtgcctcgatagaggcagcatgcgccttttccttctgaagagccgtattgtgcttatcccgctccatcttgcgagctacagcatctgcagagccttctggattagcccatgtttagacagactaaactgggctcaaacatccaccatcggcacgggacttaccaagagccctggaataaggaaattctaacatagcgcaaagagcacacgattgaatattttctcattggaagagtcttgccacgataatatagcgctttctatgttcgcattctctattcacaaagaagtgagaggactagaagatgggcatggagcgctccctaaagagaaagaagaactgttgttactccgcn

SEQ ID NO: 41726 - DNA, 450 bp, Glycine max
actccgcttaccacttccgactaacttccgctggagctcatatccctcttgtgcttgttctggtacgtataatttttcaaaaaattgctgtctggttttttgtttgcatatcctgtttttaactggcatgttcttttcttctgtaactgcaaaaaaatatttacttgttgagtggcttctaactttaataatctttaacaatttttaattaaggaatgatgcccattgctgattgcatgaacaaatgaattggaatccttccaatcctttgaataacttctcatgctatcatgcatgaggaatatagtgcaattttattcatatgccgacatatataaattcttgacccaatcaagtatgttattaacttattatctattagtatgaagttctggtttgaatgttacatttcatgtagaagagggtggatctgagtatcccagacacatg

SEQ ID NO: 41727 - DNA, 397 bp, Glycine max
agcttgaatcggacatccgtgtgattatttatgaccattttattttctcaagagctttctttgtgcaatttcgagcttctcgatatgtgatatgcctgaatcggacatccgtgtgaaaagatataccagttgaatttctcaagagcttccgttgttcaattttgagcgccttaatatgtgattggcctgaatcggacatccgtgtgaaaagttatgaccatttgatattttcaagaccttccgttggtcaatttcgagcctctcgactttttatgcgaccgaatccgacattcgtgtgaaaagttatggccatttgaatttctcgagagattccgatgttaaatttctagcgtgtcgatatattataagcacgaatcggacattcgtgtgaaaagtt

SEQ ID NO: 41728 - DNA, 430 bp, Glycine max
ctcagcttaaatgcagctccttgctgtacagtgctttgtggcacttttttgcctaagaggaactataaggcggagaaaatctcgtgttcgatgggcatggatcattcgaagactcctgctagctcgagtgaccggatactgcacacacataaactggaagaactgccctcatgccctaggtgtggggtatcacggtacatacacaaggatgatgatgagtgctgaagagaagaagactcatagaagggccccctacctacggtgatgcggactcattcacttgtgccaatgtttatacgtctctatgcttatggatacgatgctatagacatcttacatggcatgcacatgagagcaactgcgatggaatggtcctgcatccggatgatcgctcctagaggacaaggatatatcatttgtattcgaattt

SEQ ID NO: 41729 - DNA, 385 bp, Glycine max
acggatgcccgaaagttagaaatatattatacgctccaaattgagcaaccggagctctatagaaaagtcaacggatcgtaactatgtcacacaggaagtcctattcttggacataactcatcgaggacgctcgataattgcacaacacgggcctcatcatgcatgcgaatgctcctaacattacgctaagattagcgagggcgggacgtaacatatcgagacgctctatattgagcaacgaaagctatcgacgactttgaatggccataacttatcacacggatgttggaagacgggacataactcatccagacgctctataatgaacaaccgaaactctctagaagttcgagatgacatgacaatacacacagatgtgctattt

SEQ ID NO: 41730 - DNA, 432 bp, Glycine max
  unsure (1)..(432): unsure at all n locations
tgccacccagctcgcccaggcgagctcagctagctttgtcgagcttggttgcttcctccacacgcaacagccttctggaggaatcttctggaggccccaagtgggcctggttgctatttgcacccgcatttttactaagtacaccccccttttctatttttttgtaactctttttccgtaacgttacgaaactttacgaacttcgtaacgatacttattttttcttccgcaaggttatgaacccttacgacttatgtatttactcttttttagctttcgaagaagttacggaaacttacggattgcgcanaaacacctctttttgacttccgccacattacggaatntcacggatcgcacaagcctgcttncttttgatttctgagacgntctcgaacttcatttatngcatgtcatcaagtaataagcccg

SEQ ID NO: 41731 - DNA, 418 bp, Glycine max
  unsure (1)..(418): unsure at all n locations
agcttcaacatctttatcccttccagtttgctggaactacttttcatggacttgatggggcctatgcaagttgaaagccttggaggaaagaggtatgcctatgttgttgtggatgatttctccagatttacctgtgtcaactttatcagagagaaatcagacacctttgaagtattcaaagagttgagtctaagacttcaaagagaaaaagactgtgtcatcaatagaattaggagtgaccatggcagagagtttgaaaacagcaagtttactgaattctgcacatctgaaggcatcactcatgagttctctgcagccatcacaccacaacaaaatggcatagttgaaaggaanaacatgactttgcaagaagctgctagggtcatgcttcatgccaaagaacttccctataatatct

SEQ ID NO: 41732 - DNA, 351 bp, Glycine max
  unsure (1)..(351): unsure at all n locations
tgagatgaggaagtgtataaaggtgtatcttctgcttttattcgntgaccacagagtggtacctgnagatatgtcgcgggggtcaggagaccttggggacgtcaggcggggtgctattgcccaaaaccaagcttgaccaatcccgacccaacccgggcatagtcagtcagtgagaacctgtgatgtacctaaacaggcgagctcctgacagtcaacagataaaagaaacaaagaccacaaagcaaggaggcttgtggtggctggccagctgtgaattttgtgtgatatatggttgtggcctctggtaatcgattaccaagggtgggtaatcgattacaaggcttaaaaatg

SEQ ID NO: 41733 - DNA, 325 bp, Glycine max
aaacagaaattacggcggaaaaattaactaaacccggaataatatatatagttgtggacatttatttatctatatggttattcaaaacttgacatataaaaaatatttatctatcaccattggtgtaatttatttgtctaagaacttcacagcaactgcaagagaatggctctggtggtgggggccaagaacaaagtgacctcacatcttggttatttggtggctgagtgtgattctgttgcggaggatcaacgttattaccaactgctccttctccaaatgaaaatatgtcatggccatgtatgaagaatcgatcaccttggac

SEQ ID NO: 41734 - DNA, 406 bp, Glycine max
  unsure (1)..(406): unsure at all n locations
tanaaggagaatttaaccattattatcttataaaatttcgagatattnnntatnccaacttcaatccataactaccttttgactttgctaatttcttgtaaaaactttaaaagattttctaaattatcaattatagaaaatcaagatcttaaaacctataattatcaatttttgtcagatagaggattttagtaggtattaatcctttttataaccattacttaaatattaattaatcctagaaatttttcctattaaatttaattacaatttaatctttaattattaattatttatttattaatcctgtataaatcatatgtcttttatgagacattagttctaacttttctaccatctcacttatattcagttaaaagaaactaaagcagaatttagtatcttt

SEQ ID NO: 41735 - DNA, 394 bp, Glycine max
agcttacccttttgggaggatttttaggttctggagaggatcaataacaatgcctatacgttggaccttccagaagagtatggagtcaacaccacttttaacatttctgatttaactccttttgcaggtggagctgatattgaggaggaggaactaatagatttgaggtcaaatcctcttcaaagggaaggggatgatgcaatcctccctatgaagggaccaatcactagaaccatgagccttacggtagatttctgagcccatgggccaaggttgggtccaattatctttgtacatattagactaggatgtcattatatttggtccttgtatttagggctccatattgtaagtagggtaccctagaaatataggatttttcagcccttgtatt

SEQ ID NO: 41736 - DNA, 437 bp, Glycine max
  unsure (1)..(437): unsure at all n locations
nttatgtttagacactggggngaattttctaatatatatacattagtgagataagaaaaaaagagaaagagaaaaagtaatttttttaattatctagatcccactcttcatttaatgaatcttaagattaaattgataaaattttcaagaatgtatgtatagtgttgtaggtaggcgggtaccatagttggagactctccccgcatgccaaagttgacaaaagaaaataccccccttttcatgaacagcgctcacaataggtttccaagcttccagctgttctcttgtccagatgccaggtgtattagggtatctttggccaacgtacaaaacggccacacgtataatgaaacaaaatactaaagcattagtacaagataatctttgtgtggacaaaatcagatccaatttctagacgtgttcagattaattacccc

SEQ ID NO: 41737 - DNA, 402 bp, Glycine max
  unsure (1)..(402): unsure at all n locations
agctcncagtgttttatatagggctttatgtcttcatacttttctctctagcacaggcttttctgtttatcttggtgatactcctgtctcatggcgttctaagaaataacccattgtttctcgtagttcatctgaagctgaatatcgtgctctcgccaccacaacttgtgagcttcaatggctcacttatctcctcaatgatctgcatgtttctgctaaacaaccagctctcctctattgagataatcagtccgctttgcaaatcgcagccaatcaagtattccatgaacgtacatagcacatagatattgattgccatctagttagagagaaagttcaatctggtctgattaattacttcctgttgctgctccacaatagcttgcccacatctttacgaag

SEQ ID NO: 41738 - DNA, 433 bp, Glycine max
  unsure (1)..(433): unsure at all n locations
tataatattntntgcctatgaaaattgatcganatttttttttgcccctactaaaaaaaattctggatctaccaatgcttatgactttagtctagcccaatacttaccttgaaggttattatttgaaccaaagttaaattcaaattgcaatcaagtaattgaatacgaatgattaatgtactgaaattaaaattaaattgttcaagttcttactgaattcagtctttggtggaaacaattcttagttagactttacttacctcctgaacgaactctagattagtctaaactccttcctcctgatgaaccacagggttaagaaaaataaaataaaaaaattagagcacctataaaaaaaaatgagtatgatatttattacccttaaataaaattcanaaaaatgtgtaacaaaaatttagtgtctactcggaaa

SEQ ID NO: 41739 - DNA, 411 bp, Glycine max
  unsure (1)..(411): unsure at all n locations
agcttgctagtgtgtgtttaaatgtttataataaaaganaatttatgtgataatgtttctttgaagaaaattttatcagcgaaaataaaatattttgaatatgaattctgtagtatttttttaattagattaagtcggtgttaatgactcatcagtgtgtcactaattcatgaacgtttcaactttcatttaaaaaaattagtagatcatatctattcgaagaaagtattttgagtatgaaacttattgtaatatgaagttgtagtattttttcaatgagattacgttcattgttttgtgttaaaaattgataagcgttcaagtcgaaagtgctatttgatgatgttctgctggttcttgatcatattcaatttaatatatttgtagtaattctcgaattacctattttca

SEQ ID NO: 41740 - DNA, 434 bp, Glycine max
  unsure (1)..(434): unsure at all n locations
tctagagaagcctttcaggaagctgctaaatattctctctttgaagnngcgcaagaaaggtacctaaacctatttcagtaaaatcgctctcccggattcattaaccgttggatcatcttaaatttttttttctggaggttcctaggacaactgtccacagcttgatcgttgccatttgcaacataacatctggagtgtgagatatgatattttttaccgaagcagaaaatttgagtgttgcaggctttaaattacgtgcaacaacggaaaatagccacttcttcattcttctcttcctctaaaccctccccaacgcccccaagcttcttctccaccacccacgaccaccggtggccaccgcgagctgccgtttgttgtcgttgcactcccacaccaagaggaacacattaatcaaaatgggatcttcaaacata

SEQ ID NO: 41741 - DNA, 260 bp, Glycine max
gaactagtgccgttcctgagtatgagagacaccgctttaagagcgctgtacaccagcagcgctttgacgccatcaagggatggtcggaactccgggagcgaggcgtacatctcaaggacgacgagtccactgaccttcatgacgaaagacggcgccctcagaggacatcactggatactcccatggtgacgtgggatccggaaatagaacatgacatttatgccaatgctggtggatcaactgacggcgtgcgtgacatg

SEQ ID NO: 41742 - DNA, 292 bp, Glycine max
gaccctgctaaagacttgagaaaactccaaaagattttcttctttatccattattgaatatcaagatcctaaaacctatcataatgaattattgtcagatagaggattgataaagagtataatcctttttataaccgttgcgttaaatattgcactatccgagaaaatgctcctatgaagctcaattacgatagggcctttacttatcaaatacttattcatgaagcctgtataaatcatacgtcctctatgagacattaaatctaactctactacgatgtcacttacattc

SEQ ID NO: 41743 - DNA, 375 bp, Glycine max
agcttgtatttattttattggatatttttcctgttccattaagcttttgatgtctttagaggatacttcctcgttgacatcttttgtcttgaatggaattgccatgacaggtttattgttactgtctttgatatttggtagttgatattgtgttgtgggaggtaattccgattggattaactcaccatccttcacttgccagtttgttatgacatttgttgttggatcacctatgatgtcttgtttccaagggtaatctatatcctttctgatggcataaacatgaaaccaatcaaagaaaaggacattaaatttgactctctcgacaaattcgtaaaacttgtcttggacttgttttctgtttgtacccttgta

SEQ ID NO: 41744 - DNA, 493 bp, Glycine max
  unsure (1)..(493): unsure at all n locations
tggatgcgacagggnattgaaactttggagtgcnncntttgacgacttgagaccttcgtaganccacgcgngcctcaaagaggaccaggagttcttggcggcctaaggaacnagaccgttcctgagcangacggacaccgcnggaagagcgccgaacaccagcagacgctcgaggccaacaagggacggaaggaactccgggagcgacgcggacagctcaaggacgacgagactactgatctccaggagtgaagacggcgccgacggaggacattactggatacttacatggtcaagtgggatccggaaatagaacatgagatttatgccaatgctgggtggacaaatgagggcgtgcgtgacatgagatcctgagccacgggtcattggaccccgtttgatgccgacgctttagggcagctcctgagatgttcacagtagaagaaagagggcgagtaacgctagtatggacagaagaggaagcgagctgagn

SEQ ID NO: 41745 - DNA, 448 bp, Glycine max
actcagcttgtcctagatctctcttattgaactagacttagatcatacaactttattgtaacaacatatttaaaaccaaaacttaatccgcagatctctcttgtaagactaagtttcaattctgcttcattcaagttctaaggcagcaatacatttcccaatgctaaaatcacctaaccaggcacacaaatggttgatcagaccaagagcatacaaaatttaagcactgaaagaagcattgaacacaagaaacacaatcaattagatattaaaataattacatcagttgttctttagaaatccccaacaagggtgtttagcaagccattacaaaaaaatccctaacaataatgagattgcaaaacctacgtatctctgcaaaagttgctccttttgctgcctccagagctcttttcccgaaataagcattgtggtgtgctctggaatg

SEQ ID NO: 41746 - DNA, 427 bp, Glycine max
agcttgtaatcgattacacaagtatttttatcgattactatatgagattttcaaataataatttccaagagtcacatctgttcaaattgttttttgaatgaccatcaaaggtctatttatatatgacttggaacacgaatttgcttagagtttttctgaacaaaaagtcttatcttctcaaaaacaaaattgtcttatcctctaaaacattccttggccaaaacacttgcaattcaataaggaattatttgagtgcttcattgtacaatctatctctttcaagagagatttcttcttctcttcttcatacttctgaaaagggattaagagaccgaagatctcttgttgtaaagaaatctgaacacaaaggaagggttgtccttgtgtgtttcagaagttgtaaaggatttgcaagatagtggtactc

SEQ ID NO: 41747 - DNA, 454 bp, Glycine max
  unsure (1)..(454): unsure at all n locations
ctcagcttaggaggaacctgacagggatgctagcctaccattgtagcttcatgacttcttgaatgggaggagggttgcgtatctccagtatgatagtgcatttttcgggattggctccaatcccccgacgtgtgatcattaagctgaggaacttgctgccacctaccacaaaagtacatttttcagggttgaggcccatgttgtatttgcatagttccctgaatacttcctctaggtccaccacatgttggggtatgctttgagacttgacaactatgtcgtccacacatactttgacgtttcatttgatctgttgtttaaagactcggtccattagtcgttggtatgtcgcgcctgcatttttgaggtcgaatggcatgaccttgtagcaaaagttagcatcttcagtgatgaatgtcngtttctcctggtctggagaatgcattctgatctg

SEQ ID NO: 41748 - DNA, 435 bp, Glycine max
gacctttggcatgcaagcttgaaggactcgagaagcttcttttcaatagtttctttcatacttcatatttttttgtttcaaacatgaaatttatttttacctaaaattagttcttcttttgcttattttaattgttgaaatttgttttgcttatgaggtgtttgacaaaatgtttataatagaatcaaggtctttttttgtttaattttttagtttcagtttttgtatattgctccttttttggtataaggcttcactaggttgcatttatgtgtttcatttgaacacgatcttattaagcttgaaggacccgagaagcttattcacaataatttttttcagacttcacaccggtttgtttcaaacatgaaatttatttttacctaaaaaagtcattggtctgtatagatgttcattgttttgcttgcttatgat

SEQ ID NO: 41749 - DNA, 461 bp, Glycine max
  unsure (1)..(461): unsure at all n locations
actctataatactcacagcttgtttaccccatgttngaattgcttacaatagagcttgttatagcactcactaattgttctccttttgaagttgtttatggttttaacccactaactcctcttgatcttttgcctatgcctaatgtttctgtttttaagcataaagaaggtcaagcaaaggcagactatgtgaagaagcttcatgagagagtcaaagatcaaattgagaggaaaaataaaagctatgctaaacaagccaacaaagggagaaagaaggttgtcttcgaacccggagattgggtttgggtgcacatgagaaaagaaaggtttccggaacaaaggaaatcaaagcttcaaccaaggggagatggaccatttcaagtgcttgaaagaatcaatgacaatgcttacaaagttgagctgcccggtgagtataatgttagttccaccttcaatgtctc

SEQ ID NO: 41750 - DNA, 364 bp, Glycine max
ggacagcgagccagacgtgaataactatggagaaaactattgccccaagcctagctgaaccgacctccaaattaaactcaagggaaagaataatctacacataaagagtaatctgatcgtatagacgggatatacataacacatgagtcatagtaccactagattcagggtattagctatgagatgaccatgaacaaacataccaatgtgaagcgcatataggaacaaataaacatgcataactgtctgtaataacaggacaagaaaaagaatgatatgcgtcgaatatatatgactctcataaaggaaactttctatgattatgtgatgcacgctataaatcaaggtgacttgagaaatacta

SEQ ID NO: 41751 - DNA, 135 bp, Glycine max
actgatgcaatcctaccccgcaagagcattggagaggagacgccatcccgagagacccaaagattcaagataaggccctagggttcttatgacccagagggtagatatcgggctcatggactattaaagaacgaa

SEQ ID NO: 41752 - DNA, 384 bp, Glycine max
ctaaaggtatatctagagagagcttgggtagtcgaagagaagttcaagtccatagccatcaaagtttgaaaagagtatgatgaactaagggatgtcaatatggccaccgatgaagccttggaatgagaaaccaagaaggcccgaaaggaataacacgaccaaagccaagttttgaggggctttatagggcatctatattgagctcaagctccgaagaggtgaaaggaatcatcacgggtcaaaggcatgatcttgaaggacgagctgaaggcttgccttatgtcgaaaagaaatttgtcccaacagttaagcgagactgaagggaatatgtgggccgtcatcgatgagtgcaaagagaagctaaatctagcggcgactcacgag

SEQ ID NO: 41753 - DNA, 446 bp, Glycine max
accagctgatgagcccctagggactcatccagttttatcctctttgttagagaagataaatcgcttgggaagtctctatcctcaagcttgagtgaaccactgtagaatgagtcaatccaatgagagagcctctctgagagagaagaaaaatagcttgggaagtctttatcctcaagcttgagtgagccaccatagagtgagtcaattttgtaaacacatccttgtaaccctactatcactttgtatagtggaagaatctccatattggagaattataatcgtttgcccccattactacctttaattactaagtgtctatcttaaacttcacgaagcgggaaagtatgagttttcccaacacaaataaaggcgtatgtcatactcatgtccaccatcacaaattcacaatgtcacataccaagattccagtagcccttcccatcaat

SEQ ID NO: 41754 - DNA, 284 bp, Glycine max
agctcggttcgatgtactcacccgttgtatatcgaagaacgaatgaagaacggcgaagatccgtcgagaaccttcgccaaattcctcgacgaaacgatgccgatacgtgtaggacgcgcctcggcttatatgctcataacggaaacgatctttacgagcaaattcgaaagagagagaagtgcctaaggggctgaactcttttccagctcacttcctcgcctatttatagcgaaataggggagatgcttgccgcacagctcgtctaggcgagcagggatgcttcc

SEQ ID NO: 41755 - DNA, 408 bp, Glycine max
  unsure (1)..(408): unsure at all n locations
ntanatggttgagcaaggtagagacttaaacccaatattaattntcttgggctacagatgatgaaggggacatgttatttagaccctaaaataatctctactacagaacataaccactctacaaataatttcattgtacagaagttgaaacaattttttcttttatgatgtatggacacattttttttcaaaattttcaatgacaaagtgaaagaatgcacatatgaacacatagaagcaaatgaattagtaattaaaactagcaacacacaagaaagcatgttggtaattaaaatcagcaacacgcaaaaatgaattacaatcagaattttttgttctatcttggcatttgccatttctcttctttcgaccatttggtttctcttttgctaaaaactatactaaatc

SEQ ID NO: 41756 - DNA, 416 bp, Glycine max
  unsure (1)..(416): unsure at all n locations
agctntattntgttgtaattntgcattgtttaattnctacatttatcaaagatcccccttcctcttttagtcaaaccatatttcatatttgcaccaaattttttttaccaagatttgtaagatcacaattcacaagccccagagaagaaaagggaaaataaatccttgaaagtttcatttttgacaaatacagttgaagcaaaattgaattacgtaatagttatccttcaaggacatagggagggctatataaacctttcttctgatgttggtgtgaaagtggctttgtgaaaaaggacaaaggcttgttcagcgatcataacattgaagattttgtattcacacgtatgaagagggataataatattggtggtgtctcgattgaaatggagcagggtggagacagagttggacat

SEQ ID NO: 41757 - DNA, 437 bp, Glycine max
  unsure (1)..(437): unsure at all n locations
ntgacctatgataccttatataatatgtgggtaaatacttaaatgtttgaattaggtcaagaacatgtttctcacttcactactagaaataatggttttaacatcgctggcttaacattggttttttttttctaaaactgatgttagcatactcgtaaataatataagctcgtaaacatcaattttttaaaaactgatgttaacgagctcatgttaacaatggttgttcaaaaaccaatgttaacatgagctcgttgacattgattttttaaagaattgatgttgtgttttaacttaattaaaaacccaaaactcgtttcaccctgcgctcactctcccaaacctcctttcactagagcagctgatgactctcaccactatgagttgagactgtcctccttggaaactgtcgtcactcatgactctcaccactctca

SEQ ID NO: 41758 - DNA, 408 bp, Glycine max
agcttcaggtcatgttgcctctaaattgtcattttcatcatgggtccttgtttagaacttgtgttgcttctattcaataagtgcttggtttttctactaggtcacttctttttaattatttaggtgttcctctttgtgtgggaaaaccaaaatctgcaattcttcaacctatagttgatagaattagaaccaaactagtgaattggaatggaagccttctttctttgatggggaaagagtccaagtagtaaaatctgtgatacaaggaatgcttctttattcctttcgtgtgtatccttggccgatttccatttgaataacaaaactagtttatgaaaatcttttgattttagttttgactttccttacttagagtatgtgttgcttttgaataataaaactatttta

SEQ ID NO: 41759 - DNA, 441 bp, Glycine max
  unsure (1)..(441): unsure at all n locations
ggacctatgaaactcagcttagcgatcatgccgccgcttagctttttcagatttttttgaaattggcttagcttagccttggccagcttagcggacccaatcagcttgagatgcaagggttgagtgctaagtgctagagactctcggcttagcacatgaccaaagatgcacttagcgcgaggcttgtgcttagcgacaggactgtttttcagaaaaaaaaatttgtaagttatttttcagtcccttccttaagaaattgaaacccttatatctatcattcaaaaacaagataatatactccaatgtactgattataaagcaagttccacatgatacgatgcatgaaaaacaaagataacagaaattaaaactgggttgcctcccgggaagcgcttctttaacgtcattagctggatgctnttacctcaatggcgatatcat

SEQ ID NO: 41760 - DNA, 413 bp, Glycine max
  unsure (1)..(413): unsure at all n locations
agcttataccactatattcatgtntttggcgtccccaaaataatgactggtttaatagtaatgattcaaataacaaaaaccatggtaaatttttttttcttctttttccttttcatttctttctcttttcacaataattagattcagaaggaaaatcctcactatagagtcctgaatggccagttcacaactctattcggagtcatttctttcttatcactcgtaatctctaaactattttgttgtttcaaaaggaagagtataccagccattactttaggtcgtcacgtgaaaataataaaataaaatacggtcggtaaactcttttgcaaataaagtttgctaatactttcttttcaaataacaagattaaacataagtacattcatcatttaaagctgtccaaaatatgg

SEQ ID NO: 41761 - DNA, 429 bp, Glycine max
  unsure (1)..(429): unsure at all n locations
ntagaagataaaactattaatctgataaaaaaaacttttaattcagatgattntacaagtataagactattcaagtaaaaaataaaaaaatacctttccaagatgaggtgccattccaggagttgagaagcatttgtcaactttaagcttatttttaccacctataagtgtatatatatatatatatatatattagataaggataatgtagtttagaaactttatattcttggcatgaaaaggaaaaattatagttgctaaggcaccaaagacatgtttaaaatatcccctgcacagttgagtgacactcaaagtgtctcttgagcacattaacaacaaaactaatgtcacagaaggagacgaatatgcagctaacaaaataagaaaagcaagaataaaaccaagaagggcaggggcaatatgcatatg

SEQ ID NO: 41762 - DNA, 409 bp, Glycine max
agctggtatcttttatccctgctatttatataactatagattcttttagttaaaaaaaatatcttatcacgtgattttgaacatcatagaaggctaggatatttaatgggttacttttgcatttgacttactatctttttttcttgtcagctatatataatgggatcaggtataagttataaccacaccaacaacagaattacattgtcatatttacttcctaaacattaaaaaaggttaagagtatttatacaagaatcgttagtaaacaccagataacccaagtaaagcaataaagcaaaacagtaccaaagtacaagactaattatcaagctacatccaagtacctattacatatttcacaacataatatagctcgcacgtgaatagctgaccaaaagagagaagt

SEQ ID NO: 41763 - DNA, 691 bp, Glycine max
  unsure (1)..(691): unsure at all n locations
acgggnnnnnnnnccccggnnnnncnngnaatttgaaaacccttttgattgantnactnctagtactatntcgnagnnngacactagtcnngaataaactcannagctgtgggttaaanataccagaggggcatcnctctgtctttttatatagnngctttagtgtacaatatacaaaaacaatacaccagaaatggagattactcattatgcgatgtttatgtcattaacaccacactagtgactcgatgggtctatatggttggtagtgcatttcacncagaacnccactagcannaaagtatgagaagtaattacaanagtagagtatgggtcacngtgaccatttgtatagatggaattaacccaaagtgggatanngtcantactannataatatnntaaagttgggttcaacgccaaaccattagcatcgccttgtaatcatggntctttaaagccccgcgctttaactaaatgttccacacttcgcaatgcatttcacagtatatagccaccaccttcatagcnnctctgcnntatgaacnnatcaatataanannaaataattgggaatatttaaaaagtgggtattgaagattaaccatctannnacatcacncgagtcagaaaataaacccattaataaaatgactaaatctttatcttcaatccaacttaggagttcctg

SEQ ID NO: 41764 - DNA, 506 bp, Glycine max
  unsure (1)..(506): unsure at all n locations
agggaacggaaagannntttgaaaccttggaattgcncncttttgannacttgagaacttcgcacagccaccggngatgctctacaggcgaccngcatgtatgcaagctggatattcgcgcggctgggagtatanatgacaagcgngcgcgatatgcgaggatgatattccgagtactttggatacggtacgaccatgccctcctgactatcagctgggacaatggcgagtggaggaacactacgccatatacgcgacgagcataatgaacaccttcacggtcgtaaaagccctagagtggggcccatgctgcaaagctcatccttgagtgaagatttgaggctgacgcttttgaactataatacaaagagcgctctacatgagggactggtctctagacactctcaagagaaaagatggtgactcctgtttgctgatacgcagatccgacgaataggccccccaatgtacacatacctgtgagccagctagttacgcctagagcg

SEQ ID NO: 41765 - DNA, 422 bp, Glycine max
  unsure (1)..(422): unsure at all n locations
tgagttcacagttgctgtcccataaagtctctgtgtactagnnnaggccccattcttcttttcgagccctcttcgtttctcattccaacgcttcagccatggccacgttgacatccctcaactcgtcacattcctttctaactctaatggttgttgtcttgaacttttccttgactacttgtgttcttttcagttccacttttaaggcttgcatcccttcgctctccacaaggacctcaacctcttcctcacttgaaacctttagcattgggtgccaagttatctcttgcgtccgagccttcagccacttgtgatagccgccgacgatcccattgtcgcttcctccaagctccttatcctttctttgcaccgcattccatgctttttggactctttgaagcattcttgcattggggtcactg

SEQ ID NO: 41766 - DNA, 299 bp, Glycine max
  unsure (1)..(299): unsure at all n locations
cttgcaagcttccttatatataaggangaattattnctgtcttcctaaaaaaaaaaaagagtaagtttttttattaagacgtatctattcgtttttaaatataaggtatccaatgcgcctctttgaaaaatgtccaatacctttgcatttttataagtattcaacttaagtgtcccaagctccttttttgaatatactcgttgatgtgcccataaaataagaaagaaaatacgcataaactagtaaaaattaattaattcagctataactaagtgaaaatcagcatacttggtgtatgt

SEQ ID NO: 41767 - DNA, 369 bp, Glycine max
  unsure (1)..(369): unsure at all n locations
agtatccaacggctgtttattctgatgttctgagcttaagnagnnagactatcacaccttagtctttgtcatctttgagtaacttttcaatttgagcctcattaaaaggatccctatacagttgtatgagcatgaaatcataggagaagttgtacaagatgttggtcttgttttgcaagggttctcgtgagcaaaccaatttgagaaggagtgtcccacagaggttatagaagcctataaaaaatattgctttgtggttcccattcttagagtggtggtcattgaaggatgatacatcccgtcccttctccaaccgccttatctgttcgcataccacccgtaaaataggacaatcaccatactcatgtt

SEQ ID NO: 41768 - DNA, 454 bp, Glycine max
  unsure (1)..(454): unsure at all n locations
actccgctttagattacggggggccaattcatatcgggctcttcatggntgttctctactgtagaggcattcattgctggcttatcaacctgagttattccaatgtctctgtagacacttttcaaaatcttccttcatagtttaaaccaaatcaatttgccaaatgtactaaactacaatatagttttttttttaacccaatgatgatggtgataataaggaatgtatgtaaacaatgttcagtgtcatatatagttctttatttttggcttgcctcactccacgttagagttgttgtagttgtctagctagttagtagcattttcatttcaccgacagaaaataatgctagtatcataatgtatgcatattgactntgggtggccacttgctcagtgcatcttggttatgtgacttgttagaagttaacactagtctctatcatcgctaatgg

SEQ ID NO: 41769 - DNA, 421 bp, Glycine max
  unsure (1)..(421): unsure at all n locations
agcttcttgataagtgcccatacgaatgatatngnagatttttcgattcgnnnttggatggnggctagatttgttttgattaggatttgaggtcttgtgtttagatttgttgcagaattgcaagtttaatgagttggatttgtggtttctaccatggtcccaaggtgtttgagatctatcctctttgaagaaagtaactctgttgttgagtttggttatttcttcttgtttctcagcttttgttgattgtttggtgttcaactttcatgcatttgttgtggatgttccactttgtttatggatggttgctagccttgttttgatcagggtttgaggttgtgtttggatttgttgcggaattacaagtttgatgagttggatttgtggtttctaccatgctcttaaggtgtttgagatctat

SEQ ID NO: 41770 - DNA, 451 bp, Glycine max
  unsure (1)..(451): unsure at all n locations
tgagctcggcttgagttgaatacgtaaagcttgagttgacatatgtttttnttaaggctctgctcgacttacataaaagtctgacttacgagcctatttaaaagcttgcttaaagacgtcttttattaattaattattttaaaacctagtgaaatactaactaaaaaaagaaacttataaaatttcgtataaataatgtacaaatctaaaaataattgataaacaaaattatattgaattcaagtcgttaaagcacaaagtatataaaaaaaataaaaatagcataatattaaaaaatgtatggattagagatgatttacactaatatagccaaacaaaaattattattagttaaattaacaatttttaatccaatttttttaatatataattatattatatattnttaaaaaaaatatatccacaataatttcatcttagtctactcaag

SEQ ID NO: 41771 - DNA, 395 bp, Glycine max
  unsure (1)..(395): unsure at all n locations
agcttgaatgacaatcaactcatggttcttcgaacagatctgtagaanggaggatcggcgaacagcgctctgccatcaattctccgggctccgaactcattgctggatgatgcatgaatgacaatcatctcatggagctccgaataaaagtcgctaatggaggaaatgcgatcagcactaagcgatcaacccgcggggctgactcctcgatgggggaagatgcatcaatgacaatcaattcatggagctccgaaaaaaagatgagaacggtggttatgcaaacagcgccaggcattcactatgagaagctgaaactttacttgcgatgaagcttcaatgacctataattcattgggctccgaatcaatgaggaaaagggaagatgagctaacaac

SEQ ID NO: 41772 - DNA, 437 bp, Glycine max
  unsure (1)..(437): unsure at all n locations
ctcaagctnttcctctcatatagatttctagaagctnttggggcttataaggatgtctcctattgaggtcgnagatcttttctcanatacatgaattgacagttggggaattcccatgcacattctagtgaattcacaattttagtttaattcttaattntacatatacttatttatttttatttttattttaattaattaaattattttttgattgtatcttaaataaatatgttggctaggtccagagtttaattgaaccaaaatataaaaaaaatgtgtacaaaattaataattaacaaaaattatagattttctaatatttatgaacaaaaattatgaaagaaaatatatagaaagactgaattcataaataaaaaatgaaagaaaactaaaattataatttagtcaaatatttataggtgattaatatgcat

SEQ ID NO: 41773 - DNA, 423 bp, Glycine max
agcttaggtcattatgtgatgaaatttaatggcacttttggtaaaggtcttaactcttcatggaatcattcttattttaatctttgcattattgacctgtcttaatgattatgcaatctactaggctgaaattctagagaaaagaagcatggaagcaaagatggccgagttgagtaatctggttacaaagaacactaccaaaaaggactgcactcaaacaaataaccaagtaagatgccttttgaaactggctattcatttgttcattccttcctgagtaaaatagacatttttcacttttaatttataaattttggactttggttggtgctaaggtgtcacagaaactcgaagatgacctaaaactatgtaaaggtgagctgcgtgtaactgaagaaactatcaaaagcttgagaagtgata

SEQ ID NO: 41774 - DNA, 435 bp, Glycine max
  unsure (1)..(435): unsure at all n locations
actcagcttgacaatgaaagcagtcactaagttcttgtttattagtttccagtaatnggnnggccaatttggcataaaattcaattatcatgttttgctataagtttcaaattgtccttacttgtttggtgaattaatttgggagtttctagtcaaagatctctaagtttaaaataatagtatataaattctattagagcaactttgacctatcttacttcaacttcctcattgagaataaagaaattaatatgacagccatatatacttacattgcacttataaccagcattgcttacatgagaaaaaagggatcccgatgggcattttgcaggtccttaaaaaacggaccctaacatcacgtcaatgagaatttcaatattaaaattgatcttataatttcactaaggtcttagtaaatctgagcaattaacc

SEQ ID NO: 41775 - DNA, 384 bp, Glycine max
tcttaacggagtatccgttgttggttgcatatgctgaagcgaatagaatggaagaattttggcagttgcttgagcagatgcagaagttgggttttcctgttattgctgatctctccaaattcttctctgttttggtggagaagaagggaccgataatggcattagagacatttggccaattgaaagaaaagggtcatgttagtggtgaaatatataatatttttatggattctcttcacaagattggtgaggtgaagaaagcgttatcactatttgatgaaatgaaaggcttaagcttgaaacctgactcatttacgtattgtactgcgattctgtgccttgttgaccttggagaaattaaagaggcatgtgcatgtcataata

SEQ ID NO: 41776 - DNA, 450 bp, Glycine max
  unsure (1)..(450): unsure at all n locations
tctagccaaatggacttaccttgacttaattcctttgttagcccttttgagccttgtttccctttccttgttttgaagctcactacaagccttaagtgaaaaaccatgatatcaccatatccttaaggaattttggagctttggaattgttttgggaataagtgaggggggtttttgtttcattggataacatgttttgttggccatgcttcatgatatattttgagccatacttgatatacattgcatattggttaaatgttggacatgctgaatatgatgctgtttctcaaaaggctacaaagcaaaaaaaaaaaaaaaatcgaaaaagaaaaagaaaaacagtaaagttgagtgaatgaataagaaaagaatgatgagactcttggttctactctntatgtttanaatttatctttacttctttntattttcttatgttttcttaaa

SEQ ID NO: 41777 - DNA, 403 bp, Glycine max
  unsure (1)..(403): unsure at all n locations
agctcgaaataatcagagnngnnnatttacttcactttaacacatacaacctctttccttttgggcctagccagttgctggtaagtctgaaataaaatcaaaattgctatatacacttaccttttttatacatacatttttttttcattttggacctagcccattttgtgaagtcaaaataagatcaatactactagcttcacccctttcttcatgtttgcacccttgccaccaaggctgctgaccaggcccaccatgttagcattttgtcagtgttgtctaagtcaaagccaacttatgaccttgacttaaaaaataaataaataaattataataataagtaggtaaatatataagcggttctttagcttattttattctttcagctggctctattattgtc

SEQ ID NO: 41778 - DNA, 440 bp, Glycine max
  unsure (1)..(440): unsure at all n locations
tgtgccttcggtaagcttgatacatttcttaacactttgatgtttgatgttgngactgcaatttaaaaccatgatatgtagttagcttattcaaaatagcacgctgggggaatgtagggccgccatgtcatttttctcttcaaagctgagagatccaaaagtcgtgccatgctaaactagaaggtcctcagcttcaaaacaggggatgataatctgaatgattttcgcagctatagcaggggccctttggattgaaccattcaggcagattccatgaatgattttcaataaaatctgctattagagctttcaaagagagaccaatgctgttggaaaggttcaaagaggtcacaataggttgagaccaatgctgttggataggttgccagaagttaatatttttaccatcacccagcatccacgaagagttctgatagatg

SEQ ID NO: 41779 - DNA, 403 bp, Glycine max
gatccttaagcacctgcagcatgcaagctttaaatttaaacgacatactttttactcggatttctgattgagtcccgtaatatatcgacaagctcgaaatagaatcttgatgctctgagcaaattcaaacgacaataactttttactcggatgtctgattgagtcctgtaatatatcgagacgctcgaaattgaatacggaagctctgagcaaattcaaacgacaataactttttactcggatgtctgattgagtcccgtaatatatcgacacgctcgaaatagaatcttgatgctctgagcaaattcaaacgacaataactttttactcggatgtctgattgagtcctgtaatatatcgagacgctcaaaattgaataccgaagctctgagcagattcaaac

SEQ ID NO: 41780 - DNA, 410 bp, Glycine max
  unsure (1)..(410): unsure at all n locations
tgctgattacttcaacattcccggtgtcttcagtgtgtatntactgcaaaactctccctcaaacggtccaggatacataggcacctcagtgttgcaaacttctctccatgattttattgaggttattttccagaacaacgaaaacaccatgcaatcttggcatcttgatggttatgatttttgggtcattgggtatgccagcttcctttatttataaacttttgtttctattatcaatatttttattagtagaagcaatttagaattagcttaagaaagttctaaagatgttcattgacccttgcagtcatggtttcggccagtggacagatgctagcagaaaaacatataatctagtggatgccctgactagacacactgcacaggtaacttaacatgaaagttcccta

SEQ ID NO: 41781 - DNA, 339 bp, Glycine max
  unsure (1)..(339): unsure at all n locations
agcttcgataaataatttcgagcgtttctatatattacgggactcagtcagacaaccaagtgaaaagntattgtcgcttgaatatgctcagagcttcgatattccatttcgagcgtctcgatatattacgagactcactcagaccaccgagtgaaaagttattgtcgtttgaatttgctcagagcttccgcattcgagtgcaagcgtctcgatatattacgggactaaatcagacatctgagtaaaaagttattgacgcttgaatttgctcaaagcatcggtattccattttgagcgtctcgatatattacgggactcgatcagacgtctcgagaaaaa

SEQ ID NO: 41782 - DNA, 389 bp, Glycine max
  unsure (1)..(389): unsure at all n locations
gngatcgagagcagcgggcaagagtaatagagncatactatnnccnagcnaggacccggtggcggccatcatactcaacaccttagcgccactatgatttccatcatactcaacaccttaacgccactatgatataagccgtgtgatagcaaactagatataaatatccatttcaattttccaattccatacagataatttgtaaatgataaatcatatttgaatacaaaagcataattagtgatagtatatggtatggagaaacttgaggtgattaattacatgctgatccgcacatgtgtatgataacaacaagatttccctgtgcccacaatgaaaacatctgataacaacgccattaggagtttagaaatttctagtgtatgacg

SEQ ID NO: 41783 - DNA, 410 bp, Glycine max
  unsure (1)..(410): unsure at all n locations
taatatatctganaaaaatacgtatttatatngnggttttcttgatatatagagccgactgttgtatttgattcctaataaaaattctcttcctatctgctcactaatatttgaaaaattttattttagattcctgtcgttagttagaaggtgatatgtccattgaatatttgataacgcgatttgtgatagctaaaaaaaacctaatatttgttttaaaatcaaattaaaaatgaatttttttttctcttatttcaaccttcttttttgcctctctttcttcctccctattctttttcttccaccatcgaatgttggagtacccattggaagcctcttcacaatttcatgttgccttgtttaaagtangggagttagcaccacctccactgcaccaaactccccttcac

SEQ ID NO: 41784 - DNA, 297 bp, Glycine max
  unsure (1)..(297): unsure at all n locations
ataagcagggagtctttcctaatgnagcagctntgntggtgttcgctatagcctagtctatcttcatctctgatcttccctgcatttatcttcctgttggagatgtagcaataaagtctaattttttcccctctaagggttatgtgagagttctttccctttcttcttgtctctgtgaacaagtaatgaaagataagcatttcccccactttgacatattactcaaattccacatggatctttcaacatgtgctcattaaccacttaatctttgtgtactggttgcaatacccccct

SEQ ID NO: 41785 - DNA, 443 bp, Glycine max
  unsure (1)..(443): unsure at all n locations
gacactaaaaactcaacttgaatccttatatattcttatgatgtttaacatatgggagagaaaaatattttttccctcatcccttgagctaggttttggggttgagttaggtctctcacattatacgttagagccttagcgcctttctttggctttcgcacataggccctagcgccattcagcccctttctttttcttctccatcatcatgtctcactcaaactctatctttcacactgcttttgttgtctccaacatcaataatcatatcccaatcattcttgagatgaaaaatatccaatacgtgacatggactgaacttttcaaaccccgatgagcctttttgttcactgtctctctcaaatctcttctcttaccttatctctctcaaatcactntccttaccttaccttccctcaatctcttatttattcttcttctca

SEQ ID NO: 41786 - DNA, 216 bp, Glycine max
  unsure (1)..(216): unsure at all n locations
agcccgcttttacacctttaatggcttcaaaacgcngcnggggggccncactccagaacctgtgtctatcanagaccacatctggcctgggggccgcactagaaccctttctaacaacatccttcctggatctcttggctgggagcattttcggagccatttcctgcaaagacacatttgtaaagttagttgacaagaaaatccaatttatcacaa

SEQ ID NO: 41787 - DNA, 202 bp, Glycine max
taaactcacttgctgaaactgttccattaactttttgaaatgtgaaccctaccttgcacagtctaggagtgacacgggatggacaaaatcgcatttggagtgctttaaaagacgccttgtctgactgatgaaagtccacatttcaccgaatgtttgtgcctgagtgaaagagttcacatttcggccaatgctgaccctcctt

SEQ ID NO: 41788 - DNA, 389 bp, Glycine max
  unsure (1)..(389): unsure at all n locations
agctngtattagataagataagattgggagaggaaaagaggagagggaaccgtgtgagaatgagggaatgaggggttacttggtgacccctctctcttcgctgatgacgtgaccaaatggcatgacgtgattggttcatttttgtccccgagatccatgccctctgctcttgagcatttttatgagacttttctctttttccttttatgcactatgttgtctctcttgacctaatgaactctttttaagagtccaataggtcacacaatttattttttaaattatgttttcttccatttctttcattgttttttttcgaatgttctttttttaattacgttggctccctttattatagatgctattttcttcttttttttgtactattc

SEQ ID NO: 41789 - DNA, 432 bp, Glycine max
  unsure (1)..(432): unsure at all n locations
ntgtcttctttggatgctgactngtgttctgaagtcattaatgatgagatggattctttagaatctaacaagacatggcatttagtagacttgcctcctggttgcaaaccaattggttgtaaatggatcttgaaaaagaaactaaaacttgatggtactgtggataaatacaaggctcgccttgtagccaagggttttaggaaaagagagaatgtggatttcttcgacaccttttcaccagtcactagaataacatctattcgggtgctaatatctcttgctgctattcacagtctagtggtacatcaaatggatgttaaaactgcttttttaaatggtgaattggaagaggaaatctatatggaacaacctgaaaggttcgtgattcatggacaagaagataaagtctgcaagttagataaatctttgttn

SEQ ID NO: 41790 - DNA, 266 bp, Glycine max
accactgagaattgtccatcccgcatccacatgtgtaaacatgattaactttgcttcataagtagctaacaataaatgaaggtgattgcatacaattatcaaactttacttgtgacactaatagtcatggtttaaattgtggatgtggtgacaattgtggtcgcattaagaaagaaggaaaggagggaaagatcgtgggttggattcctcctgttgacacaaaactaacacactaacaattaatatttgccgatagaaaaaaaaaa

SEQ ID NO: 41791 - DNA, 277 bp, Glycine max
  unsure (1)..(277): unsure at all n locations
tatgtggcgaacaatatttacatatctatatcntatttttgaaatttttaaaatatgtaacctaaatcgggaacagaagctttgatatgcacatccggctttctccgcagtgaacaaaaccacacaacaagattctttataggacataaaacaagcagctgccaatggctcctgcaatttagacaatagtgtcgtatgaataacataaacatcctttatagggatacaataaatatattttacttactaatccaaataagctccaagatacacgtct

SEQ ID NO: 41792 - DNA, 484 bp, Glycine max
  unsure (1)..(484): unsure at all n locations
agcactannaaganaatttgagacctggattgaggctttgannacatcanctgtggaatgccagcggttgctgccggctattgctgttagagaacacttaatgtaaaaacgaattattctgcggaagattaatatgatagggcctatgtgttacacatagtagatgaagcccgttcctctgtgtatactcggttgaacaggttatataattcgataatatcttggatgagttatcggctactaagcacaactactcattgtgcgaagacgatcgtatgagaagattggagtacttatgagaagaggttcagatgaggagacaatgctatgggcgtacgactagaggttaggaatgatcctctgtcccgaataataattcgtacgagatgagattgacgatcctagggaataacccagcgtggtatagtgattattgtgctcttcacacgtatgctatgcgtacaaaagatgatgaaccaggtcg

SEQ ID NO: 41793 - DNA, 432 bp, Glycine max
  unsure (1)..(432): unsure at all n locations
ntagttcactgcttcaagtagtgtacgatatgttttttatgaaatttcattgcctaagagttactatcaggcgaagaagatattgtgttcaatgggtatggagtatcagaagattcatgcttgctcgaatgattgcatactgtacagacataaatttgaagaaatgtccaaatgccctatgtgtggggtatcacggtacatagtcaaggatgatgatgagtgtagtagtgatgaaaactcaaagaagggccccctagcgaaggtgttgtggtatctttcaattgttccaaggtttaagcgtctttttgctaatggaaacgatgctaaagacatcttacatggcatgcaaatgagagcaactgcgatggaatggtccgtcatccggatgattgctcctagtggaaaaggatagatcatctgttttcgaatttc

SEQ ID NO: 41794 - DNA, 431 bp, Glycine max
  unsure (1)..(431): unsure at all n locations
cctgtagatgcagctngataaaccttcaagaagatcctaacaacctaataactatgaatttttctaggctacttattaacaccataaatatttagagaagagataaagtaaatgaaatgtgaggaatttatgcttgtagcagagtatggaaacaaagccagagagtcactaatctttttgtgtagaattttatacttccacatccattgatttgaagataagaattcctactggaacaatttgcccctaataggcctatatgtgcgaattgtacagttcttattattatgtgcaactaactttcattaggctgaaattaactttgcacgggacattttgctttgttagcacttagtagttaaaccaaatgctccaaaatacaaaggtagaaacgcgataatggtggttttctttacgaaacctcacttttc

SEQ ID NO: 41795 - DNA, 449 bp, Glycine max
  unsure (1)..(449): unsure at all n locations
cttatacacctttgagtggttttcctcttctcatttgtttacaangtttcttctattgctcctttagaaacgaaatgcaaaatgtcttaatctcattattagttgtgagaaattttatctttgtgctttcattcctcattcgtcgcattatttttgaaaaaatgtctattgttctgattggtttgggggtttgtttctttaccaagcgtgctcatattttagagaaagttttcaaagactttaatgtcttcaaacttttgcatttacaagacttcaatgtcttctgtcttttacatttacaagacttcaatgtcttcaatctttacattccaaagacttaatgtattttgtcctttacatttcaaagacttcaatgtcttttgtcttttacatttacaagacttcaatgtcttatgtcctttacatttcaaagacttcaatatcttctg

SEQ ID NO: 41796 - DNA, 421 bp, Glycine max
  unsure (1)..(421): unsure at all n locations
agcttgcttctacaccttgatggtntttctcttcggtcttttttgatttccctttagcgtttgtgggctgcgttggcaggctggggggtgcgaacacgtgaccgctgcgggttatgctattcaaccaagtgatgttggttactttggccgatagtgagccgatgttggtagcttcttccttcttgccgcccgaaggggcgtacctccacggaactgcgcgactattcttgtaaggaaaaggaataggtctaacgcccgatactgccgagtgctgtcggggcctttggggaaccgtgtccctggtgaagtgtattaccaagggttgaggctttttaggaccttccttatatgccgactgcatgcatatatgttgttcccccttcccctcattgttgacctcaacccgaccatggtctatcat

SEQ ID NO: 41797 - DNA, 210 bp, Glycine max
tgcttgagggagaaagagactgtggtgatcactctcgctagccgactacaatgtgtgcggttgctgaagcatagcatctaactcgtacaggctattgcatatagtgagagggagttcctgagaagtggaatcattatgccaaaaaaaatgatgtgtgactaaagagcatcactctgtctccggcatagccgctgaaacatagagattgat

SEQ ID NO: 41798 - DNA, 398 bp, Glycine max
  unsure (1)..(398): unsure at all n locations
tggttagggacggatttcttgaactgttatgtgtgtttccatagnngccaatacgcgatatgatgcactaagtgatggtataacaagagtgaagtattttggttgaaagcaaattacctcacgacaacaaaaagagttacacacaaggtttattatccacatccaataattaaagtattaaagaggatattcttttaatatataggataaaatcttatctatttgattaaaatacatatttggaattcacattataaaagtggataaaatctttttctgataagataaagattattattattattgctgttgggtatcaagaagagcataagattgtcctattgcttactatgtaaaactttttatattagcaggtgttacaaaatactctatcttct

SEQ ID NO: 41799 - DNA, 410 bp, Glycine max
agcttagcgcattaagctagcaatttgtataagaagaacaaaatcctcatctcctttaacaaagtgtaacgattaaggtaccactgagaattgtccatccagcatccacatgtgtaaacatgattaactttgtttcataagtagctaagagtaaatgaaggtgattgcatacaattatcaaactttacttgtgacactaatagtcatggtttaaattgtggttgtggtgacaattgtggtcgcattaagaaagaaggaaaggagggaaagatcgtgggttggattcctcctgttgacacaaaactaacaaactaacaattaatatttgccgatagaaaaaaaaaaccgatggtggtcgcgttgcagtgagccaaaaaaacctttacattgcggtcaattgctggaaaatg

SEQ ID NO: 41800 - DNA, 428 bp, Glycine max
tcccacccagctcgcccaggcgagctcagctctcctatgcgagcaagggtgcttcctccagaagcaacagccttctggaggaaggatctggaaggcccaagtgggccagattgctatttgtacccccctttttactaaatgcacccctcctatttttttggtaattctttttccgtaacgttacgaaactttacgaatttcgtaacgatacttattttccttccgcaaggttacgaatccttacggattatgtatttactttttattagtattcgaagaagttacggaaactcacgaattgcgcaaaaacacctcttttcgatttctgccacattacggaatttcacggatcgcgcaagcctgcttccttttgatttctgagacgtctcgtgacttcatttattgtgcaacaaaggacgccaagtatt

SEQ ID NO: 41801 - DNA, 424 bp, Glycine max
  unsure (1)..(424): unsure at all n locations
taagcaccgcggctgcagcttgggttntgtgccaccagtcnattgttattggccatgctcatataaaatttaagatttaattgttatttaattttcccattctaagatgactgaagttaattttttatatctagattaagaacaagaataaataagttatttattaaaataattctactaaaatacggttacttttcccaaatatattattggcaattattggttaattaatgatagataggatgagtaagcaggtcggcccgccccgcgtaaggtcaacccatattggtaacagaccgggtcagtccgccccgcattcttacatggaccaaataaattggttcatctccgtcccgtgcacctcgcgggtcaaacaagtcgggccatgagcctaattttaaaagagtttcaatttcaataaaaa

SEQ ID NO: 41802 - DNA, 416 bp, Glycine max
tgttggccgcgatcgacaaagggtgtataagacgatgttagtttctgcatgctatcatgcgtggactgttagcgatagcaaaagaatgtttatactaataaccacttgggtatttctgccggccccctaacttcacgacttattaccgacagagtttgtaagcgtggaagacgacgtaaatctccgcatgtgaacgagcttgttggccgcgattgacaaagggtgcagaagacgacatttgttttttcatggtatcatgcattgagtcttagagatagcaaaagaatgtttatagggataaccacttgggtatttccgccgacccccaacatcacgagtttgtattggagaggttttttgtgcggaagacagtgtaaatctcctcgtgtcaacggacttgttcgccgtgattgaca

SEQ ID NO: 41803 - DNA, 407 bp, Glycine max
  unsure (1)..(407): unsure at all n locations
agcttagtggtattctttacttatgtttttttagatnnaggaggagtctaagatagtgtcagaactggctagaagaatacttgtatagccagaagtagcaggacaaaatacttgttttgtaatcaagttttttattagtggaaccctttcatgttgtgtaaagggaattggacctaggtctatttgagtgaacctgtataaatcaggtgtttttacttttctttttaacagttttattaagcattctcttagcattttttgtcattctttttataccaagtgtttgcttgaaaaattgttttagaactttattttacatagttactggatgattaaactcgcttttattacaactcattttttttggtggatgacgcacgcacgcacgcacacacacacacacacac

SEQ ID NO: 41804 - DNA, 427 bp, Glycine max
  unsure (1)..(427): unsure at all n locations
ggacactatgaaactcagcttttttttttcancagagttttatgcctgttctttgaatgacattgaggaagtcattccaggccccncagaacctagctactttgttgtactcctttattagatgctttgatgcttgaacttatttgctcttctctagaagtatcgactagttttttgaagtagatgtatataatcatttgatattattttagacaagagtcatagaaacttgcgtcttctctttttatgaaactcaaagtatcatcccaaattcattagtccaaagtaggttggcaccaatgaagaagagaatcctatgcctcaatcccacatggtattattaaaagaataaaaaagagaaaacgaacaaacaaacaaggtagggaccaaaccaaactcaccattaggaaaatctatagctgcgatg

SEQ ID NO: 41805 - DNA, 346 bp, Glycine max
tgtaacccatatgatgtaaaagggctaggtatgaaagcacaagtatatctataggagacaatcattatttaaggaggataatcctattataaataacaaaatttgttcttcaaagatgtaatatacgcaacactccaattcgaaatgatatgttggaacattaacctcggatgagattatacatatgtgcgatgtatgttggatgtgttattaatatgagtgtaaaaaacactgacgaacacacactgaatacccagcatattaatcatgcacaacagatggaccactgtctcttaagtggatacatgtttgatatgaaccaatcattcaaactcggaattaaaag

SEQ ID NO: 41806 - DNA, 373 bp, Glycine max
  unsure (1)..(373): unsure at all n locations
agctntatttgtgcgggtctgggattctatggtcaagtgtttgcgatatgtgaagatgatgttccaagtacttcggatttggtccgaccatgccctcctgatttccagctgggaaattggcgagtggaggaacgccccggcatttacgcaacaagcataatgtaaacctttacggttttaaaagctctatagttgggcctaggctttagagttttcattttgttaaggcttggtgtcttttgtttttgaatttataatacaaggatctttcttcatctgttcctggtctctacccattctcattcatttgcatgtttacttctttttctgaaacggcagattcgatgacgagtccnctgaaggtactaatacc

SEQ ID NO: 41807 - DNA, 382 bp, Glycine max
  unsure (1)..(382): unsure at all n locations
cttatttaatttgtgttcagtaaaattagtttttaaaacaactgaacaatgtaaaatgacaaaaattgacacatttataagatacttttacataaatttcaattttattttgtgaataaaaacatatttcgaggtgttataattttagtattctaatgaattataaactcttataatttttgttctaaattgtaattttggtcctcccttgttacccaaatccatgattttggtccctttaattttttgttgtaacatttggtccacttagttntataaattggcgattctggttcccttagtaaattattaactaataactttaattaataaagttattaaattaattataaattacataagagtattaataaataaaaaa

SEQ ID NO: 41808 - DNA, 431 bp, Glycine max
  unsure (1)..(431): unsure at all n locations
agtaaggcaccacactttttcggngattctttntctcatcagaggngccgaacgacttctcaataaacacatcttattatgtggtgcttgcatggctatccctggctctatgtatgggcgactatgcacacaatatttgcaggagttcttctaaacacactggtgctatcctgggatcaagcgagaacgcttaatgctgttacaaattcctagacccactcatgcgtgatcctgtcaggaatataacgaccgcaagaacggatcaaatatcgcttgcataacagatatcttcttccattgtgatatagacagagaacggcctaatagagcaatggtgtctcgtagcgacacaattcttatcacaaaggatagctcgtgcgtggttccaacttgtcaacaggacttacaagtaactggaacagatcagcgcg

SEQ ID NO: 41809 - DNA, 381 bp, Glycine max
  unsure (1)..(381): unsure at all n locations
ggtttgcaagcttctatattagctgaaccattttatcaataaacacaagttgagttttattcagaaaattagagtttatctcttttatcttagtgagagtgattctcctaaattcttgagtgattcaagaacaccctggctgtatcaaaggactttcacaacctttgtgtgttgccctcgctggaaagagtgattctttccttcctttcatcttcacccttgttctttaaaaccacaattccagaaaatccacctctgcccaaaattatctcgtggccataactcccattttacgcactcaaattaagtgattcttgagcctanatttgaatttagaacgagacctttcacctcgttttggaatcacctcattggagccct

SEQ ID NO: 41810 - DNA, 376 bp, Glycine max
  unsure (1)..(376): unsure at all n locations
cgagttggtntagccttaatttcactttagttattagtcaattcaattaagaatgagaaatcccaaagagaaaatgtccgattgattttccgctttattttactaaaaggtatatttttgttattatattattattntatctctttttgatttccaaagtggttacggcacgaccgaacggtcggaatttattttaaccgaagttaacggataatacgattcaaacgattggtggaaatttattttatttttaagttaagcgagaaatgacttaagtaaaatggcttangcacgtcaagagggggtataaaaagtaaatgaaatgagaataaaaatacacgaaacacaatgtggaccaccatgggtacataaaatg

SEQ ID NO: 41811 - DNA, 485 bp, Glycine max
  unsure (1)..(485): unsure at all n locations
agtcatcaaaagattataaatatgtaaccatggcatgagtttcaaagacaatgaatcaagaatcataaatcatctttgaatcatctatctttcaatctttacaacatcatctctcaacatctttcaatcaatctttcaatatcgttctacagaattttctgattcatttctcttcatatttctaaaagttntttatcaacactttctcttccaagaaacgttctttgttcaaaaacttgtgctatttatattnttcattctcttctccctttgccaaaagaacgaaggactgaccgcctaaattcttttgtgtctctcttctcccttacaaaagattcaaaggactaatgcctgagaattcttttgattcttcccttccncttaagcaaaagatttcaaaggactaaccacttgagatatcttttggttccccttacaaagattcanaggactaaccgcctgagaattctttgtcccaacacatt

SEQ ID NO: 41812 - DNA, 284 bp, Glycine max
  unsure (1)..(284): unsure at all n locations
agcttcaactacgacctcattagctatcattacaccatggaggatatgtctgcctttgagaaaagtagtttgcctttcatcaattaagtgaggcagcacaagagccagcctattagccaggactttggacattattttgtagacacaccctatgagagagatgggtctatagtcattaagagattgggggctattggttttggggatgagggctatgaaggatgcattacttcctttggggaatctgccattaatgaagaattcatcanagaatctgataaaat

SEQ ID NO: 41813 - DNA, 359 bp, Glycine max
  unsure (1)..(359): unsure at all n locations
tatggaccatatcgtggccaatgttctcatcgataatggttccagtttaaacgtgatgcctaagagcactntggacaagttaccattcaatgcttcccatttaaaaccaagttcaatggtggttctggccttcgacggcactcgccgagaggttaggggagagatcgatctcccactacaaatatgccctcacacctgtcaagtcactatccagataatacacattcaccccgcttacagctgcctgttggggcgcccgtggatccactcagtgggagttgtccttctacactccaccaaatgctgtaattcttagtggaggggcacttggtcatcgtatctggcgaggaatatatctt

SEQ ID NO: 41814 - DNA, 388 bp, Glycine max
  unsure (1)..(388): unsure at all n locations
tcgacctgcccgcgtgcaagctggtaacaacttatattctnnttaaanaatgtggtttctttggcagttattgttggtaaatagttgtgttntaatttanaatttctaaatatatattaattatattagttctattttataaaataaaatatttattgtagattttcttaagattntgttttaatgagtcaactagtttgttaccgttgttgtgacaattgtaggttggtttccaacgatcatatttccaatggtcatattttcttgttgcaaaaatgcctatatatatctctttcctcttttctaaaaatggtacagagcaatgtctagtttcttcctcccaaaacattgtctatttctttacctataacaaacttatttttgtgag

SEQ ID NO: 41815 - DNA, 365 bp, Glycine max
tatgaacagagaagttcttaaactcatcacgttatctataatgggccttgaggtggatccaagtgctctgatcattcattagcatattcatgttatggtggcatactcaccactgtttgtttctttagggaactcaccataactaaaaaagcgcaaaggcacccctataacacccgatccataagtaagagggataacgaggagggagtgcaagaacagatgaaggtcgacctatcagccttaaaagatcaaatggcttttatcacggagggcatgctaaagcttcaaaaaactatagaagataatgctatggcggccgcttccaatacagctagggaagcggaactggtgctacaacccataat

SEQ ID NO: 41816 - DNA, 495 bp, Glycine max
  unsure (1)..(495): unsure at all n locations
cctatgttggtgatatgctaagatggacgtgtggacttgactaccactctaataaagagtacaacagatgttgtgtttgatgatttacgttttctctctttcttttatgttcatatgcaatgttcatttttttctcttatttcgctatattctatctcctatttctatatatttgggatgggtgtatttgactatctcaagttcaaattgagatgagagataacaatttatctaatatctgtgtcttttttatacctgtatataataatcacattnttatactataattaaataataagataaatcgtataaactctagcacaatagatatgcagacgcgataactattactaaaaatacatatagaatttattaatcttgggtaatagttaaaaaacatcaaaagagtgtagtggagatggtgaacttttaanaagttaatagcaaaagagctgtgagttgaaatttaaaattaataaataaccattttaaata

SEQ ID NO: 41817 - DNA, 313 bp, Glycine max
ggcgcgcttagcgcgaatcctgcgctgagtgcgtgatcactgacatactcgttaagcttagatgtcgtcgcgcttagctcgtaatcgtcgccatacctgctaagcctagaaagacgtgtttagcacgcgaggtggataggattgtaagctaccttactcttctaagggagtaagaagtataagaagagtcacaccgagactcagagctctctgataaatacactcaaagcacaagcatgtctaataaggaagaggctcgatctatagccattcttcacttctgctttatgcatccatattcttcttctatccc

SEQ ID NO: 41818 - DNA, 436 bp, Glycine max
  unsure (1)..(436): unsure at all n locations
agacacattcctctgctttcatttactggaagttcaaaggtacttcatctctctcttattttgattaaacattgtaatctttatttttatgtgtttacaacgtacattacattttcatgatagtatttttatgttacaacctctactagttagctaacaagtgtaatatattataatattgttgaattcattgttttgttggttccattggtatttattctaaatacctattcttattctataacatatatggtagtagctgtaacataaaaattagttagaataattattatagcttttcttcttaattcatattataattgtgcgggggacttactttcntttaatacatattatactatgttatattatcatagtgtgataaattatgttaatacaactggttacgtatcttttgtaatggataagtcatgga

SEQ ID NO: 41819 - DNA, 519 bp, Glycine max
  unsure (1)..(519): unsure at all n locations
ggagtgtaatgatcatcgaccnatcttcatcactcgctgctttatactcagctgcaacctagctcttatataggnagagatccttacgggtgcatgtcatgatcttaacataagagcaggtgcttgcgctatgtcctaaaggagtttggctcaacactcgtaaaccacggagacgaccatgctaactatcatatggcaatacaacgaagagttgaactattctgtggcccatgaacaaaaacatgtggaggatattgcacaaatgatcgccgcataataagcaagagggagggtgattgatgcgatgcatcacaaaactactatgtggatggatatgttcgccatgaccttgaatggaagtaagacctcctgcgtaactatccaaacagaagccatggccgaagtgtgaccgttcggacgagatcatgtgctcatcgatactcgcccgcatgattgattcaatgccacataatataacacgtaggtctcttgaacaccttaggaaaacatggagacgag

SEQ ID NO: 41820 - DNA, 465 bp, Glycine max
  unsure (1)..(465): unsure at all n locations
tgtatgtgcattgtatcttatcattgtgtcttgctgttatctatcaatgaccagattggaatacgctatatggtctgccagcagttcgagggaatcaatggacattgattctataccactagtgtggtttagagtctgcattcgaagtctatgacatcatcataatgtcttccacatcaccatttccatataacctatacctcacaactagaaatggcaagaaaacccgtacccgtgggtacccgtttgaatctgttctgactntgacaggtaatacccgagttgatcgggtatgggtttgggttcaggttttccctgataaccaaaatcgggtacgggtgtgagtatgagattactacattcgaaatctatagattntttgcataatntaatcagaaggcctgaaatttttatactagttacatttacttttagaatttttatataattaatattcctttctta

SEQ ID NO: 41821 - DNA, 177 bp, Glycine max
gagttatatttgattgtgtaatagaacttgcatgctacgattaaacaaccagttgtcaagaacatgatgaaagccttgtactttcagtttaccgctggagatctaccattgtaccttgttgcctttacaggatactgggcttatgggtcttccacagaagtgtatttgctgaatagt

SEQ ID NO: 41822 - DNA, 494 bp, Glycine max
  unsure (1)..(494): unsure at all n locations
ctaagcttagatgacaactatataaaactgttaatattagacaaaacttaagttaatatttcagatatttttttaggttttttaattataaaatggaaatnttttatctctacaattaacacttgtatctaatgtggactttnttttatacatgatcaaatgaaaagaaggaaacaaatgccaacaaagaatatagataacaaanaaaacaaaattctaagaacatgcaaaaaggtcatccataatatttacctgatgcattaagatgatgtctactgttggggaagtccagcaaatgaagtcatactcctgagagacactcttcttgactaatcgatctgcacaaaaataatattaaaaaacacttaanactttgcacataagttttaatggagaagactgcttgtaacatgttttttaacacctaatgcttattattgtgattnntcaatcaatttagttaataataaattaaaaagtatctaactaatagt

SEQ ID NO: 41823 - DNA, 456 bp, Glycine max
  unsure (1)..(456): unsure at all n locations
agcttctatataagcctgaaccatttatcaataaagacaagttgagttttattcagaanattagagtttatctcttttatcttagtgagagtgattctcctaaattcttgagtgattcaagaacaccttggctgtatcaaaggactttcacaacctttgtgtgttgccctcgttggaaagagtgattctttccttcctttcatcatcacccttgttctttcaaaccacaattccagaaaatccacctctgcccagaattatctcgtggccataactcccattntacgcactcaaattaagtgattcttgagcctaaattgaatttcaaaacgagaccattcacctcgttttggaatcacctcatttggagccctgtagcttcagttattgccatttctatatttctgtccagccaccacttaacctacgttntaccatcccattcatccattttat

SEQ ID NO: 41824 - DNA, 514 bp, Glycine max
  unsure (1)..(514): unsure at all n locations
aggnaatgtnnnaatgatactgaancatgaacatggatacccccattataataacccactatggctggcggcttcttaccactgttttattcaatgtgcgatgtttacctggcgaatgctctttcatgtctgctgacgggcttatacctaaccataatccacgatacctgggtattaacagctaatattgcccgcgattttttaaacatctcggctataacgtccccacaaactcggccttcataccgttgatcagacaactggggctgccaaaaacggagtgcacggatgaaaagttgaccacctcataagactggaaagcagtttctaactatacttctgcggctttacactaggcatggacgatgggcagcttatcaaaaatctttctcttctgacaccatgaacaagagaccgccttctacgatatttatcattttgttgagcgtcatatgagcgacctccacttgatgtgatccatctgacgcgcaatcacgcacgtgtaggggggatn

SEQ ID NO: 41825 - DNA, 425 bp, Glycine max
  unsure (1)..(425): unsure at all n locations
gatccttaagtcacctgcngcatgcaagcttcgataatcaatttcgagcgtcttgatatattactagactcagtcagacatccgagtaaaatgttattgtcngtttgaattgctaagagcttcgataatcaatttcgaccgtctccatatattacgggactcagtcagacaaccgagtgaaaagttattgtcgtttgaatttgctaagagcttcgataatcaatttcgaccgtctccatatattacgggactcagtcagacaaccgagtgaaaagttattgtcgtttgaatttgctaagagcttcgataatcaatttcgaccgtctccatatattacgggactcagtcagacatccgagtaaaatgttattgtcgtttgaatttgctaagagcttctataatcaatttcgagcgtctccatatat

SEQ ID NO: 41826 - DNA, 544 bp, Glycine max
  unsure (1)..(544): unsure at all n locations
atggggagtgaagcatgatnnctgatagcatggattaccgcactctttatactcangctctagcacattcatcgacagtaactttttactcagatgtctgattgagtcncggaggtatatctagacgctcggacttgatcgcctaacctctgagcaaattcaaacgacgataactgtttactcggatgtctgattcactcccgtaatatgtcaagacgctccgaattgaataccgaactttgagcaaattcaacgacaataacttattactcggatgtcttgatcaattccctaatatattcggacgctcgatattgaatgtcgaagctcngagcaacttcaaacgacaataactttttactctgatgtctgattgagacccgcgatatatcaagaagctctaaattgcataccgaagctttgacaaactcatacgacaataacatttactcggagtctgattaggcccgtatatatttaacactcgaattgatgatgatctttagcaattcaacacatacctttactcgtagctgttggaccg

SEQ ID NO: 41827 - DNA, 377 bp, Glycine max
agcttatgatgtagttgcaagtctcctgcaacatcttggaagctgaaacctacaacaagaacgaaattataattattataaaaaaaacttaattttaatatttgccacattttgcatttaatggcactaaagtatagtcaatgatggcaaggaatatccaagtcccacaacattacaagttgtgggtaaaaaaacattaaagggagggcacaagcgtgacttatctagcaaggccaaccaaagccacagaaaatctctgtttttgtgtcttgtgcactgaatttgtaataattataataataataaatgtgattattatcattactattcatattattattattattattaatattattataggggtaccttgtctg

SEQ ID NO: 41828 - DNA, 430 bp, Glycine max
  unsure (1)..(430): unsure at all n locations
ccgttttatgcttggatgctactgttcacgtaatgcaattntccatttcctgcttctaattacaatttcgttcttgtttcttcttctactttcatttacgtttctgttttcattttcgtttctgtctcatttacgtttctgtttatttacgtttctgcttcatgtttcatttacgttttctgtttgaatctatggaaggctaaatattctggtgttgtttccttttgaggacgaagcccanatctctntgaggtttcgtttataatgtggttccctggcagttttcccttcaccagttaacccaaattcgtgaacattaatcagtgcacgcttcgtgttcgattaattgcctctgagcctaacgtgcgttcatgcttaatggacgaanggctaactggtgtatgtggtgcctaatcacgtattgacaacc

SEQ ID NO: 41829 - DNA, 478 bp, Glycine max
  unsure (1)..(478): unsure at all n locations
cactcaagctttatataagctgaaccattttatcaataaacacatgttgagttntattcagannattagagtgtatctctgttatcttagtgagagtgattctcctaaattcttgagtgattcaagaacaccctgactgtatcaaaggacattcacaaccgttgtgtgttgccctcgctgganagagtgattctttccttcctttcatcttcacccttgttctttcaaaccacaattccagaaaatccacctctgcccagaattatctcgtggccataactcccattttacgcactcaaattaagtgattcttgagcctaaattgaatttcaaaacgagacctttcacctcgttttggaatcacctcatttggagccctgtagcttcagttattgccatttctatatttctgtccagccaccacttaacctacgttntaccatcccattcatcccatttatgccaagaaccaccttat

SEQ ID NO: 41830 - DNA, 332 bp, Glycine max
  unsure (1)..(332): unsure at all n locations
cactggtaacgtgtccactatcatngntatcatatccttttctgtcattgacggtgttacttgagttgccagatccctccacctttgggcgtattctctaanaagattcatgctccttcttacacnatgtttgtagctgcattctatccggagccatatcagaattgtattgatactgcctaataaaggtgaccattgtgtcctttcaagaatggactctggaaagcttcatattattataccangtgacggctgccccagtagactttcctggnaaanatgtatcaataattnttcatttttcgcatatgtccccattttcctgcagtaca

SEQ ID NO: 41831 - DNA, 285 bp, Glycine max
atcgtctcgatgtattacgtgactcaatcagacatctgagtgagaacgttattgtcgtttgaatttgctgagagcttcaacattcaatttctagcatctcgatatatttcgggactcaatcagacatccgagtaaaaagttattgtcgtttgaattttctgagagcttcaacattcaatttcgagcgtctcgatgtattatgggactctatcagacatctgagtaaaaaagttattgtcgtttgaaatcgccaaagcttcaacattcaatttcgagcgtcttgat

SEQ ID NO: 41832 - DNA, 233 bp, Glycine max
  unsure (1)..(233): unsure at all n locations
acagtaacccatcaaaataatagcctttgctagtaggatcttctggctcctgcatatatgctactctttcaaagtgtgcccgtccttcggccctctttccctgccatacggcgaattgaagaagatgaaaatcatagcaaatcatattgaacatctacaacttctanaaatgtcattcatattgcctgtcgttaggaacagaggtgcaattatctttcacgtaacaagataat

SEQ ID NO: 41833 - DNA, 378 bp, Glycine max
  unsure (1)..(378): unsure at all n locations
cttggtgtatntggctggttagaaatggtagaatcttctcagatggcgatcatctattgagttcatttgggattgagtagtttcatttgcttcttttgttgttatgcttgtgatctttttacgggggatgtccttgttagatcttcttagagattgacatgcattgttgatgcttcttggatccccccctttgttgtgttttctttagttcttcagaggatttcttattccctttntggatcttccttttctatattaataagtccttttctcatatganatanaggaacatgctagctgctagccagtgcaaatttatagaattttcttttacctaatgcatganagtgaaatgtatttcaaatttatggcacatat

SEQ ID NO: 41834 - DNA, 422 bp, Glycine max
tcacctgccgcatgcaagcttctacaaaggtgtgttcctaatttctatgagtaaagctagtgaagaagaatgtggcattcacttgtggtgaaagacaagggcaagcctttgctttactcaaagaatagctcaccaaggcacctgttctagctcttccagacttttctaaaacttttgagcttgaatgtgatgcctctggagtgggagttggagctatattgttacaaggttggcaccctattgcttattttacttgaggaataaactcaagcccaagaggtgtggcaatgctaacaagtgtctttttacaaaggagaaaatatggaggttgtctaagaggggaaatttctttaataattgtctttatttcaaaatgtcttcccttcttagctaacctcttggaggagacacttacctcctta

SEQ ID NO: 41835 - DNA, 155 bp, Glycine max
ctatgcacttctctctgtttcgaatttgcttggaagaatttgttccgtgaagaacatctaaaccgaggcgcttccgaaacatttccgtaacgtttccgtgaggaatgtcgcaaaggattccaccgttcttcgacgttcctcattcgttcttcatc

SEQ ID NO: 41836 - DNA, 594 bp, Glycine max
  unsure (1)..(594): unsure at all n locations
tgaaacgcataattgaatccatctcgacccgatgattcagtcacctgccgcatgcaagcnttaccgcgtatacgtgcaacacgctcgatgacatcgcggatcatcgacatgttctaacgaacgagtcgtttccaaagataagcgacacacgatcttgcgacattacactcacgtattcgacaagcgtgcgcctgacgtgagctattagtgtgacaacgaacatcgcactccgagctgaatactcgagtcttgcgacacgtggaccatcaccaccagtggctgatgaggacagaatagaaggagaacggttagctatctgcgatgaggatgacttggctgctgattcaaacacccgtagtaagctgctgatggacgattcttcacacgtgcgctcgtgaatcgacgtgaaggacgatgctgggaactgtgtcctcgcagacgtactcgagagtggacgcctatgaaggcgacgccagagcctgctacaccgcgcaggagaagctgatcgactgaatatgtctgacacaatctcttgacacttgtgcatatgtgctgacgaacactctaggggacgatacagagtgtcctcactcn

SEQ ID NO: 41837 - DNA, 163 bp, Glycine max
cgctactgtgattatctgaggatgcagccatgatatgaaccgtgatcctatttttaaggtcaagacatagcagtgcgtcaagtacatatgttatgtatgagaatgtgtggctaagatagaatctatccaccaaactattgaggaataatgcattcagtactat

SEQ ID NO: 41838 - DNA, 339 bp, Glycine max
  unsure (1)..(339): unsure at all n locations
gacaatatctntttactcgtatgtctgattgagtcccgtcatataacgagacgctcgaaattgaatgttgaagctctgagccaattcatgcgacaatatctttttactcggatgtctgattgaagcccgtaatatatcgagacgctcgaaattgaatgttgaagctctgagccaattcaaacgacaataactttnntactcgatgtctgattgaatcctgtcatatatcgagacgctcgaaattgaatgttgaacctctgagcgaattcaaacgacaataactntttactcagatgtctgatatagtctcgtaatatatcgagacgctcgaaattgatg

SEQ ID NO: 41839 - DNA, 574 bp, Glycine max
  unsure (1)..(574): unsure at all n locations
ttagtgtnaatgatgcatgatagctacacctttatctcagctcacattcaatttagcgtcttgaatattacgggactcaatctacatncgagtatttattattgtcgtttggattggctcagagattcaacattcacattcgagcgtctcaatatattaccggactcatatctgaccatccgagtaaataagttatttgtccgtgtgaattaagcttagagcttcaacaatcaaattcgaagcgctcgttatatcacgggactcaatcatacatccgagtaaaaaggtattgtcgatcgaattggctcatagcttcaacattcaatttccagcgtctcgatatatgacaggactcaatcagacactcgacgaaaaagttattgtcatttgaattggctcagagctcaacattcaanttcgagcgtctngatatttacaggactcaatcacacttccgagtaaaaagatattgtcacctgaattcgcttanaacttcaacattcaatttcgaagcgctcgatattatacgggcgtcattcagacatctcagtaaaaagtattgtcgttcgaatcn

SEQ ID NO: 41840 - DNA, 368 bp, Glycine max
  unsure (1)..(368): unsure at all n locations
cactggagctgacccatcaactgttacaactctttcagactggtgattcctaggctcttgaccttgacttgatagaacactgttttaagcgaaagcgcttgactcgatcccatgctgtactaaagtgaaacaaaacccactgcgaaacaaaactccaacgattatcatgggtggaatggatgaatgcatgaagaaatgcacatggcatatatgcatattatgaatacaggagcccgggaaattgtccccttcttatatacaacatttgggcagcatggcgcctgacgtatgtatntaagaaggcgacacggaccctccgtcagttgatcaaatgagaggctcatgacgcaatctgtgcatgatgcata

SEQ ID NO: 41841 - DNA, 255 bp, Glycine max
atcacaccttatgctgggctacataacaaaccttgatttaacagtggtcctagtcttcaatatgagactccatggtgatgttctcattgttgttcaataagactttctgatcctcttctgagcttatgtctagtaccatgaacaatttatttatcacagaaagaagacaatattacaactttcactatgctggacaattgctgtgtgaattgctcgagagtatctctcagtcttttgatttatatttacatcact

SEQ ID NO: 41842 - DNA, 486 bp, Glycine max
  unsure (1)..(486): unsure at all n locations
ctttcagggtatctagcatttttgctttgacataatcccaaaaaggtcaattgagagagaaagaanaaagaagacacaagttgaggtgaagaggtattccatacgcaaatggcattataccttgngacatgatgagtggataattntttcctttggtgggagccatattacataatcatcaactgtaatatgttgttgtaattgaaatccaagaaggccagcaattagttagatctcatcctctcaattaatatatatgcgttctttgattcattattatttaaaataataataattgagtatgacccatctgacgttgaaacatgtatcagacccatccactatcanttttacggtatctcctgaatgactctccacgtcactcgcactaactnttcaacgatacataacaaatatnggattttcctatttagcttcatagtggtcatgactcgttatatcaaccttctcatangaacacaataa

SEQ ID NO: 41843 - DNA, 458 bp, Glycine max
  unsure (1)..(458): unsure at all n locations
agcttctagagaatactacatgaagctgcctctgtaganacgctgcccagccttcgttaaccgttggatcttctcgaaatttggtttgcaacttcacaagacactttaccatgatttaaccgttggtatctttgagaaaatatctggagtgtgctagaagcttccgttcccgagagcatctcttatttaagcatttcagcctttgctntcttgtagcttaagaaaaatgtcatttcttcttctttctttcttccatatccatttctaaagttccaagtactttctccatcacccacatccaccattagccaccacaaaccatcattgttctccatttgaaacccacaccgagaggaacccttcaaccgaagcagaaattccaacttggcttgcggttcngtagagaacgaanaccctaatctgatctttcgtttctttcgacgtaccatggtctatgc

SEQ ID NO: 41844 - DNA, 551 bp, Glycine max
  unsure (1)..(551): unsure at all n locations
cgggaatggggatgaccctganagtggcgcatgattacggccattatactcagctccattgttaatatcgagcgtcacgatatattatgcncctgtttcggagctacgagtgacaagatatgaccattggaattggtcaagaggctccattggtcagtttcgagcggtctcatatattatgcgccatattccgacctgcgagttagaatttatgaccattagatattgtcgagagctgtcgttggtcaattggagcgtctcgatatatatgtgcctgaatcggacctcgagtcggaggtatgaccatttgaattgctcgagagcttccattactcaatttcgagcgtctcgatatattatgtgctctaatcggacatccgagtgaaacgctttgaccatatgatatgctcgtgagcttacatcggtcactctcgagcgtctcgatatatgatgcgcctgactcggacatccgagtgagaagtttgaccatctgaattggtaanaagcatcatggttcaatctcaacgtctgatatatatggagctgatcgg

SEQ ID NO: 41845 - DNA, 389 bp, Glycine max
  unsure (1)..(389): unsure at all n locations
atgtaatactatatttatctgatgtaggctattattgataaataatattggattaatgaagctcaatattcttagaaagataatgaagtgtaaccatacttacctttgaagtgagtgaagttctaccatatgaaaaataagattaattataattaggtatcaagacttaagaacctttatatttaggaattttgtacatttattaaagtttatcacactaatgattatgtgaaaaatcatcataaaatcaaagaattctgaagatcttgatataataaaaaaagtataataacttgaagaacgtatttattgtattgcactacacaataaatgttactatactgtagtagtgtatatattatagtngtataagatactgattttttata

SEQ ID NO: 41846 - DNA, 365 bp, Glycine max
  unsure (1)..(365): unsure at all n locations
actgcatggtatctttattgaataaagctgaggntatcaagcttcattccgctcagctagtggtgtgactgtgatgttgccttttctggtgtctgatgtacatcgttcacgggtccttatgatactatcatgtcttataattgaagatacctcacaggtttgttgatattctctcaaaattttctgtcttttattttctgactgggtttgtgcatttatttgctcataaaagtgttattaatcacaaaacaataattcttgaatgtctggcgatgaatccttccctacacattattcatgcctgtgntcacttgagatcatcatgatgactatctgattgtacctttaccaggctctcctgaaaa

SEQ ID NO: 41847 - DNA, 370 bp, Glycine max
  unsure (1)..(370): unsure at all n locations
ngcttaagataatggtacgganataccatatcccgtggtaccttccaagaaagataaggaccgccatctggcgagattcctagacattttcaggaaactggaaataactatgccctttggagaagctttgcagcagatgccactctactcaatgtttttgaaagatatgttgacaaggaagcacaaatacattcactatgagaatatcattgtggaaggcaactgcagtgttgtgatatagaagatccttccaccaaaacacaaggaccctggaagtatgactattccttgttcaatangtgaagtcacagtgggaaaggctctcattgactntgtagccaatatcaacttgatgccactctccatgtgt

SEQ ID NO: 41848 - DNA, 139 bp, Glycine max
  unsure (1)..(139): unsure at all n locations
ctccactccaatatctgattataggctttaatatgtggctantgttgtgctagcgcgcttagcgcgactatggaccgctcacggcgcattagtaggatatcagcttagcgcgtgctcttctcactcactggatggactg

SEQ ID NO: 41849 - DNA, 454 bp, Glycine max
  unsure (1)..(454): unsure at all n locations
agcttggcattcccattggtggaaggaccttataagactntataatcagtctgatttccacagtatccagtagaatatggtatggaaggttggttgtggcgacaaaatcaaattttggcaagattcttgactgagtgagggctgtaagcatttcaaaaaaagattcttggcaatatggaaggaacgttagtttattaataatattcaaagaaagattctcatagtataacccgtgcagaccaaccctggatgggattcagttntcttctcttggccaagggcagaacgaaagccttgttgctagattctctgaagtggaaattaagtctgcagtttgcgcttgtagtggagataaaagcactggcccgtatggtttgaacttcaacttttatcaagtagtttgggaaattctaaaacctgatttcatcacgttcttcgatgagttcttcattaa

SEQ ID NO: 41850 - DNA, 411 bp, Glycine max
  unsure (1)..(411): unsure at all n locations
tactaagctatttagtcctatttgattcttaattacacactagaatttcctctcctgtagaaacaaaccctntgagttgattcatataaacttcttcttctaagtcaccattcagaanaggcggtctttagatccatttggtgaagctccaaatcaaatgagccactaaagccaacacaagccacaaagagtccttcttagaaacagaagagatagtctctttgtagttgatgcaatcctatcccgcaagggcattggatagaagaactccagtagattgngccagagatgtaagagaaggccctanggttctcatgagccttangatagatttcggacccatgggctaagtatgtgcccacttatctttatacatatntgattaagatttcattanttttgggccttata

SEQ ID NO: 41851 - DNA, 298 bp, Glycine max
tcatttatcctatcttctacagccaatgggtgagttccgtgcaggtagtcccttaaacaatcggcctcaccgtgatagaaaatgagaatgaggagcttattcctactccggtgcagaacagttggagagtctgcattgactatacgaagttgaaccaagttaccaaaaacgaccattcttcactgtcattcattgaccagatgcttgaacacctgtcaggcaaatcttactattgtatacttgatggtttttctgggtatatgcaaaacactattgctcttgacgatcatgaaaagac

SEQ ID NO: 41852 - DNA, 296 bp, Glycine max
caaagtgttgttaaagataacatcggttcttataaaagaaccgatgttaacttatcattcaccaacatcagttatctgggccaaccgatgataatgaagtgatgtttacattaacattggtttttttaacaaccgatgttaacttacatttaccaacatcaatttttttggggaaaccaatgttaaggaagcgatgttaacattgatttttaataaaccgatgtcaacctactatgataacatcggttattcggataaccgatgttaagaaagtcatgtgatgtaccattatgcca

SEQ ID NO: 41853 - DNA, 288 bp, Glycine max
catgcaagcttgtgttgcacaagttggtggtattcatacaaagatgggtttgagcttatatgtcattacttagtggaattctacttttatgatgcttgagagtgcccttgtatatcgatgtgctttttgtagtcttgaatttgatgataggagctattcaagttgtcttattaatgatgaatggaagagaggacaaaaaatgtgtgaatttttgcgtcccttttttcaaatcacagagttgatatctggttcctcttacccaacgtctaatttgtaatttatgcaagt

SEQ ID NO: 41854 - DNA, 398 bp, Glycine max
  unsure (1)..(398): unsure at all n locations
atatgcatgtgaattatgaagcatcaactagaatcaagccaaggctattgtgcaagcaatcaatggggcaaaacacaccanaaaattatgatgatggatgactcgaattctcacaaaggtaaacttatcactttcaaattgagctttcaaaactatcatgacatgtaaaggaaaagcaaggatttcaagtcacaaaatgtcaacaaactnttattttcagaacaattacccattacttgaacatatcctataattcanagacaaacatgcaaatntaacacaacaaaactaagaaaattaaactaatttaacacgactaacaaaaccaaaaccaaagaacacattcccccccccccccaatacttaaacaacacattgtcctcaatgtggctcaatta

SEQ ID NO: 41855 - DNA, 472 bp, Glycine max
  unsure (1)..(472): unsure at all n locations
tctcgaccgngatctctaagtcacctgcggcatgcaagctngcttacctttgatatctgacacgtctcgggacttcattcattgtccaaggacgccaagtgtctcgaagcggccaatcaaaggttgtatatcatcaaataataatccccggacgaaattagggtatgacagttgcccctctttacttacctctcatcggagataagaggaaagcaaagataggacactgatttcgtccgtcctgccctttccgtgatgacgactctcgcctctactccttcgtntttcttctgcacaaaacanaatacaaacaacaacctgaacaacgaatataatatacatataaaaatatacacatatttggcgaaggaaccgatccggataacaacagaagaacgtgtttcccagtcaccagaggcttcgcgcttgataatggaggacacatgaacagcgctaggcaatgacattcatg

SEQ ID NO: 41856 - DNA, 422 bp, Glycine max
  unsure (1)..(422): unsure at all n locations
ctgcgagattcctcacggataacgttacgganacgtntcgaatgcgcctcggcttagattatcttcacggaaacaattnttccaagcaaattcgaaagagagagaagtgcctaaggggctggacacttccttcttgctttcctcccctatttatagcacaatatgggaggtggttgccgcccagctcgcccaggcgagcatggttgcttcctccataagcaaccgccttctggaggaatcttctggagggcccaaatgggcctgggtgctatgtgcacccccattttactaagtcacccnccttgctatttttggagactctgtttcgtaaagtacggagactacaaattcctacgatactggttctttccgaaggtacgacctgcggattcctatctcccttttgacttacgatgtacgga

SEQ ID NO: 41857 - DNA, 492 bp, Glycine max
  unsure (1)..(492): unsure at all n locations
tcacctgccgcatgcaagcttggaactctagaacttannatagccccaagatttatatgcttcaatacttgccctgaagacaattgatgttgaacaaaaattaatggagtgcaatttcatgaataaagtagtagttcaaaaaaagaaggatcatattaaaagagcaaaagaagaagaaaaaaacacagaaaatggacatacttccaaaccaatatttacaaagaaccaacctccattcttacaacaccaagaaatatattgcaaacaatattgcctttctcatttttggtaaccaaaccaaattcttatagcaataagctcaattttaaaaatgatatattttcaagagagtaagcaaaanacaagaaagattcatggcaagttcatatctatcaaggcataacaatctcaacatatgcagtgagcgtaaacacnattagaatgtgtacacatacatatagtaattntcttggtaacaccctcacgtttctt

SEQ ID NO: 41858 - DNA, 409 bp, Glycine max
tctactaatatatggagttggtcactgctgtgctcgagaataactattggttgaccacagcaacactaacgtggtaaaggacaatggtcttacaaataaacctgttgcgcatgagcaaacattattaactcatatgaaccaaggaagtgattgcataattcttagactagctaccttcagtgtacctgaacaaaatgagttccaaacacgtgaccgacacatatcatgctgtgcacagaataatcgagcggtggttgacttctaacaggataaatgtcatgctttgttgtcaggacaacaacacaacgattacgttataccgtgatgcaatgacatatctcatcttcgttatatccatccactttgccatactagcctgaatcaagcaaacagacacatctaagatatt

SEQ ID NO: 41859 - DNA, 346 bp, Glycine max
  unsure (1)..(346): unsure at all n locations
tgaagagttggtgccgctaagcgtagcctttaaggagcttagcgcatatccttgcggcagatgtttagcttagcgggcactgtccagctaagccaattctgcaaaagctgaatttctacaacttccgctaagcggctccatgtctcgctaagcggccagtgtctttnttagttttatttttcaagtttgaattttaataaattcagtcctgatcaattgtttggttcctttatatgcagatggcctctcgaanacgtaagagtagtgattctaggccacaggatcagaatgacaacaggagatttcaatcagaggaagcctggaaccaatatatcaataatatttt

SEQ ID NO: 41860 - DNA, 414 bp, Glycine max
  unsure (1)..(414): unsure at all n locations
atgacgaggttgagtcgccgctgtggctgcctcactggcttagcttcatcctctaaaagtatcctatgcatgcaggtagatgggctaatactaggaatgtctgctaaagtccatctaatggctttcttgtgcttcttgagaactatcaacaacttctcgtcttgcttagcagcaagggaggcagagatgatcactgngaaattttccttgtcctccaagtaagcatatttgagggttctggtaagggcttcaactctagtgtgggtggtggctaaacagtgggaggaaccatggtaggagaagaaaaaggttcctcagcctatacctcataaagcaagtcagaagtatatgtacctcctgcaacatggntagtgcattctgactctacaaaatcaacatcaagaggtacaacat

SEQ ID NO: 41861 - DNA, 411 bp, Glycine max
  unsure (1)..(411): unsure at all n locations
ctgtgggacttctatggatgctatatctttgagcttcaatgaggtcctctaatggtgattttccaccatggagatgcagcacaagacacacgagaagaggtgagaggaggcgccatccactacggaataagccatggaagaaggatcttcaccacgccgatgagccttggataagaagcttatagaggatgcttcaatggatgacaagaaatatggagtgaaagagagaggggggagcacaaaattgaacgaagacaaagggagagaagttgaactttgagttgtgtctcacaagattcttattcatcanagttacaacaagtgttacacatgcttatatttatagactaggtagcttccttgagaagatctcttgagaaaacttccttgagaaacttctttgagaaaaca

SEQ ID NO: 41862 - DNA, 525 bp, Glycine max
  unsure (1)..(525): unsure at all n locations
acgagcacgtgattacantcgtaaaccgcatttggtaccatctgatgcccgcgatgattaacgtagaactgcggcgtgcagacttgtgtgttgcatgatcccacacatattatttatctgcgcgttgtctttgctcgaaataacaaatgcttgagccaacagcgctgtatgaggcaaccgacaacggcctttccataaaaccagtggcacatgaacaaacaatatatattgcgctgaccgtgccagaagaaacaacgaaatctttgcttaattgatacactaactatattcaagggacccgaacaaaatgatctctcaacacctgggcgatacatatgatgacggggccaaatagtcatgtggggttgactctaaaaggaaaaagcctgcttgtgttgggcagcatccatgaaacttttttcgtcaacaatacatatccacggctgtattctcatcctcggcacacaccctggaggaccacatcacatttttaattaacatggttaaaaaagctctaacactccg

SEQ ID NO: 41863 - DNA, 407 bp, Glycine max
  unsure (1)..(407): unsure at all n locations
gacgaggctntggatgtcttagacgagctgaatgatgtgcaacctcatgaaagtagtgtntatgctntgatggngaatatctatagaaggtgtcacatgcatcagagagcaatgtttcattatggtgtttgataattgtaaaatctaagctaaattgatagtcatttntggctaataatgataatagtctcttcactctagtagtgtttttaatctaattacgaagaaattaacatttgtgcaattntttattagcagaagtcaaaagaagaagaatggaagtgttttagagggaatntgacgganaagtgtggaagaaaaagaattgaagaagagttggaagaattggaaaactctcttagcgtgcaatccaacttagtgtgcaattctcgctcaacatgtgtgct

SEQ ID NO: 41864 - DNA, 429 bp, Glycine max
  unsure (1)..(429): unsure at all n locations
atgcttatgtcttatgcttatatgatgtanaagcattntanaattgagaaagaaaattctagttaggatagctaataagcatgcaatgcctataaggcaaacatcgctatgtgctttcatgcagtaaggaaactgaacaccatgacaaaatcttttactatagttgattaaagagtatataactggaccatatgatctgcctaaaggagtctgccctaagctgaatttagtttaccgtggaagcttgaaagcgggaggtggtgagagattggctaaaagtacatatttttagtaactttattcatgcacttggaccagcgttcggacatgagatcctttagtcaaagtcaacatacatcccatcatatccttccattgattaagggttgcataacaatcttagtggcatactcatgcaaagtgaaagta

SEQ ID NO: 41865 - DNA, 463 bp, Glycine max
  unsure (1)..(463): unsure at all n locations
agcttgttcttgactcatcttctccttgaagtggcatctccaatcatctttcttccttctccgttccgctgccattgatcttcaagtagcaaaggactccattgatgaagaagattgaaggcctacaagctccacatggagctacgtcattgatgcctatagatagtctcctccaagtccccatgtagaaaagcagttctgacatgctccaactccatatcatgtcgattcataattgccatcaaactccacaatttcgtaggtgccttgatgttatagttgaagataggcatctattaatcccatanattgtggcacttatagcttcaccccagaaactctttggtagtcctacacccaaacgcatacacctcacacgctctagaatgatcctattcatcctctcagctagaccattttgtcgaggagtctatgccacaatcctatgccttttgataccatg

SEQ ID NO: 41866 - DNA, 569 bp, Glycine max
  unsure (1)..(569): unsure at all n locations
cgtggaattgatcccatgannnnctgatagcattgcattacgcgacctattaatactcagcttagaatatacaataacactntntgcacaaccatgaagtccttcttaattatcatgctatcatggaacttcttggtcttttctttgtagaacctggcattctcatacgcctttaggcagatctcatctaactcactcagttgcaactttctttcctcaccagcttgatccatagagaaagtgcaggtcttcacttgccagtatgctttgtgatcaatctccactagaagaatacatngccttccaaagaacaacccgataggaggcattcctatgggtgctntgtangcagtcctatgtgcccaacgagcatcatctagcctggtactccaatctttcatgtttggctgcacaatcttctctaaaattctcttgatntccctgttagaaatttctgcatgtccattggtttgnnggtggtatgtgtggatacnctgtgtacaatcccatacttntttaagcaggcatgcattgatntgttgcanaaatgggttccttgatcactaacn

SEQ ID NO: 41867 - DNA, 473 bp, Glycine max
  unsure (1)..(473): unsure at all n locations
agctntgaagatacaagacacaaaccgacttgcaaagtattcattcattcttcttgtaaaaatctttctctaaatttctatatagatactaagatctcaaaacaccttgtaaaccttgagagaaatgactaaagtgtagagagatatatctatttgtaaggcaatctgatattagtcattgtgaaaactttcaacaaatcttgttaatttgtttagagctagcagtagcttggtaaggcaaagaatattgngttaagtncaatcttgggtagagcttgcatttataagagtcagaagtggcaatgaagaacacttgtaactntntgataagctagtggaaacttgatgggtttccaagaacttgacatagtctcaaggtagaaatgaaccaatataatttcttgtgttattctttagtgtttntcttcatgttgactgacaaatggttcnaaattgttttagttctatatctg

SEQ ID NO: 41868 - DNA, 425 bp, Glycine max
  unsure (1)..(425): unsure at all n locations
ctcttggagtagaaacatgngaccaactcattntatttcanaaatgaagtcgtatctagtcaaggtcttagagaccatacaagtttcctaacgatttctaattatgtgggccattaagtctatcatatgctgacaatagccgagaagcctatgaatctcttcgggggcggagtaggtgtctgccatcgccttggccttggctaacaatcanggaagttcttgactcccgttcaaggtaagagcaaaccgatccatccacatggttgcctcttggtgtaaagagtcgatcacccttcctctagcctctntntccgcgtatacttgggcatattcgtccgcaatcctatgctcgtgggccgcggctagacctaactcttcttggtacttggcgatgatagctagcatgtnggtctctgtctcgcata

SEQ ID NO: 41869 - DNA, 148 bp, Glycine max
agacttgccggatgatgccgatcgaacatttgccaatcgacatcatccaattgttattcacggactgaatagaataaacaatggccggtgtcggtcactatatggccccgactgatatccttcagtcgacattgtcaaatttctttta

SEQ ID NO: 41870 - DNA, 390 bp, Glycine max
  unsure (1)..(390): unsure at all n locations
agctngaagtgagaaagtgtggaagagtcagtcttcctactnttatttgttgaccacagagtggtacctggagatatgtcgcggcggtcaggagaccttgnggacgtcaggtggggtgctattgcccaaaaccaagcttgatcaatcctgacccaacccgggcatagtcagtcagtgagaacctgtgacatacctaaacaggcgagctcctggcagtcaaccaataaaagaacaaagaccataaagcaaagaggcttgtgtggtggctggccagctatggatcttgagtgatatctggaatatggcctctggtaattgattaccaagggtgtgtaatcgattacaacgcttaaaaatgaagacaggaagttaagatggtctctggtaatc

SEQ ID NO: 41871 - DNA, 308 bp, Glycine max
  unsure (1)..(308): unsure at all n locations
gttggatgagttattcatacccattctgttntanggttnttgtgatgatgtttgtgatgtttatatgctgaaattgctcatggaaaactgctatagatgaaaggtagagttaacctatggttggaaagtgagaatgtggtgttatgagtggaaaaaaaaaagtgaggctttgagggttggaaggttaagtctgaattctgtggtaaatggaggttaaagtgagttaatactagcttgaaatgtcatttatgacttgggagaaagcttggactatgctatagagaagcacaaatgatcaaagtgaacaa

SEQ ID NO: 41872 - DNA, 411 bp, Glycine max
  unsure (1)..(411): unsure at all n locations
atctcatcattgtctttttctagagagagagagctcatgaaagcaagtaagtgacagctacacttttttctgattgtttaaaattatatcttgacctgttgcaaaatttatttataactttgtcttgttatttatgagtggtttactcaagagggagtgaaatcaggcataatttatcaatcttataataaaatatganaaatgtagtcatatttgtatcttgcaagtttcctaatttgtctttaatctatattctaatgggttaggatagtcaaagtattgagtgtatttaacatgcattggatttggtgtctggtagatctataaaacgatgttcataatacccctcctgccctcatttgatttcaattggcataccttaaagatgtggtacacccaacaggtcactac

SEQ ID NO: 41873 - DNA, 278 bp, Glycine max
ttctcctcctcgaagctcttctctagatactgaacctggctcgcagatatacgtcgctgcttctctggttgatgaaagtactcgtccatgcactcatccccattgtcgtgcatgtcaaacgcgcggaagaaggagccgttacaccccttccctccttctgcttcaaaactcatcatggatctcgaacctgaaccagattataacaaaaacaccatccattagtcataggtcaaaaacaaaaattggtgatagagaggttatattaggttctttttttt

SEQ ID NO: 41874 - DNA, 463 bp, Glycine max
  unsure (1)..(463): unsure at all n locations
cggttntgggcaatagcaccccacctgacgtccccaggtcttcttgacctcgcgacatatctccaggtaccactctgtggtcaacgaataaaagtaagaagtctcacccttccacactttctcatttcaagcttgtaggattatggggtacccatcagatgtgggactaggtggcggtcgggcgatggtgcataacaattcttcacattcaccaaataccgttaacccaccattcctggtgcccacctcactgagctcatgacttccacgagccctttcctcgttctctcacgccgggtgccataattcttccagcttccacacatcaagaattaacatccagccctctaactacacacgcagaaaatgggcgaagagaaaacttgccaaacacaaccgacttacaactttaactcgaactcagaaatttcttcgtcatatttaccggggatcatctaaattt

SEQ ID NO: 41875 - DNA, 529 bp, Glycine max
  unsure (1)..(529): unsure at all n locations
tgacggcctttgagccatgagcacggatgattcatgactgccgcttcatctnctaatgcttgggaaacacaagttgtttatatgattggtacacatttcttcactggttgttgagatacacatggcacgatgggatggtgttaagaatactctagttttattatacgtatgcttactatgaaatatgagtgacaatggcttatgtcaatacttcacttgcgtctttatcttgatcaaaatttctggatgagaaacacgatattgagcttcacggttgatactcggctgtatttgtaattctcccataatcaaattacacaacntcttgctcatgttttagtgaacgaatgtatcttagtctctttgtcataaaatgaccgccataactcgccgccatatgttgcacacttctcgcgagtctccaattggaaactatgcatgcctgtatctccgaagtaacaccaccgtataatataacttcatctgtttaaacttattatccgtctaagctaataaattatctcctcgg

SEQ ID NO: 41876 - DNA, 422 bp, Glycine max
  unsure (1)..(422): unsure at all n locations
cacctgccgcatgcaagctnggccaaaccaaaatcagcaactttaggacataagtttctgtccaagagaatatttcccggtttaatgtcgtagtggattattctctgttggcactcttcatgtaagtaagcaatgcctctcgcagtaccaactgcgatctcatgaagcttttcgaatgataaggttgtgttttcgtgaaacaggtacttctcgagtgcaccattcaccatgtactcgtaaaccagtgctctcaagtgtctttcgaagcaaaacccatatagacgaactagattaaaatgatggacttttccaatggtacccacttctgccataaactgctcatcaattctcttgtcagaactcccacgtagaactttcacggctacgatggttccgtngctgaaacttcctttataaacaac

SEQ ID NO: 41877 - DNA, 539 bp, Glycine max
cgcgggtttgatacccacgattagctaacacatagactaacgcccattattatgttggcgccgcctactgacgtgcagatgcattgttgcgttctatattttgttgatgctgaagccaaaatctggattcggtatgagaattatataaattaatattccttatccgagtataaagctattggcttggtatgtcttcccactaagcaaatcaatgtgttttccttgagatatttagtggaaactcttagagagaaagggtataaaatccgcacggggtatctcatattttccaccttgtattaactgaataccaaatggagcgtgtatagtagctgccctcatcaatacaactggctcacgctgagagcacaagaataatatgcttgtgttatattatggatagaaaaacacactgaagattgaatacaatcttcttattatgtttctaatatctccccccccccctccactcaagggagggtgctgagaatgctcaatctatttgtttgttcactctaataaccgtgaagaggctggtc

SEQ ID NO: 41878 - DNA, 431 bp, Glycine max
  unsure (1)..(431): unsure at all n locations
catgatactgtatttgatngtgagctacaagtattaagagatcactatgtatttaataaagggtacctgctgtccaatanggcttggctatgcttttcacgcactttcaccaatttagaatatattcatttaaattgttactaaacattcaatgcagttttctattttttcatgtaagttntagttgaatcatgcattcttgtatgaaagaaagcaatccaggggtctgtgaccttttctcctcaacttttgttaacctcttgcttctatatatatagagccctcactgtatatattctatttcataatcagggaatagaaccaaagcaccattaaaatgtaatgatgaataagtcttttttttttattttttgacttatcatcttaacttcctctagttangacataattgagtctgtttatcaacttat

SEQ ID NO: 41879 - DNA, 398 bp, Glycine max
  unsure (1)..(398): unsure at all n locations
cattcttagaagtttgatacatanaggatntgagctctttgttcatctgagtcatntcgtgtagtttcatcaaggtaagaagggtctttccactttttgaaccctaaccttgttatctttcgaagctaggcttcattgcatgttatattgatgattaaaatttcgtatttgttgccatgattggaactctgtaatatggtgttttcttgaagtttatcggtaaaaatgagttcttggatttaaacttacggtaggcttaagttcactttatcggacgttttttatatagaagtattaataaaataagtttaggacattctgagaatgataattgcacgaaattgactgattgtatagtatataaattcttttctacagtttacctcaaaatgaatttt

SEQ ID NO: 41880 - DNA, 342 bp, Glycine max
  unsure (1)..(342): unsure at all n locations
agactgtangaatatggngtatccatcacatgttgtactangtggcggtcgggcgatggtgcacaaatagttttttntttccacatccacaatgcgcgcataaacccaccatcccctgttgcccacctccaactgagctcacgtactcccacgtagcccatatcctcgtttctctcaacaccgggtccccatcaatcctcccaagcttccacaacatccaagcaaaacaacattcacacagcacaagctatcacagccaagctaaacagagtaaaggcagaaaactctgctcaaacaccaaccaaaaatcacagcttttttccactcaaagaccccagtaac

SEQ ID NO: 41881 - DNA, 214 bp, Glycine max
  unsure (1)..(214): unsure at all n locations
tctatggaggctggatctttgatcttcaatggtgattttccactatgaagatgcancggtaggcaaatgataagatgagatgggaggcaccatactttaaggaataacgcgggagcactaaattgatggaataacagatggagataagttgaactctgaaatgtgtgtcatacgacctttattcttcaaatttgcgacatgtgttagacatgct

SEQ ID NO: 41882 - DNA, 453 bp, Glycine max
  unsure (1)..(453): unsure at all n locations
agcttgtctgtctcgatgcagcagtaatgatggtccgagttatgttggggagcggttacgaacccggaatgggtttaggcaaagacaatggcggcataactagcctgataaatgccaaaggaaatcgtgggaagtatgggttaggctataagcccactcangcagatataaagaggagcgttgccggaaggaagagcggaagtcaaggctcgcggttgagacaagaatgtgaaggaaacccaccctgccacataagtaagagctttataagcgcgggttagggggacgaacgtcaagtcgtcgctatatactaagatgacgttccgagtatgctggatttggtatgaccatgccctcctgattccaactgggaaaatggcgagtggaggaacgccccgacatttacgcgatgagcataatgtatacctttacnggtttaaaagctctatagtt

SEQ ID NO: 41883 - DNA, 368 bp, Glycine max
  unsure (1)..(368): unsure at all n locations
agcccgatcatctcaacatanatataccagtatatcttgcagtagttatggacagagtagagctccaattcaaatgccanattgagaaatcgaatagctatccaataagtntgctcttctacccatgcgagaatgtgttggtatattatgaaacatattttctggtaaaacagagcgatattataaattagcagattaattgcagtttattgataacagctaagtgacaatcaaccaatttatgcccatagaagcgtgtgtgctgcaatgcaacacgagagaattcactttcatgtgagtttaacattatatctcaaaggcatgtgatagctaactttctgaagagcaccagacaattgttaaactaa

SEQ ID NO: 41884 - DNA, 275 bp, Glycine max
  unsure (1)..(275): unsure at all n locations
agcttgaaattgaacaacggaagctctcgagataatcgagtggtcataatatttcacacagatgtccgattcggggaaataatatatcgagacgcacgaaattgaacaacggaagctctcgagaaatttgaatggtcataacatttcactcggatgttcgatccggggacataatttatcgagacgtctcgaaatgaacaaccgaagctctcgacaaattagaatggtcgtaactttttacgcgaatgttcgantcggggacataactcatctag

SEQ ID NO: 41885 - DNA, 377 bp, Glycine max
  unsure (1)..(377): unsure at all n locations
cgccgccacggagttntccgactatgctcttgtgtggtggaacaagctacaaaaggagagagcaaganatgaagagccaatggttgatacatggacggagatgaaaaagatcatgaggaagcggtatgttccggctagttactcaagggacttgaaattcaagctccaaaaactaacccaaggcaacaagggggttgaggagtatttcaaggaaatggatgtgctcatgattcaagcaaatattgaagaagatgaggaggtaactatggctcgatttcttaatggtttgactaatgatatccgtgatattgttgagctgcaggagtttgttgaaatggatgatttgcttcacaaagcaatccaagtggagcaacaat

SEQ ID NO: 41886 - DNA, 299 bp, Glycine max
  unsure (1)..(299): unsure at all n locations
tagctnttcgattcattctatgcacccatagaggtccacattgtgtttagtgcatatttattctcgttntgtttactttatatacccgctgttgacgtgcttaagccattatacttaagtcgtttctcgcttaacttaaaaataaaataaatttccaccgaacgtttgaattgtattatccattaactctggttaaaatcaattccgaccgttcggtcatgccgtaaccacgttggaaatcaaaaagaggtaaaaaataatataataatcaacaaatatctttttagtaaaataaagcg

SEQ ID NO: 41887 - DNA, 444 bp, Glycine max
  unsure (1)..(444): unsure at all n locations
agcttctggtatatataagtgtccttgaatcatttattcattgtctctaaacaaacatattttctctcttaaacttgcgtctgaagaatgtggctataggggccttaaatgtgtgcagtaaatgagttcaagctgagaaaccactctttgttattggcgtgttgaacactacaataggaaactgtttccttttacatcagagcaggtctcggcagcaaaactcttctttcaatggcaattaaggaatatcagaacttgacttcattaaatcttcataggattcgacagattctaggagaatgtatccacaaaatagatctcaaacacaaagtaataaatgaagtcttaaatgacatctttaatgttgtaccatatcatgattctatattgttattgtctaanacattagacagaagcttcacacatcatgttctgataatgcat

SEQ ID NO: 41888 - DNA, 271 bp, Glycine max
agcgtatgttacactctattccggacatgttcatacaattcaactacaccaaatcttataacttgcaaccacacatttcatatgcaccgtactaacaaaaaaaatctaattacttctgcaacagactatctgtctcattatgtaaatttatttctaatagataggtttccatatatacatcgccatgcatgaatcatgcattttagatgaagaaaaaagataatatatatgctgggtgtctcaaaatctttgtcacttacattgatgttta

SEQ ID NO: 41889 - DNA, 447 bp, Glycine max
  unsure (1)..(447): unsure at all n locations
actatgcaaagagtatccaaggaaaatttcttcatctgacttagaatcaaactttcctaagttttcttttccattgtttaatacaaaacacttgcaaccaaaaacatgaagatgcgagatatttggtttcctaccattaaacaattcatatggagttttctttaaaatgagtcttattaaatccctatccatgatataacatatagtattaacgacttcatcccaaaaatattttggaagaggagtatcatataataaggttctagcaatttcttccaaagacctatttttcctttcaacaactccattntgttgaggggttctaggtgcagaaaagttatgttcaatgccatgtttttcacanaataaatcaaattctnntatttcanattcactcccatgatcacttctaatagatataattctgagaattttcttattttgaat

SEQ ID NO: 41890 - DNA, 563 bp, Glycine max
  unsure (1)..(563): unsure at all n locations
aggagatttttttgaccatatagctaaccattgattacgcacacatgagtgtgagcctctacatgacgaaggacctattttctagagagactctctttaaccacaatgtaccacatctttaagaattatccttacaaccaataaagccactaactcttatgcatgctatcaagccatacactctttcttaccatatgcttatgcaacgctagctaatatgcaattcatactcagttcatctgcccctatgcgcattaactatgcccacgagttcactcttacgcactgggtatatctcactcactgaangatgtaaaccataacatttcattaatcatgaaacatcgcaaacaattaatcatcactcattgaccttcctaatcacacatcttatcttctctaaacccacacccacgtggtataacatagcaagacatactcccaaaccttgaaatccaacactgcaacataattacgcctcatccttaactgagataagaacgtcactgacgagccatcactgacttgtattcctaaagcctatctgaccatgtgaataatgg

SEQ ID NO: 41891 - DNA, 467 bp, Glycine max
  unsure (1)..(467): unsure at all n locations
agtcacctgcngcatgcaagcttgtcattaacctgtcaaaccatggcaagtcagtcatgcacccaccaaatcaccattgcgcaattntgatatgtttgttattgttgtttgatacaacctgttttgcacccaaatcatgtcgacaaacaccatgaaaacaataatagcttatttttcataatgaggttttgttgttgttatgctcctgttaagaaacctatatttggttttctcgccaacaacattgttgtcgtgtaagcttgtgacattgacaaggggacacaactgtcgtcaaagttgacgacacacattatttttctcattctatgtccctaaaggttntcattcttgacaaaagaatttggtggtggaaaacatgcttgccgtatangatgtcatataagtgacgatggtagtggccaaaatcatgactatcaacgcgatgttgatagaatgtttgtaaagtg

SEQ ID NO: 41892 - DNA, 403 bp, Glycine max
  unsure (1)..(403): unsure at all n locations
attctgtgttagatattcgtgatttacaacctggcaatgtgaaagttnttattcaatggcaaaacctccctccaagtgaaaatagttgggaatctgtggctaaattacaagaggtttttccgacttatcaccttgaggacaaggtgagtcttttaggaaggggtattgatatgcataagcataagccacacatcaccaacgtgtacactctcaaacaacgagcaaaagaagcaataaccatggaccaccagcagcaaggcgcacaacacccaaggggtgcaaaccacccaatagttacaacccatccaaagggtgtaaaccacctaatagttacgaatcacccatagaatgcaaggtcagaagatgcgaatcaaggggacatgacccttgggaacagtcacaa

SEQ ID NO: 41893 - DNA, 512 bp, Glycine max
  unsure (1)..(512): unsure at all n locations
tgccgcatgcaagcttatccttattgttgtaggtgtggttcatgtctgtgtaaatagacaaataattcatttctagaatagttcattnttctttaaaacgtggtttataaagatcaaaacattttcaaatcttggttttggttcaaaacagatttttttttccctttcatttgttcaccaaaaaatgcacacgtttttaacttcatttaattattattgattaaaacattntcatgttttgatttgattcaacacacgtttgattntatttcttctttcatttactcaccaacaattggaacatatataatcgtattatataagaagggaaacacatttaaatttttgcattaatttttataanatatcntttattagaaatcanataacagtataaattaatatgaaatattgtacatttatgtaagaagatnnntgggttttaatttccatcaagaattctacagatatgctgttattataccagaaattcaggattaattaaacttact

SEQ ID NO: 41894 - DNA, 426 bp, Glycine max
  unsure (1)..(426): unsure at all n locations
cttcttcggcatatgcgagatagttgttgtttgtgatattattgaccagccctccgagaccttctaccgagatgtcttgggccacatgggcctcgttcaaaaccttcactagtagagcccgatgaggctcggagctcatgagtaactccaacagcgagaccctggccggtgttttgttgtgctgttcgataaccttgaattcgctctgctgaagtatacggaggaactcactggcttcctctagtgacaccttctttgtaccatcctttttctccggaagacctttcgcctgaatatctttattcgaagtgaggggtgcttcgtcatcttgttcctccaccactattggctttccccttgacgtttgcnggttggactggtaggtccgcgggtgcaaacacacgaccgctacnggtcacaccactc

SEQ ID NO: 41895 - DNA, 283 bp, Glycine max
tggctaatgcaagttagtgaagtgaagtgctaattgactaaatcagatttctgtttaatcgttcacaagataccataatcaaaatccgttgcttaagaaaaatgtacgatgaagaatactaagagtgaggctgaaaaattatgcacgagattaaaatattgacgacatcggaacgtttagtggcggtggaactaattttgcagcggttatagattacgatgttgtcacgagcgactaaaaaaatcgtaattgtggtggccggtgaggtgacgcatgtactata

SEQ ID NO: 41896 - DNA, 430 bp, Glycine max
  unsure (1)..(430): unsure at all n locations
cacaagtcatcattatttatacatcaagctctgcaattgctgcaggaaggcttctaagctaggtgcagcttatagaggcaaaggatgagagttgcaagataggtagcagaggcggatgattgtttaattattattattatntgtacaaatttttattgtgttgacanttngttagttgatggtgttttttatttacttatttttgtgttcctcgattgttaaacaacatgcgcctagtagtagcaacaactcttcagttgatttataaaacaaactttcggataaccaacaactaaataaacaatgataatataaactttttttgaanataaaataaacaaatagagtacgaatctgataaagtaaaaatatgactacacatatctaacacacatcagagcaatgatcttatcaacaggtcttgctttca

SEQ ID NO: 41897 - DNA, 374 bp, Glycine max
  unsure (1)..(374): unsure at all n locations
agctngccacttatctcgcccaggcgagcaatgttgcttcctctagaagcaacagccttctggaggaatcttcaagagggcccaagtgggcctggttgctatttgcacccccattttactaaatacaccccctagcctttattggtgagtcttttgtcgtaaagttacggaaacttatgaatttcgtaacgatacttgttttctttctgtaatgttacggaacctggtggattacataatcatccgctcttttgacttacggaatgttacggaacctcactaattgtgcaacgatgcttccatttgatttccggcgtgtcacggaaccttacggcatgtgcatcaatattttcttttgattttcggacgtcacg

SEQ ID NO: 41898 - DNA, 398 bp, Glycine max
  unsure (1)..(398): unsure at all n locations
tctcacaaagcctgagagactaagctgcagtcgtttgtggaacccatggtagcacagcaacagattcaggatcagttgaagcctgcacagaacgttctgacatactgcttgatcccaacaattcatctgttgtagagaagttcaacgacagaaaatctcgccgtagtgatctctcacanagggtcaatatctgcgaaatgggtttttatgggttggtaattcatgtctgattaagcatatgatgcacagatataatatctagaacttttaagaatngagagggcacgagacctgtaaaagttcctcaacagaagatgatttgctcaactttatgccccagtgcttcctaacatcattgatccaatttgcttcaaatgcttcagatagaacagatacct

SEQ ID NO: 41899 - DNA, 371 bp, Glycine max
  unsure (1)..(371): unsure at all n locations
cgctngctacatatataacttacttgagaacctctgaggggtctggtaaggcattggtcatttgatcattggagttaattaagctagcgataatatctcctaataaaatcttttccttgatgaagtgatagtttatctcaatcacgaagattagattggaaggtgatatgaaagcagcttaattgttacacataagtgtcatttgcattgtgcacaaccttcctaaattgaagttctcccagaagttgtttcattcaaatgagctagcaagtagatgaagccatgatttggcagtctgcttttgcactggatcttgtgaccatgttttggttcttattcttcctggctatcatattacccctaatgagtac

SEQ ID NO: 41900 - DNA, 460 bp, Glycine max
  unsure (1)..(460): unsure at all n locations
agctnnttggagtatanacatgggaccaactcattntatttcagaaaagaagtcgtatccagtcaaggtctgagagaccatacaagtttcctaacgatntctaattatgtgggccattaagtctatcatatgctgacaatagccgagaagcccatgaatctcttcgggggtggagtaggtgtctgccatcgccttggccttggctaacaagcggggaagttcttgactcccgttcaaggtaagagcaaaccggtccatccacatggttgcctcttggtgtaaagagtcgatcacccttcctctagcctctntntccgcatatacttgagcatactcatccgcgattctatgctcgtgggccgcggctagacctaactcttcttggtacttggtgatgatagctagcatgttggtctctgtctcgcatagacgctgagacaagctttctttggaccttgaa

SEQ ID NO: 41901 - DNA, 358 bp, Glycine max
attccttggattatatggttgatccaagctcatgcttttacaaagaggttcatcaagtcaagttgaaatatggaagtaaccgtcttgcagatatgaggcaggaaatgaatcgagtcacatcactgcttcgtctactgccaaacatatttaggattatcgatgtgcgtggtacttccagattcaccttgacaaagatgtcatgggaccatgtgaaaatctaaattgattcaaccacatatcttgcgtaacaattcgcaatacgttaactgtacatcattcgcatgcatccatgcttttcataggttgcattgctcgctgcattctttccttgaaaaataaaatattatgaacttaatca

SEQ ID NO: 41902 - DNA, 378 bp, Glycine max
  unsure (1)..(378): unsure at all n locations
agcttctagtccttgtggatcttcttccctcttattcttgaactacacttgtaggtttagcttgaacttcacctgtaacgtcatcaagttctggttcactcaatgtttttgtgttgatatgcatcattggcttcttgcttggatcatgtttgtccttcatccatgtgttcagctcatcaaattgcacatccctactgaaaactattcgattcgttcttggatttaagagtttgtatgaccctgtgggattatagccaacaaagatcatgtgttcactcttgtcatccaatatcttccttgtatgatcacgaatatgnttgtaacatgttgagccaaaaactctcatatgcttcacagatggtgttttccctgaccata

SEQ ID NO: 41903 - DNA, 591 bp, Glycine max
  unsure (1)..(591): unsure at all n locations
aggggnatgagnnaatgnatgnccattgtnnnngttgattcccattctatntacctgacactatataatacataagctctgacaagacagtacacactgctgtcttctacaacaagatattatanggaaatctactctaaagatacatctaataatacccactattataacactccccctcaagctggagcatataaattatatgcaccaagctcggaacatataaactgaattctatgcccccttaaggatttagtcaaaatatctgctggctgatcattggaattaatgaattcagtgacaatctctntatacagtagcttctcccgaataaagtgacagtcaatctctgtgtgcttggttctctcatggaagactggatntgaagcaatatgaagagcagcctgattatcacaatacagcttcattngcatcactttgcagaatntcaactcttcaagaatgtgtttgacccacataagttcacatgtaactacagccatagatctatattcagcctctgcactagatctagcaacaacagntngcttcttacttttccaagagataacattcccttcaatagagaag

SEQ ID NO: 41904 - DNA, 447 bp, Glycine max
  unsure (1)..(447): unsure at all n locations
agctttctttgttatctttctttcttttctgaagccaaggagactaaaaattaggttatgtaatgccaacaatatctattcatcatcatctgcatagttttacttttttgaaacttagtgtgttgttatcagacagtacgtagcctattatatgctataacaattacaatattcgactttggtttaatatttgcaggggtatcaacttggtccattgactaattagatcatctatttctgttntcgggagcaacatggaagcatattggagtttctgtatagacctagctagtctcaacattttcaaacaaaatgaaaattgacttcctttgatgatcatactggtgaaccgtaaagcattggtgttacgatttcaaacaagacttgtttcatatntttcatgtttacttagtagattttgtactagacaatgctttaatttgatat

SEQ ID NO: 41905 - DNA, 139 bp, Glycine max
  unsure (1)..(139): unsure at all n locations
agtgtgagagcttattgaacatgtntggaatgtctatattatcatatatatccganaacgctggtgcatgaagtgtcaaaggcgaacctctgagaggcatcttgcacgtacacctcagctccagctgtggatgcatcat

SEQ ID NO: 41906 - DNA, 165 bp, Glycine max
  unsure (1)..(165): unsure at all n locations
agcttgaacagataatcgctganacccaacctaaccccanattaaattagcaacacttcctcgcactctaaatcaagcttgttggagaaaagaaggaagaatggaagattgaagagtggtgagatgaaggcagactcgatctttgtgtggcacacgtctgagatg

SEQ ID NO: 41907 - DNA, 306 bp, Glycine max
gcttcaacctttggtgcccatttctgctccatatcgcgaaaggagggcattatctgaatcgtgaagtgcgtgtctactagtgggacttctaaacttcaggtttgggtggacttctttctctcttgattttcgtgggtatggggttttgggagatatgatggatagtcttgctagttttctgcttcatgatagttatttgtgaagaaacttgtttaaagcatgttgaaatttccatgtttggatgagttaaacatacccattctgttttacgggttttatgaagatgcttgtgatgttcatgtgctg

SEQ ID NO: 41908 - DNA, 434 bp, Glycine max
  unsure (1)..(434): unsure at all n locations
agtcacctgccgcatgcaagctntgagggtgcgcagcccaccatcttttcatagtagagtaccgataatgtgtctaccatcacgattatcgtctccctttccattattgggggtaccacctgngccgccagatccctccaccttttgggcgtgttctttgaatgatccgcccccctttttgcacatgttctgtagttgcatcctatccggaaccatatcaaaattgtactgatactgcctaacaaaggcaaccattangtccttccaagaatggactcgggaaggttccaagttagtgtaccaggtaacagctaccccagtaagactttcttggaaggaatgtatcagcaattcctcatcttttgcgtattcccccatcttctgacaatacatctttagatggttcttgagacaagtagtccccttgtacttgt

SEQ ID NO: 41909 - DNA, 218 bp, Glycine max
atcttacagtcacctgcacgctgcaagcttcaccggatgacgccgatcgaacatttcttaaccgacgtcatgcaaatttctttcatggattgaattgaaaactcgttaggcgacatctgtcgtgaagtagcgaccgatatttttcaaccgacatcgtacaattcttgttagaagagctcgctggtcgataatggtctttttacggcagagtaagttat

SEQ ID NO: 41910 - DNA, 446 bp, Glycine max
  unsure (1)..(446): unsure at all n locations
caagtgcttganagaatctatgacaatgcttacattgttgagctgcccggtgagtataatgttagttccaccttcaatgtctctgatctatctctttatgatgcagatggagaatccgatttgaggacaaatccttctcaagagggagagaatgatgaggacatgaccaagagcatgggcaaagatccacttgaaggacttggatgacctatgacaatggctagagcaaggaaagccaatgaagctcttcaacaagtgctgtccatactatttgaatacaagcccaagtttcaaggagaaaagtccaaggatgtgagttgtatcatggcccacatggaggaggactatatgacaccactttgcttcaatnttagagtggttagtttggctaaataatggcccaatccttgtaaaagtggctgaccaaaaatatagtttgtgtaatc

SEQ ID NO: 41911 - DNA, 462 bp, Glycine max
  unsure (1)..(462): unsure at all n locations
acctgccgcatgcaagctnggtgtagagcttgagttaagaagctagatttgacagtgataaatacttgtaacttgttgaagttagtgaaacttggtgtgttaccaagaactagacgtagtctcagtgattgagatgaactaatataaatttcttgtgtcttacttatcttattttctcttctgttttttaaactaacttacggtttgaatntgatctttatttttgaaatcttcgtttgtttttataagatcttaaacaatcacctgatttgccttatggaaatctaacatatgtttccttagttatttttcattagacgataacattgttattttttgaaaaagtttaaatttagtaaaaattacaattcaaccttccttcttataatatttgcctttacaattattatccctgatggtacatatattgacttaagtctttaaagtgatttatatatactc

SEQ ID NO: 41912 - DNA, 336 bp, Glycine max
tgcaatcttgagatcttctatctgcaagagagttactcttactcaacaggttcctatgtgttatatgctccactagacgagtcagctctcacatctatagtaaagggatcaaaccttgacaaagtgatgattctgccatcacggtttagtatacttcccggaacgttgcaaggagatgaatatagacgcactggaagtcctctaactgttgcatttcatgtagatgaaagtgccacggataagccatatatccctctctaatcaattcaaattatacacaaagtcattacagataccgttacctctttaaaggacattgtgctgtatcataatcat

SEQ ID NO: 41913 - DNA, 538 bp, Glycine max
  unsure (1)..(538): unsure at all n locations
tggacggcnatttgagtccatgagacccgcgatganacaatctaaacccgcgatccttatagacacctgccgcatgcaactttctctctaatagactgtgcatgattgtccgtctgatggtgtggtcccattgcatggagaaagttctcaataacacgctcttatagtcatcctatttgagcatggacctggaagcaacgtaccataaccaagctgattccactgcctccagagaatgacgagaagcctatagaaagatatgatcttcctgcacatcaaggcgcttcatggtggaacaaacaatatggaactccataagatgcttgagaggatcttcacctncaactaccatgatactagtgcattggaaggaatagttcagtcttgacaacatatggaacactctctaatgatatagaatgcaaatcttattaactggatacggtgcaccatttacttttagtcattcacacgtggaattgcaagacattacaacttattaacgacactaatgttatgtactgaattgcaaacaaat

SEQ ID NO: 41914 - DNA, 362 bp, Glycine max
  unsure (1)..(362): unsure at all n locations
tgaagcaggtcttcatcaccattcatgaatgtgtntgacattntgaatacatttttaggctacaaccttattattggaaagcttttgaaccacacagagaaaccttcaatttagtttagttagatacagtttttaaaatataaatttttaaagaaattaagcattgactaaaaatgttagagaaaggattatgcaccgtgaatagtagatattttaaaaaaggagatgcaattataatagtaattatagttaatctctagtcaattntaattntaaanaaaaaaacattgtaagacatcttagaataatatctttctaagacgaattttactttagaatcatctttatatgatgtcattcta

SEQ ID NO: 41915 - DNA, 425 bp, Glycine max
agtgtttcatagtgttcatctattcactgcttctgattaagcaaggccacaatcaagaaacaaagggatgtgagatatgaagccaaagtgcaggcaatgtacataacatgatagactagttgagatatcattgcctctattacaatcctctctgcaaacaaacataattcagaacatgaatacaattctctttatgacaacattcttgtaatcctttctcatcaatcactaagtcatatataagtaactcaaaattcagatctatttgaatctacttcatgcataatacatcggtcattagtgtaactcacaataatttaccatcatgttaagtggccatactacaacatagaatccaaatatcactactagaaaattgtattctacatcggtcaaatagcatttacatcgtgctcaaccgtgtg

SEQ ID NO: 41916 - DNA, 230 bp, Glycine max
aatatatattattacttttaaacattatatttaattttttttttcacaaactaaaagagagataatagataatataagggcttgagatgaaagatacatatacttttaattgtggagtatatttgaacaaagaattgattattctattacttttaattgttcgataccatctgtcattaagatatcctataatacgaactttcttatttccaaccattgagagattaccc

SEQ ID NO: 41917 - DNA, 474 bp, Glycine max
  unsure (1)..(474): unsure at all n locations
aaatatgtattatctagatgtcgatccttgatgaanatatgttttttgtatcaaactntatntacgtcctgaccaaactacgaatgaatcagaatctcttttctctaatgaatcagaggattaagacaaanaaatatttaatataagtctaaataaaactataaaaatgttggatccattgggagacctacaaaaagtaagctttcaactcaaagtaagttttaccattagaaaaaaatgaagatgagttctagtatctcatgtgaaattgcatcacccacanaaaataactcttgaattcanaatgggttactaccactaagaatgctctaatatntctaaacacgacccaacactcatcaaactctttgctnttaatggtctaatgaagtattttatctattntttttacatgaataatttcaagtatgaaaaaatggtatacgatatactttctgacctcatttgaattta

SEQ ID NO: 41918 - DNA, 533 bp, Glycine max
  unsure (1)..(533): unsure at all n locations
ggcgtganttgagtcatgcaacccggatgagtcgtctcgtgcgccatctctaaccgaccgctgctgcagctctgaagttactccattgactgtccaaccgattctacatacttgcgtgccataaaatcatgcactgtgattctctatttgaaaatctatttggaagaacgatgaccgatgatcggcttgagtgttccttctgagaactagacaagtcatgtttcactttgctagctgcactgtcttctgctttcaagcanatactaaatgtattcagtgttnttacacgcaatatgcgtatgacaccatcttctccttcactaactagatattggccattgggactaaatttcatagtccaaataggcccttgtgagctctatctcttgtcaatatacagtgcacttgactccttccacctcttcttatatctgcttacanttatttcttcgaggtataatatgtcgttggattcaattttgatcttgaattacactccacttcctttcttgctgctattaaagggctatccn

SEQ ID NO: 41919 - DNA, 343 bp, Glycine max
  unsure (1)..(343): unsure at all n locations
agctatgatcaaatgactaannattaatggcataaaagatatttagcagatagccaaaccaacttcactattcctagttagaaattccaatattctatattacctgctcattagctgtaggaggaaggcctccaacatacacccgcctagcatgtcatgtagcctggtaattcagtacatcaaagataggccataatcagggaaagtcatgctaaacttaaaatgaaacttaaataagactgtagtcagtctcagcaagcctccatactcggaaagactaaacttaaaatggtgtgttgacgaagttagtgtggttctactctttttctataatgactctttt

SEQ ID NO: 41920 - DNA, 350 bp, Glycine max
  unsure (1)..(350): unsure at all n locations
atccacggaggatatgcttaccacctcgtatgactggatagcggtttctaatgactcctctgcggcctccacataaggcataaaggatgggcagttcaccaagatgtcttcctcgcctgatacgatgaccagatgcccttccactacgaatttcaaattttggtggagtgtagagggaacaactcccactgagtggatccacggacgccccaacagacaactgtatgggagttaatgtccattatttggaaagtaacttggcatgtgtgagggcctatctgtactgngaggtcgatctctcccctaacctctcggcgggtgtcgtcgaaggcacaaaccaccattgaact

SEQ ID NO: 41921 - DNA, 287 bp, Glycine max
  unsure (1)..(287): unsure at all n locations
agcttataagaaacaaaatgcctcaatcatttccaaatatgcatgtgaattangaagcatcaacaagaatcaagccaaggctattgtgcaagcaattaatggggcaaaacacaccaaatgattatgatgatggatggctcaaattctaacaaaggtaaactcatcactttcaaattgagctttcaaaactatcatgacatgtagaggaaaatcaaggatttcaaatcacaaaatttcaagaaacttttattttcaaaataattacccatttcttgaacatatcctat

SEQ ID NO: 41922 - DNA, 486 bp, Glycine max
  unsure (1)..(486): unsure at all n locations
atatggngtacccatcacatgtggtactatgtggcggtcgggcgatggtgcacaacaagttttccacatccacaatgcgcgcataaacccaccatcccctgttgcccacctccaactgagctcacgtactcccacgtagcccatatcctcgtttctctcaacaccgggtccccatcaatcctctcaagcttccacaacatccaagcaaaacaacattcaaacagcataagctatcacagccaagcaaaagcagagcanaggcaganaactctgctcanacaccaaccaaaatcacagcttttctcacttaaagaccacagtaacaattccttcgatccaattcgttaaccgttggatcgactccaaaaatttactggaagtctatagtgcataagcctacattgtgaccgttgggatctactagcanagatcaagaactcattctgtactactctttccacagccaaccacacacaagcattttct

SEQ ID NO: 41923 - DNA, 568 bp, Glycine max
  unsure (1)..(568): unsure at all n locations
tgcacgtgcnntttgaagaccctttgaaagaccccnntantnacntannattgannatcgatctcgtacccgnngatcctctgagtcgacctgcngcatgcaagctnnttggagtagaaacatgggaccaactcattttatttcanaaaggaagtcgtatctagtcaaggtctgagagaccatacaagtttcctaacgatttctaattctgtgggccattaagtctatcatatgctgacaatagccgagaagcccatgaatctcttcgggggcggagtangtgtctgccatcgccttggccttggctaacaatcggngaagttcttgactcccgttcaaggtaagagcaaaccgatccatccacatggttgcctcttggtgtaaagagttatcaccctttctctagcctcttttttcgcgtatacttgggcatattcgttccgcaatctatgctcgtgggccgcggctagacctactctttcttgtacttggcgatgatactatcatattggtctccgtctcgcataaacgctgagacaagcttcttttgactttgacangcactaan

SEQ ID NO: 41924 - DNA, 433 bp, Glycine max
  unsure (1)..(433): unsure at all n locations
tcgcacttgataatggagacacatgaacagcgctaggcaacgacattcatggcgctccgaacaaaggtggagtatggaggattgccttgagggtccgcacttangcaatcatgaaactaagctccaaactcgaaagtggaggacacatgaacaaccctaagcaataatattcatgtggctccgaanaaggatgagaatggaggattgccttgagggtcctctcttangcaatcatggaacacagctccaaactcgaaaacggaggacacatgaatgaaaccgcaattcattcacgtggctccggaacaggatgagaatggaggattgccttgagggtcctctcttatgcaatcatggaacacagctccaatcatggaacacagctccatactcgagaacggangacacatgaatgacaacgccattcattcac

SEQ ID NO: 41925 - DNA, 375 bp, Glycine max
  unsure (1)..(375): unsure at all n locations
aagcttctggatcagggagctaacaaaaantttcatgcaggtggaccttcttctagtagctctgacttgcagcagcctcctatccctcttccatttccacatagagcaattcccaacaaaagaatggaagaagtggaaaaggagatcttggagaccttcaggaaagtaaaggtgaacatacctctgctagatgccatcaagcaaattccaagatatgctcaagttctaaaggagttgtgcacccacaaaaggaagctcaaaggcaatggaaggattagtatgggtagaaatgtgtcagcattgatagggtaaattgttcctcacattcctgagaaatgtaaggacctaggtactntctgtataccttgcattatt

SEQ ID NO: 41926 - DNA, 462 bp, Glycine max
  unsure (1)..(462): unsure at all n locations
tggacttaccttgaatcaattcctttgatagcccctttgagcctattntcccctttctttgttttgaagttcattacaagccttaagtgaaaaaccatgatatcaccttacccttaaggaattntggagctttggaattgttctgggaataagctgggtgttagtgcttagctntactgagttttaaaagattggctaaaattttgttaaaacataagcacttatacaatgaaggaaagctggagttgctgcacatgatgtccaacgttatgtcaaggaatcagatcgggctgcacaatgcacaaggcaagataaaatgtcaaatgaagaattgaagctgcaggatccacgatgtcggatacaatgtccaggacatcctgcccganaatactggacacataaatctgttatatctttaacagaataatgtgcagttagcaacanaattatgcgatctatctt

SEQ ID NO: 41927 - DNA, 428 bp, Glycine max
  unsure (1)..(428): unsure at all n locations
aacattttctttctccattggtatctccattataccctattgccatatcacatgtatacaccatgccagacttgtattctttcaatgagtctttcatgcattgatctggcttgtaatcatgtgaattctccattgttgatccacttttgctcaatatactttctccataaagcacctcgtaattttcctcatggtcaaacttaagtggattatccacaatggaagagtcaagaagtgaggttagggaatcctcggtggtacaatttaccttggtcaatgaattaccattggtgttgtcaatacttggtggtgttccacaagtatctatcacactgctcccaaactcatttctatccttaccatctgacttgtcagcacacagttttntatgggattccatctctttttctaaaccatcatccttaatc

SEQ ID NO: 41928 - DNA, 290 bp, Glycine max
  unsure (1)..(290): unsure at all n locations
gaatagcataatcttaccttaattacactacgggttacttaccttaattgtatcattattctcattataaataaaggcttagtgtggtcatccaagacacaattcatgaaattctataactctcaaggatggtgttaattgctatgctaaaacatgggtataacggngtgcctaagtcttactatgagatgttgagtggagtactaatgtggctttgttcccccnctcttatttcttgttttttatctatttcatttaagatgaataanatataatcttctatatgtcaa

SEQ ID NO: 41929 - DNA, 399 bp, Glycine max
ataccattcagaatctcacacgactttcataatattcaaagtttcttatatgcggcgattgaagttggatcccagtccatcaatctagataatcccaattaataacataacactcccaaacatatgctcctgacaattaggatcagtctatgaatgcagatctcatagaaaactaccagtgatggaacaactagtaccgacttcctcacacacattaaagcttttgtcattcacaatgtaatcttatcaataacaaaatacgagacatgaatcaaaacagcaccaacacatacgctctcatcaataaaaataattctttacatatgaatacttaaaagagtggtaatagaagataccctcatacggtcagagagaatgggatgagtaatcaacttggtg

SEQ ID NO: 41930 - DNA, 360 bp, Glycine max
cgctgaaatcaagcctatctcatttataagctcacgatttccttgctttgacctagatgacagcatgttgacagctattatcgcgccattcgataaaatgccctgcatttgcaaaacgatatataagtttttatgaaaattctaaattatttaatgattcatctacacatttaccatagatcattcacaataattataaagtgttatatgtaatctcttgtaggatacctgacatacaggacctaagactgctgctccaatcttgttggaaatatctgagtggttagtagatagactcgtttgcatatttaaatccgttaactctgacgatagaataaaagcgaatgagatgtcttatgt

SEQ ID NO: 41931 - DNA, 423 bp, Glycine max
ctgccgcatgcaagcttataattcaatttcgatcatctcgatatattacgggactcaatcagacatctgagtaaaaaagttattgtcgtttgaatttgctgagagcttcaacattcaatttcgagcgtctcgatgtattacgggactcaatcagacatccgagtaaaatgttagtcatttgaattagctctcagcttcagaattcaatttcgagcgtctcaatagattatgggactcaatcagacatccgcgcaaaaagttattgtcgtttgaatttgctgagagcttcaacattcaatttcgagcgtctcgatgtattacgggactcaatcagacatccgagtaaaatgttattgtcatttgaattatctctcagcttcagaattcaatatcgagcgtctaaatagattatgggactcaatc

SEQ ID NO: 41932 - DNA, 282 bp, Glycine max
tcggatatctgatcgagtcccgtaatctattgagacgctcgaaattgaattctgaagctgtgagctaattcaaacgacaataatgttttgcatggatgtctgattgagtcccgtaatacatcgagacgctcgaaattgaattctgaagctctgagctaattcatacgacaataaacttttgctcggatgtctgattgagtcccgtaatctattgagatgctcgaaattgaattttgaacctctgagctaattcaaacgacaagtaacttttactcggatgtc

SEQ ID NO: 41933 - DNA, 340 bp, Glycine max
  unsure (1)..(340): unsure at all n locations
ttatgcaaatttcatgcagtactgctacttagaatttgacgtacagcaaaataatgtggttcaggatgcctggtgatatgatcatgcactcagtgttagttgtcatcttatctacactgcttcagagctatcaattccgataggacagctccatatgcccttgttttttacaaagtttgtttgacgtgtgtaacaccaccttatcaaacaatggccaacataaagcctccacttgaaccaaatgagacgtgcctaagtgtaatcctcacattttagtgcattattcggtatttcatactttngcangcagtgcttggacatgttttcttcatggtatgct

SEQ ID NO: 41934 - DNA, 318 bp, Glycine max
aatattgtagttaatcgaacgtgaattcagaaattattcaactctcttaattgagattaatatcagagatgacaatgtgactactagtgatatatccgtctaaaatataatctattatttgttaattgtatattaaatgttttatataatttaagatttttctcatacttaaaagtaaatgtgtaataattaatttgattttttaacaccagactttaatataagttctaaaaaagaacacttattttagaaatttgaaccacaaggaaacgagaatatctaatactcaactaggataaggatgaaataataaatttc

SEQ ID NO: 41935 - DNA, 520 bp, Glycine max
  unsure (1)..(520): unsure at all n locations
gttanatatatatctcactntcagaccatatgaaggannagcgtggacgttgtctgtcactatgactgtccacactgttactgtctagggaataatgatctgggcctgcacatatgtcacaagggcgnagataagaattgtcatgatggaacaaattgaagactgcanggatccactgatgtctggatactaatgtctcatgacnatccatgtcccgagaaatactcggagttgcttgtacagatgcatgcatacacagtcanagtatgtgatagcatgcacggatctcacgaatgatctgatactaatgtctctgacattccggccacgagtaatacatggacatatacattctgttatatctgtaacagactattgtgccgctagcaagagattagatgatctattcttaggaacggaatagaagataattaangtttgaatttcacagtagaacagttccgttccgtgttgagattatagataacaactaaatagtcaactgcttctttagattttg

SEQ ID NO: 41936 - DNA, 334 bp, Glycine max
  unsure (1)..(334): unsure at all n locations
agctntttaatctaacctaananaaacatatgttcaaaaactcaaactttacgtatccaagtcacatgatgggatatattgatgggatatattgatagaatcttttttactttgaaaaactaaatgttatatttatcgaattcatttttcacataattacacattcagatgccttgtttacccttgttttaatatataaataatataatatgataccgtaattgaataccaacgagtttgtgtttgtttctgctagcatatataacaagcaaccctcaccatttatattgtttcagcgaagaagaanggagaaattgatgttctttaatgtgaa

SEQ ID NO: 41937 - DNA, 315 bp, Glycine max
caagagcctgccattccgcaccaatggcaactgctgcacataatctaaatgtataatgtcacacctactattaatattgatggaagaaattatgcattaacgttataaaaaaatttatacaatcacccaagtgcgacattacatatgatgatttatcattggatgatactgtagacaaatagggatcgaactcttaattagtgatcaaaagaaaaataatgtttgagccaattacagaatgtgagataagatatagaacatcttaattaatattgttacctgagagaacatgctgaacattattaatgacaatgc

SEQ ID NO: 41938 - DNA, 468 bp, Glycine max
  unsure (1)..(468): unsure at all n locations
agcctttatctatggcttcctatggtggtgatcttgttcttgactcatcttctccttgaagtagcgtctccaaccatctttcttccttttccattccactgccattgatcttcaagaagcaaagcactccattgatgaagaagatccaaggcctacaagctntacatggagctatatcatgtggtatcaagagcattttcatctangtgatgttcttttgattcctctatctttttgtttggtcaattcactataattccttgttcttcatcttcttctccatgtatctcctcaattttcttgtagtatggtgttgtttagtgtagatcaaaaaaaataaacccgataaatcttagatctacactcgctctngcatatctatggttgcaaatttatagataaactcttgaatcatgtttgtgttgatttaggtctatcatttttantataatatcttgtttgaacctt

SEQ ID NO: 41939 - DNA, 240 bp, Glycine max
  unsure (1)..(240): unsure at all n locations
tgcaagcttattctatcaccagatgcatgtattaagatataatagcttttgacccctaacaagaaatgctgcatggtttctagagccacaaattatattcctctgttcaaattatattacttatagttactaaatgataattcagttatgaacaagaacaacattctacactctataattngaaagtggtgtaaagaaatgatactctatcacttctaatgacattaagaattattgact

SEQ ID NO: 41940 - DNA, 399 bp, Glycine max
  unsure (1)..(399): unsure at all n locations
actatcacaacataataggtcctgtttggatgctgctacagggggaaaccttatgcataagatgaataatgcaacaatgcacattattgaggccatggcttcccatggatataatgttactagcgacaagaggatcctaatgaggcctacggagttcaccaggtggaggtcaattcatccagctcatcttttgaccaanagttggatattttcattgagcagataaagacattgatgaaagctcaaactcagaggatgacacatattcccccctatntatgaccagtgtggggagacaagatacatgaatttcaattgccccttttcccaagctttggaagaggtgaactatgctagtggaatgaacaataactatgagccttacaccaaccccttcaa

SEQ ID NO: 41941 - DNA, 198 bp, Glycine max
  unsure (1)..(198): unsure at all n locations
accactacaattttattttataacatcgatgtttttacgtatctaatctcaacatataaattgtgttagatcgacaatctgtctcacaactgacttagaagatcaaaacatatgaaaataagtccaataagagttaacgttctaattatggtgattagaagaanaaaaatctcattgattaactctaatagttgaatt

SEQ ID NO: 41942 - DNA, 526 bp, Glycine max
  unsure (1)..(526): unsure at all n locations
ggagagtnnagtgaagcatgaaangcgaacanttggactacgtccacattgatattgagcgtcccgcactctgcgggacttattttacatccgaggtttatattttgacgggtggatcggcacagaggtagcactttcatggtctagcgcctccatctattacaggactcatttagacatgcgagtaataagctatcgacgattgaattatgtgagagcttcaacattacatctcgagcgtctcgatatactaccggactcaagtacacgtccgantaaaatattactgctctctcgaagtggctcagagcctcacagtccatttcgagcgtgtcggttgatgactggacgtcatcatcatgcgacaaacagtattgctcgtgaattgatcgatggtaacctctatctcagcgctctttttatatggactgctcgacaaacataaacaaatgtcccntattgttcaacttagaatcatttggcggttattagacgactaatagactcgaacacctactgtttgagg

SEQ ID NO: 41943 - DNA, 261 bp, Glycine max
  unsure (1)..(261): unsure at all n locations
agcttcttttggaccttgttcaagcaatcaactcctctntcagaaccatgctatgtgctcgcgactggtccctttcttcccttcgcaacttgagttcactattgctaccccatagagctctcgcgaaattgttccggccatactcttccttgcgagccctcttggtctcttgttcaagggctcttgcggtaattgcattctcttcccgtaacccggcacactccttccgaacgtgtgtagcagccaacttgaacttctcct

SEQ ID NO: 41944 - DNA, 343 bp, Glycine max
  unsure (1)..(343): unsure at all n locations
gatgccccacattatttccatgacacaaatgcaaaaatgatgatttggaaatattatgcaaaactggtcatgcatgcacctatgtggacactcaagtgtcaaattnttatggtcatgtgatgctagggctcaggattcatttcctctattntaaatcaacccaatgtttccaaaatatgttcttttatcaatgtgtgcattcatccgagtccatttcgggcgtccggggaaaacttcacagcattcacccttcaggtgtatacacattnttttcataaactagttatgatcaatgaatatttttcatagaagagttggaaatcatctcttttcagaagcatgt

SEQ ID NO: 41945 - DNA, 567 bp, Glycine max
  unsure (1)..(567): unsure at all n locations
tgtatcgctcnttttgagacccatnntatagacannnatgattaccattgaatttgccgacgtggtcgtaaccgngatcatgtgagtacacccgcggcatgcaagctatatggtgctgaatcatgagctctattacgtaccttaatggtcgatttcgcgcgtggagatgtacacttatgacacatcgagaagaggtgagaggaagtgccatccactcatgaataagccatggaagacagaaccttcctcccacgatgagccttagataagaagcttggagatgatgctactatggacgaaaataagaaatgataaaataacagatggaggagctataatatgaacgaagactatgggtgagaagttgaactttgagttgtgtctcacaagactctcattcatcatacttacaataagcgttacacatgttactatttatagactacgtatcttccttgagaagcattcttgagacaactgtctaagacgctcttttagaaaattccttgtgaagctgagcttaacacacacacacctctaatgctaatctcacattcttagaatctg

SEQ ID NO: 41946 - DNA, 246 bp, Glycine max
acgatgccttatccagagattgcgacatcggttcccatgcatacatgacatcttgccactcttcgaccttattcatatggattgagcattatgtgttgacagttcttgtaatatggaatagacataacaagatggtggaagaagtataaatagtctccaatgcattgatgagagctagatccctaacgatgacaatactctgacacaacacatgatctttcacagacactcctatcaccttactta

SEQ ID NO: 41947 - DNA, 389 bp, Glycine max
tgtgttctcccttgtagaactactaactgcagtaacagttgcagcccaactattcggtagtgatgacaatagaatcatctcatcctcaaatttaatctgcactgactccaactgggcaagaatagtattaaattcattaatatgatcagttacagagataccttctctcatcttgaggttgaacaaccaacacatcaagtatactttgttggctaccgacaacttctcgtacatatctgataactccttcattaagcctacaatagtcttctcgtttacgatgttgaacgtgacattcttagctaatgtcaatctaatcatgccaagagcttgtcgattagcaagttccattcttcttgcttcatgtcgtctaacttaacccctgatat

SEQ ID NO: 41948 - DNA, 366 bp, Glycine max
  unsure (1)..(366): unsure at all n locations
aagaatgatttcaagattgagtcaacaagttcaagatcaagattgatttcaagattcaagannagacatcaagaagaatcaagagaagatgaattctagattcaagagaagaaatcatgaagcaacaagtcaagacttcacaagggaagtattgaaaaggattttntaataaccaaacatagcacaattttgttttacaaaaagagttttctcacatttttctaagttaccaaagtatttactctctggtaatcgattaccagtgatagaatttgatttcaaaaagcttntaactgaatttgtaacgttccaaatattntttaaatgatgtaatcgattacaatatattggtaatcgattaccagt

SEQ ID NO: 41949 - DNA, 506 bp, Glycine max
  unsure (1)..(506): unsure at all n locations
tcgaccggatgattcgtcgacctgccgcatgcaagcttatacattcattggctaagcgcgatgcgtcgcggctaagctcatttccttgcggccagaattgggtttcattgagctaagcaaaactcatgccatctaagcccaattccttacggccagagcagcgctaagcgatccatcaaccgctaagcacctattcctctgtaatgaagatgcactatttcagctaagccagctaagagccaggcttagcgagagttgcaggtattntgttctgcagaacttactaagtggccctatctccgcgctaagccatgttggatcaagtggcctcagaataattaagaaggggggttgaattaattatgaacttttcttgactaattaaaatntatccttcttaatattactagattcaattaggatttactactacagtatgagaaagtaaagaanaaaaacaataacttataataaagtaaagcggaaataaaaagtacacagtggaa

SEQ ID NO: 41950 - DNA, 363 bp, Glycine max
  unsure (1)..(363): unsure at all n locations
accttggtgttaanagttatgtatctttgaattgctcgagagctttcatgtttcaatttcgaacatctcgatatattatgcgcccgaatcatacattcgtgtgataaattatgaccaatagaatttctcgagagcttccgttgttcattgtcaagagcctctatattggatgcgcctgaatcggacatcttgagtaaaagttatgactatttgtattattaagagcttacgtgcccaattttgagcgtctagatatgtgattctcatgaatcggacatccgtgtgaagaggtatgactatttgaatttctcaagacctttcgttgttcaattttgagcgtctcgatatgtgattcgcccgaat

SEQ ID NO: 41951 - DNA, 293 bp, Glycine max
tagtttaactattcacacggatgtccgattcgggcgcataatatgtcgacaggctcgaaattgaacaacaaaagctcttgagaaattaactggtaaaactgttccacggatgtccgatatcatgcgaatcacatatcgagacgctctaaattgaacaactgaagcttctgacaaattcaattggcctaacttttcacacggatgtcccatacaggctcataatatatctatacgctctaaattatacatcagaaactctcgcgacatgcaaatagtcataacttttcacactg

SEQ ID NO: 41952 - DNA, 346 bp, Glycine max
  unsure (1)..(346): unsure at all n locations
agctngccacccagctcgcccaggcgagcaatgttgcttcctccagaagcaatattcttctggaggaagaatctggaaggcccaagtgggcctgattgctatntgtaccctcctttatactaaatgcacccctctaccttttttggtgattctttttccgtaacgttacgaaaatttacgaatttcgtaacgatacttattttccttccgcaaggttacgagtccttacggattatgtatttactccttttttagctttcgaagaagttacgacaactcacggattgcgaataatacgtcctatctatttccgtcacatcacggaattctcacggatcgcgtaagc

SEQ ID NO: 41953 - DNA, 399 bp, Glycine max
  unsure (1)..(399): unsure at all n locations
taaactgcttctgtccagttgccaangcaagaacaatagtcttttccattaaatcctaacaatagataatcttggcacatttctagcagcaatactggttagcgagaattttataacagctacaacaagagggttcatcttacctgaagaaggcaacataagattttccttctgctcattgacangctcttgacctattttaaccttttatcaatatttcagccatatatacacagagtgcactaatgtatgccacccccatgaattgaacagtgtgtacaaacatatccattatctcttgacaactgttatatggaaacataataaatgtattatataaccatctgaaattctgctatatgagtttatttgtcataaagagtctgctcactaatcaat

SEQ ID NO: 41954 - DNA, 300 bp, Glycine max
  unsure (1)..(300): unsure at all n locations
atctatctctattctagtaaacattaattaaactcaatgttctttttataaaaaaatgttaattagtatactacgcataacggttaaagaactaatgacattgattaacaatttgttntatataagtaattacacttatttgataatctcaacaataaacaatcaatntaaacgacatctatgatgcaatgttattttctcttaatgccatataagaggatataatatctagttcagtggataacaatacttaactaaagatgttagattaatgatgcttgatattttgacacttatata

SEQ ID NO: 41955 - DNA, 451 bp, Glycine max
agcttcaaaatataataaaagaactatgtgtattacagaagatcgaagtatcataaatagatctggaatactattatagaaggaaacctgcatacatcatgctcataaaacaatttgctagaagatcaaagtatcataaaaaggcctgcaacaataaaaaagaaaccccatttctcaatttccaccaaattcaagttgaacataagtcaagggaaagcatgaaggtggtgggaacatagtgaaaaatgaaatccctgaaagctacataggttggaatcattgaccattaataagaagacctaaatttctatagtcttgacagacagtataaattcacatgcagcctggcatatacattatagaggacgacagacgactgaataacctttctctgaaatgaaattctatgtgtaatcagttcatttaccttaccagtacccttttatatatg

SEQ ID NO: 41956 - DNA, 574 bp, Glycine max
  unsure (1)..(574): unsure at all n locations
tgtncatgtgnnnnattggagcccttgannttttgatcccatgcatnacccgacactattaataatcagccctgagccatatgctgactcaacatttatcttgagcgcgcgtgtctttgactaaccacagccttcttgaactcattgaggacatcgtggcttactcccatccatgtctgcaaactcaagagtgggacaccaataatgctatttatgaacttataccaaactcaaaggttgtgtaatggtactaggttaattatcacaagactaacanaacatgttattgcacctgacataatttctcggacaaatatcngagatcatgtgtatatcccacgaatgtctatgtctccttcacagtcaccatggccctttaagctattgacgagacaatttccgataatgctgtcttatgctatgacaattaatcaatcccacagacgatcactatctctcagtggacttacttgcctaaccacattatcacatggccaccctatcttgcttatcaaaagtcgagcaacgaaagacttcgaatttaatacatgatccacacaaaaaataatgaccg

SEQ ID NO: 41957 - DNA, 447 bp, Glycine max
  unsure (1)..(447): unsure at all n locations
agccttgganaatgatntctatacaaaagttagttgtataaagcaactaacaaactcccncaaatttacagttctgattgtcctcaagcaaagaaggaacagttcacttgtcctcaagtgacaaagacagtggccaatcaaaagaaaatggtgtttgattcatcaaggacatcaaccatatgaactgaatatcatggaatgcttaaatcaatcacttctcacaagcatgcagcttttcaaagataggagcacaagtattagagtcatagctgaaataagctagtaagcatgaaagaaatcaaggaaggatcatcaaccaaaacctcgcagtcattgtttcactcanactcangtgtttaggcttattccatcataaacaaccaacacaagttccaacctttgcatttcatctcatatcatacagtantgaacacacaaaaatgaatc

SEQ ID NO: 41958 - DNA, 529 bp, Glycine max
  unsure (1)..(529): unsure at all n locations
agcacgtaattttgagaacattgagtacccggattgatacattgagtcccgcgatccntatagtcacctgctggctgcagcatatatgtttaatagaaatgctacagatttttcatgcggcaaatactnttcatcttgttgtcctaaagccaacgaaagttataattttatataatgaaatagtacattgcctaatgatgtctccaccatctgagaggattgttccacagactgcaagaacctcataactcgcttccaatttccttcacatctatcatacaagctccctctgagagatcaaacctattcttgcacaggtaacatgggaggcacacaattgaaatgcagcaaaagtaactcaatgactataactngaaagggtgcacaccatgactaccaccaaaaagtttggagttaatataaacaacaacgccattgactgacctgccgacacaaatattatacaatgtgtggcattctcatggagatgctgaacggctcatctcaaatctcttttcttatctactcg

SEQ ID NO: 41959 - DNA, 481 bp, Glycine max
  unsure (1)..(481): unsure at all n locations
ttggcatgcgtcttcntggaaagcttgcatggttttgattgtgagtggttattccaaaaaaggtaactctctcaatgtgaatgctgtttttaagctcaataatgtgttcaatgcaagcaacatcactagcttggttagtggaagcttggagagtttgagtcctcaaaaggatgagaactactttgaacccatttctgtgttgatgtttccaaaaggaaattacagttacaccttggattccatagaagttgccaacgagttctctcatgggagtgatgctgagcaaggattagcattgaatttaaattcattgagtttttgcaaacctcccctctcttgngggattaggagactccaattggagtactcacttgattgccgttcttctaagaattgcacttctataagtgggagttttggtaaacttccatctctaatgtctttgacaagcactggatgttctcttactactgagaaacat

SEQ ID NO: 41960 - DNA, 455 bp, Glycine max
  unsure (1)..(455): unsure at all n locations
agcttcatgatgaatcaacaatgattcaaaggtggtttgatgataacaatgatgacaacaaaagaatatgactaaggtgatgaacaaaangctcaaaagatcaaagaacatatcaagtgaatcaaagagcatctcaagtaaatcaagaacaagtcaagagttcaagaatcaatgagaattcaagactcaagaagaaagcctagaatcaagaatcaagactcacgatctcaagaatcaagatcaagattcaagactcaagattcaagaatgaagaanagactcaatcaagataagtattaaaaagttttttcaaaactttgaatagcacatgagtttttgataaaacctttaccaaagagttttactctctggtaatcgataccatattgttgaatcgataccagtagcaaatgagttgaaaagttctcaactgaattacaacgttcaaatatttc

SEQ ID NO: 41961 - DNA, 365 bp, Glycine max
  unsure (1)..(365): unsure at all n locations
cgtgcctcttcacgtctggaatatgaatgtagcatatagatcctaagacccttangtgctctgctgatggctgttttccgttccaagcttcaattggagtcttgtcttttacagacttagttggacatctgttgagtatgtaaacagcaatgtggactgcttcatcccaaaatgtgttaggtagtagtctcttcttcttgagcatcgatctagccatctccataactgtgcgattctttctctcagacactccattntgttgaggagaatatgcgactgtaagttgtcgctcaatgctttcatcctcacaaaatctttcaaactcgcgagaggtgtactctttgccgcgatcacttcttagtact

SEQ ID NO: 41962 - DNA, 401 bp, Glycine max
  unsure (1)..(401): unsure at all n locations
agcttaaagtatgcccgagtcattcatccctatgagatgttgttgaagtattggtgatcagaattgccattccttggattatagggttgaaccaaactcatgcttttacaaaaaggttcatcaagtcaagttgaaatatggaagtaattgtcttgcaaaattggggcaaaagatgaatcgagtcacatcactgcttcgtctactgccaaacatatttangattattgatgtccttgttacttccagtttcaccttgacaaagatgtcatggaccgatgttgaaatctaaatngattcaaccccatatcctgcgtaaaaattcgcaatcttcaactgtacatcattcgcatacatccatgcttttcattggttgcattgctcattgcattcttntcttgaaa

SEQ ID NO: 41963 - DNA, 310 bp, Glycine max
agcttcccatagttctaattatttcttctacagtagcttgagagacctaaaaatcctcttaattctttgactgtcttaggtcttgggcactgttggattgccttaattttatcaggatctggatgcacccctttggcaaaaatcaaatgtcccacgtaattgattttggtcgtgccaaagctacattttttgtagttgagtgtcaagccgtgttcttgtagtatttgtagtgtagtgtgcagacattgaatgtgttctgaccatgtattggtatagaccaagatgtcatcaaagaaaatcaaaatgaact

SEQ ID NO: 41964 - DNA, 369 bp, Glycine max
attctcttaattgccttaagcctcaagcgtagtatcgcttgacgatgtcggcgttcacgggtgaatgtagttcctcgtcatccatgtttgtgagcacaaaggccccttcggagaaagctttctttactacgaagggcccttcatagtttggggcccactttcccctatggcttttaaggcatgagaagactttcttcagcaccaggtccccttcactgaacttgcgagggtgtaccttcttgtcgaaagtgttcttcacccgtctctggtacaaacgcccatggctcataacggctagacgcttgccttctatgagaatgagctgatcaaaatgcgcctggtcccactctgaatcctttaatctggact

SEQ ID NO: 41965 - DNA, 332 bp, Glycine max
tgccttttggctctttttttctgaacccaaatcataccacaggtttgggatcctaataacttgtgagaaaaaaatccatggggtaaattgattcaaagtaaaactcaagtaactccattttgtatcttggatctaaaacagtagcaactcctatgatcacatgaatgacactccaataagaatcaaatttgtctaacatcttttttgccattttttgaatcacttcattaggggaattgacccattcaaataaagccatcttgatctcacaaatttgaggaaaataaatgttagcagttggatattttgtgcctgaaatcatttatgtaata

SEQ ID NO: 41966 - DNA, 397 bp, Glycine max
taagtgaagtgttatccacatagcagtgaaaataaaaaaagtcaacctgaatttaattgaggggcccgaagaatgaggcaatttcctctcccagaaaaaaaggaagaaaggaaaaaaaacacagaaagagacaggttcacttgtatgttgtggacccataggtacgacataattaagagctaaattgtctttcaaagacatattagtccagaaaatggatcatgtttcccgcataatagtactccgatcgagaaagaaaaaaaaaaggcttgaacattgttataaatgaggatggaaacaagggaaagaaaccaaacaaaaaaatgagaagtctcctcaaaagccacccacgaatcacatcagagaaatggaaaaatgtgagtatgcatgcattaca

SEQ ID NO: 41967 - DNA, 333 bp, Glycine max
agcttgctcaagacaaatttctatacattccaatccactcaattcatataatttctcattcaaatcaatcacaaacacttcctttcatacaaaatcaaaccactgaatcacattttattagttcactgttcaatcatgcttttgtacaagctacaaacaactaaaacaactaaaatttaaaagagtgaattttaaagaactggaacttaaagattgaaatttaaataactgaaacataaagcataaactaaataaactgataaaaataaattgctcaaatatgctgaattaaaaactcctggtcatcctgctgatgatcctccgcgtgctcat

SEQ ID NO: 41968 - DNA, 408 bp, Glycine max
  unsure (1)..(408): unsure at all n locations
tgctngagaagcttctgtggaggttggatctttgttcttactaaggtctttcaatggtgagtttcagccatggagttgcagcgaaagaataagaagaaaaggcgagaggagacgccatccactagagaataagccatggaagaagaagcttcaccactaagaaagtgccttggataaaaatcttagagagaaagcttcaatgaaggaagaaaatgagagacagagagacaaagaggcatggaaattgaaggagaatagggagagaagttaaactttgaagtgtgtctgatcgaggtcgtacccgaatcaaataaacattaaaaatgcaatatctaagaagtgatcctaggtcgtctcccaatgaacaatggtcaaccaaatgttcataacagacagtgataaaacagt

SEQ ID NO: 41969 - DNA, 324 bp, Glycine max
agcttgtagcaaatgcatttctttataacttttagctcggatatccgattgagtcccgtaatacatcaagacgctcgaaattgaatacagaagctcttagcaaattaaaacgacaataactttctactcggatgtccgattgggtcacgtaatatatcgagtcgctcgaactgaatacagaaggtgagaactaattcaaacgacaatgacttttaactcggatatcccattgagtcccgtaatatatcaagatgttcgaaatggaatacagaagctgtgagaaaattcaaacgacaataactttttactcggatattcgattga

SEQ ID NO: 41970 - DNA, 334 bp, Glycine max
agcttcgataatcaatttcatcgtcttgatatattactagactcagtcagacatccgagtaaaatgttattgtcgtttgaatttgctaagagcttcgataatcaatttcgaccgtctccatatattacgggactcagtcagacaaccgagtgaaaagttattgtcgtttgaatttgctaagagcttcgataatcaatttcgaccgtctccatatattacgggactcagtcagacaaccgagtgaaaagttattgtcgtttgaatttgctaagagcttcgataatcaatttcgaccgtctccattatttacgggacttaatcagacatccgagta

SEQ ID NO: 41971 - DNA, 403 bp, Glycine max
  unsure (1)..(403): unsure at all n locations
ntgagcaaattcaatcgacaataacttttttactctgatgtctgattgagtcccgtaatatatcgagacgctcggacttgaacgccgaagctctgagcaaattcaaacgacaataactttttactcggatgtctgattcactcccgtaatatgtcgagacgctcgaaattgaataccgaagctctgagcaaattcaaacgacaataactttttactcggatgtctgattcagtcccgtaatatatcgaaacgctcgatattgaatgttgaagctctgagcaacttcaaacgacaataactttttactcagatgtctgattgagacccgtcatatatcaagacgctcgaaattgcataccgaagctctgacaatactcaaacgacaattacattttactcggat

SEQ ID NO: 41972 - DNA, 309 bp, Glycine max
ttttgaaccgaagccgaagacacgtattgtatcctattaacttgccagaaataaatacatggggtcgattgattgccagtaaattcatcaggacactgcttgtggatcttggacataaaacagccgcaactcctatgaacacatgaacgacactccaataggaatcaaatttgcctaagcattttcttgccattttttgaatcactacattaggggaactgacccattcacaacaagccatcttgatgtcacaactttgaggacataaaaagtcagcagatggatattctgtgcctgaaatcatttatg

SEQ ID NO: 41973 - DNA, 323 bp, Glycine max
agcttgaaatagtttcattatatatatgtaattaagaaaataaggcatagataatcaaatattattattttgtgcagtataatcaaaggcatagaaaatgcatacaatgagttgaatccgcaaaatcaagcactgtgtattaaattatgtgctactccacatatagtcgatagtttaatttcaaagagtcaagttttgagctttgagtattatatacgatgaataaagaaaaaccggccgttgctcgtaaacaaggccgtacaagtatgctgcagccgtattgcttgcacttagaacttcgaactgcgcagtcgaattgctta

SEQ ID NO: 41974 - DNA, 329 bp, Glycine max
agcttattaaaaatatgtatactaaaacaatatacatgtaacacctaaaagtttaaacaaaaaatattgcttcaaaacgctttaatttaatttattttagaaatacacatcactttttttaaccgttacttataaataataaaaacaactttctatactatttttttacaaaacaaaatgtgatagttggaaaatgctaaatagttgcatgaaattaaaataaatgcaaatgtagagtaattcaatttctatacataaataaaatgaaacttgcagtgtcacagagaaatatatggatacaacccataatagtgtgataataaacaaaa

SEQ ID NO: 41975 - DNA, 393 bp, Glycine max
  unsure (1)..(393): unsure at all n locations
tcttatccaaggctcatcttggtggtgaagtctctttctttcatggcttattccctagtggatggcgcctcctctcacctcttctcctttttcttccgctgcatctccatggtggaaaatcaccattaaaggacctcattgaagctcaaagatacagcctccatagaagccccacaaccaagcttccatcaagtggtatcagagcacaatagcttcatgtaggtgctccttaaacctccattaatttttttttgctttaccttctcttccattgttgattcttcatttttctccatgtatctcctcacatgtcttgtgctaaatgttgttaacatgattctttagagtttccaccgattaaactngctatagaagctagattngattttctat

SEQ ID NO: 41976 - DNA, 325 bp, Glycine max
agcttgaggaaatttaatctagttcctagccagagcatgaacgactgcattggcctgtatatatcttaacaaatcaacagtgtatgtatgatacactctaagcaagtttttaatatgactaaaaataattgtgcatcctgaaatgtcttccatcaacctcattggtgatctgatccgccaccatgtacgcaatctatgttaattaaagcatcaaaccaattatacttaagatttaaactctaaattataaactatttaaactaaatagaataacttatgtcagttggcctacgtattaaactaagacacataattatgaccctta

SEQ ID NO: 41977 - DNA, 377 bp, Glycine max
tctagattgtattgatttttcccagttgaatatcttttcaataatgagaagtttattaagagaggaaatggcacaaaacagacggatcaaatccccgaaatccgtgggaagaaaaaatacaaagagaaattatgaatacaagcttattgtacacttacatgtaaataatataaaacaattgtgtatacaaattatcttttcaacgactaacagcactgaagccagcgtacatccatacattattaattagaattgcaactatatgagtgtctcacatgatatgtcaggatcccttcgaaaattctcaagctgtgtattgagttgcccttcagttgaaatgagcctctctgcagcctacacataaaatttcagcaaga

SEQ ID NO: 41978 - DNA, 329 bp, Glycine max
agcttcgaattatttttttaccgattgaagatagaagaacaatgaagaatgaacgaagaacggcgaagaacatccacggaatcgatcacggaaacgtctcggaagcattacgaaagcacctcagcttggatttttctcctttttgttcttctcctcactaatttcaagtgaaaactcagtgtaaaaattgctagcccccttcccctatttataggagaaaaggggaggtggttgctgcccatctgcttcctgatgaagatttctgagtgcacctgcaatggatgagtttaccctctccaaggcttcctgatgcagtttcatgagcgcac

SEQ ID NO: 41979 - DNA, 230 bp, Glycine max
ggattgacttatccatagatcttgatgtggggctgccaaaaacagcattggtagagattccatttctgtggttgctgataggcttcctaaaatggcttattttattccatttatgtcgcaacctacccttcggcgggagggtgacgcagggctcatgggtgcgtcttccaagaaaggaaaatgtgtggagtcaccaccaacgtttattctatgaaaacgtcggaaaaaac

SEQ ID NO: 41980 - DNA, 318 bp, Glycine max
agctttgccttttttttttcttgatcaactccaagttgcttaaagacaaaagaattatagtaagttttggtagaaatgcagtagtgacataataagtgcattagtgacacacttcttttaatcttggccatgtatctccaaaagtagatatgggtattctggtcatcaactagtacataataagggcattagtgacacttcttttaatcttcctatcaaaaacgctttttgagctataataagtcatggatcctgctgagaaaatgattgagtcttatggggttgttggttggatagcagaaacagaacatgcaatct

SEQ ID NO: 41981 - DNA, 345 bp, Glycine max
  unsure (1)..(345): unsure at all n locations
ngagatgaggaagtgtagaagggtgaatcttttgtttttattcgttgaccacagagtggtacctggagatatgtcgcgggggtcaagagaccttggggacgtcaagtggggtgctattgcccaaaaccaagcttgaccagtcccgacccaacccgggcatagtcggtcagtgagaacctgtgatgtacctaaacaggcgagctcctggcagtcaacagataaaaggaacaaagaccacaaagcaagggggcttgtggtggctggccagctgtgaaacttgattgatatgtgagatatggcctttggtnatcgattaccaacggtgggtcattgattacaacgctt

SEQ ID NO: 41982 - DNA, 273 bp, Glycine max
agcttctaaatggatctcttcttgctcacttagtttcaacttcctttcctctccaacccgatcaatagagaagttgtaggtctttacagcccagtaggctttgtgctctatctctacaggaagatgacatgcctttccaaagacaacccaataaggagacattcctatgggtgctttgtaggcaatcttatgcgcccaaagagcatcatcctgcctagtgctccaatctttgctgttgggctgcaccatcttcttcctgatgattattattcg

SEQ ID NO: 41983 - DNA, 471 bp, Glycine max
  unsure (1)..(471): unsure at all n locations
cccgcacaacgccctacaccacttccagtgntngttgctatangggacactcactatatcccaggtnngnnaannaanangagggttgatgcatccctcgcanacggaccaggnganaaagaagagccgaccggaggcaagcaagacggccgaacgcacgttatagtcacaaacagccgagagcccgcccaaaaaagagccacccccccgcaaccaaaaccgacaaagaacgagaaccacaccaagccaacaggaaaaacgaacaggccacagaagcgcaggacgaaaccagccaaggggcggcaagacaaagaaaggggggaaaaccacacaccccaaccacgaaaagagacgaaaaaacccagagacagcaaaaacaagccaacaaaccacacaacgaaacaggcataagaggcaaaagcaccaccggggcaacgacaaacaaacaaagcacacccccaaaaaaccagc

SEQ ID NO: 41984 - DNA, 434 bp, Glycine max
  unsure (1)..(434): unsure at all n locations
agggagtgcagctcaatgatagaaatgttatttctattgtgatctagacgcattattagagcttatggaaggaccttaagctactctatcggtctaacctgacacatttggttgacgggggaaccccaatgggaacgagttgccggtcatgtagggaatagcatggtctcgggccaggagcttattggagaccgcagattgcctcactcttttatgttcaatggtacgagacgacttaccaacgacactagatcagatggcgttgtacacnacaaaccgactaccgcgggctttgttgtatacaatggacgacatgtcaatatgccttggcatacggccgatctccacagcacttaagctttattcggcaaatacagcctttcggcctttgattctattcacaatactcgttattggggccctataccacttcg

SEQ ID NO: 41985 - DNA, 329 bp, Glycine max
agcttatgcgcatatatttttatgatcgctcacttgcacaagacagtctattaactaagaaaaaacgcacccatatacaatcaaggcagcttcgttatctaaattatttacatgtacttccaaggtgtatctgatacttacatcacacacatctccttggctaaatttacatacatgcatactcaaagcatttcggggcaccaaaaattgcacatgtgcacattttggtatttctaatacctataaatacacaaacttcatgacgaatcttgagtatctacacaataacgtgctacatttcatgctcttttcaagtttttgctacctaa

SEQ ID NO: 41986 - DNA, 442 bp, Glycine max
agcttgccggttcacacccaattccgttgtcatatgcttaacttgatcccatatccactcaataattcaatggtagccataaccccaaccaaggttcctcaacctccatttttctgaggatacgacttgaacgcaacgtgtgcttatcgtggaggagcctctgggcattccattgagcattgtatgaccccgaagcataaagtgtgaagtctaattgatacgggctggctgaaatttgaggagaatcgcttgttgaatcataacattgacaagcaacaccatacatggggcaattttggaagctattgctatgactcatcaagattttcaagtttatgccattattataaaccacagttacaatgctaaatgatatggataaaatggacatccttgtccctcatcctctcacaaacgcatgtttgcttattcaactgtcacc

SEQ ID NO: 41987 - DNA, 334 bp, Glycine max
agcttaaggttcaagactcttttttttggtataaaaaaggtaggatccccaagaaaaaatcattattcattgaatggacatttattattcgtatttattgctctaaatcaaacccttacttgagcgttagagtaacttttgcaggtaccctcctctttcggatcacatcattcggacaaagtgaagaagcaagaagaacacaaaggaccctttggcacaaggaatagtgtttgatcatattgtgattggaacatttttgcgcccaccttggggtggtgtaatatagtccccgaccccacaaaatatggcaattacacgaactagaacaaacaca

SEQ ID NO: 41988 - DNA, 411 bp, Glycine max
  unsure (1)..(411): unsure at all n locations
ntaccaagtgttcttgagtccttcttcataaagcttatgtatatgacctccattttcaactctaagcttgattttcacctcaatttcttgctttattctcacttctatttcaaaatcttatttttgcactcttgaaggttgaaaacttgaatctaaactccgccattcttccttctaaatnttatggagactacaagaggtaaaggggatctcttcaactcttgaaccctgtgtttgttgttaaacttccttgaacatgttgttttgaaattttcatacttgctgccctgttctggatctgtgtgctgatctattttccttgagtttttatgccaaaagtgagttctttgagtgttaaaacatggggttagccttaaatttcacttaaatcgaagtttctagaaagagtta

SEQ ID NO: 41989 - DNA, 336 bp, Glycine max
agcttttcgattcattctatgtacttttggtggtccacattgtgtttcgtgtatttttattctcgttttatttactttttatatccccttttgacatgcttaagccattttatttaagtcatttctcgcttaacctaaaaataaaataaattttcaccgatcgtttaaattgtattatccattaacttcggttaaaatgaattccgaccgttcggtcgtgccgtaaccacgttggaaatcaaaaagaggtaaagtgataatataataataaaaaacaacgtcttttagtaaaataaagcgaaaaatcaatcgaacgttttctctttgggatttctc

SEQ ID NO: 41990 - DNA, 402 bp, Glycine max
ctaagcttccgctgttaattgcttagattgctgccacttggttttgtctgcgtggtggtcggcagaggagcataaaccacagagtctggcgacaggtgttgattgttgattcatggccagctaggttaccaggttaaccaacgcatctagtttaccttcaagcttcttaggctcagctgatgaagatgaattcgtggctacttcatgcactcctctaatgacaataacatcatttctggcactaaattgttgggagtttgaagccatcttctcaattaaatttctggcttcagcaggggtcatgtctccaagggctccaccactggcagcatctatcatacttctctccatgttactgagtccttcataaaaatattggagaagaagctgctcacaaatctg

SEQ ID NO: 41991 - DNA, 334 bp, Glycine max
agcttgggttcctattgttattaatcacattcgggcacttattttattctctacgtgctgtcctcatacatataaattagccccacagtccaaagttcacaaaaccatgctcatatgtcgttgaggcatttcaccgagcacttggtgggcacatgtttaggcatgaatatcaagagaatgggggcaatgtggcatgccccattacttcaaaatgcaccctaggcctaaggccatcccttacaacccttcaattcaacaaaaacaagcaacaattcaaggataaatccctcacgttttttagcaaatacatgcaacttagagcaccaaaatacat

SEQ ID NO: 41992 - DNA, 340 bp, Glycine max
atagagctcgagagacaagagtttttttttataagctgaagacgacagtcactatggtctgtaaaaatgtgatgagctgaaagatatcaacatgaccacggttgaagtgtacagctggaaaacaaaagggcccgacaggaaaaatggagtatgaacaagttccaagggttctgtggagcatcaataacgagctcaagcttaaaaaggccgagagggatgaatcaatgatggaaaacatggtgttaaaggataagttaaaggcttgatggacgtcgaagagaagtttgactgaacagttgagccaaatagaagagaatatgataataatcattgatcaata

SEQ ID NO: 41993 - DNA, 333 bp, Glycine max
agcttcttattcttatattagttttaaaaatattcaataattttcattctaatgatagaattcaacttgaatttttaacttatttttattgagtctcattttatcttttcccacacacaacaattcaaattttgacttgggaaaattatttttccaatgattaagcaaccttgcttgtagtcatttatacaagcaacttatgtaagcattttaaagaattcattaatttgttctaatagtattctcaggtcagttaactacaaacaattatgatttcttcaggacacacatattctccttgattctcttgaaattgaactcgttatgtacctt

SEQ ID NO: 41994 - DNA, 347 bp, Glycine max
ttatctaaacacattataagaatctatggaaggttctaaagctatctatctgtctgaacctaaacacatttggttcaactgaatcatcccacgattgaaaaccaagtagccgtgtcatttaaagaatacatcatcttgtaaccatgaatatatttgaaagcacaaattggcctactcttttctgttaaattttaggaaacaactgatgaacaacactagttcaaatgggtttttagccgaaaaaccaaaaacagtgtgcatggctatatacaagttacaagatgccattatccttgtggagacgtcaaattataaaggttctaaagtaatctcgtgcaaagtacaaa

SEQ ID NO: 41995 - DNA, 330 bp, Glycine max
agcttgtaggattatggtgtacccatcacatgtggtactaggtggcggtcgggcgatggtgcaccaaaagttttccacatccacaaatcgcgcataaacccaccatcccctgttgcccacctccaactgagctcacgtactcccatgtagcccatatccgcgtttctctcaacaccgggtccccatcaatcctcccaagcttccccaacatccaagtaattcaacattcaaaccacacaaactatcacagccaagaaaaacagggcaaaggcagaaaactctacccaaaacaccaaccaaaatcacagcttttctcacttaaagacccca

SEQ ID NO: 41996 - DNA, 335 bp, Glycine max
  unsure (1)..(335): unsure at all n locations
ntgaaatggacattgaggtatctaaatggatctttgttaagtggattaaggtataagaagatagcacatgaggtagcaatcacaggctatgtagatgcagattttgcaggaaatgtagacacaagaaagtccttaactggatatgtgtttactttgtttggagcaacaatcagttggaaagcaaatcaacaatcagttgttgctctttcaacaactgaagcagagtacatggccctagctgaaggagtgaaagaagcaatttggctaaaaggaatggtatatgaactcggaatagcacaaccttgtgcacaattactgtgaagtcaaaggccatt

SEQ ID NO: 41997 - DNA, 331 bp, Glycine max
agcttaaagtatgctccgtttctttcatccctatgagatgttgttgaagtattggtgatcagaattgccattccttggattatagggttgaaccaagctcatgcttttacaaaaaggttcatcaagtcaagttgaaatatggaagtaattgtcttgcaaaattggggcaaaagatgaatcgagtcacatcactgcttcgtctactgccaaacatatttaggattattgatgtccttgttacttccagtttcaccttgacaaagatgtcatggaccatgttgaaaatctaaattgattcaaccccatatcctgcgtaaaaattcgcaatctt

SEQ ID NO: 41998 - DNA, 437 bp, Glycine max
  unsure (1)..(437): unsure at all n locations
tcaccttctggtcctcctcatagatgatgcatgagataacatggtttattttcatctaccactccgagtatgcctccggatcattctttcctttacagggaggaatgttgagattaataccatccattcggatgtggctaggaacaccatcattccctcttctcctcctttcttcttcattatgatctctattcttcatttgataacgttgcttcattaacctctccaaatgttgtgtcaaagctcgcattcggacttgcgaaagccccactccatcattaggattattacctgccatgtgaaacacacaaatcaaacgtaacaagaccattatagtcgttgtttgaatacctcacccactcaagtgtagcacacaattatggattntctctaatgacaacactcttgcctttaacactctaattccacttgagttc

SEQ ID NO: 41999 - DNA, 335 bp, Glycine max
agcttatgcgcattcttttttacgaacgttcacttgcacaagacattcttataactaagaaaaatgcacccatatacaatcaaggcaccttcgttacctagattatttatatgtacttccaaggtgtatttgttacctacatctcatgcacttccttggctaaatttacatacatgcgtactcaaagcatttggggtaccaaaaattgcacatgtgcacattccggtatttctaatacttatgcatatacaaactttgtgatgaatcttggctatctacacaataaggtgatacatttcatgctttactcaagtgtttttgctacctaaagccgc

SEQ ID NO: 42000 - DNA, 432 bp, Glycine max
tctttgagaaaacttccttgagaagctagatcttatctacacacacccatctaaaaactaagctcacctccttgacaaaatacatgaaaatacaaaaaagtccctactacaaagactactcaaaatgccttgaaatacaaggctaaaaccctatactactagaatggtcaaaatacaaggcctaaataaaggaaaaacctattctaaaatttacaaagaagagtggatccaaccttgacccatgggctcagaaatctaccctaaggttcatgagaaccctagggccttctttagtagctctagcccaagcctcttggagtcttctatccaatacccttggggggtaggattgcatcatcctctccaccttggaatggatttgacctcaaatcctgaggttcttcatactctggtctccttcccttgacacct

SEQ ID NO: 42001 - DNA, 328 bp, Glycine max
agcttctaaatttttatttgatgaagctctgataccacttgttggacaagtggccttagatatcttaagaagggagggggttgaattaagataccacaaactatttccccaattaaaaattttactcttctttaatgaaaatttcaatgcactcttattatgaattattgtaagataattcaaactaaacttccttaatgccaaagataaacaacaataaataaagaattttaagagaagagaaagtgcaaactcaggttttttactagttcagccacgccctgtgcctacgtctagtccccaagcaacccgcttgagatttccacta

SEQ ID NO: 42002 - DNA, 372 bp, Glycine max
  unsure (1)..(372): unsure at all n locations
tggagaaggtggctntggaccagtattctttgtgttatataaaactggtatcctgaacttcttctattttcctttaaaactttctaaatatagcagaagattatttttcagggaacattgatagatgggaaagtgatagctgtgaaaaggctttcaaagaagtccaaacaagggctggatgagttaaaaaatgaggtggcactgattgccaaacttcagcaccgtaatcttgtaaagcttcttggctgctgcattgaaggagaagaaaaaatgttaatttatgaatacatgcccaacctcagcttggactgctttctttttgagtggaccccttacgatgttattctaaacatcttagataatcagcatatt

SEQ ID NO: 42003 - DNA, 351 bp, Glycine max
ccgggatccttaagcaccgctgctgcagctgacattctttattttcactccatacataggtggaagcatttgcatggagctctatctatttttcttaagcttcctctacttattgatatcttgagtcaaaatttaacgtagtatttggtacggtgaaatgaaaaagactctgcttttgttatagcaactagaataactgttgatttccacttttcatatccactcttaccctctttttagtgctttttttggggttaaaagcaaggtatttccactattaaaaatcatgatattaacttttaagacagaaattatcatagtgaattgtctcttccaataaagtctttttca

SEQ ID NO: 42004 - DNA, 347 bp, Glycine max
  unsure (1)..(347): unsure at all n locations
tgcatttggaattgtgatagccccactctatcattatgatttgttcctgccatctcaaacaaacaaatcaaacataacaagacaattatagttgttgtttgaatacctcacccactcaagtgtatcacacaattatggcttttctctaatgaaacattnttgccttttaccactctaattccccttgagttcttagacaattcaagagattatggccacaacaaagaacaattcaccaatatgtgtaaggtaaggctagagagacaaggaaaaggttaaccaatataaaagactaacaatgtttttaggcacaattaaaggaaataaaattcagaatttaggaattc

SEQ ID NO: 42005 - DNA, 332 bp, Glycine max
agcttctcccctattttgtcttattttggcatgggaggctgaagggaaggggttcagcacccttgttaagcatattcacttaaaattggtgaggagaagaagaaagaaggagaaaatcaaggccgaggcgcttccataacgcttctgtaacatttctgtgactaattttgtgaacgttcttcgtctgttcttcatcgttcgtcaatcttcaaccggttagtttttgatttcgaagctttgaattcattctatgcacccttaggggtccattcttgctttgtatgttttcatcttcatctcgtctactttcaatattctttttcttcgtttta

SEQ ID NO: 42006 - DNA, 128 bp, Glycine max
ttgagcctatgttcccctttctttgttttgaaactcattacaagccttaagtgaaaaaccatgatatcaccttacccttaaggaattttggagctttggaattgttttgggaataagtgtgggggggg

SEQ ID NO: 42007 - DNA, 330 bp, Glycine max
agcttttaaacaagcctttattttcttttgaggaagcctctattgaagcttcttgaggaagctacatgatctgccttggtaaaaacactacgcaacctttgttaaccgtaggagctattcgaaattttggttgcagcttcaaaacacaattttccatgatctgaccgtcgggatctttgcgaagatgattgaagtgtgcgtgacaatttccgtgtccgagaccatttgtaacttgagcgtttccagccttagcttccgtgtaactaaagaaaaaacaccatatcttattctttcttttcttcaaaaccatttctattgtcccaagcactt

SEQ ID NO: 42008 - DNA, 437 bp, Glycine max
cctcatctatgattatgttcccaatggaagcctttctatttcaatacatggtaactttcatcaaaggcaattctatattttttctaatcacaatttatgatctcttcttttggtactatgaccttgtttggataatttttttcacaaacacatattggtatagaaaataaggtaacatgaattgaacttctttcataaactaaaatcaacttcggtacataacttttataaaagctctctcatgtaacttctcacaaagttgagttgtataagttgattttagtagcttatgagagaagctcaattcattttactttgtttatgttcttctcttataggcttttatgaagaaatttaccaaataggacttatgtcactttgtccttgattgttgttccatttgatgtcttcagggaaagctggacttgccacattta

SEQ ID NO: 42009 - DNA, 301 bp, Glycine max
agctgttcgtttatagttctattttatataagaccaatagcttattaatctgtaagagacttacaaattcataattcataacacgttacttctaatactctaacctacccatctatataggacaattatggtataaaataattaatgtcgctatatatatcactataatttttaatgtatatttaatgcacacgtaaattttcataataaattatgacaatcgtcttagcttgcttatactctattatttccctttccaaagtttccattctcttatggatctcacaatgttaatttgtta

SEQ ID NO: 42010 - DNA, 333 bp, Glycine max
agcttttggaggaagccttttattaagcttctagagaaaactacatgaagctgcctcggtagaaacgctgcctagccttcgttaaccgttggatcgtctcgaaatttggtttgcaacttcacaagacactttaccatgagttaaccgttgggatcttagagaaaatatctgctgtgtgctagaagctttcattcccgagagcatctcttatttaagcatttcagcctttgctttcttgtagcttaggaaaaatgccatttcttcttctttctttcttccaaatccatttctaaagttccaagtactttttccatcacccaaattcaccatttg

SEQ ID NO: 42011 - DNA, 392 bp, Glycine max
  unsure (1)..(392): unsure at all n locations
tgatggtgttgagaagaaatctcatgtgtgtcattctttttaatggggagaatgtgaatgtatgtatacatgattttgatgatgtcaaaagaagaatcaaacaaggctcattctgcttcaagattaatacaagattgtttcaacaaacaaagccttgattcaagatttcttcaagatcaagccttgcctcacaatgaaaggtttcaagttattcaaggcacatgtaatcgattaccaatatatgtaatcgattaccaatggttagaaagtgtgtaatcgattacacatcatatgtaatcgattaccagagactttgaacgttgggaattcaaantttaaatgaagggtcacaactggtcaagacaaacaactatgtaatcgattacactaat

SEQ ID NO: 42012 - DNA, 339 bp, Glycine max
agcttgaccaatcccgatccattccgggcatagtcggtcagtgagaacctgtgatgtacctaagcaggcgagctcctggcagtcaacagataaaaggaaaacaagaccacaaagcaaggaggcttgtggtggctggccagctgtgaattttgtgtaatatgtggattgtggcctctggtaatcgattaccaagggtgggtaatcgattacaaggcttaaaaatgaagacaggaggctaagatggtctctggtaatcgattaccacggggtgtaatcgattaccaggcttgaaaacgaggtcaggaagctaaggaagcctctggtaatcgattaccaagg

SEQ ID NO: 42013 - DNA, 433 bp, Glycine max
tggagaagatgcttcaatggaggaaaagaaagagtttatatagagagaggggggagcacgaaattgaaggaataaaagaggtatagaagtggaactttgaagtatgtctcacaagactctcattcatcaaagttacaacaagtgttacacatgcttctatttatagactaggtagcttccttgagaagctttcttgagaaagcttctttgagaaaacttccttgagaagctagagcttagctacacacacccctctcataactaagctcacctccttgagaagcttccttaagaagattcctaaagaagctagagcttagctacacatacctctctaatagctaagctcacctccttgagatgagaagctagagcttagctacacaccccctataatagctaagctcacccccatgacaaaaaacatgaaaat

SEQ ID NO: 42014 - DNA, 333 bp, Glycine max
agcttgcctcaaatagtgtcctagaaggataaggcggccgaagggactagttccgctcctgagtatgacagtcaccgctttaggagcgctgtacaccagtagcgcttcgaggccatcaagggatggtcgtttcgacgggagcgacgcgtccaactcagggacgacgagtatactgatttccaggaggagatagggcaccggcggtggacatcactggttacccccatggccaagttcgatccagaaatagtccttgagttttatgccaatgcttggccaacagaggagggcgtgcgtgacatgaggtcctgggtaaggggtcagaggatcccg

SEQ ID NO: 42015 - DNA, 373 bp, Glycine max
tgcctacaagattgacttgcctagtgagtattatgtaagtgccactttcaatgtgtctgatctatctctttttgatgcagatggaggagccttggatttgaggacaaatccttttcaaggagggagtgatgaagacataaccaagggcaaggaccatgaagcacttgaaggtcccatgaccagaggcagacttaaacaagcccaacacatcatagagacaaggctggtcatttgtatagctgtcattgatgatgattgaaggcccaagtggagaaagatgaaagcccacacgcagaggctctaccaagactactaattgttgctgaaggcgcatactaacttgaaggcccaagctaaataagtgtttagttat

SEQ ID NO: 42016 - DNA, 306 bp, Glycine max
ggatcaccagctaaggccctttaatgaccgctcattgataaaggaggtatgggtgcatagacaaccttgaggtttgcctattaagcagccacccttgaatgagtgcgtaatagcttactgatcgagcgctcttgcgccgaagatgaacggggctaatcgatctgctgaagctgtgggatgttaaaaagaatctgttggggagcagttcaccttatagggaaggaccctttctagcactgctggacgaatcggaagcgagaatgtttgcttgagttattcaaacttttgtgttaattcaattcctag

SEQ ID NO: 42017 - DNA, 328 bp, Glycine max
agctttgagccaactcttacgacaataaccttttactcgaatggctgattgagtcccgtaacatatcgagacgctcgaaattgaatgttgaagctctcatccaattcaaacgacaataactttttactcggatgtctgattgagtctcgtcatatatcgagacgcttgaaattgaatgtcgaagctcttagccaacacaaacgacaataactttttactcggatgtctaattgagtcccgtaacatatcgagacgctcgaaattgaatgttgaagctctcagccaattcaaacgacaataactttttacacggatgcctgattgagtc

SEQ ID NO: 42018 - DNA, 330 bp, Glycine max
agcttcagatatgttccttatgcttcatgtaaactcggccaaaatcgttaagggaacctcggatccctgctatatacaatactataaggaattccatgcaacctagctacttgcttgatgtacaaatccacgagtttttccgttctatacgatatatacaccggaataaaatgagcagatttggtgagtcgaactactatgacccacacagcatcatgtccacaactaggctagcgtcaactaaatacagaatccatacatatgctctcccagcttccattctggaagttacaatggctacatttttgctgatggatactggtgtacaga

SEQ ID NO: 42019 - DNA, 230 bp, Glycine max
  unsure (1)..(230): unsure at all n locations
agctacnatcttatttttatgttaaaaggcatgggaagctgaaaggaaggggctcagcccccttgtaaaacatattcacttaaaatcgttgaggaaaataagaatgaaggacaacactatagccgtaggcaccgacataaatcccttcgctacacttgtgaaacaaaattgatgacctatctgcatgcgatcactacagtgaggcaaactaaaaccagctagtttctgat

SEQ ID NO: 42020 - DNA, 91 bp, Glycine max
gaaactcattcaagcctcaaggaaaaccatgaatcaccttcccttaatgaattcggagctatgaattgccagggaataagagggggggggg

SEQ ID NO: 42021 - DNA, 260 bp, Glycine max
  unsure (1)..(260): unsure at all n locations
agcgtacatattgnttatttcttacaacaaccgcggggcaaaaacaggcgaatacatgtgtcctgtgctcaaatgggaccctacttcgaatactcactacgcacaagctgtgatcatacattgctaagatagatgagctgaatgatctttcttggcccgatttactcgctcgctcgtcgtaagctatttcaaggtgggaaatatctctcaccagttgtgtttgagtgtcggactactccataccgagcagctcatatccc

SEQ ID NO: 42022 - DNA, 336 bp, Glycine max
agctttggagaaccaagttctttttaatgctagacgaaatatagatgggaatagaggtaacaatggcggtaatgacgaaccgaggcagaaccgggttgagggagtaaagctcaatgttcctcccttcaaaggtagaagtgatccagatgcctacctggactgggaaatgaagactgagcacgtatttgcctgcaatgactacactgatgcgcagaaagtcaagctagcagcagctgaattctccgactatgcccttgtttggtggcataaataccaaagagaaatgttgagagaggaacggcgagaggtagatacatggactgagatgaaaagggt

SEQ ID NO: 42023 - DNA, 335 bp, Glycine max
agcttatcggcacaagatttttttttcctaaatatatgcaaacatttaaaagagaaagaacgagttataactatacaatttaaccaattattcctaatttcaaaggcaccaagttaggattatgcaatgctagaataacaaacttgaagtcactttctggccacaaattgcaccaacccttgtcgttagctatttcaatgtccattatagctcccaaaagttctgtgtgagtggcaaagttaataccaacagagcaaataagaaacccaaagtgatagcagatcggtctctgaaaattcccacacaaccagcaggtccaggagctcctttggcag

SEQ ID NO: 42024 - DNA, 320 bp, Glycine max
acctgttcgaaagagtgtctgcccttcttgaagatgcccactgacgaattaactccttatcttcttcaagataatcactttttactcgttcattgaaattggcccattcatctacagtacattaatgacatacagtaaatgagtgcacatgtactaaagaagggtagaaatgtatggaagcatataaaatactcaccaggatatatctttttcaggtagaataaaattgatattccatcttcattttccttattgagttcctcatcagaatatacaacatcttctttgaaatatggtgtcagaacactgaagcaatactc

SEQ ID NO: 42025 - DNA, 336 bp, Glycine max
agcttgtctcagcgtttttgctatacagagaccaacatgttagccatcgttagcaagtaccaagaagaattaaatctagccgcggcccatgagcacgaagtggcggacgagtatgcccgagtgtacgcgaaaaaggaggctagaggaagggtgatcgactcgttacatcaagaggcaacaacgtggatggaccgatttgctcttactttgaatgggagtcaagaacttccccgattgctagccaaggccaaagcaatggcggacacctactccgcccccgaggagatccacggacttctcagctattgtcagcatatgatagacttaatggcccat

SEQ ID NO: 42026 - DNA, 326 bp, Glycine max
tggggacccagtgctgagaggtttattgtaacggctacgtatgtgaacgtgagctcaatttaaaggtgggcaactggggatggtgtgcttatgcctgggcttgtggaaatgggatatttgttttgggccatcgcccgatcgccacctagtaccacatattgacgggtgccccataacccaataagccttgtgtgagaaagcgtggaagagtcacccgccatatgcgtgagaaagcgtggaagagtcacccaatgggtagatctgtattccacatatgctgaactacccattgtgagaaagcgaggaagagtcacctaacctttgtg

SEQ ID NO: 42027 - DNA, 307 bp, Glycine max
agcttgaaaagacacttctctttttgtctataccacgcagaaggaatggtcggataaaccatccttatcaggtccgtccaaggcaccaagtgtagctagctcctataatgaatactctacacgagcaacagaggaggacgacaagctgaaccatatctcgagaaaaatctgaacgatgtggaagaacaacggaggatctgcatagaatagacttcacctgaaggagtacaatgaaaagaatgaccataataacatgtgcgtcgttgcgatgagcgcaaaaagcctgaacactgcgagtctaacagcc

SEQ ID NO: 42028 - DNA, 497 bp, Glycine max
  unsure (1)..(497): unsure at all n locations
gcccacggggtttgaccgtggcacnntggagaactatagaaactcaagcttggactagatcatggagtaatatgctgacaccgattttattatttcttaangatcanaactgccattctgtgtctgtaattgggctccaccaatgccaaagcatattttagagaaaattgactagagaggccaatctgcctcaaattgtgtgagagactgaggctataaataaaggctatgcgacgcctttgttgcactttgatatcagataaacacactctatagatcacactccagtggatgcacatacactcttgccactactgtacctcgtaatacacgcatggtcgactaccatgctgctatgatacatgaagatggcgctgcaatcatgtctccttcttcgtcattgccgtgtcattatgcttcaataatcaatggatccagatgtgaagaaaaccaanggctactatctctcgatggagctacataagacagttgtcaan

SEQ ID NO: 42029 - DNA, 331 bp, Glycine max
agcttgtcacgagttattttaacacatcagtatatgaaatacgacgcgttacagccaagggtaggaaagaaaaattcgtattaagattcctcaaacttaagggcaaaatgctccttgtttagctatcataacgtaaacaataaagaaaactagcttttagtaatttaattttaaccaactccagatattctttttttcgttttatccaatgtgaaaaattttctttgtttaaggtgaaactttgttttattcagcttttgtcacttaactttcttatccatggtcaaggaacctttatccatcagaaaacaagtaacttatttatttgtct

SEQ ID NO: 42030 - DNA, 239 bp, Glycine max
  unsure (1)..(239): unsure at all n locations
ttcttttgaccaaaagcaaacaaaaggaattatttgatattatgaaatagtacattggcttaagatgtctcgaccatctgagaagattgtttcacagactgcaagaaccttcaaactcgcttcaatttccttcacatatatcatacaagctcctctgagaaatcaaacncatcctttgcaaggttacatgggaggcacacaatttgaatgcagcaaaatcaaccaaagacttgaacttg

SEQ ID NO: 42031 - DNA, 229 bp, Glycine max
aggtttttttttttacgtgcaccgaaggaactggtgtccgtccgcattatgaccgtctccgtatttggatcgctgtaccccagcatcgcttctaggccactcaaggaaggccgtacctcccgggagcgactgtgcctgcccagcgtacaacgccgagtcctgcatcactgccggagatacgccgccgacggaggacatgactgggtacctccgaggccacggcgtgacc

SEQ ID NO: 42032 - DNA, 328 bp, Glycine max
agctttgatgttgttttttacaaatcacatgtttgtcatcatcaaaaagggggagaatgtaaatgtatgtatacatgattttgatgatgtcaaaagaagaatcaaacaaggctcatttgcttcagcattaatacatgattgtttcaacaaacaaagccttgattcaagattacttctagatcaagccttgcctcaaaacaaaaaagtttcaagttatccaaggcacatgtaatcaattaccagggcacatgaaagtgtgtaatcgattacacatcttatgtaatcgattaccataaactctgaacgtcgggaattcaaattataaatg

SEQ ID NO: 42033 - DNA, 391 bp, Glycine max
gaacaccaaactcagcttactctacacctaaaaagagatgattttttttcaaagagaagcttctgatagggagctaacaaaatttcatgcaggggaccttcttctatagctctgacttgcagcagcctcctatgcctcttccattcccacctagagtaattccaaacaaaaaaattgaataagcggaaaaggagatcttggagaacatcacgaaagtagaggtgaacatacctctactagatgccatcaagcatattccaagatatgccaagtttctaaaagagctgtgcacccacaaaaggaagctcaaaggcaatgaaaggattagcatgggcagaaatgtgtcagcattgataggtaaatcttgtgctcaaattcctgagaaatgtaa

SEQ ID NO: 42034 - DNA, 335 bp, Glycine max
agctttgtcttgttttttcttaccaacctatgaaatctcaataaataatgttagaacactaacactagctgaagaaattagacttgagcatgaagataatattgataccgctagatttataagatcaaatgcaacatacaataggacaatcagaatattatgttttgtatagtaatgatatttgaaaatggattgtggatctatggctctattttatttttttgtggatctttgcacaaaatggattgtgcaataattatcattggtgtattagaaattatatcttcgtagcttttcaagagagggccttttcttgttatcttatgatttttctc

SEQ ID NO: 42035 - DNA, 360 bp, Glycine max
gatccctcttgtggactagacttattatctttctacattattgggacaacatatttaaaaccaaaacttaatccgtagatccttcatttaagactaagtttcaatcctgcttcattcaaggtctaaggcaatagtacatttcccaatgctaagtgtcataccctaatttcctctggggaccattgtttgtcggcatgcaacttttgtttgaccacttcaaaatgtttaacacccatcgctgtggaatccgtaaagtttcaggatgtttcagagacaaaccggccaagaacacgaaaacgaagtgtatttagcaaagtgtctggggaccattgttgatcgcttcgcaaggcttaacaccca

SEQ ID NO: 42036 - DNA, 335 bp, Glycine max
agctttgagggtgcatattctcaccatcttttcatagtagagtatcgataatgtgtctaccatcacgatcatcgtctccctttccatcattgggggtaccacttgggccgccagatccctccaccttttgggcgtgttctttgaaagattcgtccccttttttgcaaatgttctatagttgcatcctatccagaaccatatcaaaattgtactaatactgcctaacaaaggcaaccattaggtccttccaagaatggactcgggaagattccaagttagtgtaccaggttacagctaccccagtaagactttcttggaagaaatgtattagcagt

SEQ ID NO: 42037 - DNA, 358 bp, Glycine max
  unsure (1)..(358): unsure at all n locations
atttagtcatcctgcttggacgaatgagaaaactggggcaaatgaagagggtgaggatgaaatataagcccatgctgtgactgccattcctatatggccaagtttcccaccaacccaacaatgtcattactcagccaataacaacctttcttattacccaccacccgatcatccacaaaggtcatccctaatatcaaccacaaagcctacctaccgcacttccaatgacaaacaccacctttagcataaaccaaaacaccaaccaagaaatgaattgtgcagcgagaaagccttagaattcaccccaattccagtgtcctatgcgaacttgctcccatatctactngataattcaaat

SEQ ID NO: 42038 - DNA, 125 bp, Glycine max
agcttttgaacaggggtgttattttttgaaacacacaagcattgcccttgtcgctcctagttgccaaaccttactaaattggaccctatgcttggttgaaaaggcaagaccccgtgaagtacttg

SEQ ID NO: 42039 - DNA, 464 bp, Glycine max
  unsure (1)..(464): unsure at all n locations
cccacgcccgccccgcccatcgcgacanccactcgaccgaactacacnncantaagagataaanagaannaaaagttgatccatgcatcgcacaccngagaggcganacagncgagcggaacgcaagcaagccagaagaacgganggacattgtaaaaggcagggcgcaggcccggcacagggaaaaaagggaacgacccacaccaacgccaggacacaaaggccccaacgacgaggcgcaccgaggcggacacccaagagaacaaacaagaagggcaagggaggccagggcccacaacccaagggcncgacagcacacaacccagggcngccaaaacacgccccgctaacaagccgcgcagacagccgagacaaacacgggggggaggaaaaacaggcacagcacccaccccacgaactggcacacacaacaccggcaaaaagaggggacgacccacgaaccn

SEQ ID NO: 42040 - DNA, 360 bp, Glycine max
tcaaccacagcagaacaattatgacctctccaacaacagatacaaccctggatggaggaatcaccctaatctcagatggtctagcccttaacagcaacaacagcagcctgctccttccttccaaaatgttgttggcccaagtagaccatacattcctccaccaatccaacaacagcaacagccccagaaataaccaacagttgaggcccctccgcaaccttccctcgaagaacttgtgaggcaaatgactatgcaaaacatgcagtttcaacaagagaccatagcctccattcagagcttaactaatcagatgggacaatcggctacataattaaatcaacaacagtgccagaattctga

SEQ ID NO: 42041 - DNA, 318 bp, Glycine max
agcttgcctcaaagaggtttattatggacaaggcagccgaaggaactagttccgctccggagtatgacagtcaccgctttaggagcgctgtacaccagcagcgcttcgaggccatcaagggatggttgtttctccgggagcgacgggtccagctcagggacgacgagtatactgatttccaggaggaaatagggcgccgacggtggacatcactggttactcccatggccaagtttgatccagaaatagtccttgagttttatgccaatgcttggccaacagaggagggcgtgcgtgacatgagatcctgggtaaggg

SEQ ID NO: 42042 - DNA, 459 bp, Glycine max
tataaaactcagcttcttacatagtccgcctttgcttgaccttcttttttcttaaaaacagaaacattaggcataggcaaaagatcaagaggagttagtggattaaaaccataaacaacttcaaaaggagaacaattagtggtgctatgaacagctctattgtaagcaaattcaacatggggtaaacaagcttcccaagtttttaagttcttcctcaaaactgtcctaagcaaagttcccaaagtcctattaacaacttccgtttgcccatcggtttgtgggtgacaagtggttgaaaataacaatttagtgcccaacttgctccacaaagtcctccaaaatttttttaggaacttagagtccctatcactaacaatgctccttggcagaccatggagtctcacaatctccttgaaaaacaaatcagccacatgggaagcatcatcaactgttttacat

SEQ ID NO: 42043 - DNA, 325 bp, Glycine max
tgctatgagggcgcatattccttcatctgagaaaagaagagtatcgatcatgctgatagcaccacgaccatcgtatcacctaccctcatcggaggaaccacttgggccgacagaacccccctcctttggggcaggttgattcaaagaacccaccccttattcgcaaaagttctatagatgcatcctatacaaacccctcccaaaatcggactagcctgccctgaagcggcaaccattaggctccttgaagcaacggagacgggaagatgcctagatcatgtaccaaggtgcaggcaccacaagatgactgtcgcgggagaaaaga

SEQ ID NO: 42044 - DNA, 398 bp, Glycine max
  unsure (1)..(398): unsure at all n locations
atccaaaaaatgtgagtgccatcaccttgaggtttggcaagcaaattgaagtgcctccaccagtagtcatgatgcaagctccattggagcttgtaggcctaggatcttcttcatcaatggattcctttgcttcttggaagataaatggcagcggaatggagaaggaagagagagaggagacgccacttcaaggagaagatgagtctagaagaagctcaccaccataggaggccatggataagagcttggaggaagaaggagatgaatgaagggagagggagagaagagcacgaaattttgtgctcaaaaagagctctgaaatctgaagttaatattcaaatgatcaaagntcaaaaaaatgcacacacatgacctctatttatagcctaagtgtcaca

SEQ ID NO: 42045 - DNA, 186 bp, Glycine max
  unsure (1)..(186): unsure at all n locations
agcttgctccatatttctttcctatnagacgcagctaggatacatcacggtgcactcctcaccgagatctggccccctgtacatcactgacgatacacaatggggctcgagaactccttcctacatttgtcccagtctttcgaaaaaagatttatctttattgggggcggcataatttagcatact

SEQ ID NO: 42046 - DNA, 301 bp, Glycine max
  unsure (1)..(301): unsure at all n locations
cacacaccaaccataatcacagctgtgctcacttatagaccccagtaacaattccttcgatccaattagttaaccgttggagcgactccaaaattatactggaagactataggacataagcctacattgcgaccggtgggatgtactagcaaacatccagaactcattctgcactagactttccacagccaaccacacacaagcatttttctgcacagagccaagatcctgctgcacctattntgagagcaaaattctgcataagtgcagatttcgaaaatcacactttccctcatgcaat

SEQ ID NO: 42047 - DNA, 331 bp, Glycine max
agcttgtgtatgtgcattttatttggtgccgaaggcatacttgagtacaaaaaaagtgaaacaaaattgcttaacctatttatttaattttacttatctcaaactttttgggaagtgctacattattattatttttccagcgaggttgattgtggtattcttcggaggacaaggattagacatctagagcttaattagtgattgggacatattgttggaagtgggaataggaaattgatcaagctcaacaaactatgcatttatttaagcattcggttcatgtgatagtgaggcagcactcccatcatcaacaagttttgaggtcatttcc

SEQ ID NO: 42048 - DNA, 438 bp, Glycine max
  unsure (1)..(438): unsure at all n locations
tgagttntaattattntattcttgaaccattttttttgacatatctcatacatcctaataaacttaaaaagaatcacacaagaaagattgaaaaatccttttcttttctcaaaacactttgtttttcttttttcaccatcacaactacatttagttgcactttcagactataaataaaaaccttcagcaaaacctatcacttgatgtatttaatgattcaccagtctatgttaaagtagagtatactaacttaattgtagtgtactagtattttatcagtggctgaataatttagtgcactcttctttaactctagcttaaattgcaaagggaatttggaggaaataaattaatttacaatcaaacctttttagcaaataaataaaaggttaaatgaattatttgatttttattcgatttttttcatttaatttttat

SEQ ID NO: 42049 - DNA, 332 bp, Glycine max
agcttgcttctacagctttttcagaggaaggcctcacaccttttattgcacgaggtttaaatagccccaacgcaggggtgcttcagggggtccgcaaggcatgggaattggtgcaaaagaaggacaaggaacttagaggaagtagcaatggggccgtcggcggctaccgtaggtggttgaaagcctacacacaaggtttggattggctcacgaggttgagagccaataaagaggtggagtttgaagctctggaggaaggcgaagaggtacaagtcctcagaatggagctcaggaaagcccaagcggtcaaggaaatgttcaagtcaacagcc

SEQ ID NO: 42050 - DNA, 380 bp, Glycine max
aaataatgtatattcacactatgtatgattatttttgtttattccttgacctgtgtaattagcaccattgtctaggttaattagatagagttttacttcttttggtaaaagccaagttgtcttttatgcctaattgatggaagcttgcatgagaagcttctatggaggttggatctttgagctttaatgaggtcctccaatggtgattttcaaccatggatatgtagcggaagataaaggataagaggtgagaggaggcgccatccactagggaataagccatggaaggaggagcttcaccaccaaaagagtgccttggacaagaagcttagagaggaagcttcaatggaggaaaagaatgagagagatagggggggggg

SEQ ID NO: 42051 - DNA, 335 bp, Glycine max
agcttgtaggattttgttttacccatcacatgtggtactaggtggcggtcgggcgatggtgcacaacaagtttttccacatccacaaatcacgcataaacccaccatcccctgttgcccacctccaactgagctcacgtactcccacgtagcccatatcctcgtttctctcaacaccgggtccccatcaatcctcccaagcttccccaacatccaggtaatacaacattcaaacagcacaaactatcacagccaagaaaacagtgcaaaggcagaaaactctgcccaaaacaccaaccaaaatcacagctttttctcacttaaagaccccagtaa

SEQ ID NO: 42052 - DNA, 392 bp, Glycine max
tctcgtcattatatctagcagtctttcacttgatcttgaggataagttgttgcttgttttgagaggccaaaagaagttgttgcttctcgtcattataattcttcctttgatgcatgtttggatagcctctctagagttcttgaccgatgcattgagactaaccttgttcttaactttgaaaattgtcattttatggtccatgaatgtatagtcttaggacatttggtctctaatagaggtattgaggtcaataaggccaagatcgatgttattactttttttccttacctcgcttctgtgtaggaagtactttcttttcttggacatgcatgtttttacatgagattcatccaagaatttagcaagattgccctgccattattcaagcttct

SEQ ID NO: 42053 - DNA, 328 bp, Glycine max
agcttctgctttttatttcataattataatttacattttacaatacatgtgtctaagtggtccttttgtcaatcagggctaaactaaacggaatgatggtacaatttggatctgtatgtggatacaaggactacattgcctatgcaaatatttttccccatcccccaaagcatcttttaagatgttattctcaccagcaaattttttacataaaagtcaaatattcatgtggttgcatttctttgtaaaatatgttcctcaacaaaggaacttttttctagaaatgattattgctttagaaaattatttacagcaaggacaactgttc

SEQ ID NO: 42054 - DNA, 348 bp, Glycine max
tctatacagtcatcaacagtccctgtttgcttcatatctttcatctttacataaggattttcaacatttctccctccaaaccttgcaacaaggctaccttaaaattgtcctaagccaaaggtgcctcagttactcttatgtattgtttggattgatggaattacaaaaggaaaaaaataatttctttttaattgtttggttagagtaaaaagagaatgaaaagaaattggctaaattactaagcatacaactttaccctttaaatattataatattataattataataatataaaaagcacaaccaaagtttgcttctacatggcctgttcatctctctctctctctc

SEQ ID NO: 42055 - DNA, 321 bp, Glycine max
agcttatgatttatgatttgttatggatggtggttgatcactaccttttggtccaaaggtggaggctctacttggtcaatgcatatgaggaatggaaagtggtagtttgggttcatattttggatctctctctataattttaaaatgataccttcatgtggagagttggtgaaaagttagggactttactcaagattgttcgcctaacatcaacacactcttatggccaattgacgagatttcatgtggagttggattttatgaagaagctggttgtggcctttaaagctcatggagtgatatttcctccattaatatgaa

SEQ ID NO: 42056 - DNA, 405 bp, Glycine max
  unsure (1)..(405): unsure at all n locations
gcttttgtatttgttatcttgcacaaaaagtactatttcataattgaaataatcataccaccaaagcttggtaaagtagagaccattttacatatgttagcacttataaaaagacatcagcaaccatatccaaactatttttggagccatcagaccattggaaaaaccaatgagaaaaacaagcaaaagcagaagggatagcataagtaccagccatggagaattcacaaggcatggagagtcaatacatacatatacctgtattagaatattccatcaataagaaattcaaattcaaattaacattattaatttatccacatncatacatttcctcatccacttgtataactaaccgcacagttctgaaaggaagtacattccacataagaataataatagaaa

SEQ ID NO: 42057 - DNA, 333 bp, Glycine max
agcttgtttgcccaaattttatccctttcagacaagagattgtatgtgatggctttctggtcacccactttttttgcatagagggctctgtggatttgagagttataagccttctcccatccttcatagtaggtgcttccttcatgaaggcacccattagccttggcaatggtgtcccttgacaacattacaacaactcgtaggaccttggacacaatgatcttgttgtccaaaaattcaatgttcctccagaacatccatatgagctatggatagaagggttatggttcgttgaagtagcatcttgcaccacataagaacatggtcttgtgg

SEQ ID NO: 42058 - DNA, 435 bp, Glycine max
tctccccaattttctataaattggggagaagttttttttttaagggttcagccccttaggcacttctctctctttcgaatttgcttggaaaaattgtctccgtgaagaaaatccaagccgaggcacttccgaaacgtttccgtgaggaatttcgcgaaggtttcgaccgttctttgacgttcttcattcgttcttcaccgttcttcgatcttcaacgggtaagtacctcgaaccaagcttttcgattcattctatgtacccgtggtggtccacattgtgtttcgtgtatttttattctcgtttcatttactttttatacccccctttgacgtgcttaagccattttatttaagtcatttctcgcttaacctaaaaataaaataaatttccaccgatcgtttgaattgtattatccgttaacttcggttaaaatga

SEQ ID NO: 42059 - DNA, 333 bp, Glycine max
agcttccatcaagtggtttcatttcttaagagcttcaagtaggtgctccttaaacctccattaattttttgctttaccttctctttcattgttgtttcttcatttttctccatgtatctcctcacatgtcttgtgctaaatgttgttaacatgattctttagagtttcccccgattaaacttgctatagaggctagattttattgtctatggttcaaacttcctttctttttcttatcattctcctcatgttgattcagtctcattagttccattacgtgttcctgaagctttccaaataaagttgcaagagacatgttggatagatctcttg

SEQ ID NO: 42060 - DNA, 323 bp, Glycine max
  unsure (1)..(323): unsure at all n locations
taggagacagattactttgtattagatctttttgaagacgtattagagcttgatgtaactagatgcatgcacttgagagcatggtggtgggaatattgcatgtggttaaacgtgttcatgatcacgtcaaaattcaactgaatatattttttgtacgcgtaaaaaaaattcagtagagaagtagagctagttatatctaccaaaaacaaaagttgagctagcaaattacaaacatttaatacgtaaacggttagattntagaaagaaagatgttattctattttagaaaaaattatattgatatgtacacccatttttgagta

SEQ ID NO: 42061 - DNA, 332 bp, Glycine max
agcttgagaggattgatttggtccggtgttgagagaaacgaggatatgggctacgtgggagtacgtgagctcagttggaggtgggcaacaggggatggtgggtttatgcgcgcattgtggatgtggaaaacttgttgtgcaccatcgcccgaccgccacctattaccacatgtgatgggtaccccataatcctacaagcttgagatgaggaagtgttgaagggtgaaacttcctgcttttattgttgaccacagagtggtaccgggagatatgtcgcgggggtcaggagaccttggggacgtcaggtggggtgctattgcccaaaaccaagc

SEQ ID NO: 42062 - DNA, 420 bp, Glycine max
  unsure (1)..(420): unsure at all n locations
tacccgtcatatggtggacttggtggttatcagncgatggagcaaggcgactctccacatccataaatcacacatcaatccgtcatccccagatgcacaccttaaactgagctcacgtactcccacgtagcccttatgctcatatctctcaacaccgggtccacatcaatccctccaagcttccacaacatccaagaaattcagcatccaaacatcatgaactatccaaaactaagaaaacagggcaaaggcagaaaactctgcccaaaacacattccaataccacagttttcctcactcaaataccccaggaacattgtcttcgttccgatttgttaaccggtggatcgactcgaaacttttactggaggtccctaatacataaatctacattatgaccgttgggatctgctagaaaat

SEQ ID NO: 42063 - DNA, 303 bp, Glycine max
agcttgtcgagtcaaatattgttctcggggtgggccacattgtgcgccgtggatcttcatgagaatactacacactcttcatatgcccttatgacctgcaaaagccattggatgtggggaataaatcgcgtaacgtgaagataaaatcccgcatcacctatcgataagtttgtattatccactcgcgcccgttaataggaatcccgaccgggcaggagcgccgaaaccacgatggaaagcataaggaggtcaagcgataatatactaacaaagtacatggccctgctatgaaaataaagcgaa

SEQ ID NO: 42064 - DNA, 330 bp, Glycine max
tgtctataagaacataatttcctatatcatttacaaatatgcatgtgaattacgaagcatcaacaagaatcaagccaaggttattgtgcaagcaatcaatggggcaaaacacaccaaaagattatgatgatggatggctcaaattctcacaaaggtaaacttatcactttcaaattgagctttcaaaactatcatgacatgtacaggaaaaacaaggatttcaaatcacaaaatgtcaagagacttttattttcaaaacaattacccatttcttgaacatatcctataattcaaagaaaaatatgcaaatttgtacatgcaaacagaatt

SEQ ID NO: 42065 - DNA, 387 bp, Glycine max
atacaagtagtggggatgtctcctccacctctagaacctcacaatcattcacagactcatctcatgctctcaggatggcttcctcttctcgcttagatctctgccagtcttcgtacaacaaaagctttcaaacatctatggaacttggacctttctctctctagaaatctctaaacatgcaaaagcttcgagaatttcccaaactccctctctatttctgatttcaggcttaaatagggggccttgttggtgcttgcgcgcttagcgcaactctggaccgcttagcgtgcattagtgaattttggcttagcatgcgtcttctcactcagtgggtggactcacgcagcgcgcttagcgggatgatccatcactcagtgaacatgcaca

SEQ ID NO: 42066 - DNA, 331 bp, Glycine max
agcttgtcgatcttctttatttaactcttgactctcttcaacttaagtaactcagaacctaattcgaacagcacaagccaacacattctctaaccaataagctctgtgcttaaagtgcaaatcctctatgcatacaaccagaaaccaatcgaagttccttatcattcgcatttgtgtagaaaaagtcgttgggtgaatgtgcctctagttcagcaaacacaaacctaactagaagtaatttaacaattccagcaactaaacaaaacaagctttctattcagagaataaaaaaatgggaataagaagaggaaggtagaccattaatggcata

SEQ ID NO: 42067 - DNA, 412 bp, Glycine max
gcttgaagacttgtacagtgaccaaatctctggttttttatctttgatcttgacaacattgttgctattattgaggatgaagatcaagccttactgttattgtgtgatctacttaagacctttgctcatttcaaagaaacacttctctatggaagagattctctcactcttgttgaagtccaatcagccttgaactctaagggattaaatgaaagaaatgaacaaagaccttctgtacacggggagagactcagttcgtggaagacaatatatgaccgatgataaggctgaagggaaaagatccaagtcacaagctcgatctggatctaatgtaccaaacattagatgttaccactataaaagagaaggccatactcggagattctgtcctgatagacagaatggaaacatg

SEQ ID NO: 42068 - DNA, 327 bp, Glycine max
agcttagagaagatacattctctcaaataattcgtcaatcaactcatccactgttggaattggaaaactatccttgatagttattgcgttaagagctctataatccgtacatacccgccacgaaccatctttcttcttcacaagaattattggtgaagagaaaggacttttgctgggttgtataattccttcttgcagtatacctgccactaatttttcgatttcctctttttggctatgaggataacgatatggctttactttaactggtactgaatcttccattaatggaataaaatgatcttgtgcttgaggaggtggcaatga

SEQ ID NO: 42069 - DNA, 414 bp, Glycine max
  unsure (1)..(414): unsure at all n locations
ctaaagggttctggttgtcaaaccttgttctnttactataaaacaaaagtgtgttatatcttttcattctcttctccctttgccaaaaagaattcgccaaggactaaccgcctaaattctttttatgtctctcttctcctttatccaaaagaacaaatgactaacctcctaaattcttttgtgtctcccttctcccttttcaaagaattcaaagcgacacagtctgagaattcttttgattcttccatttcccttaaacaaaatatttcaaaggactaaccgcctgagatatcttttgtttccccttcacaaagnttcaaaggactaaccgcctgagaactttgtcttaacacattggagggtacatcctttgtggtacaagtagaggatacatctacttgggttgtcgaactg

SEQ ID NO: 42070 - DNA, 333 bp, Glycine max
agcttgtcactggttatttatttccaaagccatgtaatgaattacacatggctttgtatgaaaggatatgactattcacaattgattttaaatttcaacgttcagatacactggtaatggattgccaatatcttgtaatcaattacaccattttgaaatcaattggaacgttgctaattcatttgaaagcttttgaaatcaaactttgccactggtaatcgattaccagtttcctgtaacttataaaatttggagaaaatctcttttgaaaaataaaactgtgctatgtttgttttttgaaaaatcttttcaatactccaattgtgaaacatt

SEQ ID NO: 42071 - DNA, 326 bp, Glycine max
agctttttggtttgttgtataagctaaaagtcttaaagattgatcttaaacattggtctaaggaggtgtttagtaagctagacctaaagattaatttggtagcctctaaaatagacagtgttgatgacaagatcattgagggtgaagttcatttatcataccagaggaaggtgttgcaataagatttatgaaatctctttatatagagagaggggatgatttcccaaaaatcttgtgctctttgggagaagcttagggacttgaactcctattttttttcacttcttcctgtgtcatagaaaaaggaggaatcagattataactat

SEQ ID NO: 42072 - DNA, 414 bp, Glycine max
gctttgaatgttcatcattgcaagcgagttatttatttatatcgaaatgctggaagtaaactaacaagggaaaggtaaattgcagaatttaaaggagcagcgagttcattcgatcgaatgaaccatttaaaagacaggaattctaaagtaaaatgaaaaatgcattgcattcgaaatgtaaagtttacagaaacttaaaatggttcacaatcatacatttcccttgcgtactcgtttctctctgcgctgggtactttgagtatataaggattttgtagaaatgatttgcgaccccgaaatctgactaacaactgctatatatagacattttaaaaataaactgtcctaacggtcgaacactatcctaatgccaagtgtcctgctacgtacaccttgcatgcatataactgctcc

SEQ ID NO: 42073 - DNA, 328 bp, Glycine max
agcttggctgcattgtgtttagtttataaaaagcttggctgcattgcacaagaattaaagttagtcttaaaagctactaatgaaaaatacaagtccatggttgatgaggcatgacatgatacagcttcaaggcaaagtgaaagctaagtgtgctgtttgttgtccaaacagacagcttcatgacatgagacagcttcaagaaaaaataactagtctacttcccactcagttctactactagtctacacttactttgtttgctgtccaaattcttaggtgattaaaataataattaccatcttgtagaatggtatggtaataataaata

SEQ ID NO: 42074 - DNA, 409 bp, Glycine max
tatcctttgtggattggtttctgatctttttttttttaatagccacaaatcattcttataacttccttttgcagtgtaataatcgctcaaaaattgttataagacatttatactaatgattaaaggagaattaaagacaaagacaaccgttacaaaatttaggaggagaaagaggttgtgtctgtaataaaacatggagacaaagttaacaggacatattacattggtctcaattaaatgttcttgagctaggtcttgtaaatcttaggtgagatataattacaagaatgctttagtgcggactctatgaaatgcttcccaatgcccatgtgtcttgttcaaagacgagcttatattaaaatgtgaatttatacggtgctcgaatacttcgacggatgatgatctcata

SEQ ID NO: 42075 - DNA, 331 bp, Glycine max
agctttgatctaccaccttcgtctccaccatcattttagtttttctcttattttaatattagtagtactttgatttccagccgtgtatttcgctatattattatgacatttgaacaatttagtaactctttatttgcatggtgtgtttgaacaattatgaattatgttatatgactatgtgatttttctatatatttgatctagtcatgtttcttgcttcatgattagtttatatttctccatgattgttgtgtgaatgattagttgtatttgtatgtttcatacttgttacgcactttggctttttgttgatgccaaagggggagagaaa

SEQ ID NO: 42076 - DNA, 342 bp, Glycine max
gacgaatgagaaaacaggggcaaatgaagagggtgaggatgaaggagaagcctgtgctgtgactgccattccaatacagccaaattgtccaccaacccaacgatgttattacttagccaataacaaaccttcttcttacccaccgcccaattatccacaaaggccatccctaaaatcaaccacaaagcctacctaccgcacttccaatgacaaataccacctttagcggaaaccaaaacaccaaccaagaaatgaattttgcagcgagaaagccttataattcaccccaattacagaggcctatgctgacgtgctcccatatctactggataattcaatggt

SEQ ID NO: 42077 - DNA, 332 bp, Glycine max
agcttgcttctacatcattccttttgaaaatattttgaaaaccaaactggtcactggtaatcgattactgccaactggtaatcgattaccagagagtaatcactctggtatcttagaaaatttgagaaaattattttgtaaaacaaaactatgctatttggtttttgaaaaaatcttttaatacttatcctatatgaagtcttgacttgttacttcttgatttcttctcttcaatcttgaatcttggattggattcttgatgcttgatcttgaagtcttgaatcaatcttgaatcaatcatttgggcttttggcatcatcaaaattgcttgg

SEQ ID NO: 42078 - DNA, 334 bp, Glycine max
tatcatttcgtatgtgcatcatcatgtataagtaagaagaaaggttcttaagttacaaaatctattccatgtttaaaactctctattttaatttatcaccaggtaatcataatccattacattagtgtttgtagcttacagagaagtttctcgaatcagcttaatccgattcaaggcaatcattatcgattatacaattcacatgacacaaacactggtttttcaggagtctctgctttaatcgattatcgcgtgatataatcagatacttctctctcaaaacgcgttcaaaagtgatcactaacactttaactgattacctcaagattctaat

SEQ ID NO: 42079 - DNA, 348 bp, Glycine max
  unsure (1)..(348): unsure at all n locations
tcatcataacgcatacgtgaagcgcacccatcttctctaccaagaagcactgcctatctttcttcgatttgaagtcaatgtaatccacatccgtatcgcggtcgttatacaacatgagcaacggagtctctttcaaatatctaaggacatgacaatcttggacttttggaaattagctagccactatacagaacatgacatgtgaactgaatatccgagacaaantaaaaagtggccagactctggattaggagccacatcccagagcttcaagttcgggacggcgactatggtgaactttaaaagaacgttattcttaattgatttggggcacaaaggctaaaatcn

SEQ ID NO: 42080 - DNA, 244 bp, Glycine max
gcactataattattcactccttgttccatagtgtctagatctttccccgatgttatttttatagggacattccctgagagattattgttattgagagagatatctaacttgactgttattttacctatatcttctgaatgcgccctgtgagatggttcgaacatcggagaagtacctaaatctatatgtttggtggcttcgaatgtgagttggaatcctaatgtattggataaattcatttttc

SEQ ID NO: 42081 - DNA, 337 bp, Glycine max
agcttgcacaacaagtatctaaatttgtttttgtacaaaatgaagtaactaactaactaacttccactaatgtatatagttactactcaaaaggaagggatgggccttgatttggcccatctaacctacctaattaaactaattacacaaagcaaagcccaaattcgcagcataattattcaagtgcaaaggttctgacttccaagcctaatttcacccttgaaatggaagaattggcccaagcttatttgtcaataaatttaagatatttttcttagatttctagggactactcacaaactccatttgaagttctttagtttcctataggccttgc

SEQ ID NO: 42082 - DNA, 438 bp, Glycine max
  unsure (1)..(438): unsure at all n locations
gagtctccttacattaaaagatcttccttttttgttggaagaaaaccatcatcctccacttcactagaggaactatgagaactcttagatgactcactatccacctctccattctccaacataatcatggtccttttgttaggacattgggatgcaatatgacccttttccaaacaattaaagcatttaatggaactagttatattgggaaggggttgagtaggagaagtaggattacatcttgaagacttcctttcaagatgctgtgaagaagaaccctccttcttagaagtgtctttatccttccaatttgaaagggtagtcttcttgtaggtttgtttcctcttcaattgttgctccactttcatagtcctatgtantaagtcatccatgttgttgtagctttgaagctctacaacatcttgaatgtccctattc

SEQ ID NO: 42083 - DNA, 341 bp, Glycine max
agcttctcttacaaagattattttatagaaaatggaagattaggaagtacaagtggtgaggatgtcttcttcacctctagaaacctcacaatcactcaaactctcatccaatactccgcaagataacttcctcttcaatctctactgtccctcaggatcttcacaccaaaagttctctctgccactcatccactcagatgaatgcttccaagaacagagaaagcgccaaaaattgagaactcccttctatttctgatttcaggctttaaatagtgttgctgatttttggttgttagctcagccacattctggtttgctcagctgaattaagtgacatttgg

SEQ ID NO: 42084 - DNA, 356 bp, Glycine max
tgaaaaggatgtgacctcatttcttattgttttgaaactctacgcttctttcctcaatacttgtaaaaagaataaaaacatatttattagcggcgttgggtatgtcaaagttgggtaaggtctaaaaaccctttacctgtgcatcttcctatgagggaacatggttcctcaccaactcaatgagtggtgttacaagtatacaaaaagatgggacaaaccttttataaaagtctgataagtcatggaatgtccaaaattcccttatacttggtggagtgggccacttatgaatgacctttattctcttaaggtccatgggaaccccttgatcactatttaaaaactaatgaaagtaa

SEQ ID NO: 42085 - DNA, 330 bp, Glycine max
agctttaagatacttcttttacttgcatgtagtgtgttagtgcttagctctaccgagtgtttaaaagattggctaagattttgttaaaacataagcacttagacaatgaaggaaagctggagttgctgcacatgatgtccaacgctatgtcaaggaatcagattgggctgcacaatgcacaaggcaagataaaatgtcaaatgatgaattgaagctgcaggatccacgatgtcggatacaatgtccaggacatcctgctcgaaaatactggtcacataaatctgttatatctttaacagattgtgcaggatccacgatgtcggatacaat

SEQ ID NO: 42086 - DNA, 364 bp, Glycine max
ttcttgactcatcttccccttgacatgttttcttcttcacctttcctccttctccattacgctgcctttgatcttcaaaaaataaaggactccattgatgaagatacaaggcctacaagctctacatggagctaaatcatgtggtatcaaagcatcttcatctaagtgattatctttagttatctctatcttttgatcagtcaattcactttaattcctttctttatcgaataatccatgtatctcttccattgaggattgaggctgtttaaagtacataacaaaaataaaccgattaaatcttagatctacacttgttcttgcatttctatggttcaaaatttataaatccactattaaatca

SEQ ID NO: 42087 - DNA, 330 bp, Glycine max
agctttgaagatacaagttcaaaccgacttgcaaagtattcattcattcttcttgtaaaaatctttctctaaatttctatatagatactaagatctcaaaacaccttgtaaaccttgagagaaatgactaaagtgtagagagatatatctatttgtaaggcaatctgatattagtcattgtgaaaactttcaacaaatcttgttaatttgtttagagctagcagtagcttggtaaggcaaagaatattgggttaagtcaatcttggggtagagcttgcatttataagagtcagaagtggcaatgaagaacacttgtaactttttgataag

SEQ ID NO: 42088 - DNA, 397 bp, Glycine max
gtcgtatctagtcaaggtcttagagaccatacaagtttcctaacgatttctaattatgtgggccattaagtctatcatatgctgacaatagccgagaagcctatgaatctcttcgggggcggagtaggtgtctgccatcgccttggccttggctaacaatcagggaagttcttgactcccgttcaaggtaagagcaaaccgatccatccacatggttgcctcttggtgtaaagagtcgatcacccttcctctagcctctttttccgcgtatacttgggcatattcgtccgcaatcctatgctcgtgggccgcggctagacctaactcttcttggtacttggcgatgatagctagcatgttggtctctgtctcgcataaacgctgagacaagcttctt

SEQ ID NO: 42089 - DNA, 331 bp, Glycine max
agcttgaggagtctgagttttggcgtccaaggagagggaggccaacaaggatctagaggaggagctgctagtgttcaggaaggaagccatggagcaacacggaaagggcttttacaaaggtcatcaggttggtcaagttcttcaacaaagatcttgactttggtctttgtgatccatttaaggacgtgaaggacgatgaattgcttgatgaagaagaagtggttgtcgcggaggaggatgccagcgaggagcaagatgttggggccaatgtttaggctgctctttctttgttcttttatatactagagtttgggccataatggctttgtaa

SEQ ID NO: 42090 - DNA, 402 bp, Glycine max
tcatgagagagtcttagatcagattgagagtttattttatagctatgctaaacaagccaactaatggagaaagaatgttgtctttgaacccggagattgtgtttgggtgcacatgacaaaagataggtttgcggatcaaaggaaatcaaagcttcaaccaaggggagatggaccatttcaagtgcttgaaagaatcaatgacaatgcttacaaagttgagctgcccgatgagtataatgttaattccaccttcaatgtctctgatttatctctttatgatgcatatggagaatccgatttgaggacaaatccttctcaagagggagagaatgatgaggacatgaccaagagcaaggtcaaggatccacttgaaggacttggaggacctatgacaagggctag

SEQ ID NO: 42091 - DNA, 330 bp, Glycine max
agcttcgatgtatgaatttgtaaggattttttttatctcttttatttttataatgcaatattgtatattgtttagttattctatggctatggttggttaaacctcttagaacttggattgtgatgtagttgtatccatgtattctaattcttatttttaataaagttcttcgatgttattcaattaattgtatccttctatcattttcacttctacattagaattggtcactttaattaattattagttaattgtgtattttttactatcttctcataattaattgacttatagaatgatagagttcataaagcttgcatgatcaagtga

SEQ ID NO: 42092 - DNA, 420 bp, Glycine max
tttaaataggctcgtgggccaagccaggcttttatgtatgccgagccgagccgttaaaaaaagcctatgacaggtaatgagctcaagccttacgtattcaactcaagccaagctcaagcctagtaaagcttggcctggcttggctcattttcacccctagttgcgacataattcatacaaagcataagaataacaagctaaaagcctaagaataacctactttctcacggaacaaccgctccaattcgtgctggaatctcttttcatatgcatagtagtagtagtagtaataggtttttatacattgacatgggcttggacttgtcgtgacacccttacttaagtggggctccttctttcaatcttggttgcccactgtcttcacttgcttaagtgatgcttaaacgcctaaattggctt

SEQ ID NO: 42093 - DNA, 328 bp, Glycine max
agcttctgttctaaatttttagcatcaccatatatgacgggactcagtcggacatccgactaaaatgttattgttgttagaatttggtcagagcctcaattttcattttcgagcgtttcgatagaatacgggactcaaatggacatccgagtaaaaacttgacgctgtttagaatttaaacgagcttccgtttactatttggagagtctccatatattactgaacgaaatcggacatccgagtaaaatgttaatggcggttgaatattgtcagagcttctactttcattttttgacgttctcatatctcacgggacttcctcagacat

SEQ ID NO: 42094 - DNA, 226 bp, Glycine max
agctatgtttttcttgtttccggaaacctcacggatctcatgtgcacccaaacccaaactccggggtagaagacaaccttcattctcccattgttggcttgtttgacagaccttaaatgaaatgctctcaagagtgaaacataacactctaatgatactgcaatacgtatttccgactatgcttgacattccaaatgctatagaacagatacatgaggcgtcctgc

SEQ ID NO: 42095 - DNA, 330 bp, Glycine max
accgcagcaacaagcgagaacaggttgaaaacccggcaaaaacggaagcgaccaaaaaacaacgcccaatcgacaaaagaatgcacaaacaagaaaagcagaacaaaagaacacacggaacaaggaagaagcacacaacaagaaaccacaagataagcgacaaaaagaaccccaaaagcgccaagaggacaggaagccagaacagacacaacgagggagcacaagcaggacccaccaggcacaacacatcaacacgaggaagccaaacaaaccgcaaaaacaaaagcacacaaccaaagaaaccccacccaaacaacagccagaccaaag

SEQ ID NO: 42096 - DNA, 331 bp, Glycine max
agcttctattctcaatttttagtgtctcgatatattacgggactcaatcggacatccgagtaaaaacttattgtcgtttgaatttgcttagagcatatattctcaatttcgagtgtctcgatgtattacgtgactcaatcgaacatccgagtaaaatgttattgcagtttgcatttgcaacaagcttctgatttcaatttggatcgtctcgatctatgatgggactcaatcggacatccgagttaaaagttattgcggtttgcatttgctacgagcttccgctttcaactacgagcgtcttgatatattactggactcaatcgaacatcag

SEQ ID NO: 42097 - DNA, 450 bp, Glycine max
  unsure (1)..(450): unsure at all n locations
aagatactcagctctattagctgaccatttatcaaaaacacatgttttgtttattaagaaaatnagagagtatctcttttatcttagtgagagcgattctcctaaattcttgagtgattcaagaacaccttggctgtatcaaaggactctcacaacctttgtgtgttgccctcgctggaaagagtgattctttccttcctttcatcttcacccttgttttttcaaaccacaattccagaaaatccaccacctctgcccagaattatctcgtggccataactcccattttacgcactcaaattaagtgattcttgagcctaaattgaattcaaaacgagagcttccaccttggtttgaaatcacctcatttggagccctgtagcttccgttattgccatttctatatttctgccaaccaccacttaacctatcgtttaccatgccattcat

SEQ ID NO: 42098 - DNA, 333 bp, Glycine max
agcttgaaccattctaatttctattctaaatttcagttctcagagtcaagatcttcatccttctgatgtagactctaatgcaacttcattctaatgttggatgctctcttggtatcccttgatatgtcttctattaaggcccttattgtcttgcacttttccaagttcaagtacttataaggaagcactcttcattatgtagataggcttcaaaggatcgtctaaggcttttactcttgacaatagttctgagacaacatttatgagtagtgttttgagcacctcaaagtgtacacacatatctgcttcttaagaatatttagcattgaaaca

SEQ ID NO: 42099 - DNA, 569 bp, Glycine max
  unsure (1)..(569): unsure at all n locations
gctatacagacgganagtgaacanagaagncggcncntntaccatantnanaannaaggannnnnnnnnnaaacaggattgatgcgtcgctagacagcccaccgananaanacacaagcccnnccananaaccnncnccaaaagcgaagggagaacccattcttaaacnagngngagcncaagaacggaggcgaggnaacggagaagcccannccaaccggccacaaaaacgcaccactcagaagcacaaagggagaagaatcagccacacaaaaagaccgggaagaacataaaaggagggagccgaacctcaaaagaacaaagaagggaaaagcaagccataaacgaccacaatgtagggacacacacaatgcggcacaaagaaggttaagacaaatcacaaaccacagcaaggaaatcagcgcccccgtagacaaagtgagacttagaaagccacattccgcgccatgcaaagagtgaacctacttgtgaagtgggagtttatgcccagccaatggcacgaagcccgtcacgatgggaaagagacacagcatacagcaccagcaacg

SEQ ID NO: 42100 - DNA, 345 bp, Glycine max
tgccgcatgccagcttgcgggattcagttttatttattttgccggagatgtcgatgatagaaaaagtactaccggacttgtattttttatgggcgattgaggttttacatggaggtctaagaagcaaggcattgtgacactttctactagtgaagccgagtatgtatgctgcaacttcttgcacatgtcatgccatttggctaagaagattgttggaggaacttcagttgttgcaaaaggaaagcacaaagatctatgctgataatagatctgcccaagagcttgccaagaatccggcgttccatgaacgaagtaagcatatagatacaaggtatcatttcatta

SEQ ID NO: 42101 - DNA, 390 bp, Glycine max
gagacagagatatatagagaatttctttcttgtagaaaccatagaaagaaataattctttttgaattgattcttttactgctttgagttgcttactaattataacaaaatttcacttctttcacatttgtgcatttgctgtcacatgaaggcttgtctgtttggccttattgtgaaatattatggagtacactcgttgacagcaattttgtgtgtctgctactctgctgtcatataaaaacactaaaaagaatttggcaaaacaccatgaagagttaaaagatatgtctagctttctacatcggttcaggccaaaactgatgtagaattctacacattctacatcggttattagaatgaccgatgttgaaagctcgccatctctattact

SEQ ID NO: 42102 - DNA, 334 bp, Glycine max
agcttgtacatttatttaatgaaaatttcgactttatgtaagcatggttgtccgtttgtcttattttattagaattaatatagaaattttgttattaacctcatctattattttattagaattttctttttttgtattattttattagaatttttaatttttttaaaaaaacaaagacattctaagatggttctttgaaaaaccatcttagaaagtatacattctaaaataatttttgaaaaaattatcttagaattcttaatatttttaatttaaaaaaaaacgttctagccatcttaaaaaatataccttttaagaaggttctttgaaaaat

SEQ ID NO: 42103 - DNA, 435 bp, Glycine max
  unsure (1)..(435): unsure at all n locations
tcagctgaagttcctgtggatacagatgtggaggttttctanttgcagnttgtggaagactcatgattaatctgtgcagcactgcctcctaacatgcattcataaacctcttgccactgcaatatatgttacaatttcgatcattttaagtacaaaatgtgtaaaattaatgaaaaacttctagagttgttgtgttgaataagaatagacatcttcggttgatcacttaccaagatatatattggtggggtgtgattatctattccgagagaattgcgtttctttggtgagtttctttattcgacagacaaatttgtcgttggaattggtgtaaataaagaggcagaaagatatatgttgttgaaatacttaacttattggtgattgaatagaagggtatagtatcaattaatattaacactggtacgtgtatat

SEQ ID NO: 42104 - DNA, 331 bp, Glycine max
agcttcattaagatttttcctcaagaagcttcctcgtggcttctttgagaagctagatccttatctacccacacccctctattaactaaattaacctccttgaaaataattacgaataaaaataatgcaacaaataatcaaacatcaaacataattactaataatatataaatatatatatcagggtgttacaactctcccacccttttagaaatttcgtcctcgaaatttaccttactcaaacaaggatgggtgagcttatcgcatttaactttctaattcccatgtggcatcttctcctgatgcacctccccagatcaccttgaccaat

SEQ ID NO: 42105 - DNA, 441 bp, Glycine max
  unsure (1)..(441): unsure at all n locations
tttaattcaatgcaatgaagcatgacttatgcctttgtatctaaattgtggttttgaatgtgaaaaggcatgaatattaagacatgtttgaggtttttttaaaatttaaatttggctgccccatgattggcactttgcacctaagtaacgtgggagatgcttttcaatggtgtgtagatatatgtgtaaatatatatggcataaaaatatgttgcaaaatgtgtgaatatatggcataaaaataccttgcaaagtgaatgaatagtaaataatgcatttcaaaatatgtatatttgtgggtaggtagcataagaagcctttcaaaaaaaatgtgcccatgccaaaaatggcacaagaatgtttcccacatgaatatatgatgtggaatngcccctcaagtgtagatagatggcatgaaagttccttttcaaatgcaagtgt

SEQ ID NO: 42106 - DNA, 329 bp, Glycine max
agcttcaagtggacagactaccaacaaggatgaatctgcataggagacaagtacagattcaggatttgcgttgtcctttttgcaggggtgctgaagaggaggcatctcatctgttcttccattgcatcttgatccaaccaatttggtgggaatcgatgtcttggttgaacttaaaaagtgcctttcctctcgggcctaaacaacactttctccagcatattttcatccaggcagaagggttaagggttaagaggtggagatattggtggttggcggtaacttgggctatttggaaattaagaaacagaattctattctcaaatgcagaa

SEQ ID NO: 42107 - DNA, 460 bp, Glycine max
  unsure (1)..(460): unsure at all n locations
tataaaactcagctaaagcaatattcagtagccagtataacaagaaagttatgtgttctgttttaattctcataaaggctgcaataagttattacaagttgtatataagtgagaagaaagtctttacggatcccagaattcaaaatgatcgaaaacatgtcaaagactcgaacacgtaggacaatatggccacgagataaattttaccgtgaaaattaaaacagaacatcaagtgtcaacttcaatttcttttcttctaatgcaaacagcaactgtagcaaattaagtagttctcaaatatatgcaacacaaagctactcagtcgaacagatattcacatattctcaacaaaatatagatatagaatttacataaatcattggtgttctttgggtgcctctaatgaacaactnttcttttcctcaatctataaataaattcaaataccgaaacagaattt

SEQ ID NO: 42108 - DNA, 351 bp, Glycine max
agcttggagcttaaggaaaagtgtgaacgagctctagtatatgttttggcttttacattcccaactcctttgagtggcatttgtattggttgttaacttcattgttgcatcagtacatttgatatttgttttggattgtgcatcatcatattgtgtgtgaaggaaattttttaagtcagaaaaaattacttcagagccaaaaatctctattttaatcatttacaaagttgttgtaattgattacaacgagctgtctaaagcttaaagagttaagtctcgtatcaatttaatcaattatcgtggcactttaattgataacactgtcgtttgaaataatgactgtatttttta

SEQ ID NO: 42109 - DNA, 526 bp, Glycine max
tgttgcttgtgtgttgaattgtgtgtaatcttgagatgtgagaaaatttgtatgtgtagagggttcgatggaacctgatatttataagagtggagcccaactgcgggtccttgtttgtaggggctgttatagcctttgcagataatttccgacttatagatgatagtcgggatcttgtagataatgttagatataaactatagcttagagataaaagctactaaataattgtaccttgtagataatgtgtggctttgtagataattagctacctgccaatagataagatattcaaatatattcaaatattaataggttagagataacctgtcagttaggaagcccggctgctaagggtcgggtgttcgtgctcctgttgcaaggctgacgtgaaaggttgacacatgtcttagattgtcatgtacgatgccatatgtattttgtgggtcctagatagtagaatttgatagatatcggtatggaaaaagaggaacaaattgattaaaaataaataagttttaaaaaa

SEQ ID NO: 42110 - DNA, 509 bp, Glycine max
  unsure (1)..(509): unsure at all n locations
agcttgtagacagtaatagttggcaataagtagctatatggtcatgaatgctatcatgactgtcaaaactagcttacaagttttgcaaactttgttgtacgatagaattaattattgattttaaatttacattgtttcctatagaaatcataaaatagaaatgtctctctgctatcactattttacggctgagtgcataatatattagcatctaagggaatgactacgatgacgggtagcctgtgacttgtgtatttagatgcacttgcatagggtattgattaaaataacagaaagaggtacaaagcacacaagcatcaaacttaccataatggtatactatgatttcagcaatgaatatatttcatgttccaacttanacaagtattccattgggactcataagcaaaaataattaatttcacattaattaacaatgttagttgacaccatttaattttactaatctaaacaaaaaataagattttttctttctaaataccataatt

SEQ ID NO: 42111 - DNA, 478 bp, Glycine max
tcactgataatttaaaatagagagtgggaacgtggtccaacatcaatttttggaagcataaatggatggaggacaactgtactctccaaggaaaatatccccagttatatttaataagtaaacaacagaattcatcaatcaattctatgggagattttgtggagggtacgtgagaatggaagttatcatggagaaggacttccaaatgcactttaatttctggtcaaccaatctaaaggatgttctttcttagaggggatgggtttgtatttttgtgggctatattcagtctctcctaatgggatgcagactgtaattgtcttgctttttaactttgtatcttcagtacacctagtactgaatttcatatataatatattgatttttgctgtgcaaaaaaaaatgtctctttgtaatctgtaataccactggtacttctaattatcaatataaattatctttgcagttcacaaaaaaa

SEQ ID NO: 42112 - DNA, 242 bp, Glycine max
ttgtctcctagtaacgcttctttaaggtcttgagctggacgcgtgatgacttgtccgacaaggacctagcactattgcttacctttggctttggacttggacgcctgataaaccaccaagactcctgagaaacgctcccaactcacagaaacaaacttatcggctttggaggaggcggaggagcgtatgatgctcactgacaaccatccccactctgatgtggtgtgtcgccttgcgcctgc

SEQ ID NO: 42113 - DNA, 465 bp, Glycine max
ttagaggcattatctttatggatctaaatttgaggtgtttagtgaccataagagccttatttacctgtttgataagaaagaacttaacatgagacagacgagatggttatagttccttaagggttacgattttgagcttagctatcacccaagttaagcctacgtattacctgataccttcaataaaaaatccctttaggtgtttgctttgatggttaaagagttagatatcttatagtgatttagagacatgagtttagcatgtgagatcacctttggtagcattaagttgggtatgttgatagtcactactgagctcttgagcgagatccaggagggttgaactctgactccattcttgttagcccacttagagtctatagctattgggagagagagtatttttatagtgggacttgatggagtcttgagattcaatgatagggtgtgtgttcctagtgtacc

SEQ ID NO: 42114 - DNA, 883 bp, Glycine max
  unsure (1)..(883): unsure at all n locations
tggaacggccngtaggtccctgtggaagccgctcgantatatacggtctgcccgcatgcatgcttgcatgtgcgagacccaagcgagtggcaaggagttttttcttctccgggagcgctaccatacctctgtaaccataggtgatcttatgaccagcctctcaccccaacgctctatgttgacttctgtttccgactcatttaaaggtccacaccgcctacggaatcatattgccgtgcattgactgagggactcttaaatcacctttgcgctatggtcttcggccagcctgagattgctaaaatgcgtccgcagcaacgctccgctttttgtgaatgagcataagagctttggaagaggttggagtcctggaatatgacctactacgataaactcatatatgtttttgtggctcaccatgcgcctgcttatgggctcttttgatgctgctgtcggcgctcttatctatgagagcccatcacgactgctgttggcacttctatgttgaggggaacatgattaagcgccctgcaatcgaacacggagttcccccctccccgtgtcagacttcttatgggcaccctgggtgactggcgagcttcttccctccaaaccgttgaagacatctgaaggggccccgagaaagctctctcttcaatacaaaagggatggagtgtattcgccaggaggattgtactccgcctatacgtgctgatgccacggctccactccgattttctgtggagctcaggtgcctacattcgtctggccctaataagcgagggaacctgcactcgttcttgggggtttctggctatctccagggtttagctggaactaacactgtcttgattagtcgcatggggccgataaatcccttttc

SEQ ID NO: 42115 - DNA, 558 bp, Glycine max
ttagcaactctttctttttgtttagtcaaaacttctaatgctcttaatctctcctcatctaaatcaaccaactcatctgacatcattttccaataatggtcgattggaatgtccatttgcttttgtaccctggctgattgcaaatgtatttcgaccggaagtacagcatcatgtccataagtcagtcaaaatggggtagtattagttgattccttaggagaatttctacatgcccatagaacttgatctaacgttttattccaatttcttggcttttgggcaatgtgttttttaatcaagttaattacaatcttattggctgcttcgacctgaccatttgcttgcgcgtaatatggtgttgaggttaataattgaaagccagttttttgggcaaattcttgcatttttcgtccagtaaaaactgaaccttgatcagtggtaattgtttcaggaataccatacctataaataatatgattttgaatgaaactaattactgcttcctgatcaacatttggcaaagggactgcttccatccattttgtaagtaatcgatac

SEQ ID NO: 42116 - DNA, 494 bp, Glycine max
atcctctaaagctcaccatgcggcatgcaagcttaagagcaagatggaggtggatgaccatatttggattttggatgaccatattttgacctttaggggtggtgggctagttggggttgggatggatgttggacccacttgctcatgtctggaattttgttagcaaattgaagaatcacagcaagcttagattgagaataacataatccttagtaacaatttatctcatgtacaatttgaattatcctacaaccaggaaccagaatcttgatatttcttttctaacctcagataactctttttccccgtccttcaagaaacttttaatcaacaaaaaaaagaagctagagtttcagaattctggcttcatttgatcaagagcacaaactgccttagaatctgaatcttgcattagctttgctcgaattagcaactaaagcacgttcagcattcaatttaaagctttcatgcagcagaagataacacttgatgtg

SEQ ID NO: 42117 - DNA, 522 bp, Glycine max
taacagcaataaaaagcatcaaagtaattcatagatttactcacattaactaccacaagcacgattgacagtgaaaaatcataagatttgatttaatgcctaattgcacacctgacatccagtagatcaactctaactcatgatgataagaaaggaaacatgcacaacaacaatttcattaccttcctctaatgaaagctgaattgatctcttctctaactcaacagcatgcttgctaagttcaactgaggacagggagcgaagcactgccaaaggatgagatatcagctatataaaatatcaagaacttcataagaaagcatttgagggattattttaaggttcctggacatactttggatatattcttcttgatctgattggtccaatttcctcaaaaacatctgcaattgttggtatcgctctttccagtgcaaattttttaatccctttggattaccaatggtagtagggccagaaaaagctgtcacataattggactcaactggtgctaacttcatg

SEQ ID NO: 42118 - DNA, 164 bp, Glycine max
ttgcagacactgacatacttatacagacctggcaattatgagtgttgtagctctgtgcaaattccgcccatgtctctgtatcaacgccatacatgactgtaggaccagatatttgctgaccttcattgtcagcaaagacgagatttgaagtctatgaggactta

SEQ ID NO: 42119 - DNA, 527 bp, Glycine max
tctaaattaaatgtggagaggaagttacaagagataattcagtacattattgttgattctcctccattaattaatggcatggggtactattaggcatgcaaattggtcccacatgcactaaccacctgagaaaaacaatgaccctgatatcgatgttgttgatgacgaagagcctctattttggtttggtctttgttgctggaaataatcagggggtgacacgtactgccaccttccccgacgacgacgaagattgagctccagattcaggtaaggaccctgctaaattcatatatataaattctgtttactacatgacattttctataatcactaagtttataatattgcaatttattaaactttattttgaattaaaatcctgcattttatataccaattaatatgcaaaattatcacaaacaaaaatagagaatgacggaagagagaattttcaatattattctacaaagaaacgtaatacacatttaacaataattatacaagatttttatatttatctcttt

SEQ ID NO: 42120 - DNA, 577 bp, Glycine max
tacggcaaggcggaccccctgtgactcgcgggggacgatgcacttgctcatggtctcgaatgaataaacagactgacggtctaatcccactaatattaactatacaagctggtcttccacgacgttagagaaaccataactgactttgaacaaaaaccaccctcccggtcagtcatagatggggtgatgaatttattaaatataatgcgacgggtatgactccatttggctttaataccctcaatcatacgtagaatgaattcctttttttcttccatacagaaagcccttgaggagtaggaggcttaaaccaaaactacacccccttttattaatagtgcaaattgcccttagaagaaaacataaaagcattccccataccatgaggtaagaagccctaactgcttttgcaccaatcttcaaaaggatatgtgttcttaaagggtttcgggcaaaccaaaagaatcacaatccctttagggaatgaactacctcttttgtgttccctcatcgagcacaacttgcttaccctaatatccccaaaaatatgggggtttctgagagacatatttcctcg

SEQ ID NO: 42121 - DNA, 530 bp, Glycine max
ttaaactcttcttgcatagccaaaaaccatttatgattagttagagcatgtttcacaaatttgggttcacaatgtgttaaaaaaagataaggatgaattttgtattaatgaataccagattttgatttggttttcatagggtggttgttggcaggtctaggtggggaggaagtagaagttgaatggaagattctaaacttgaggcaaaaccttaatctgagtgaggttcaaaatatgtaagggatggatgagtatatttaggaccgataagagggttagagagaggggaactaggttcagaatgtatgtgttcataatgagagaggttcatatggagaaacaacttggttagcagtggcaactgaagtaggaacaacaatctgagatggcattatagatagaagaggttattggtactgatggcacaatatcttaagtagatgaagaatggcttgaaaaaagctcataatatggaaacttgaactcattaaaaacaacatctttaaatatataaatctttcttgtaagtg

SEQ ID NO: 42122 - DNA, 634 bp, Glycine max
agcttgtgcttgttttatttaaattcctaggatcatgagcaactaggtgtgtcctactattacttaagaaacaaaggtgatcaaataacaagcaaagatttaaaaggtactaggttgtctcctagtaacgcttttttaaagtcttgagctggacgcgtgatgacttgtcggacacggacctagcacttttgcttacctttggctttggacttggtcgcctgctagtcgaccatgggtcgtaggcaacgctccagtttttgtagatgagcttaagggctttggaggtggcggaggtgcgtttgttgctcactgccgaccatccccaggctgatgtggtgtctcgccttgcgcctgcctacgggcgcagtacttcttgatgaaacctcaattagtaaggggcctgatgaccttgctgggggtgataggcactccgtagaactgacagaggcccgtaatcagagctggaaacccatgaccctgttgacttctccgtgccactggtgtcttgcggcgcgatcctgcaacatagatgacatcagaatcagtgagagagtgctactacctatgtagatggaatgacttgctggggggacggcaccctgttgactgcagaagccataccagactgaaacct

SEQ ID NO: 42123 - DNA, 552 bp, Glycine max
tggagaggatgcttcaatggaggaaaagattgagagagagaaagagagagggggggagtactaaattgaaggaggaaaaaggggagagaagttgaactttgagttttctctcacaagactctcattcatcaaagttaccataagtgttacacatacttctatttatagcctaggtagcttccttgagaagctttcttgagaaacttccttgagaagcttctttgagaagcttccttgagaagcttccttgagaagattcctagagaagctagagcttagctatacacacctctctaatagctaagttcacctccttgagatgagaagctagagcttatctacacaccccctataatagctaagctcacccccatgccaaaatacatgaaaatataaaaaaagtacctactacaaagactactcaaaataccctgaaatacaaggctaaaaccctatactactagaatggccaaaatacaaggcccaaaagaaagaaaaaacctattctaatatttaccaagaagagtggaccccaccttggcccatgggctc

SEQ ID NO: 42124 - DNA, 459 bp, Glycine max
agcttgtaatttacaagaactgatccaaatatgttgaattttttagcattactgaaagcaacctctgcatcagtacacttcttaaaaaccactctagcccggctgctccctctatcaacttctgtttcagattcatttagaggtccaaatcgcctaaaaatcttatttaggtgcatttctgagggaacagaatccagctcagcaaagttcaacacaagctcagccggagaattctcatctgcacaaacaaaaggcttttcaggaaccacaacaagattgctgtctgaacattgtttcctggaataggacctacgagtataaactataataggtttttctggctcagcaggggcatgctgatagtctcttctgttgcttctccgcgggcagcttttttagaaccactctggatgcccttgtcagccaatgtgtatcacttaaatcatcaaattcaattgt

SEQ ID NO: 42125 - DNA, 1054 bp, Glycine max
  unsure (1)..(1054): unsure at all n locations
agcgcggcccccanatatgcaatacttgaccgtggcacctcaatgtgcaaacagacaacgatagatacgactgagttgcgattcaaaaccaanctcacccccagccaggangccntttagaatcacattcccatctaccgacgccgaaagtaaaataatacaacccgctagccctcactatgggtgggtggaaagatgtggtttcttttatttgcccctataatcaaactcgcgggaggctaaaagaaagccaactacatctcaccttaagatgcgcaattattgggcgaaatgggaacagtccaccttgcactatgtaccgacggcgtgatacgccacatgtgagtattctaacacggacaataactaccacatcacgtgttctcataaagtccaaggtcatagaaatgcggcgctaagtaactctaatagttgcatgtactcccttaagcggaaggaacatctcttcttgatcgactaggacgccacaattcagatatgagctatctcgcactctcntgacatacaaagcacgtatgaagtctccacacgaatattatcatatggggtggtgtatatcggagggccacaccaagatagatacttacttgacagaagatcactacctctatcatattaaccaactctcttgaattttgtggctcgtgntcttccggaaccctagcgacacaagatttggtcatatggccgcccggctacatttatcgtggtggagatcaagcagagatacataaatatttggaaaaatcccgcaaattcatatttggggccaaaaattctttggcaaattgttacggggccaacataaaaaaaactcgagaccccagcgatcaaaatgggtaaaatgtgggctgcaccggaatgaacccataaccgctctaataagcagaagaagtattttttggaaatgagaaaactcaaaatacactaggcgttaccatagatgccaacaaacatctgggacaaaatgggggaattcgcgttcccgacaccccactattataggtaaanaagtcgcatctcgattaacccc

SEQ ID NO: 42126 - DNA, 204 bp, Glycine max
  unsure (1)..(204): unsure at all n locations
tgggaccaaaaaatattcttataaacacctattgaaaattggcaggttttaccgtacacccccatcttgtaattttgtgttaaactgccgaaatcgcttggtataatccaagcgagaaaactttaattgctaaagaaacgggtaacaaggaaaccatatccatatcccactaccgtgttcatatcatatggaatccgatgatcn

SEQ ID NO: 42127 - DNA, 391 bp, Glycine max
taacacgcgtaaaaagcatctaagagatttttttgatttactcccattaactaccccaagctccattgtcagtgaaaaaacttaagatttgatttaatgcctaattgcgcacctgacatcccgtagatcaactctaactcatgatgataagaaaggaaatatgcgccacaacaatttcattacatgtctctaatgaaagctgaattgaactcttttttaactcaacagcatgcttgctcaagttaactgaggacagggagcgaaacactgccaaaggatgagatatcagctttataaaatatcaagaactttgttagaaagcctttgagggattatattaaggagcccggacataacctggataatattattcttgagctgaaagggccaa

SEQ ID NO: 42128 - DNA, 212 bp, Glycine max
aaaaaatattcttataaccctttatgaataaggcaggtttaaccggacacgcacatcttggaattatgtggaaaactgccggaatcgtctggattcactcaaagcatgaaacgttcatttgttatggaacagggtaccagggtgaaacttcctatcaccactccggctttttgctatcgaattcgatagcgtcttagccggaagattgaatt

SEQ ID NO: 42129 - DNA, 348 bp, Glycine max
ctctttcaactcttcttggttagccgacaaccttttttgattagttgaatcatgtctcacaaatttgggttcacaatgtgttgaaaaaagataatggtgaattttgggttactgaataccacattttgactatggtttcatccggtggcatctggcaggtctaagcggggaggaattctaagttgaatggaagattctctacttgacgcaaaaccttacttctactgatgttcaacatatctaacggccggatgatattttttccgaccgatacgagggttagacacaagggaactccgttcagaatgcttgtgttcattatgatagacgtgcatacggagaaacaac

SEQ ID NO: 42130 - DNA, 470 bp, Glycine max
gacctgacgcatgcaagcttgctataaattacaaatgaaagtggaaagcctgtttctttttctattactatccatataaaaccagagtgaataaaatccacttatacaactaacagtttacgagtgtgcaaaatagcagtcaactctatttttttttttttctactttccatatttcatgctttttactttgtagttttgtttggacaaatttttcaagaagtacttataagggagaaaaaaggtaagatgtattgattttatctggaagctaaaattaacctatgaaatttaatttttggatgagttaaatggaaaaaaaaatctataaaaattaagagtataattaattttttgcttatatgaactttctttttcttcttctctaaagagtctatagataaatatgttcaaatagaatcttaagattattatcattggttttggacactgacatatcaaaatcttatt

SEQ ID NO: 42131 - DNA, 554 bp, Glycine max
tcacatggagctacatcatgtggtatcatagctcaccatcaaaacttggggtgttacaatcaccaccaccaccaccatcaatgtctctgccaccatcattgtccctgccaccaccatcattattaacaataccacctctgtcattgccaccacaaccactaccaaggtcattgcaaccaccaccacaccgccatcaccaatatcgctacctccaccaccccaccatcgacattgctaccacccccactatcgctgccaccacctaaagtgacaaattaccaagaagaggagttgaattggggttttgaaaactttttgatcctttgaaataaaaggtttatgatgatattttaaaattaaaaactattttgaactcacaatacaaattcaagttgttcaaaatgcacaaatatttgcatactggttcaccttaaccttgggctatgtccaatcctcatccttcaagaggagaatttatctaacacaaccaaattacaactataccggcaaacactaaatttcacatccttaacagttcctcactggactttaaa

SEQ ID NO: 42132 - DNA, 884 bp, Glycine max
  unsure (1)..(884): unsure at all n locations
cacccnttgggtacctgttacgaccgctgctctatagtagacctgctgcatgcaagcttcaaaccaaatgcttgcaatagctcaactgtctggctggctgcttacacctgagcatcctgcacataccaacttcactaccaaaagcatttctgacaacgngagatgtgctatttttatacagagcacaagatcacatgtgctcccacgctggcatatacaggcnatgagaacaagtgaccgtcctaatcaagcgagctactggctgtgtactaagactatgaaaacaagagcacctagcaacgaggcttgtggtggctggccatctgcgaattctgtgaaatatgaggattgtggtctatggtaaaacactacacacggtgggtgacttactgcacagctactaacataagactcggagctaatacggactctggcaatctataaccaccgggtgagatcgattaccatgcttgatcacgacgtcacgacgctatggaacgctcttgtaatacattaccaggggggcgtnatctattaccaggcttgagaagggaaatgggagacggtgcaaaccatctgctatcgattaccatcttgtgcaatcgattacacagaggaatgcgtcactagtgatcgaataccacgcgtgtggtatcgattacacagtgcattattgcatatttcatgttctgaggctgcgtaattcaagttatcctctggtatcgattaccacgctgcgcaccggtaccgagatgaacagcctcaataaccccttaaatgcatgtatgataagaaagcattgcgggccgctaagtatattattgtgaaaaacctccccttcctttctttcttgaagtccgaagggggcaactaatcgtgaccat

SEQ ID NO: 42133 - DNA, 608 bp, Glycine max
  unsure (1)..(608): unsure at all n locations
cacagcttgatgagaaataaatgttttgcttggtacatcatctatgctacttaatgagatcattacattatttgtgtcttaataggaagtgaaggacatacattagaggaagccaaatctatcaatctatccttgagtgcattggggaagtgtattaacgcacttgcagagaatagtgcacatgtgccatttcgtgactcagcttactagattgctacgtgattcatttggaggtaagattcagtgagtataataattcatattttgtctttgttcatttatacaaagcagtaagatttggcaaaatactcttcctaactttcaggacgtgagacagatgaagtcgagcccataccggatgctctgcctaatctggaacagtaagctgcctaatgtgtctttgatgcattntagaagtctaatcggctaaaaaataaaagcaatcactccataactgatgtattttattggaaatgttaattaaatttggtttgatataaaggaaactaattaaaatggatatttgaaaaataattatttanattaaaatggatatttgaaaattaattatttaaattaaattcattttgctagtaaatctaaaatta

SEQ ID NO: 42134 - DNA, 467 bp, Glycine max
cctccatgatgttgaatcaagattgattcaagttgttttgatgataacaaagatgatgacaaaaagcccaagagaatgatttcgagattgagtcaagaacaattcaagaatcaagagaagtttgatttcaagattcaagagaagatgaattcaagattcaagagaagaaatcaagaagacttcacaagggaagtattgaaaagatttttcaaaaaacaaatgtcataccctaatttcgtccggggactattgcttgatggcatgcaacctttgattgaccacttctaagtacttatcaccctttgttgcacaatatgtgaagtcccgagacacgccggatatcaaaagaaagcatggttatgcgatccgtgaaattccgtaatgtggcaaaaaccaaaatgaagtattgttacgcaatctatgagtttccgtaactttttcgaatgcttaaaaagagtgaatatatg

SEQ ID NO: 42135 - DNA, 421 bp, Glycine max
agcttgcaataaattacaaatgaaattggaaacctaaaaacataaacaataattatccatataaaatcagattgaataaaatccactcatacaactaacagtttacgagtgtgcaaaatagcagtcaactctatttttttttttttctactttccatatttcatgctttttactttgtagttttgtttggacaaatttttcaagaagtacttataagggagaaaaaaggtaagatgtattgattttatctggaagctaaaattaacctatgaaatttaatttttggatgagttaaatggaaaaaaaaatctataaaaattaagagtataattaattttttgcttatatgaactttctttttcttcttctctaaagtgtctatagataaatatgttcaaatagaatcttaagaatattatca

SEQ ID NO: 42136 - DNA, 728 bp, Glycine max
  unsure (1)..(728): unsure at all n locations
accagccacgccgcaatttacgcttattatactatctagcgatgcacgtggcactnacacttagttcatcattcaactcacanccttcntcctccgcagctcaggcccnnnnttgagatccctccttatacagcgccactatataaaactcacgcgcgtgcccaaccggcatttagagggaaacgggttacgtaaaaaagctgcgaccttttgcgggaatcttatgaaacaaataacttgaagaatggtgaacttaggaaatgtatctttcaaaaccatcactggtaatcaattacccctaaggtggtaatcataacacactaacagaggggaccctgcattctaacagttgaaaatcccaacatttataagcctctggtaatccattacaagtattgggtaaatcaattacacaggttcaaactgatttagcactatttaacacgaggtgtaactcttgaaagttgaaaatctaacgttttaacacccccgtgaaccaatactacctttttgggagacgattaccccaaagttaaacccttgggaaagaattttgggaaaaaagcttgggctactcaaagttttgaaaaaccttttaaaaacctattctggaggagcctcttcttgaaccccgaatcttgagacttgaatattgaatctgaattgggcctgaaactcgattccttgaaactcgaagtctcgaatccttgggaaatttcctaaccctc

SEQ ID NO: 42137 - DNA, 336 bp, Glycine max
gagccaaaggatcccctcgtctcaaccctctttgacgtttgaattcagcagaaggactgccattcacaatgacagacatagaagctgaagtgaggcaacccctgatccacctaatccacctctcatgaaatcccattattctgagcatatatagaggaaaatgcccagaaacagaatcgtaagccttctcaaagtacactctgaaaaccatgccgggtctcttagatctcctaacctcctcaaccacttaattaaccaccaagactccatgtagcagttgtttcctttaataaatggtgactgcctttcattaataatctgaagcatgaactttct

SEQ ID NO: 42138 - DNA, 492 bp, Glycine max
aaactttctgcttatattgttgaccccacaggggtacctggagaaattgtccgggggtcacgagaccttggggacttcatgtggggtgctattgcccaaaaccaaacttgaccaaatcccgacccaacccgggcaatattcggatcacatgagaaaccctggtgatgttacctaagcgagcgaactcctggcatgtccacagataaaaggaaaacaagaccacaaaacaaggaggcttgtggtggactggcccaacctgtgaattatgtgtaatatgtggattgtggcctctggtaatcgattaccaagggtgagtaatccattacaaggcttaaaatttgaagacaggaggctaatatggtctctggtaatcgattaccaaggggtgtaatcgattaccaagcttgaaaacgaaatcaagaaactttaggagcctctggtaatacattaccaccctgtgtaatcgaatacacagacgaatgggtcactggt

SEQ ID NO: 42139 - DNA, 493 bp, Glycine max
agctttgaaaaatgatttctatacacaagttagtcgttttatgcgactaacagtcaataattcctaattctcttctaatattaaagaagctttctttaggcaggggtttggcaaagatatcggccaattgattctttgtttcaacaaattctagtacacaatcaccctttagaacatgatctctaagaaattgatgcctaatttcaatatgttctgttctagagtgcagaataggatttttggataggttgattgcaccgtattgtcacaacggataggaatatgatcaagcattataccataatcagagagttgttgtctcatccataagatttgtgcacaacaactttcagcagaaatatattccgcttctatagttgatgaggcaacactattttgctttttgttataccaagatactagtgttgaaccaataaagaggcgagttccactagtcattatccttttgacgacacttaagcgggattctttg

SEQ ID NO: 42140 - DNA, 544 bp, Glycine max
tgttaattgcttcccttgattaagactatatcatccgcaaaaagcatgcaatatgggataatcttttgtatgtccttgataagtacatccaagactaggtgaaacaagtaaggacttaaagctgagccttgatgtaatccaatcacaattggaaagtccttatttcacctcaaggagttctcacattagtagtcaccccatcatacatgtcttgtatagcttggatataagccatgtgtacgtcttttttctccaaagtcttccacaacgtatctcttgggacacgatcataagctttttccaagtcaagagaaaccatgcgttaggatataagtagaagggaaagtcaattagcatagttagactattaataagttagttactacagttaggatattgattagttggttaagtggttagttagttagatggaggggtttgttacatataaataggggaagaaagataggaaaatgggagaacttatcattgggagattgaacattatctctttgtgaaaggagaaaatttttgtgaagggaaa

SEQ ID NO: 42141 - DNA, 393 bp, Glycine max
agcttcacaaccaagatgcttttcaatttcttcagctgtcttgctggcttcttcacccctgaagcatacatacacataccaacttcactaccaaaggcatttctcccaagggaatatttcaatcttttatacagagcagaagataacatgtactttcaagttccatgataaaggaaatattcaagagaaagctctaaaataaaaggcaatactcactatgtcttatgactttaattccaattgccccttcaagcatcctatcttttgaaccgtcatggtcatattcatgaagtcctgattcataacatcaataaaacaacacaaaacactttcagtgacttactgaacaactactaccataaaattcagaataatttcaaaatgcttcaagct

SEQ ID NO: 42142 - DNA, 569 bp, Glycine max
  unsure (1)..(569): unsure at all n locations
tgtagaatggctagacatgatacatgtcatggcttggtttggttcaagggtaaaagggatgccccacattatttccatgacacaaatgcaaaaatgatgatttggaaattttatgcaaaactggtcatgcatgcacctatgcggacactcaagtgtcaaatttttatggtcatgtgatgctagggcttangatttatttcctctattttaaatcaacccaatgtttccaaaatatgttcttttatcaatttgtgcattcattcgagtccatttcgggcgtccggggaaatttcacagcattcacccttcaggtgtagacacgttttttttctcttcaaaaatcggtcatgatcaatgaatttttttttcgaagaagagttggaaatcatctcttttcaaaagcatgtcggtttttagctagacaacttattttctctttttccacctttttccttacttgccttcttctttttttcttaatggctctctttttctttactcgccctcttctttttttcttatttgctctctttttctttacttgccctcttctttccctcttgttctct

SEQ ID NO: 42143 - DNA, 470 bp, Glycine max
  unsure (1)..(470): unsure at all n locations
ccttcatgtatgaaaatgtaaggattttttttttttttttttttataatgcaatattgatattgtttagttattctatggctatggttggctaaacctcttagaacttggattgtgatgtagttgtatccatgtattctaattcttatttttaataaagctcttcgatgttattcaattaattgcatccttctatcattttcacttctacattagaattggtcactttaattaattattagttaatcgtgtattttttactatcttctcataattaattgacttatagaatgatagagttcataaagcttgcatgatcaagtgacaacatgaatctcctttttacaaacttatctgttattcattcttaaccttaagttaaatctgatatgaacaatgtaagattgatttangggaagagtattctcataccttgaccatatgctactaattacaataatagataagata

SEQ ID NO: 42144 - DNA, 522 bp, Glycine max
ggagtttagagaagggagcacaaatttatgccaaaaaaggaagggtatcaagtttaataaaccaaaaccttgaggggggtcaatgtaatatactcatttttttaaccaaaatacattctcaattattttaacatttattatgatcaacatctcattatatgtagctaggatggccacggttcaaatagtgtgcaatacacttggacaattgtgttttaaacatttattattgtttataacacttgaatataaagttattttgaaaacgtacaatttaatgcgatttgtatattatgcaaaactatttatcacttacttccaaaattcatttaataagggacagttaatataatttgattcaaaattatctcatcaattttcattaattatatttttaactttgaagaaattatggttttgtttaaatattatttcttttgtttttggggattcagattttatttcttttaacgcatcaagtttttattttagtaacaattaaaaattatatttttgtaacat

SEQ ID NO: 42145 - DNA, 578 bp, Glycine max
agcttggtcttaagatatccagcttagactccagagtgtctgcaagttgaagaattcaaaactaaagcagtggtgaatttatatcaagccctagtactctcgacatattccattgctttcctcttcacagattcaatccgttcttgatcaccttgggacttctcataataaagatactttttgaataagaactgtcaatcaagacaacaaaaccctaagtcagtctgactggaaaaatacaaaacaatgtcagtaaaattggtaatatagatatgcccaaaccttcatctttttcggtgggaggctcagactaacagccctttcaaacagtgcacgaattatatctttgtctttatgttgaatttcctgtagagtacacgagagaatgttacgttcaaaataatatacaaacgcaaagaatatgagatggagaaggatatacttgatcaagataaacactccataagtctgttctctttgggtactcccgtaggattttttcaaacatggatcgccctcgatctagaaccccaactttgaattcaagaatagctgtctgagagaaaaaattaatatgc

SEQ ID NO: 42146 - DNA, 355 bp, Glycine max
ttcaaaaccttcatttagaggtcaatggggagggaaggggatacttccttttaagggaaatctatgtacttacaattttgtatttgatacaagtgaggaatttatttttggggactgtgaatgttcactatgctggtcccataaacatgcgttaagaacttaacatatgtactggatacctgtataagccgattgggaaaacctttttcttttttactgcaattttggtggcactagcaacattatattttgattggctaggatgtttacatgcactgaacggattgaacatctaatcttttccatggaaatggaactgtatgcaaacatttgattcccaatgtctttaatttga

SEQ ID NO: 42147 - DNA, 528 bp, Glycine max
  unsure (1)..(528): unsure at all n locations
agcttgtttaccccatgttgaatttgcttacaatagatctgttcatagcaccactaattgttctccttttgaagttgtttatggttttaacccactaactcctcttgatcttttgcctatgcctaatgtttctgtttttaagcataaagaaggtcaagcaaaggcggactatgtgaagaagcttcatgagagagtcaaagatcaaattgagaggaaaaataaaagctatgctaaacaagccaacaaagggagaaagaaggctgtcttcgaacccggagattgggtttgggtgcacctgagaaaagaaaggtttccggaacaaaggaaatcaaagcttcaaccaaggggagatggaccatttcaagtgcttgaaagaatcaatgacaatgcttacaaagttgagctgcccggtgagtattaatgtagttccaccttcaatgtctctgatttatctctttttgatgcagatggagaatccgatttgaggacaaatccttctcaagagggagagaatgatgangacatgtt

SEQ ID NO: 42148 - DNA, 559 bp, Glycine max
tatgcgcatatttccttacaaacgttctcttgcacaagacattctattaaccgaaaaaaatgcacccatatacaatcaaggcagcttcattacctagattatttacacgtacttccaaggggtatttgttacttacatcacacacatcttcttggctaaattcacatacatgcatactcaaagcattttgggggaccaaaaattgcacatgtgcacatcttggtatttctaatacctatacatacacaaacctcatgatgaatcttgactatctacacaataatgtgctacatttcatgctcttttcaagtttttgctacctaaggccgcatgcaaattcaagtatattttccttcgctggctaaaattgtattcaaagtaaaaggtatacatttttttggtaatgtatcttttttacatagcatgcaacatatttatgtatattctttttgtgagacattttgactaccaaaaattatatgtacatacatccaagtattgtgctattatacccaaaacgtaaattgccaaaagaattttgctacctattctaaaccta

SEQ ID NO: 42149 - DNA, 558 bp, Glycine max
agcttgagctggatggacacttccccaaacatatatttgctcttagatccaaatccagcacctagcacgtgctcaaaaaaaggtcacatattcagctgaaaaataacacattttgcgaggctgttaaatggactacacactactcatacctaccaaaaaaaaagcgcaaaatcatacatcaagggctatcaacaaatcacattactaagaatgcttcataggtaagaacattatgcaaatgccacaaccctgtatcatgacatggcaagatagttagagaattggaatgatcaattaccataatatatatcaagcctgagtgggagaagatctccttcatggatgaaatggtccatatcccacctggtctggggaatatatcaaactcgtccaggctgccatccccccaacagaagagatccccaacactccaacatcttgacattggaactagagttgctttaaatgcccaggagggagagaagaaatacaaaatacaacactgtttatgggcatacaactgacagagcgagagagcttttactctactcccaatgc

SEQ ID NO: 42150 - DNA, 528 bp, Glycine max
ttacacagctcatatattgaaaataacctctattatttagacacagaaaagaaaattaacttaaatatacaattcaatatttagacacagaagaaaaataaattgaattaaatatacaattcaatcactagaacaggaagttaccccaacaaaaacatacctttttcatgagagaaagtgcttcgttttctttgtattcaatcatttcaagttcccgctcaataatagcttcacgaataagatcaacaccattctgcaaatgccatatttaaatagagaaataataaggaaactaatgcaatacaaatatcagaatccaaaaatgatctcatttactatatgaaacatcatagtgacaattgaaataaccataggcactgcctctggcaacagaaaaaccacatgaatacacagacacctctatgttacaacttacaacagagtctgtaacgctctactgataccatatacctattagcaacctaggcatttgattcctatcaatattttcatacaaaaatattaaac

SEQ ID NO: 42151 - DNA, 826 bp, Glycine max
  unsure (1)..(826): unsure at all n locations
gccagggttggttgtgccttgagaaccaccncanngaagangccactcctggaacacaaggaaggagagggttttttttttttgatgatccaggagaactgggtgaggagatgactatcaatggtagagcttagctacccacacccggaggatagctaggctcacctcattgagatgagaagctatagctatacttcctacaacccctggaagtgattaacttacatgcatgccaaagtacatgaaaatactaaaaaatcccctctacaatgactactcctaatgcgcgtgaagtacaagggttaagaatctgtttttattttaaatggggattatacaatgagcctgttaaggaaaaacctattctaatatgtacaaacaagagtggacccaaccttgggccattggcttaaaaatttaacctgagattcatgagaacccccgggccgtttttatcaantaaggccaatcatttagatggtttgggcctttatcctcggggccgatggcgtctaatgtgaattacagatgaaaccccatttcttccataaaactgttgggagttaattccctaatgtgggatcgcttccaagggtgggttgagttaatcgagtggaactctcaaagggtgcgactttcaaatggagtaaattctttacagataaatcttctaggggtgtttgcaccacggaacattataaaggcaaattggttgtgtttaataattggaaatttccaaaaacttaacaaaccttcacgccggtatttgtagcttttttctttttgcccaccatttataggtatgggcttaaaccagaaccttgct

SEQ ID NO: 42152 - DNA, 324 bp, Glycine max
  unsure (1)..(324): unsure at all n locations
taaatagggtaggggggnaagttttgtttttatgtaagaagggtataaaggttaaaaaacccatatcacgaggggtgagcttgagccttacgtattcaactaaccccaagctcaagcctagtaaagcttcgcctggcttgactcacattctcacataggtgccatatatggccaccgagcatataaatagcaagacaccagcccaacagtgacctactcttttatggaagctccgctccctttaatgctgaaatctttttaaatatgcctacttaaagccaaactcatattttgccaaactatttattcccttacttcccaaat

SEQ ID NO: 42153 - DNA, 446 bp, Glycine max
  unsure (1)..(446): unsure at all n locations
agctttgatgtttgtgttgaatgcattaaagatttatctaccaaaagcaagaaattaagtgcatatagggctacagacgtcttggaatagatacatacggacatttgtgggtcatttcatacaccttcatggaatggtcaacaatattttatatcattcatagacgattactccatatatgcatacttgtttcttatacatgaaaagtcacaatctctggatgcgttcacaacatttaaagctgaggttgaaaatctactcaccaaaacaataaagtgtgtcacatctgatcgtggtggtgaataatatggcagatatgactgttcacgtgaacaacgcccaaggccttttgctatgtacctagaggaatgtggaatcatcccatagtacaccatgtcngggtcacctatcatgaatggtgtggctgaaagacgaaacacaactct

SEQ ID NO: 42154 - DNA, 206 bp, Glycine max
acacaacatcttgttgttatcatcgagggggtgtcaaagtatttgttcctctaagaagaaaactcaatttcttgtttggctactgacggagtcatgaattctagactcatggactatgttgctacatgttaaatgtggataccttgctaaccacgcattgttgtatgaacaaatcccattatgcgtctcatgaaacagccatgtcc

SEQ ID NO: 42155 - DNA, 539 bp, Glycine max
agcttagctacacacacccttcaaaggactaagctcatctccttgagacacttctttgagaaacttccgtgaggagattcctagagaaactagagcttagctacacacacccctgtaatagctaaactcacctcattgagaggagaagctagagcttaactacacacaacccctataatagctaaactcacctccatgccatagtacatgaaaatacaaaaaaatccctactacaaagactactcaaaatgccctgaaatacaagggtgaaatcctatactactaaaatggccaaaatacaaggcccaaaagaaggaaaaacctattctaatatttacaaacaagagtggacccaaccttggcccattggctcaaaaatctaccctgagtttcatgagaaccccggggccttctttagcagctctagcccaatcctcttggagtcttctatccaatatccttggagtaggattgcatcatagtgtgccaaaactgacaacaaccagaatttcaccttgaaatcaataatagcgtttatg

SEQ ID NO: 42156 - DNA, 523 bp, Glycine max
ccttgtgcttgtgtatgagagggttttttttttggtgttttcggtatggaagtgcttgttatatgtgtgcaatatttggtctatggatgatacattaatactagctagtgtgttaagtgctggtagtatttactcaaaagttaaaaacaatataaagaattatccggtgaaaatgttatggagaatttattctaataaaagttgctgcacggaacatttggaaaaattttaaatgataagttgttgcaggtatgtaactatgaatttttgtttcagtacgcacataattaattgggcacttgtggccagcaaattatggcttattacttcgttatcaagaatgaaaaaaaatattatattatactttatttttgggtgagaaagaaattgctagttattataccttcactaactaattgcatttgctaattcacttgacttttatatgcacaaagttagtgcgcattaaaatgtttaaaatgtgattatttcaaaggtttttcactttttacttgggaggatt

SEQ ID NO: 42157 - DNA, 441 bp, Glycine max
agctacattagttggtggatttcagtattcctgcctcttataaaagagaggtatgtatatcatgcattggatacctgcatcattgttgcagaattgatagcattgtgcttcttcaatgttaaagaaatactgattagttccaccaataatagactacttatccttaacctctcaaccgacatatgaatgttactccaatgacttaaccaatgcatgattatgactcccacatattaacttcatcattcatctcccaacactggtttctctactatgttaaagggacacccacattctgtactgccaataactgtgtcgactatatttttattagctgccctgtgttttccactcttttcacaagcaattaaaacagctgaaatccttcctttattttcgatatttgtatctgacctcataatcactaccacaaaaccaata

SEQ ID NO: 42158 - DNA, 474 bp, Glycine max
tgcttgtggggcttctatggaggctggatctttgagcttcaatgaggccctttaatggggattttccaccatggagatgccgcggaagacaagggagaagaggtgagaggaggtgccatccactagggaataattcatggaagaatgagcttcaccaccaagatgagccttggataagaagcttgtacaggatgtttcaatggatgaaaataacgagggagagaaagagagaggggggagcacgaaattgaatgaagaaaaagggagagaagttgaactttgagttgtgtctcacacgagtctcattcatcagagttactgcaagagtgacacatgcttatatttatagactaagtagcttacttgacaagctctgttgagaaaactcccttgagaaacttttttgaaaaaactgctttgagaagctatagcttatcaacacacacctttctcataactaagctcacctccttg

SEQ ID NO: 42159 - DNA, 375 bp, Glycine max
agcttgttaaagaactgaggaaaaatcaagaacaagcttgttctcacatcgttcgcgtgtatgatatccagtccacaaggtttgaagtagaggagagcttcaaccctataaagcaacgtggcggacaaaagcggacaggaaacttgaatggtcgtcattgtcaatgcggaacgtattctgcgcttcactatccatgtttacacattattgcaacttgtggttacgtgagcatgaactactaccaatatatagatgttgtttatacaaacgagcacattttaaaagcttactcctcacaatggtggcctcttgggaatgaagcagctattcctccttgtgatgacgcatggacacttatccctgacccactacaat

SEQ ID NO: 42160 - DNA, 481 bp, Glycine max
tgcataacactttaactgtggggcaatctttttggatgtttatcttgaggcttgggaaatactgtccaaaatgctgagccacattgaccaatgctaatgccactttatccattacttgatactgagtttctggatcttgtgatattcaacagacgaagtatattggtcttagctcattattttcctcttggaggaggactgcacttatggcttttgcagagaccgagaagaatactatgagtctcttactagtgcttggtttcaaaagcactacaggggttgcaagcgtaactgtcaactgctgaaacatttcttcacactcatcgttccattgaaagtttttctttctaagatgattcatgattggtttggttatctcgatgatccttggtaagaatctggataatgaggttattcttctaactaacctttgagcttctttcacgtttttaagactcctcatcttcagagtggcttgaca

SEQ ID NO: 42161 - DNA, 458 bp, Glycine max
agcttcttagtctcacctgatgaattcgtggctacttcattctctcctctaatgacaatagcatcacttctggcactaaattgttgggagtttgaagccatattctcaattaaatttctggcttcagtaagggtcatgtctccaagggctccaccactggcagcatctatcatacttctctccatgttgctgagtccttcataaaaatattggagaagaaactgatctaaaatctggcgctgagggcaactggcacataactccataaatctctcccagcattcatataggctctctgcactgagtcgtctaatacctgaaatatcctttctgatggttgtggtcttggaaatacggaaatttttttctaaaaatactctcttgaggtcattccagctcgcgatggaccttggagcaaggtaatatacccagtcctttgccactccctctaaagaatg

SEQ ID NO: 42162 - DNA, 559 bp, Glycine max
tgtgcaaaagagggttttggtaaactccttcttgaagtaattgaacataggcgtgagaaagtagaggatcatacaattgaacaacaatggactcaaacgcaatgtcagtgtctgagtgaacttcttcagtaatagggtctatatgatgaatgaagaagaaacaaaaatagggaaataacataaaaaaagagaactgcaatcaaacaactcattgaaatccctttgccatgggaagatcctagtgaagggaattgttgaagtgaagccatcatgatttagagtttgataacagtgtccaacttgatgatgataagcattagcaggaagcttctattcaggttccaaactagcagaactcttggagtctgtagtatttgtgtattgcttgacctactagagatgtgagctcagacttgtgttgaagttctgcaagctcatgtttaaataatcaccccgaatgacatttaacaaaattcactaagacaccatcttcatcattttcaaggagaacttctttgcccttatagcagttgatcctttttgaaaagtattggcttgt

SEQ ID NO: 42163 - DNA, 628 bp, Glycine max
agcttatccttatgacttgcctccggacttcaccccccgtgccaccccggaagatttaagccaagcccctacttttgaggggcaactcccgccttacgacgactatcccgggcaagacgatgaggaaggagatacccatcttggccccctgctccacctgaaagatccgtccccacatgaactaccccaaccaaacatagtccgccatgtcccggcctcacccacacccgtaaaagaatctgttcccttcgcggaagataagggaaagattgaggcacttgaagagaggttaagagcagtcgagggccttggcaattacccattctcggatttggcggatttgtgtctcgtgcccaacatcgtcatccctcccaagttcaaagtaccagactgtgataagtacaaagggacgacatgtccaaaagggcatctccggatgtattgccgacagatgggggcgtattctgcggacgacaagttgttggtccatttctttcaagacagcttggccgatgccgctgtagcatggtataccaatctggaagctcccagatccgatcatggaaaggactggcaactgcctttattatgcagtactagtacaatacggacatggctcccgatcgga

SEQ ID NO: 42164 - DNA, 552 bp, Glycine max
taagctaaattaggctaaacttccgtaagctacttgagctgagtctagtcttacatcagggatctgcagacgaaactcagtttaagttagtataaacctaagagggttgtctaaatcgggtgtagtcttacatgagggatttgcagacgaagcttggatagtcagcctgacgagggatcaaaggtttagtaatttaggatacaacatagaacacaagagcacgattgattagagaaatatatttctatgcatcaggttgtttgttagaaagacccaacatttctacctactgctgtcattttatttaccttgcattttatagtttttagcataaaagtttagtttaaattttgtctgaaattatcacttatacatgttatctcaacaatgcttcaattctgcacttaattcacgctaacattagttccctgtgttcgatactcggattcatccgttgtaattttaaatacttgacgatccggtgcgctttccggtaaacccccattgaaatttccttgagacataaatgccgcaaaagtaactacaatgggg

SEQ ID NO: 42165 - DNA, 602 bp, Glycine max
  unsure (1)..(602): unsure at all n locations
agcttcatagggagccatgccgacggtagaatgaaaactattgttataagtgaactctatcaatggaagaaaactctcccagcttcccttctgctctaagatacatgctcttaaaaggtcctccaatgactgaatggttcgttcagtttggccatcagtctgaagatagtaggctgaactcagtctaagcttggttcccaacactctgttcaagctctcccaaaatctagaggtaaatctaggatctctatcagatactatgctagatggcacaccatgcagcctacaacctcacttatatacaaggtggtcaacttctccaaggaaaatctaatattaatgggaatgaagtgagcaaacttagtgaatctgtcaaccacaacccaaatagaatccaaacctctaggggttctatgtagtcctaccacaaaatccatggaaatattgtcccactttcattgggatatttctaaaagatgtaacttccctgaaggtctctgattgtctatcttagccttctgacagactangccaccaaaacatcatctttaaatcctgatacatcttggtagcactaggatggatgctcanattactcctat

SEQ ID NO: 42166 - DNA, 577 bp, Glycine max
cccttagcatcattagttctaatgggcatgacttccacccattttgaaacataatcaactgctaggagaatgtaaacataaccaaaagagacaggaaaatggcccatgaaatctatgccccagacatcaaacacctcatagaatagcataggttgctgaggcatttgttgtcgccatgtaagtgcacttcctgctctctgacactgctcacaagtgctacaaatcttccacacatctttaaagatggtgggccaataaaagccacagtcaagcactttgcgagctgtcctttgaactcccagtgcggaagaatggcaaaactgcaggactgagtcagtctcatgatctgggatgcatcgtctaatgacctgatcactgcacaatttccacaagtaggcgtcatcccaaataaaatgcttagcatcacttttaattttatctttttgagctttagatgccaagggaggaaaaataaaatcaactaaataattgacaatgttagcaaaccagggagtagaaagagaatcataaatactatacaatatatataaatgatcatccgagaaatcatcccaag

SEQ ID NO: 42167 - DNA, 393 bp, Glycine max
agcttcatgatgatgaatcaagttgattcaagtagttttgataatgacaaagatgatgacaaaaagcccacaaaatgattccaagattgagtcagcaagttcaagatcaagtttaatttcaaagtttcatgaagaaaagatgaattctagtttcaagagaagaaatcaagaagacttcacaaaggaagtagtgaaaagatttttcaaaaacaaacatagcacagttttgttttcaaaagagtttttctcaaaattttctaagctaccaaagtttttactctctggtaatcgattaccagtttcctgtaatccattaccagtggcaaaatttgatttcaaaagctttcaactgaatttgcaacgtttccattgattttaaaatggcgtaatcga

SEQ ID NO: 42168 - DNA, 573 bp, Glycine max
ttgcagatttggtcttcgccagtgaaaggatcgatgtgggtctgaaaaaaaggcaaatttgatcatcctactaggacgactgagaaaactggggcaaataaagagggtgaggataagggagaaacccatgctgtgactgccattcctatacggccaagtttcccaccaacccaacaatgtcattactcagccaataacaaacctcctccttacccaccacccagttatccacaaaggccatccctaaatcaaccacaaagtctgtctaccgcacttccaatgacgaagaccacttttagcacaaacaaaaaaaaaacaccaacaaaaaggaattttgcagcaaaaagcctgtagggttcaccccaaattccgttgtcatatgctaaacttgatcccatatctacttgataattcaatggtagccataaccctagccaaggttcatcaacctccatttctccgagaatacgactcgaacgcaacgtgtgcttgtcacggagaagccccagggcgttccattgagcattgtagggctctgaaagtgtaggtgcgaggtctaattgatgctggctg

SEQ ID NO: 42169 - DNA, 674 bp, Glycine max
  unsure (1)..(674): unsure at all n locations
agcttgtctgtatcattcccattgatagtcatagctttatattcataatcattttcctcattcctttcaatattttgttgtgaaccatttgcagacttgttagcattactggccggggtggcttttccaagattgctgccttcagcaccaccacaaaacaacgcagtttgagggaagtcgggaatatcaggaaggctatgatcattaagaggaggagaagagtgtgtatgcttgcactttttgtgttgagtatcatgcaccatatgcttgcgtttccgcttacgatgttttcttgacatcaagctttataaccacaaaaaaaaaaaaagaatgtgagacaattttctcaatctagacatataaatccaactagtttcaaaaaagaggaatcctaacaacactctttccacactttttttctaacactctgtatgtgattggntaaaagaaattgtcttagtattccttcgtaacagtcttttgtatctctttcttatgagcaacctattcacaatcacaacaaaatatatcacaaatacaaaatataatcataatatattcattttcacatccttaaactcataatttaatagagtcccaagaanaatgtaaaaatttgatggagagaaaggaaatacctctcctcanaagcttcaacaatatcaggaatatac

SEQ ID NO: 42170 - DNA, 560 bp, Glycine max
taagctccttcaactgcacaagactcttattatttgaagagtatccttatggaaccttcacccgacaaagacactgacaaaaagttatcttctcctttttggacaaagtatggcaagctgggggtaagtaaattttcttcccatcagaccttggatgcaattgtgatcgtatccccatttcagcttgatcttgatgggtattcaagccatcttttgtcttgccttgaatgttaaggagcgtcccaatcacactgtcataaacatttttctccacatgcataacatcaatacaatgtctaacgtctagatcagaccaatacggaagatcaaagaaaatggacctcttcttccatatgcaactcttacttttatccttcttttgggtctttccaaatacagtattcaggtgttgaacccgctgatatacctgctcaccagtcaatgttatcggctcaatatcgtgctcttgacttccattaaaagcttttttcagtcgtctataaggatgattaggtgttagaaaatggcaatgcctactgtagactatttttcttccatgt

SEQ ID NO: 42171 - DNA, 600 bp, Glycine max
  unsure (1)..(600): unsure at all n locations
agcttgtgtaataataagtctgtattatttgagtcattatgggtgtagaagttttctaccatattgccatacaataattaggattatatatttcgtgtagaaatgagacctaattttctttttcttggctacacttttgagaaacatatggttcaacatattgtgcattgtttaaggtgttgcttgaagtccaaattaggcattatatgtgtttataaaaaagaataaaattaatatcacttgaaaatttaagacaagaaccatgatagaaagactagcttggtaaaattagcctggcaactaaagttagttttatgtgcaactgcatttttttttccaaagtaagaagacaagtaatttaacaatgtgcgtatttcttttacgcaaccagtatggtttcaaaactgcttcacttataagttataaatttcagcanatagagtgttaaactatgcttgaattttcatagcctatctagatggtgagaatttgcatcaatgtttgttatcatgattactctttcaatgggtatccaaaatgataatgagattggttcaacctattatatgcctcctttactagtgaaaattatgtaatgtt

SEQ ID NO: 42172 - DNA, 548 bp, Glycine max
tttgcatgtttaggaagttctagagagattaaggtccaagttccaaagagttctgagagattttgctgtgtgaagatctgcagagacgcgagtttgaagcggaagccattctgagagcttgagatgagtttgtgagtgattgtgagatcctagaggtgaaggagacatcctcaccacttgtgtttttgcagtctttcatcttgttcttccctttgttgtaaaggaggtttccggactatggaaagctaaatcctctgttggatcttccctgtaggtacctgatgtaaatatatttctatctatgaaatgatgttttgtgtgttctccgtgctatctacttttcattccagtgtgcttttaccttgatcgcgtagatgcatgctttgttagggtcattcaacagtggaaactggcctgattctaaattccttaatagtacgggactaagttgttgtgctatcaagagggattggggtacaagaacttagttgtgtatgtgtgtcttaatgcggtcttggttaagtttagtcttacaagagggatctacg

SEQ ID NO: 42173 - DNA, 558 bp, Glycine max
tctcttgacggtgaagctcctacttccatggcttattcactagggaatggagcaccctctcacctcttctcctttataccccattgcataatcatgaacgaagaacacccttgatggaccactttgtcaaatacatatccatactccatataagctattcaagcccacagacatcaagctcattagataacgcctcgtccaatgctcatgggctattcaaagtccttaagaactgtctaatacttatcttgatggaacccttactgcgttcgataatcttgagtctcgagtctcgaacttgattcttgagatcttgaatcttgaatcttgattcttgactgtacactctcatgctgagtcttgaattcttactgattcttgaactcttgacttgttcttgattcactcgagatgttctttgaatcacttgagttgttctttgatctcttgagctttttgttcatcatctttgtcatcatcttttgttgtcatcaaaacacctttgaatcactttcgattcatcatgaagctttgcttctacaattataagtactttct

SEQ ID NO: 42174 - DNA, 555 bp, Glycine max
  unsure (1)..(555): unsure at all n locations
tcatagggagccatgccaatggtagagtgtaaactgttattataagtgaactctatgaatggaagaaaactctctcagcttcccttctgctctaagacacacgccctcaaaaggtcctccaatgactgaatggtccattcagtttggccatcagtctgaggatggtagactaaacttagtctaagcttggtccccaatgctctgttcaagctctcccaaaatctagatggcacaccatgtaacctgacaatctcacttatatacagggaggtcaacttctccaagaaaaatctgatattaatgggaatgaaatgagaagacttattcagtctatcaacaataacccagatagaatctaaacctctaggggttctaggtagtcctaccacgaaatctatggaaatattgtcccacttccactggggtatctctaagggttgtaacttccctgaaggtctctggcgttctatcttagccttttgacagactangcatgcatagacaaactcactaacctctctcttcatgttgggccaccaaaacatcatttttaac

SEQ ID NO: 42175 - DNA, 530 bp, Glycine max
  unsure (1)..(530): unsure at all n locations
agctataagataccccttttacttgcatgtagtgtgttagtgcttanctctaccgagtgtttaaaagattggctaagattttgttaaaacataagcacttatacaatgaaggaaagctggagttgctgcacatgatgttcaacgctatgtcaaagaatcagattgggctgcacaatgcacaaggcaagataaaatgtcaaatgatgaattgaagctgcaggatccacgatgtcggatacaatgtccaggacatcctgctcgaaaatactggtcacataaatctgttatatctttaacagattgtgcaggatccacgatgtcggatacaatgtccaggacatcctgcccgaaaatactggacacataaatctgttatctctctaacagattattgtgcagttagcaacagattagacgatctatctctatgaacgaattaaaagatgattaaagtttgaattacaaacttgaatagttcgttcagggattaaagattaaagataacaactacaagatcaaactttatcttt

SEQ ID NO: 42176 - DNA, 385 bp, Glycine max
tgccgccgcggtgttttccgactatgctcttgtgtggcggaacaagctgcaaatggagagatcctgatatgacgagccgatggttgatgcgtggacggagatggagaagatcatggagaaaccctttgtgccacctcctttcttatgggacttgaaattccacctccccaaccttgcccttggtcacccgggggctgaggagttttttacggacctggctgtgctcctgattcgcgctccttttgtcgaccacgaggagggtactcctggcttactttttcgtggaccgacttttgctctccgtgatattgttcgacctgcaaaagtgagttgacatggatgatcttcttcggatcaccctccatgtggagcacctattctaaac

SEQ ID NO: 42177 - DNA, 208 bp, Glycine max
tatgccatcaataattaggattatatatttccggcgaaatgagacctaatttctttttctcggctacaccttgagaaactatggttaacatattcgcattggaaaagtgtgcttgaagtccaaacacgcatttttgtgttattaaaaacaatacatggtatacttgagattaagagttgatccctggttaaagactccttggtgaaat

SEQ ID NO: 42178 - DNA, 279 bp, Glycine max
actgtgtttgggtgcggcggccaccatcaacaaagtactatcgacacctactatgtgttgatttgaccaacactattatgggtgtgttgcgacaatgcttcacaaccttatttatactatctgagaggatggtagtgatgtggccatatccacatgcttatatatcagtaagccgacgaacatttttctctttgaaacgcgatcaatgcatgttggtatggctggactcacttgacagaactggtctcataaatgagataaaaaaatgcgcgatggagc

SEQ ID NO: 42179 - DNA, 568 bp, Glycine max
taaatgaacactcataccaggtgcatttaccccaaggcttagacatcgaaaagttcgttaggccctctccctcctgatttggatccaacccataaaacattttagtacacaaactttatctatgaattctacaaaacacacgactcttcaattgttcacaaaataattttaactcgtcgtgcctcaaagtgattaaactcgtcgggttcccacagtggattccatcacaatactcatcgtacattaactcaacgctcttaaaaggtcttacagtcgtgtgattgtacagttcataactcataactcaatgcacacagcatctcaatacatgtgcgatctcacaattcatcacatatttcatttatcacttacacacaatctcaatcacaatttcttgaacctaatataacaatttatcactttaatatagtaaatcttgtccaaaacacgaacgaattatacaaaaatgtttctcataatatggggaataaaaccctcaaacaattttacataatcatgtcaaaatcaaaggaatcaaaattataggttcaaaaacacaaaaacacac

SEQ ID NO: 42180 - DNA, 630 bp, Glycine max
  unsure (1)..(630): unsure at all n locations
agctgtgcggatttggtcttcgccagcgaaaggatccaaatggatctgaagagaggcacatatgatcatcctgctcggacgaatgagaaaactggggcaaataaagagggtgacgatgagggagaaacccatgctgtgactgccattcctgtacggccaagtttcccaccaacccaacaatgtcattactcaacccttctccttacctaccgcccatttattcacaaaggccatccctaaatcaaccacaaagtctgtctaccgcacttccaatgacgaacaccacctttagcacaaaccaaaaacaccaaccaagaaatgaattttgcagcgagaaagcctgtataattcaccccaattccagtgtcctatgctgacttgctcccatatctacttgataattcaatggtagccataaccctagccaaggttcatcaacctccatttctccgagaatacgactcgaacgcaacgtgtgcttgtcacggagaagcccggggcgttccattgagcattgtanggctctgaagcgtanggtgcanggtctaattgatgccggctggctgaaatttggtgagaatcgcgtgtaaatcctgacattgacaaagatgccacacatgnggcaatttt

SEQ ID NO: 42181 - DNA, 551 bp, Glycine max
ttcaccagatcatataagataaatgcatccttgaaatctgcagatatatcctcccaaacgtcaaattcttcgcctatatattcaacctttccatcactggcacgtggagtgaatcttcctccatggtgcaatattaaagttatattgtcattcattctacacaatcagaaaccacaaacattgtcatatattaggaaataaaaaacctaacttaaactcaaacataggcacatcacacaacaacatccaatgtcatctataaaaacagagcatcataaacgaaaataataaaggaccataaacctctctgcgaaacgcgaagacaatgcaaatgaaaacccttgaacatataaaaccccaaatgaatccaccaaaacaatgcatacgaaatgaacgcaaaaaaaccaccaacctgactgccaagcccgaatatgaacaatcaccgacaaagggaatgtagtggagggaagagcacactgcaaacagttaaaaaaaccctacaagcagtaagacaatgaaagggaagatgcgtttacttcattctttatctc

SEQ ID NO: 42182 - DNA, 562 bp, Glycine max
agcttctaaactttatacaagaatgaagctttgataccacttgttagacaagtggcctcaaatatcttaagaataggggggttgaattaagatattacaaactattttcccaattaaaattctactttgattttaatgcaagttccaagttcccttaaagatgagtctctaaaagatgattcaaaataaacaatctgaacgtaaatgtaaagcaataataaataaagaagtttaagggaagagaaagtgcaaaactcagttttatactggttcagccacacccttgtgcctacgtccagtccccaagcaacccgcttgagagttccactatctggtaaaaaccctttacaagttctgaaccacaccaggacagtgattcctttgtgttcagattgctttacaacaagagaccctcggtctcttaattccttttcagaagtatgaagatgagaaaaagaaatctttcttgaaagagatagattgcataatgaagcactccaataattccttattgatttgcagtattttgccaacggatgttttacaagattagacatttttt

SEQ ID NO: 42183 - DNA, 558 bp, Glycine max
tgacacttgtggcatttccatacatgaatacaacagttattctccatcgtgagccaaaaatatccatcttttagaatatttcgggccttggcatgcccattggcatgggtgacaaatgagccttcatgcacctcccttagtatctgctcaacttcacttgcatccatgcatcggagtaaaaccatatcatggtttcttttgtatagcacgtccctattcaaaaataagttagccaccaacctccgtagtgttctcttgtcattctcaaaggccccatgtgggtactctttgtccttaatatatctctggatattgaaataccaaggtttgccatcattttcctcctatatcaaacaacagtgagcaggctcactgtgacatctaatttctatgcatggcaagtccccatgaaggctcacctggaacatagatgacaaagtagcaagggtgttggccatttggttttcctatctggggatgtgatgaaatgatatatcatcaaagtgttccatcaactctctgaagcagccttgataaaggattaacttatggtctctt

SEQ ID NO: 42184 - DNA, 479 bp, Glycine max
agctttacaagactcactgccaaattagccaatccagcgcagcaaatgcaacatgggcacaagcaactcaatatagatctgcgtaagagaattcccatcaccgcacaattcagttcgcaataaaaaaataacaaaaattggggcaaaaggaagaaaaatcattaaataaaacaaaagaaaagacacattgtgcggcattacttggcccagacaatattttcttatagaaaaagaagtaaaataactgaataaagaaaaaaaaaaactttcagagagaaaaacatacccaagcacccagataactgcacccacaagagataaaatcaaagccaaaagagcaaagggcaatccgagcaagaaacccagtggcctgcattcgcaaccttcttcttttcccatacttttgtctttgtctctatgcaaatgaacgtgttctgtgaatgtgaagaaatatgacggggtgtgaaaattgggatata

SEQ ID NO: 42185 - DNA, 484 bp, Glycine max
cttaatattggattgatgtatggatattaaattttgtctttggctatttccattctcccttttattactccataccacttttgtttatattccttccaaaaaatactccgaaaatacaccccttttgcgcacaccaatagagtcttgcatttcacaaattcaaatcgcatcatggttatacattctgtattttttgcacctactaacacaagagtataattgcattcaagcatgaaaaaatatgatacactatgacttccattaattacagtcctaaactccctggaatgacccattccaaagaaaagataatatgatggatgatgcatattgtaattggctatgtattcttttaagaaaaacaaataggatggaaaggacatttgcaccacgggtcatgcatcatagctcttgcaaaacttctctgcactagacatcatcaccgtgaaaacctcattttaatcaacataaaccatgtaatcta

SEQ ID NO: 42186 - DNA, 470 bp, Glycine max
gcttgcaaggaagctacctaggctataaatggacgcaagcgtaacacttgtggtaactatgacgaatgaaagtcttatgagatacactccaaagcaccagtgctttccctcttttattccttgaatttcgcgcacgccccgtctctcatgctgttcacacgataaagcatactcttcaagcttcttatccagggcaaaacttggaggtgaagctccttcgtcctaggctcatgccctagtggatggagcctgcactgtgctctgcttatgtgccttccgctgcatctccgtgatgaaaaagcaccattgaaggacctcattgaagctcacagatacatcctccatagaaaatacactcgcaagcttggatcaccacgcaccactcttgcacacatgactctgatccatagacctccacaccacaccagaccagacaacatgttgaaccacgctgatatagatatggattg

SEQ ID NO: 42187 - DNA, 567 bp, Glycine max
tgtaagttgtaatatttgacgaatctttactgcctaaatgtcctactaagtttattatattcagattgagttgtgcttgattttattatgaggtcaaagaagttaaaaaaaatatattctagactcaatgattttattatggtggtccataattcttttttgttatcaacatacaagtgagtatgacctcaattctaaaaaaaattatggaacttaataaaccaagagaggggtgaattggttttcaaattaaaacactcttttaaaaccagagttacaattttttttgtatgaatcgtatcacaaaacttttcatgaaccgaactcaatcaatacttaatcaatccacccttgtacaagatccttcattaactttatttctttcacaaatatattccttgaaccattttgaaaactgattaatacttgaatgaaagataaagatcagatcaagagaagagatacacaccctttttatagtggttcactctctatcactagaaaagctaatccaattatctaatccaaaactacaattagaatttcactatgcattaagaatcctta

SEQ ID NO: 42188 - DNA, 525 bp, Glycine max
  unsure (1)..(525): unsure at all n locations
agcttgtagagttaagtctcatattggtttaatcgattgtggtaatactttaatcgattacactgttgtttaagacaatgattgattttttcaagactctctactttaatcggttactagatggattaatcgactacttatctcttgtttaagttgctgacaggtgaaccacaacactttaatcgattacttaggtcatctaatctattacattgctcttgagtagctttctacatgttggatgaacactttactcgattacttagataacataattgattacttcattgaaatactcaactatcttatagatttaaatgattaccggcggttataattgttttctctataaataaccagcttgtgttcacatctatatatcatgagaacattatagaatactcaatacatctcgaaactacttcttagccccaaaatgagcatgacnccgtactttcattggtgaacaacagatgcttagaacagagctttctctgactcacaacttcttattcttttgatctg

SEQ ID NO: 42189 - DNA, 561 bp, Glycine max
tgttcttgactcatcttccccttgaaatgacgtctccaatcacctttcctccttctccattacgctgcctttgatcttcaagaagtaaaggactccattgatgaagatacaaggcctacaagctctacatggagctaaatcatgtggtatcaaagcatcttcatctaggtgattttcttttgttttctctatcttttgttcagtcaattcactttaattcctttctttatcgtcttatccatgtatctcttccattgtggattggtgctgtttaaagtagataaaaaaaataaaccgattaaatcttagatctacacttgttcttgcatttctatggttcaaaatttataaatctactattaaatcatgtttttgtgtttattttaggttctatcatttttcagtcataatcttcttgtgttgaatcttagatctcaattttcttgcaaaatattgattagaaaagaaaacacaaaaatctaagtgtaaatcacactactttaaaaagcacattctatgtcggttgtttaccacattctatgtcggttataaaccgtcgtc

SEQ ID NO: 42190 - DNA, 384 bp, Glycine max
agcttcaggctgctcgattgctccaggtttctgcatggaagggcaaaggtctgtatggtggttagcagaggagcacaaagcacaaacccttgcaataggtacagatttctgattcaaggccagctgggttaccaagttaaccaatgcatccagtttgccttcaagcttcttagtctcagatgatgcagctgagtttgtagctacctcatgcactccgctaatgactatggcatcatttctggcgctaaactgctgagagttggaagccatcttctcaattaaatttctggcttcagcaggagtcatgtctccaagggctccaccactggcagcatctatcatacttctctccatattattgagtccttcataaaaatattggac

SEQ ID NO: 42191 - DNA, 565 bp, Glycine max
tcttagtttcagatgatgcagatgggtttgtagctacctcatgcactcctctaatgactatggcatcatttctggcgctaaactgctgggagttggaagccatcttctcaattaaatttctggcttcagcaggagtcatgtctccaagggttccaccactggcagcatctatcatacatctctccatattactgagtccttcataaaaatattggagaagaagctgttctgaaatctgatggtgggggcaactggcacatagtttcttaaatctctcccagtactcatacaggctctctccactgagttgtctaatacctgagatatccttcctgatggctgtggtcctggaagcagggaaatttttttctaagaatactctcttaaggtcatcccagctcgtgatggaccttggagcaaggtaatacagccagtcctttgccactccctctaatgaatgaggaaaagccttcagaaatatgtgatcctcttggacatctgggggtttcatggtgcagcagacaatgtgaaattcttttcaatgtttgtgcgggtcttcacctac

SEQ ID NO: 42192 - DNA, 621 bp, Glycine max
agcttgatgcctctttgtataaccctttttacttttgtgatctttccaatatcttctagcatcaagtcaagacaatgtgcaacacatggagtccaaaatatttttggtctcgtgacttgtaaaattttacctagaaagaccaaaatcaataaacttgtatgagtagtgtaacaattaaaagttataactataaaaaaaacttcattaagcatgattgaattctcacccgccaacacataattacttccattgtccgtcaccacttgaataacattcttttctccaatctcctcaacaaagctatccaaaagctcaaagatcttctgaccagtcttcatgtattcagaagcatccacactcctcacaaattatgttcccaacgaacaatttaccaaaaagttaatcaaagttctattcttccaatccgtccaaccaactgacataattgaacacccatatttgattcactcctcctcacgacccctcaataagcccttcgtgtattccaactcttttttaaggagtggaactctcaattcatgatagcttggaggctttaaatgaggaaccataggttcaatcgcctcaatcatcaacttgaaactttttgatttagcaaca

SEQ ID NO: 42193 - DNA, 557 bp, Glycine max
tcatctagttttttgaatgagctcataattgacagggtggaaataagcgggccataagcgatacgcaaaagaaatttattgaagagaaacttagtcacttctctttagtattttttttgttgcttattgtttggtgttcttcttatttctgcctcgtacatgataagttcattatctttcttagtaacttgatccaccttcaaaatcctaggaagagctacgatgatagatgaaactctctaatgccttcactttgtctccatttgatttcaatcttgtaatgggaaggtacattgtttctccttctacttcttatgaagagttttgagtgtgataatttataagtcaacattatcactggtgtcaagcagggtagatgggaagatcatggtgtgaaatcagttgtttggataactgttcgaataagaggtctagagaggaagaacactcgttcccaatatagtaattaaaatatcaatcaaatcaatatagtaggaatatgagaaaattgatgacaatgaaagacttaaattgtaggctcgtcatgcatgttgttt

SEQ ID NO: 42194 - DNA, 564 bp, Glycine max
agctttgagcaaattcaaacgacaataactttttactctgatgtctgattgagtcccgtaatatatcgacacgctcgaaattgaatgcttatgctctgagcaaattcaaacgacaataactttttactcggatgtctgattgagtcccgtaatatatcgagaccctcgaaattgaatgttgatgctctgagcaaattcaaacgacaataactttttactcggatgtctgattgagtcatgtaatatatcgagacgcttgaaattgaatacggaagctctgagcaaattcaaacgacaataactttttactcggatgtctgattgaatcccataatatatcgacacgctcgaaatagaatgttgatgctctgagcaaattcaaacgaccatacacttttactcggatgtctgattgagtcctgtaatatatcgagacgcttgaaattgaatactgaagctctgagcaaattcaaacgacaataactttttactcggatgtctgattgagtcccgaatatatcgacacgctcgaaattgaatgttgatgcttttagcgaaatcaaa

SEQ ID NO: 42195 - DNA, 516 bp, Glycine max
gatgatgcgctccctgagaagttggatccaatggggaatagagatcattatggagaagaaaggaggagaacaaggaatgatggtgttcctacaccaaacccaattgatgggattaaactcaacattcctccatttaaaggaaagaatgatccggaggcctacttggagtgggaaatgaaaatagagcatgtattctcatgcaacaactgaggaggacaaaaaggtgaagcttgccgccacggaattttccgactatgctcttgtgtggtggaacaagcctccaaaggagagagcatgaaatgaagagccaatggttgatacatggacggagatgaaaaagatcatgaggaagcggtatgtgccggctaattacttcagggactttgaaattcaagctccaaaaactaacccaaggcaacaagggggttgaagagtatttcaaggaaatggatgtgctcctgattcaagcaaatattgaagaatatgaggaggtaactatggctcgatttcttaatg

SEQ ID NO: 42196 - DNA, 815 bp, Glycine max
  unsure (1)..(815): unsure at all n locations
tcccacaaagataccttttttagcttttttgtctaagttgtctctcttaacctgtggcacataagtaaaacacaagcatccaaatactttaaaatttttcaaggaaggtttatagccataccaagtctcaaaaggagtcttcccgtttattggtttggtgggaagtcgatttatcaagaatactacagtgtttgcagtttctacccaatatttcttaggtaaccatttctcatgaagcatacatctgaccatttccattatcgtccaattctttctttcactaaccctcatttgttgaggggtgtaaggagctgttaattgatgctcaatgcctgcttccccacaaaacatggtgaattgtgcagaagtgtacttccttgtcgttattaaaacctcaaattttgaatattgcagccactttggttttcaatccattgtgtaaatactcacaaaacaacctgctacccttgacttaaactgtaaaaagaatatccaccctttctgtggaaatttttattagaagaaggaatattctctctctttagggaagcatccttttgaggccggcccactcttggggaataaactggactttttctttttttctcacagttaatggtaaaaagaagaactgtttctctcccttatagaccgtgttcccacctggtgaatttcgaaataataggtggggaggccattgaccacacttctttctttttatgtcctctccacctctgctgatgaaaatggccacaacttattnttgcacaccctattttctgttttcaggaggagataaggtgtgtgtgcctccg

SEQ ID NO: 42197 - DNA, 395 bp, Glycine max
tacctcgctaagcgagttcatacgtttttttgaatttctgggtttcaggatgaactcgctaagcgcgccttgttccgctaagtgatatcatcaaatttgtttaaatttcgccattttgtatgaactcgctaagccattgcactacggcttaacgagtctttgaattttgcttttatatttctgggttcgtatgaactcgctaagccgatcatccgtgcttatcagacacacttagatagtcctgaaacttagaggctttttgcattccctttgtggcgcgctaagcccaaatacgtctctagaataaaaattgggctaagtgagcctgtctcgctaagcccatgccaatttacccctttgaatgttgtgttaatgcgctaagcgagccttgcccg

SEQ ID NO: 42198 - DNA, 490 bp, Glycine max
agcttgattaagaggcatcctcaagaagcttccttgtggcttcattgagaagctagatccttatctacccacacccctctattaactaaattaacctccttgaaaataattactaataaaaataatgcaacaaataatcaaacatcacacataattactaataatatataaatatatatatcagggtgttacaactctcccacccttttagaaatttcgtcctcgaaatttaccttactcaaacaaggatgggtgagcttatcgcatttaactttctaattcccatgtggcatcttctcctgatgcacctccccagatcaccttgaccaatggaatctgtttccctcttacgtgttttgttcgcctatcctcgatcctcaaaggcaatgtttcatatgtcaaattctccttcacttgtacatcatccaattcaatcacatggtgttgcaacctacccttcggtggggcggtgacacaagactcacaggtg

SEQ ID NO: 42199 - DNA, 432 bp, Glycine max
tctataaaggtttttgtggactgcttgtcttatcataccactaataccttcacctacaatattgaatagtaggggagctatgggatccccttgtctcaaaccccttgtagggagaaattgcttaaaagggctgccattaatcaaaggtcatataaatgctgagtggaggcaagctgatatccaaaccacatatcacttgtttcaatctatttgctaataacttatctatcaccttgtacatacatccaatcaaggagattggtctgtagtcatcaaatgactgggggtggctggttttgggaattagagctatgacagaaacattactgcctatagggaagctgccatgcacatggaattcatctacaaatattctgaagtcagtgttcttcattttccagaattgtttaatgaatttgaagttgaagccat

SEQ ID NO: 42200 - DNA, 319 bp, Glycine max
agcttggatagagaccttaaatgctttattattgttgacggattatgacgatgctaggctcatattatacgctggttgatacagatgccttcctgacgttaatatggggtgatgttgcccaaaaccgagcttgacctatgccgacccaacccgggcatagtcggtcagtgagaacctgtgatgtacccaagctggcgatgatcttggcttcttcagatgagtggagaaccagactcctaatctatgaagcctgtggtggctggccagctgtgaattttgtgtaatatgtgagatatggccctctggtaatcgattacca

SEQ ID NO: 42201 - DNA, 553 bp, Glycine max
ttcttgcttcatatttaaatgtcacttgtgtattctgaacgttctctatgttcatattctccgacttttgcgttaaatgttatttaaatttattttattttattaacaagcgtgatcagagaacactcatcaataaaattttctttgattcaaaaaaggataagctctaaattttcctataagatttcgtacaaaaaaccatggatggcaaaacaaaaagcgattgcaattgaatatggcgattgggaaaagttatatgcgaaactttcattgtggctaaaacacatgcaaaatcattctcctggatcctattttcaaatactgcatgacaatttattgttggaatagggtgagtcgcatacaccgtcagtttcataaagtattttggactttctatcaatgttaagaggcttttaattattgtaagccaatcatacaagttgacggcacacatttatacgggaaataccgtgggaccctgttaatggccacatcacaagatagagatgatggtgttcttcctctagcatttatcatattcaaaggtgaaacg

SEQ ID NO: 42202 - DNA, 474 bp, Glycine max
atgatctatattagacctgctgcatgctaccttgttgacatgtagagatttacgtgatcttccgtgctcgcaagatctgtcatactgacttttgagtctcgccgacggtctataatacccgagtggctatccgtataaactttttgttgtctataagacgaaaagcctgatagcacgcacagactaacgtcttcttttgcgccctttgtataacggggccgacactctcccacacttttagaaatttcctgctctaaatttaccttactcgaacagggatggtggagcttatcgcattctactttctaattaccatggggcgtcttctcctgatgcaccttcccagatcacctagaccaatggaagctgtttccctcttatgagtgttgttcgcctatcctccatcctcaaaggcaatgtttcatatgtcacattctacttcacttgtacatcatccaattcaatcacatggtg

SEQ ID NO: 42203 - DNA, 235 bp, Glycine max
  unsure (1)..(235): unsure at all n locations
ccagcacacgatanaaactcaacctccacaatatccaaacgtgatgaacgaccctttgtctttaaaacacggcagacgcagaacactctgaccgaaacacatggcgaacccacagctcccccctactccaaaaccccagtaagaatacacttctttctgagggctgaactcgaggaacgactggaaaatgctactggagggccctacgacatacgactacaatttgaccggtggg

SEQ ID NO: 42204 - DNA, 608 bp, Glycine max
  unsure (1)..(608): unsure at all n locations
agcttccaatctacaccaccatcgcacgggactttatctatagatgattttgaacgatgctaaaaaagacatgcagtcaatgtttcttccatccagagaaatttgatgtcatcttatgacaataaaaaaaatataacaactgcttctacatccacataccaagccagtaatacttattccaatatgacacagttagacattcacagaggtaatttttattcttaagctattatcaaatatctacacgcacacattttatttattattacattcttttcagattttgttctacagtcaacttatatatagaatgccaaattggctgtttattatccagatgaacatcagacaccaactaacactacatagcatgatcaatttgtcggccatgacagctcagattccagtgatgatgatgtaaatatgacacaggaaaacattgatataggtatttatccatcatttatattnttttatattttgtttctttgatgatcaaataaataaatcgaacattttcggctgatgtgtgttataccatatctatatgcacagaatactcattaaatgacccaacaataaatgatcttgatgattatgatgaacag

SEQ ID NO: 42205 - DNA, 319 bp, Glycine max
tttcgtcttacggactgcaaaaagaatatatggataaccactccggtatttccccccgtcaccgtgactcaaaaatcagtatgactgatctttggaacaccgaagatgacgttaatcaccgcgtgtaaatgggcttgttggccgcaattgacgaatggcgcataacaccaccttattctctacgtgctatcaggcttttcgtcttacagacagcaagacagttatacggataaccactcgggtattttagccacggagcgtgactgataagtcactctgacagatcttgtgagcgcggaatataacgtaaatctccact

SEQ ID NO: 42206 - DNA, 427 bp, Glycine max
agcttgagatgaggaagtgtagaagggtgagactttctgcttttattgatgaccacagagtggtacctgtagatatgtcgcgggggtcatgagaccttggggacgtcaggtggggtgctattgcccaaaaccaagcttgaccaatcccgacccaacccgggcatagtcggtcagtgagaacctgtgatgtacctaagcaggcgagctcctggcagtcaacagataaaaggaaaacaagaccacaaagcatggaggcttgtggtggctggccacctgtgaactttgtgtaatatgtgagatatggcctctggtaatcaattacccagggtgggtaatcgattacaaggcttaaaaatgaagacaggatgctaagatggtctctggtaatccattaccacgggatgtaatcgatttccacgcttgaaaa

SEQ ID NO: 42207 - DNA, 288 bp, Glycine max
ttgatgcaacatttggagaggggactggttttttttgatcatgctctccatgcaaagtcggcgccaatggcgaataaagatcttaaagaataataaaggaggataacagggatgaacagagaacatccaccaatccaaattgctgggattaaacaaaagataacccctttaaaaggcaataaaaattcggacgacaaaccggagagggcgaaaaaaaaagagaatgcattcgaatacggcgactgagaagaacaaaaagcgaaaccttgcttgcggcggaaacacccg

SEQ ID NO: 42208 - DNA, 413 bp, Glycine max
agcttgctgttaatcaccttgctgatctgacacttgatgaattcaaggattcacgtaatggattgaggaggacctataaaccgagcgcagcaacatttaagagaaatggatctaagtctgaaaacgtgaccgatgttcctgaagctatagactggagggtagaaggagctgttactgcactcaaagacctaggtgatcaatgtggtcagacaagtaacaccatgtaagaccttcattgtgctccatctttttcattaattccttcatctcgttttactatatgtttggataacacaaaacaatcaattatagcctaaaaaatgatggtcctgaaaaaatagaaatcattatttactagctctaccaagatagcataacttattatttctcactatggatcgtatgtgagcaca

SEQ ID NO: 42209 - DNA, 304 bp, Glycine max
tatgatcataacattggcatgactcaagtgctttctcaaggctcaccatgtacaaaaaaaggtttaattgttaatatgaccactaacttttattgttttgtaaactttaccacccaaattttatttttgaaaattgtaccatccaaaaattaattctttttttttagattttatcaccattggtgaaatatggatgattttgacttttgatatcacgtgtaaatattatcaccaatgtataaagtaatttttaacattcggttattatcaccatcaatgtatatagatccaattgatccaatca

SEQ ID NO: 42210 - DNA, 358 bp, Glycine max
gctgcatgctgatattctattacgttccattattgcttggattctacaaagtcgatgctgaatgccgtgtagatctctgtgttgtccgatgaagagaaaccaaagttctgatcaagctcgtaatcttgcagatcagaggcgcacattcaggaagctggactttgactacatgaatgaccctgatgtatgcattactgacatgatatatgccaagtgatttttttctgagcttcatcacccacgaacttattgcattggtggtgtccgcttcatctgcaacaacccttctatttacatctttgaggaaggcttgaatgctttctatttcatctttaatggctgaaatatgcttgtggat

SEQ ID NO: 42211 - DNA, 496 bp, Glycine max
taggttctcattttccttccattagtgttttttgaacaacttgattagtttgcttgactcttcaattatattttttcctaattggacaactacccctccctagtacaagtcagtatttaatctccacatagacacacacacacaacgaccacatagacacacacataggaaacaaccaagtcatcccgcacacccacttacacaaattgtataattagtaaacgaccacatagacacacacacaacgaccacacactaatatatatatatatactcaattacatttccacacctcacttaacgttcgatacaattctctaagagtgcgtttggatagagaattttaactgaagaaagtaatttatgaagaatttaaagttttggaattttattttctttataacctcattctctttcacctgaaaggttccaaaatctcattcttgaactctcgaccttccctcgcattgatgatcctcttctttaaaaaacaccg

SEQ ID NO: 42212 - DNA, 89 bp, Glycine max
ctcccggagaatcgatggctcttatgacaataaaaaaatatacaactgcttctactacacattaccagccattatgcctattcaattga

SEQ ID NO: 42213 - DNA, 1044 bp, Glycine max
  unsure (1)..(1044): unsure at all n locations
gcgccccaaacagaaagagagaaaaatacgtcnttccccccgcgtctcttcacactctttttacgcanaanaactgactccacgtcgacccccatcccagccccacgcaaaccatgtgacctcctcccaactacccaagcgacactcataaaattacctctcagcctttcagctctcccacgcgtgggaaagacatgacttttttttctctatatactcccntcttcctgcccgtcttctgaatcgtccttaacccgtcatgttatcatccacgcaccctcgttctcgacggccttctttaccaaccaatcgtacactctggtggctcgaccctcatgtcccttgggccatctttcctcactccacactccacacgcctggcgacccacagcccttcctcccactggtcgtcgtncccactctctactgccggcgagcatcctcactatctcgccgatccacacgaccaccgcttctctctatatcgagccccacacttctcccctcgccacgtagacatatatcctctcatcctacatacctcctgtacactattcttacatcatacctgcctcttccacaacacttactgctcctacccgatgtcgtgcgtccagcgttaccctcacaacgccgagacccgctctacctacaacatatctgccgcctcttgtacctactcacaacgctcactcccactcctcgtttgtacgcctctcaatcttcacaacctctcctcttgtgctctcacacgtgccctccctntcatagtctctccgatcacgcaacgcgcccctcacaatcctttcatcacctcgcaacgcacgtcctcatctttccactcccccaacccacctgtgctttatattctctcctcccatcctatcggcgacacgtcccttgtcatcctcctatctcacgttcggccgtccgcgcccacacctccctacaaattcgtcttcctgccgtcctctcactaaccattcccaacagctctccaccgagtcactagaactattatgcgctccgctacacactcatccc

SEQ ID NO: 42214 - DNA, 571 bp, Glycine max
  unsure (1)..(571): unsure at all n locations
gcgcttcattctcaacctaaatcccatcacttatcttgattgcgcgttatctcgatgcagagaacaattttagacattcatctcttacacaccaatggtctaaattgcatcatgatgaacatggaccagagctcttgaggttatataccctccatacgaagcggaataggcttaacagaaaagaggaagatatttaataactgatcttagtatttcaggaagggtgaaagcgaaaggactggaataattacactttaggatctcgatgtgtcttttaaatcaatgactagagacagatttgtttattaacccgtaattataagtaatcaaacgtatgtgggaactcgattgtgataaatgacaagttgacaacagaacattaatttgcttacagacgaagggattaagaatctataatacgagagaatagacgctgtttatgtgtatgccatgcatggnagcagctaataagggaactaaagtcttaagctgtgttagtttggttatctatatcttgatcataatagtctctttgaaaatattcttgtgcacgcatgtactaatctacgta

SEQ ID NO: 42215 - DNA, 457 bp, Glycine max
tactcaagcttgtattttgttcattcataataacctcaatggtttacaaatgcttttatttataccagttccctaataatggaatttgtcattttgtgtaaagggaatattctaaaaatcattagcaattctgcaatttgtattccatttttacaatccaggtttgctccctttcacgccactattcttcatacgtgcaccactatacccaagtccttgaagtaggcttgttgtttgcaccatattttctgctagttgagcatggaacccgtgtgtttgctacccctgtgcgtccttctacctatcatatcacatcctcaaagaagctaatcaagcaagagttcaatccctttcatagttcttaatgtatgaatctggaagtggtgagtctagaaatgttttatttttaaaacacatgttagatggcttttagaggctctactattccccccccccc

SEQ ID NO: 42216 - DNA, 666 bp, Glycine max
agctgttgtgagaaccataagtgtgtgttgggaattataaaaaaaatctttgaatgtaaatagggtttgtatatagaccgtgtgacgtaaagagaaagagttccagtgcgtgtacagaaaacgtttgtcatgtataagaatatatatgtacaaagaaaggtttgcctcataaatgaccacaggtgtataattttgtgaatgaaacaaacaggaaaaagaaagaaagaccgcgaaggtcgacatgttatagttaagaagtataaatcattcgtaaagagcaaacgtatcttttggaaacaagggactgatgctaagagtttgttttccggaataaccgagataagaatggatgaattcattgaactaataaaagaacataatttggaaacattgggtctgtttgtgtaaattcccaatcgtagtatcagaatgccatatacaggatgcttgagtgcccacctggctgtagccatgactaatattgcacgttgttttaaatcatcattgtcacgcgtgccttgtggagtaatatgggagttcggcccgagaccgacaccttgacacccaaatttgtttttgcccagatatcaagattgggttcccacgataatagaccccattgaaacacaccttagactttttgaaccttgcctatcaaaaaatcct

SEQ ID NO: 42217 - DNA, 199 bp, Glycine max
gaacttataaactcaagctattgggtcattcttatttttggcacttttttgttatgtattactaggtaccggggaagggaacattcgacaaaaaaactatgatgttagccttgaatctaggtcaaagttccttcctaggtaactaacttttatcgaaacgatatatctgccttccatataccactttctggcttttata

SEQ ID NO: 42218 - DNA, 610 bp, Glycine max
agcttctagccaaatggacttaccttgacttaattcctttgatagcccttttgagtcatgtttccctttccttgttttgaagctcactgtaagccttaagtgaaaaaccatgatatcaccatatccttaaggaattttggagctttggaattgttttgggaataagtgtgggggtttttgtttcattggataacatgttttgttggccatgcttcatgatatattttgagccatacttgatgtacattgcatattggttaaatgttggacatgctgaatatgatgttgtttctcaaaggctatagactaaaaaatatatatattattaaaaaaatcgaaaaagaaaaagaaaaagcagtaaagttgagtgaataagatcttaaatgacaaaagaatgatgagactcttggtatgcacttattcctcattgctcctctattcctttgggattcagccacttattttcttaaatgacaaaagaatgacgagactcttggtatgcacttatctttacttcttttttattttcttatgtttacttaatatgcacttattccccattgctcctctattcctttgggattcagccacttattccatatttttccat

SEQ ID NO: 42219 - DNA, 505 bp, Glycine max
ggacctataaatatcaactttaaccttgcaacaaaggagttgaccctgtatattaatattcctcttcaaactcttagaggggactttgaacgttgtttatggaggagtccgagtcacatctctgattatttttctcgagtttggtcgtggccatcaacttaaaagaaatggtgaatatgttgatgacgtgaaggtcatggaaaaaatacttcaaactttatatccaagttctgacttcattgttaccaacattgaagaaaacaaggatttaaagaccatgactattgaacaactcatgggctccttacatgctttccaagaaaaacaaataataattattaaacctaaggaggctacagagcaactactacaactcaacgtaaaggaagcaaactttgcaaattacaagagccaaagaggacgatgtcccggccaatatcgtggacgttggacatggacctggaggagaaggaagaagtggttacaacaaccactccaacaaatt

SEQ ID NO: 42220 - DNA, 465 bp, Glycine max
agcttagcatcaatcacctagctgaccaaactaatgaggaatttatggcttcccataaaggatacaaaggttcacattggcaagggttgagaataacaacacaaacaccattcaagtatgaaaacgttactgatattccttgggcagtggattggaggcagaaaggtgatgctacttcaatcaaggaccaaggccaatgtggtatgtaacacaaaaaaaaaaaaaaaaaaacccatgctagtgacactactatatgttttctttgtgaacaccgccatgaaactaagcaaataggtttgtagctgttgggcattttcagcagttgctgcaacagaaggtatctaccaaataactacaggaaacctagtatccctctcaaagcaagaagtagtggattgtgatagtgtagatcatggatgggatggaggtctcaatgaacatgggttttgatttcttattaaaaat

SEQ ID NO: 42221 - DNA, 549 bp, Glycine max
tgtagggttaaagtctctcgattgtcacgtgctcatgcaacaattgttagccgtggctatacgagacatcttgccaaacaaagtcaggttcacgataactcgcctgtgctttttcttccatgctatatgtagcaaagtgattgatccagtaatgtttgatgagttggaaaatgaggccgtaattatactctgccagttggagatgtattttccccctgctttctttgacatcatgattcacttgattgtgcatctggtcagagaaatcaaatgttgtggtcctgtttatctacggtggatgtacccggttgagcgatacatgaagatcttaaaagggtatacaaagaatctatatcgtccggaagcatctattgttgagaggtacattgcagaagaagccattaaattttgttcagaacacttaaagaaggctaaagctgttgggcttccaaagtgtcgacatgaggacagagtgggtggtaagggttcaagaggactgcaggtgatcactccaagtgtagaaaatttgtttgtatgtcttgaacaaca

SEQ ID NO: 42222 - DNA, 388 bp, Glycine max
agcttatgctcggatatcaaaagtttcgttaggagctttgataacttcttatgtacttggatgtagaaaaaataacaataaagtaaatccatgtttatgctatgagaaacttctcttagaattgtaaggttccatgaatctaaggtttttataaacactttggtgaatggagaaaggttagctctaatctagagcgttttggctaacgaagactattcaaaatctggggtattattcttaagagactcaactcttctaatcttgcatctattggtggcttctcttccttgcaaggggctccttcaaatgaagatccttaaatataccttgtgttaagccataagatgaatcagatgcctcaaatgttttcattaacgcaaatcaatat

SEQ ID NO: 42223 - DNA, 316 bp, Glycine max
gaagaaggcttcctaaggcgccccttgatgtgcttagcatgaatctcgcgcttagcgcaaaatcatcatcgatactcgtttagctttagatggaagatgagggcgagggcacgtgaatttaaagctatcttagggttataaatagagcctgaagcctaagagaaatccacactatgcatcttgaataagggaaagcctgtttctataaccattttcctcttctcttgctttatccatccattttgttgttttatccacattaaaccctaaagtataaaagtctattctgaatatgaaaggctaaaccccatttttg

SEQ ID NO: 42224 - DNA, 506 bp, Glycine max
agctttcataagtgaaatcaggtgcaaccatctccctaagagtcctctcacgaggtggaggaagagccatagttttattataagaatcacaacaggaatgtgttccttttattctactccaaaaccggttgtagagaatgaatttttcgaacagttgaaaaatatacagactgcttttttggtgtaaactaaaacatggatacagatatgcatcaaagattatttcatttgcgaccacgaagtaattaccatacttaaaaatgaagccttattgtattgctgtacaaccaatcatattctatgggagtgaatactaaattttaacggacaacaaacgaaaagacagatttcggtacatcgaattttaaaaataaccttatttcataataataatcatttattattaatttaaatattaaacactccttcggttactgtgctgttatggaaacatcataacaacacttttattacatccaataaactctacttaaatgcattgaatt

SEQ ID NO: 42225 - DNA, 539 bp, Glycine max
gccttggttaacctgggaacccaactggccatgaatcaaaaatctgcacctgtcaccagactctgtggtttatgctcctctgccgaccaccacacagacctttgtccttctgtgcaacaatctgaagcaattgaacagcctgaagcttatgctgcaaacatctacaatagacctcctcaacctcaacaggaaaatcagtcacaacagaacaattatgacctctccagcaacaggtacaatcccgggtggaggaatgatcccaaccttagatggttgaatccttcacaacaacagcaacaacaaccttattttcagaatgctgctagcccaagcagaccatatgttcctccaccaatccagcatcaacaacaataacaacaacaaccccagaaacagcaaacaattgaggctcttccgcaatcttcccttgaaaaacttgtgaggcaaatgactatgcaaaacatgcagtttcaacaagaggctagagcctccattcagagcttaactaatcaaatgggacaattggctacacaattaaa

SEQ ID NO: 42226 - DNA, 665 bp, Glycine max
agcttgtaggaatatggggtacccatcacatgttttactatgtggcggtcgggcgatggtgcacaacaagttttccacatccacaaatcacgtataaacccaccatcccctgttgtccacctccaactgagctcacgtactcccacgtagcccatatcctcgtttctctcaacaacgggtccccatcaatcctcccaagcttccccacatccaggtaattcaacatccaaatcatcacaaactaacaaaccaagcaaaaccgggcaaaggcagaaaactctgcccaaaattcaaaccaaaatcacagctttttctcacttaaagaccccagtaacatttccttcgttccaatccgttaaccgttggatcgactcgaaaattttactggaagtctctagtacataagtatacatttttaccgttgggatctactagaaaacatccagaactcattctgtactactctttccacaaccagcaattacatagcatttttctgcacttatgcagaattctgctgcacatttcaacagcaaaattctgcataaagtgcagatttcgaaaccactctttcctcatccaatattgcccaaattgaatcctacaagtcccaaatcatgcaccaatcatgtctaaaccaatgacaagcttcagaccacaacaac

SEQ ID NO: 42227 - DNA, 678 bp, Glycine max
  unsure (1)..(678): unsure at all n locations
aaacggccaaaaaaaaaaaaattctctctcctttccctntccccctttttccttctcgccccccccgagctgcccacttgtccccctaccccgaactttatctcagctctttatggccacgggggaaacaagttttttcccccaggacgcttgccggcattattggggggggcaaaccttattaatacactacattgaacattgcatatgacattaccaacgacctctattttggaaccctacaaccccattaaagacacattttctgtctgtgccagcaactttttttaaccaggagccagggtccgaaccagaccaattcacccaaatgcccatagcagaacctgggttaatgggacctttgaggaaaaaatctgatacggacttgactctatttatagagcggtgagaacccctttcccccccaaaatttaaatggactatttctacgtcgacctttaatggagccccccatctccaggttggcttgctcaacccgtttttaaaaacagggggatcgtttttcttttttgctgataccttttaatggggtctatcggagggctcttttttcctaaaaaacgcacaatgtattggctactgaactcctccctccagttttcccctctctcacacccaattaaaaaagggaaacgctggctcgcctatgtcttttgg

SEQ ID NO: 42228 - DNA, 580 bp, Glycine max
  unsure (1)..(580): unsure at all n locations
agcttgattggttgtctaatgtatctcactgtacaaggccatacattgtatttgttgtaagtctcttgtctcattttatgtgttgtgcaagtgaaatgcatttaaaagtagcaaagagaatattgaggtatgtttagggcactattgattatggtgtcaaatttgagaagtgtcaagaattcaagttgtatggattctctaatagtgattgggctagatccgttgatgacatgaagagcacttcaagatactgtttcagcctaggcacaagagttttctcacgatgcacaaagaagcaagagattgtagcacaatccactgctgaggctgaattcatagcagcagtaaatcaagctttatggttgaagaagattctaagtgatttacttttgcagcagaagaacaaaactggaatttttgttgacaacgtgtgtcatgggaagactaaacatttcaacatcaagctctattttttgagaaagatgcacaaagtggagaaatgaacttaatttactgcaagtcttaagatcaactgactaacatgnttacanagccactgcctatcaacaaatttgaactc

SEQ ID NO: 42229 - DNA, 526 bp, Glycine max
tgcaaagcggttttacggaccctttcgcattcttcaccgtataggaccagtggcatacgagctggaattaccctctacagtgcgcatccaccctgtatttcatgtttcacttctgaaaccctgcatcaaaacaccagacacgcaaatccttcctcttcctgtgacagtcgtcgtcgcaccttctggaaccaaaccccaagcaattattggtcgccgtacgatacctcaggagcacgattcaagggaagaagtcctggtacactgggagggacaaatgccagctgaagctacttgggaatctaaggctgccatcgtgcgttcctttcctgactttgatcttaagggcaagatctattttggagatatgggtaatgatactaataggccagaaattgagcatgaacctatctccaatagtgggccttccattgctgcaaacaggcccaaacgaattgtgaaacctcctgcacatcacaaaaattaagtttagtaataattataattaaatgatgtaatcttttaatat

SEQ ID NO: 42230 - DNA, 542 bp, Glycine max
  unsure (1)..(542): unsure at all n locations
ggatcctctaagtttactgcggcatgcaagcttcaaatgttctctgattgcagctgaggtccgggtggtgatggtggtttgaagtgagagtagggaatccacgaatataggttaaaggaaacaaaaaaatttgtgttcctaattttctactccaaaaccggttgtagagaataagttttcaaaacagttaaaaaatagacagactgcttttttggtgtaaactaaaacatggatacagatatgcatcaaggattatttcatttgtgaccacgaagtaattaccaaacttaaaaatgaagccttattgtattgctgtacaaccaatcatattctatgggagtgaatactaaattttaacggacaacaaaagaaaagagagactaggtaacatgaattntaaaaataaccttatatcataatataaattatttattataaatttaaatataaaacactagttaagtttagtgtgctgtttatggaaacatcagaacaacacttttattacatccaataatctctacttaaatgcattgaattta

SEQ ID NO: 42231 - DNA, 163 bp, Glycine max
ataaaccatgaaaaaacgacctttgccaccatcatgaacactggattaaaagcctgaaaagatgcatgaaatgaggaaaatacagaggcagaaaactatagaggggggaacactaaatggcccgagtgaaaaacggaaatatctggcccttttgaatatgaat

SEQ ID NO: 42232 - DNA, 512 bp, Glycine max
ttctatgtacccgtggaggtccacattgtgtttcgtgtatttttattctcgttatatttactttttatatccccttttgacatgcgaaatccatcttatctaaatgatttctcgctcaacctaaaagtaaaataaattatcaccgagcggggaaagtgtattatccattaacttcggttaaaatgaattccgaccgttcggtcgtgccgtaaccacgttggaaatcaaaaagaggtaaagtgataatataataataaaaaacaacgtcttttagtaaaataaagcgaaaaatcaatcgaacgttttctctttgggatttctcattcttaatcgaattgactaataactaaagtgaaactaaggctaaaatcaactcgcctagtcaagctcgttcataaaaataggtttttgaaggttgtcatttcaatttcttactaagtaaatggattgtttcaaggtccaacgccttaaaatgatcaccttttaaagaaaaaagaatcacttgataaaaa

SEQ ID NO: 42233 - DNA, 531 bp, Glycine max
tcaagctgttcaattgcttcaaattgctggacacaagggcaaaggtctgtgtggtggtcggcagaggagcataaaccacagagtctggcgacaggtgttgatttttgattcatggccagttaggttaccaggttaaccaaggcatctagtttaccttcaagcttcttagtctcagctgatgaagatgaattcgtggctacttcatgcactcctctaatgacaataacatcatttctggcactaaattgttgggagtttgaagccatcttctcaattaaatttctggcttcagcaggggtcatgtctccaagggctccaccactggcagcatctatcatacttctctccatgttactgagtccttcataaaaatattggagaagaagttgctcagaaatctggtggtgagggcaactagcacatagttttttaaatctctcccaatattcatataggctctctccactaagttggctaatgcctgaaatatcctttctgatggccgtggtcctggaatagacaatatggaat

SEQ ID NO: 42234 - DNA, 480 bp, Glycine max
agcttccaatctacaccaccatcgcacgggactttatctatagatgattttgaacgatgctaaaaaagacatgcagacaatgttgtcttccatccagagaaatttgatgtcatcttatgacaataaaaaaaatataacaactgcttctacatccacataccaagccagtaatacttattccaatatgacacagttagacattcacagaggtaatttttattcgtaagctattatcacatatctacacgcacacattttatttattattacattcttttcagattttgttctacagtcaacttatatatagaatgccaaattggctgtttattatccagatgaacatcagacaccaactaacactacatagcatgatcaatttgtcggccatgacagctcagattccagtgatgatgatgtaaatatgacacacgaaaacattgatatacgtatttatccatcatttatatttttttatat

SEQ ID NO: 42235 - DNA, 307 bp, Glycine max
tgtattttggtcattcatatccctcaatggtttacaaatgctcctatttataccagttccctaataatggaatttgtcattttgtgtaacgggaatattctaaaaatcattaacaattctgcaatttgtattccatttttacaatccacgcttgctccctttcacgccactattcttcatacgtgcaccactatacccaagacctttaaaaatgctcgctgtttgcaccatattttctgctaattgaccctggaacccgtgtgccttattcccctgtgcgatcttctacctatcatatgccatccct

SEQ ID NO: 42236 - DNA, 290 bp, Glycine max
agtgcgcgatcacatggtgcgcttgagggatgtagggccacagcgcacaacctggtttgctaccatgtcagatacttttctaccctacatcatttgttgtactctacctgtggagtatgcccctttacaaatatcttataacacacataatgataagaggggaatcaataaactattgataatgtgcgctcaagaagagaaatcgtcaatcatggcacaggatgataacgtgtctttcactgctcgcggaaagaagaaaggtgatccagccaataataacggcatgattc

SEQ ID NO: 42237 - DNA, 531 bp, Glycine max
  unsure (1)..(531): unsure at all n locations
tttgccaaaaggaataaaaagaagaagttcttagagactcaaaaaacaatgtggaaaaaattgcttgtgtaaagaatgaattggaaaagatagatgtatgaaatgcaaaacaaagcattgcttttatagactttttatgtctggtcaagagaaccattagaagagttatgacctttacaaaaacttaaaaccaatttgaaaaagtcaaaaactatttgaagagttacatcttttgatttgttcagaaactatcactggtaatcgattaccaaattagtgtaatcgattacacaaagcttttatgtgaaaggatgtgactcttcacatttgaatttgaatttcaacgttcaaaggcactggtaattgattaccaaaacttgtaattcattacagtttttgaattatttggaacttgtaaattctttgaaaacttttnaaatccatttgctacggtaancgatagcacagataaaaacttttggtaaactgttttgagaaaaagcctgtgctattcatttttgaaaaaacttt

SEQ ID NO: 42238 - DNA, 444 bp, Glycine max
agcttgtatggcacttgagaaaattcaaggtgctactataagtcaataccttcacttaagaagtcatggtgatgagttgatccaatcttacaaaaattgtacattactaatcacctatataatgagtaacaagggtgcaattttagagagattctataagtgtcttgaggcatgtaacgctgcttttgtaacaacatgtagacctttgattgggttagatggatgttttctgaaaagttattatggtggccatttgttgacaaccattgggaaagatggaaataaccaaatgattcctattgcatatgtagtagtcgaggctgaaaccatagactcatgattatggtttattgacttgttactaaaagacttggatgggattactgaaaaaaagtgggcttttatctctgaccaacaaaaagtaatatttctaaatacttgtga

SEQ ID NO: 42239 - DNA, 490 bp, Glycine max
tgaaccttgaatcttgattcttgaaatcaaatttcctcttgaaccttgaaatgttcttgattcaatcttgaacattctgaactcattctttgattcttgagatcatcatctttgttatcatgaagtgttcttgacctttgagttttttgtcatcaccttcgttatcatcaaaacttctttgaatcaagcttgattcatcatgaagcttgcttctacaattccagctgatgaaactcattgtccccgatgggcctggctgccaggacccatcgttaaaaaaaggatcaaaagagttagtggtctcatgttttggggtagggttggttaggttttgactaaggttaaagacatttacgtttgggttagggttggggttctgtttggtttaagtaatgtgtgtggacgagtggcttaaggcaatatttggtgtgttgtgtggagatttggacatgggaaaatatggtggactatgtgaggaatggacatggct

SEQ ID NO: 42240 - DNA, 174 bp, Glycine max
agcttaccttgaattaattcctttgatagcccctttgttcctatgttcccctttctttgttttgaaactcattacaagccttaagtgaaaaaccatgatctcaccctacccttaaggaattttggagcttcgaaattgttttgggaataagtgtgggggggggggggtatgttt

SEQ ID NO: 42241 - DNA, 552 bp, Glycine max
tgcttgtggggcttctatggaggctggatctttgagcttcaatgaggtcctttaatggtgattttccaccatggagatgcagcggaagacaaaggagaagaggtgagaggaggcaccatccactagggaataagccatgaaagaaggagcttcaccaccaagatgagccttggataagaagcttggaaggatggttcaatggaggaaaagaaagagggagagaaagagagaggggggagcacgaaattgaaggaatgaaagagggagagaagtggcactttgaagtatgtctcacaagactctcattcatcaaagttacaacaagtgttacacatgcttttatttatagactaggtagcttccttgagaagctttcttgagaaaacttccttgagaagcttctttgagaaaacttccttgagaagctagagcttatctacacacacccctctaataactaagctcacctccttgagaagcttctttgagaagattcctaaagaagctagagcttatctactcacacctctctaatagctaagcttacctcct

SEQ ID NO: 42242 - DNA, 503 bp, Glycine max
agcttttagtttcaatgcaaggaaacatggcttatgtctaaaagtctaaattttggttttgaaagtggaaaggcatgaaaattagaacatgcttgtgagagtttttactcgaatttggctgccccatgaggggtactttgcacctaggtagcatggaaaatacctttcaatggtatgtaaatatgtgtgaaaatataggtagcatggaaaacacctttcaatggtgtgtatatatgtgaataaaattccttgcaaagtgtgaatgagtagcagaaaaatgtctttcaacatatgcgtatttgaggataggtagcattaggagccttttagaaaatgtacccatgtcaaaaagggcctaggacgcttcctaaatgaatatatgatggcatggaatttccttttcaaatgcaagtatgtgcatgacgtaactagctttccaatgtgcaaatgtgagtgaaacaacaaaaatttgtatgataaatacttcaaatatgtgtacgtag

SEQ ID NO: 42243 - DNA, 556 bp, Glycine max
tgagatgaggaagtgtagaagggtgaaacttcctgcttttattcgttgaccacagagtggtacctggagatatgtcgcgggggtcaggagaccttggggacgtcaggtggggtgcttttgcccaaaaccaagcttgaccaatcccgacccaacccgggcatagtcagtcagtgagaacctgtgatgtacctaagcaggcgagctcctagcagtcaacagataaaaggaacaaagaccacaaagcaaggaggcttgtgtggtggctggccagctgtgaattatgattgatatatgggatatggcctctggtaatcgattaccaagggtgggtaatcgattacaaggcttaaaaatgaagacaggagactaagatggtctctggtaatcgattaccaaggggtgtaatcgattaccaggcttgaaaacgaggtcaggaagctaggagagcttctggtaatcgattaccaaggggtgtaatcgattaccaagcttaaaaagggaatcggaagattgtggagtcctctggtaatcgattaccagtctgtgtaattgatta

SEQ ID NO: 42244 - DNA, 478 bp, Glycine max
agcttgcatgacatatcacatatataaaactgaacaccccaaactagttggctggtgaaacagacgtgttcatgcagactccatcagcctcagggagatttctaacctcattaagaagcctagtaagttcttttgtcagttctttccgaacatagtcagatcgctcctttgtaattgatgattcttgaaataaagattcagcgagggactgatattcttgaaaccattcctcaccaatacccagattattttgatcatcatcaacaagtaatgagcattcccgtctccatctacctaaaaagtatttatcaggcagctgaaagtaattctttattacaagtacacgaagagcatgcctgcatagtattcctgatgattcaaattccttgcaagagcaatgtatctgatcatcttctgccaaccagattacaagccattctccatccatgcttttgaagtgccggacaatatatgatcc

SEQ ID NO: 42245 - DNA, 439 bp, Glycine max
tgccataaagaaatgtgtggttggcaattttctttaattagttgttagcttttttcctagctgaaagttatggttgtctattcaacaactagtttaacaattaattttatcaaatattgataacttaataaattagcttaaaagtttttaactttaaacttttagttagcttttcaactttcatttagggttgtcgaacataacccgaatgtatggaaataactaagctaaaatgaacttattagaaatattccgattgactcttaagtatgaaataaattattttgaaaaaaaaacacctatcttgtatgtgttcaagatcatcgataaagatttattgcgtgaatagttgcatatcaatatcctgattagaagaatgaatctattataaagttttaagtatttttacaaaattaaataattcttaaaaaaactcttt

SEQ ID NO: 42246 - DNA, 346 bp, Glycine max
agcttgtcaatgcattcaggaacctaacaaacaatacaagatgcatcacttccagtcctgctccaatgaataaatgtttataagtgaaacatgtatgcttattctaactcaccccatcttggagcttgtcctctacagcaggggcaccaagaagaaatacgttcttctcaatcttatctgatactgcctcaatcattatatcctgatcagcactgactacattcatggccctagagaatatactatcaaactccgtgtattcttctgcatcaaggtcacgataggccagtatcagggtactcagacccgcatcagcatactcatgcacatgctccatggctttctc

SEQ ID NO: 42247 - DNA, 561 bp, Glycine max
tgaaggtgtgtaacgcaccatcttctcatattataacatcggtgatgtgtctactatcattgtcatcatcaccttctatgtcattgggggcattacttaagttgacggatccctccactgctgggcatatactttgaaagatccatgctcttttttactcatgctctatagctgcatcctatccgcagccatatcaaaaatgcattgatattgcctaatgaaggcaaacattaagtccttccaaaaatggacttgtgatggtaccaaattattataccaggagacgggtgcccaggtaacactttcctggaagaaaggcatcaacaatttttacatctttcgagaatgcccccattttcctgcaggacacctgtacgtgattcttgagacaagtagtcccctcgaacttatcaaagcccaacaccttgaacattggagagataacaatgtcagggactatgcacaactctgccatgtttgagaaaacataatatccacctgcttcaatggccctcggcctttcctctatatgatcaaactttccgctttgcaccataacaa

SEQ ID NO: 42248 - DNA, 506 bp, Glycine max
agctttaaggttttctccctgttagggcattatctcttttttctatccagatttatagagtaagatctttccttcatctggtcttgcaccttcacccattctcattcatctacatgtttatttctattgcgattaaacggtacagatctgacaatgagtcctgtgaaggtactaataccgaggacactaacgtcgattttgaatgagtagcaaaccgagctgaggatgaagaagatgaagatacagggtttcccccggagctagaaaggatggtcgctcaggaagatcgagaaatgaagccacaccaagaggagatggaaatcataaacttgggtgtcggcgaggaaaggaaagaggtaaaggttggtatgggcatgaccacaccaatacgagatgagttggtggttttgctacgaaactaccaagacgtcttcgcttggtcataccaagatatgccttgttttgaaccctgacattgtgcaacatcgattacctctgaatcccga

SEQ ID NO: 42249 - DNA, 523 bp, Glycine max
  unsure (1)..(523): unsure at all n locations
tttttctctgtgcacctacgttcctatacacgaaaaaacttttttctctatatacacacccattgaaaaactctttctctctataccgacatgggctatataaaatctctattccttttcaaagatctcttttccccttttcaatatacactcattgtttcatataaaaatttcttttcacacattgtttatatacaaaaatttcttttcttttctttatatacgaatatgacattttgtccacaacatctctttctttctctattcttggcggtatcacgacgtttttttcattttattttaggatgacgttcctacaacagatattatcgacaataatgagataagcactaacacaacgatccaaacaaaatgtatgcacaaaacaaatgacgatcgaaacaacaaaaacaaacgttagtccctcgagtcatagaaatgagataacatacaaatgataaatgatgaaacatgaaaagaatacgaatctggggatcccacngtcatgtggctccgcatgcca

SEQ ID NO: 42250 - DNA, 566 bp, Glycine max
  unsure (1)..(566): unsure at all n locations
tgcagcttctagccaaatggacttacctgtgacttgattcctttgatagcccttttgagccttgtttccctttccttgttttgaagctcactacaagccttaagtgaaaaaccatgatatcaccatatccttaaggaattttggagctttggaattgttttgggaataagtgtggaggtttttgtttcattggataacatgttttgttggccatgcttcatgatatattttgagccatacttgatgcacattgcatattggttaaatgttgggcgtgctgaatatgatgctgtttctcaaaggctacaaaaaaaatcgaaaaagaaaaagaaaagcagtaaagttgagtgaataagatcttaaatgacaaaagaatgatgagactcttggttctactctttatgtttaaattttatctttacttctttctatcttcttatgttttcttaatatgcacttattccccattgctcctctattcctttgggatttagccacttattccatatnnttccataccttgtncttggccccattacaaactttaaagaccttttgatcctcat

SEQ ID NO: 42251 - DNA, 421 bp, Glycine max
tttaagataattgggtcggtgacatgatatctttgtcttctatgatcaagtgcaagggctcaattcttgccacatccattcttctacatgaaagttgaatttcagctcaagatgggccagtgcaatgtgcattgcctatttgtctgtgctttaaaactcaaaaaggacttgcatgaagaggcgcattatagatattacagccgttcaagagtccccataaaactctatgaaaagttggctattcagggggctcactacaaataatggtttgcttaaacataagactctcctaattatataacactattctatatttctcaaaagaatcttccacacagaaagatatgaaggaaaaccctcccacaatgtgaaatgcaagcatcacccacttttgcacatcctttttaacagactcttattg

SEQ ID NO: 42252 - DNA, 574 bp, Glycine max
agcttgaggcttcaaggttcccacccatctccatcttttatgccttagatcttccattatccaccactattcaagttttcgcgaagcttcttcttcacccatttttcttcttccattatgcacgtattctccccatttttgtcatcatatttttctcattttcttctatcattctttggtttaagaagtgctgttggtgatttgatagccttttttgtgtttaaataaggctttctcaaccttgtcttcatattacaagagtgtttcatggttgaggaaatctcatactaggtttctcttgttttcttttatccttctactgcccagctttttactatgtttccttgtgtattaaaacgttttcccaatcatttttgtaaaaacaactttgttgaaaaaaataaaatttatttcggtgatctatatatcttataaccttcggttatgaaaattttccttttaagaagaaaaaaataattcctcgtgatttatgaacttaaaacaccctatatgttcatataaatttgtaatgatgcataaagccttcatcttgccatctttttagtatcatata

SEQ ID NO: 42253 - DNA, 497 bp, Glycine max
tttatgtgaaaggatgtgactcttcactttttaatttgaatttcaacgttcaaaggcactggtaatcgattaccaaaacattgtaatcgattacagctttttgaaattaattggaacgttgtaaattcagtttgaaaacttttcaaaacaattttgctactggtaatcgattacaccaatctggtaatcgattaccagagagtaaaaactctttggtaaacatgttttgagaaaaataatgtgctactcaatttctgaggaaaacttttcatacttatcttgattaagtcttctcttgattcttgaatcttgagtcttgaatctttatcttgattcttgagatcttgaaccttgaatcttgattcttgactcttaactttcttcttgagtcttgaattcttcttgattctatcttgaactcttgaattcttcttaattctatcttgaactcttgaattggtcttgattcacttgagttgttctttgattgggctttg

SEQ ID NO: 42254 - DNA, 186 bp, Glycine max
agcttcttaatgtttaggctaaaatgagttgtgtgatttgtctttattttgtacctttagttaaaagtgggatctgatactacactatgtttggatatacattacacatgcgaaaattatgctgaaatggtctataacgatgaacgtgcacattgtacctttttgtttatgtggaaaaatacattt

SEQ ID NO: 42255 - DNA, 343 bp, Glycine max
tggagtttgcatgtccgaggtccaccaggttttttttaaagggactgttgtaactgtttccccacccattgtagaacacgttctcatgctatcctctaggaaaaaataacagtcattgtgactgacaagaaaaaccagtgcgggttttattctccaggcgtgagctattaaagatgttggttctttgttcccacgagcttaccttaatatgtttataaaggcattgctccatattgaaatattgcaacccattgccgtctttatatcctttccgcccgaattgaagccgtaatacttatgacagttggggttaaccgacaacctcaactttttttacaaaaag

SEQ ID NO: 42256 - DNA, 629 bp, Glycine max
  unsure (1)..(629): unsure at all n locations
acccgggatgctctatagtagcctgctgcatgcatgcttcatgatgaataacgaggtgattctgagatgttttgatgataacgaagatgataacagaagatgatgacaaaggtgatgacaaaaagctcaaaggtcaatcagagaatgagttcacgatattcaagatagaatctagagcacttcaagattcaagaggaaagttgatttctagaatcaagattcaagagatcaagatttcaagaatcaagattcaagagatcaagatttcaagaatcaagattcaagaaatcaagattcaagactcaagattcaagaatcaagagaaggcttaatcaagataagtttgaaaaggttttctcaaaaattgagtagcacatggatttttctcaaaacatgtttaccaaagagattttactctctggtaatcgattactagattgttgtaattgattaccagtagcaaaatggatttgaaaaagttttcaaatgaatttacaacgttccaattgatttcaaaaggctgtaattgattacaatgttttggtaatcgattaacagtgcctttgaacgttgaattaaattcaaatgtggagagtcacatcctttcacataanagctttgtgtaatcg

SEQ ID NO: 42257 - DNA, 565 bp, Glycine max
tgacaaaattatggacaattgtcttgccttcaggggttataatgctctcgggatgaaactgaactccctggtgaaaaaaaaaatcaatatgtgaagagaagagaagggagacaaagtgcaagttcaaagataataataataacaataacaacagaaaaaaggcatgaacttcagatcagcagaatcttttactgctaactaggaataaatgaggtaaaaggtttaaatttgattgtaaagcaccttcacgagtagctaagtttcctaatttttaaacacagcataaaatataaagattttgccctgtaaaagtataaacactaaaaaagataggtgacatagacaagatatagggggttgcatcaatccaggaaaagaaaaacatggactgatggtaaaataaattacatttactatgtgattctatttgaaaaaacaggaaattaagcccatgtttgttttggctctaaatgctaggaaataattgaatatttcagctctctcacaaagctggttggaaagtgattgtttttccataagacgtcgaatcaaacacaagctattt

SEQ ID NO: 42258 - DNA, 610 bp, Glycine max
  unsure (1)..(610): unsure at all n locations
agcttttgagtgaaacaatgtgactcttcacatttaaatttgaatttcaacgttcaaggacactggtaatcgattaccaaaacattgtaatcgattacaaccttttgaaaatatttggaacgttgtaaattcagtttgaaaaactttttcaaattcattttgctactagtaattggtaatcgattaccagagagtaaaaactctttggtaaaggttttgtcaaaaactcatgtgctattcaaagttttgaaaaactttttaatacttatcttgattgagtcctttcttcattctagaatcttgagtcttgaatcttgatcttgattcttgagatcttgaatcttgaatcttgattcttgattgtagactttcttcttgagtcttgaattcttcttgattcttgaactcttgacttgttcttgattcacttgagatgttctttgattcacttgagttggtctttgatcttttgagctttntgttcatcatctttgtcatcatcttttggtgtcatcaaaacacctttgaatcactntcgattcatcatgaagctttgcttctacaattataaagactttctgttaagtataggtaatagacacttaatact

SEQ ID NO: 42259 - DNA, 543 bp, Glycine max
tgcttctatacaacaaaagtcttggacaaactgatgctggacaaggatgctcatgtttttttatcttttaaaaagtaataaaactacaagtccagataaagttactactacctccatagtgcttcctatcattcaactcgagcatcactctccaattcatgtagaagttaatgcaataatacccattcaaggttttgatgatcaaaaggttgaagattgtcaacaacccttagatgatgttgcaaaaacaacactagaatctaaagttgaagtggatgttgataagagtgttgaaaatcaagtcattgtgaccaacaactctctaaacccaaacgatattcctcctatcaatttgttgtcccaagctcttaagaaacaagaagaaaaacatcaagccatcatttgggctttcactaaacaataatgggctgaaactgaacaacacaggcaagctacacaagtagcaatggctgaacagtttcgaaatttttccaaagtcctggcatagcaaattcaactggtcactacaaaaatagccagcta

SEQ ID NO: 42260 - DNA, 359 bp, Glycine max
taggccgtgtgggtatggagatctagatccagaatgccacaaagagggaaagtcctcccagatccactaaggatttgggaaaatgaaaaaaattggcagaatttttgccattattgtgcttttgagaagttgagagtgattatgagacttaagagtttgtcctataaattttgtgattggagttgcaatggtgaataataatcaaatcggtgcagagatcgacttagagtgggttggcttaagcctatctacattttgaaaatctataacattcgaacaaaagataatacattgggtcaaataaaatcgaattgaaaatgaaactttttcaatttccacatctatgttcgctaaataac

SEQ ID NO: 42261 - DNA, 559 bp, Glycine max
tatgagcctaaacttgtagcttccatgctttgaaacatgtttatagctaggaatccaaaatttggttttaggattaaaaaagcatgaaaatagggacttgtttgtaagaatttgggctgccccacgattggcactttgcacctaagtaacatgggagatgtttttcaagggtgtgtacatatatgtgtgaatatatggcataagaataccttgcaaagtgaatgaatagtaaataatgcatttcaaaatatgtatatttgtggataagtagcatgaggaatctttcaaaaagtgtacccgtgccaaagatggcacaagaatgcttcccaaatgaatatatgatgtggaattgcccctccagtatagatgaatggcatgaaagttccttttcaaatgcaagtgtgtgcgtgacgtgagattggctctcccaatatatgtataaataaataggaatggaacaacaaagatttgtatgttaataaaatacttcaaatgtgtgggggtagttcgtggtaacaaaatagttaggatatgaacatatgttattttgacacaatac

SEQ ID NO: 42262 - DNA, 579 bp, Glycine max
  unsure (1)..(579): unsure at all n locations
agcttccattagtaaggctgagagaaaatgaatattaatgacagtaaacctgaaaataaatccccactagccactaaataacttaacattctaaaaagcatttgggagggtcagaagaaaagtgtatatcaccagaacatttacgcccgaaaattattaccaaaattacaaattagataacaaaaattgaacttagttattatctaatgagcccaatattaatagtccaccaaaattgatcaactcagctcatgagagctttttatcttgtaaattgggcttctcaaagagattcatgaagttgacgtcaaaacatcttcatcaatntgcaggaaagtgacctaattaggtgcaacccttaattcaaattgattatctttctctttgatctttagtatcaggccttgcaatgctcgcttcatcctcttagtcttagaccttgtcataagacctccaatcccgtgtaaaggatcattagacgagcttggtgcacctctgtcattccctccctcttcgaaaggattcatnctcgaatctgatcttgtacctacatcaaataaagatagatcagccacatta

SEQ ID NO: 42263 - DNA, 323 bp, Glycine max
tttatgtaagacaaagatttaaaggcatttgtaattgattaaaaaaaaagggtaatttaatataggtttatgaaaagataaggaaagtagactaatattttggaaggattttaataaaaatatatatattggtaaggaaaaaaatgaaaaaagtaatgaattgtaagaatgaaaaaaagaaaatgttgagagatggagtgaaaaaaatgatgtgattgaaaatgtatgaatataagttaaaataaaaaatgtgaataggcatgatttggatatatgagttatgattgggaaaggtaaataataaattatgtaaaaatgaaaat

SEQ ID NO: 42264 - DNA, 384 bp, Glycine max
aaccggtgaaagtgtgacctttctctgtgagtgaacgactagctgtgagtgataatctttgcataaatctatgaattttagaatgaaatgtataaatgaggacaagatgaaggccatgattgtacatacacaagctcttttgaccaaacagcttaccttgaatgataattgcatactttcctacctttttgacctgaatgatattgtcaaaaatttgaaccctgaacattaaataattatctactgatgccttgtttagattttaggagagcatatggttcaaggtaaatttactctaaatttgggggagggaagtcaattagaatgaaaagaaaaaggttaagcatcagcacacacaacaaataagttgtatgttaaaaaaaa

SEQ ID NO: 42265 - DNA, 547 bp, Glycine max
ttttcaaaatgctaacaatccacaaattccagtttagaagagggtagttagaatatgcaagtctgtatatagatatgggtctgagatacaactagatcaaaatatgcatcaataccacttttgataagagtaagtttgtgtttatttattttagtggttaagtcaaacaataattggtaaattttatcaacgagtttaaagtgaaaagttgttagcaagtcaatttaaatgtagtaatatggaacaaaattcaattatttcaacttactcaaacgtaatgcaagcagcagtatgaataaaatctagagtcaattgcattctagaattggttaaccataattatgatcttgatatgaatcaatttttactaatttgtagattatagataggatgtcataagaaaaaggaaccttaaggaactaccccatctgttgctaatacaacaaattcgtcctttccagtaaggtggtgacgtgagacatctggaacagcaattaacccaaagtcctttatgcaaaaatgtccaaaaacccataccaaagcaaca

SEQ ID NO: 42266 - DNA, 437 bp, Glycine max
agcttcactgagataaatgaagtcggatagaacatatattctcgtagatcatccatcacaaaccctaaaagaagtattagattttcgcgttcggagaaacaaacctgagtggtagaaacgtagcttgatttgttggaacgattgttgagagaaagaacacagagcaaaataaggcttctattttcttaatcaaacgttggtgtttgttgccaatgttgtgttaggcttatttatagtttctctgttagcttgtaaagcacgcaacaataagatgagatataggatttttattttttattttttaaaaaaaggacattagccgtcatataaggataaactaaggcttaaaaatagatagttattttctttcataaaagataatcatttctgaaaattaatattttgaagataggttgaattacttatgaaattatttg

SEQ ID NO: 42267 - DNA, 557 bp, Glycine max
tctctcctctcaattccaacatcgcggagttttaagtgtgtgtttctccctagtcttatttgttcccctcgctccatctttttcctctcctcacttcatctttttcctagtgggctttgatttctccatgtctgcaagtgacagttcttctacattttctggtagaatcattcgtcgttgccaccatggaagacgtacaactattctaactgcaagaacaaggagaaacccaagaagaacactaagtttctaatccttcttctgtcacaagagaatcaatgatagtgattgatttgaacttacaaattgaagcattgcagaagaaaatgagaaatttagcaaacattgtggtggtaggtttttcaattttaattataatgttagttttaggggaaatatattttaggaaaaatttgtagtaacatcttttgatattataagtgttgctttgctgaagaaatattgtgaatgaaggtcctcaaggttttgttgctactgtccattactttgcaggtcctcaagtttttcagctgaaatttgatttgggtctatctact

SEQ ID NO: 42268 - DNA, 586 bp, Glycine max
agcttattaaaaacaagcatactaaaacatttttcttgtaacacctaaaagtttaaacaaaaaatattgcttcaaaacgctttaatttaatttattttagaaatacacataactttttttaaccgttacttataaataataaaaacaactctctatactatttttttacaaaacaaaatgtgatagtgggaaaatgctaaatagttgcatgaaattaaaataaatgcaaatgtagaggaattgaatatctatacataaagaaaatgaaacttgcagtgtcacagagaaatatatggatacaacccataatagtgtgataataaacaaaatacattttcatcccttctacaacaaaatacatgatgcaagctccattggagcttgtacgcctaggatcttcttcatcaatggatacctttgctttttcgaagatgaatggcagccgaatggagaatgaagagagagaggagacgccccttcaatgagaagatgagtctagaagaagctcaccaccataagaggtcatggataatagcttggaggatgaagagatcaatgaacggagagggagagaagaccacgaaat

SEQ ID NO: 42269 - DNA, 496 bp, Glycine max
tcttatccaaggctcatcttggtggtgaagctctttctttcatggcttattccctagtggatggcgcctcctctcacctcttctcctttttcttccgctgcatctccatggtggaaaatcaccattaaaggacctcattgaagctcaaagatacagcctccatagaagccccacaaccaagcttccatcaagtggtatcagagcacaatagcttcatgtaggtgctccttaaacctccattaatttttttttgctttaccttctcttccattgttgtttcttcatttttctccatgtatctcctcacatgtcttgtgctaaatgttgttaacatgattctttaaagtttccaccgattaaacttgctatagaagctagatttgattttctatggttcaaatttattgttcttgttcttgaaccatgaattgtggtgagtttaagttcctttgagttttgtcttgttatatttttgtggctgaaacctaaaccataa

SEQ ID NO: 42270 - DNA, 971 bp, Glycine max
  unsure (1)..(971): unsure at all n locations
cacgctcaactgtggtctcactaactcctgccctctntctctcttactcttggtatctntcactcatacctgacttctttatatacacancnncncacagaagagnatttgtgacttctttgcaccngcacctctagagtcgacctagcagcatgcatgctntntaatgaacgccagtgcagagattatggaagtagtatctacccccggattccccacccattggacagcctaccacatgacaacagactcgccgcccaaaactaatatggagtgacaacataactgcgtctattacctcgaacttatacagtattgatacgtttcacacagcctgacaactgtgcaaacaccgcatatgtgcattaaccctacactcggggcattcccacataaaaactacacccccctgtaaccaagaaatacaccaatgaatatgagctcctctcacttataatataagcccctgacacacatattcccatatggtcctctcgaatggggaaatcttttaattgcttttataagccaaaggtaaaattcgctccttttttcaacacaaaacattgaaaccccgaatcatatctccctccccttccaccttttaatgagaaccatatttttactcctaaattccctttgggagacgagtataaaaacctttaaggattctgaagggcctctcccttctaaaaaaaaaaaatagattgaataccaaacctgctccccaaattcataatggggaaaagaccctttagggcacgccaattcattcctaatcctgccataacggggcaaccaacttccctttatttatttctctcacattggggggcctaaacttacgcaacttcttttatcaacaaatataatgctgtgtttattccccacaattatttctcaaaaaaaaagacccggaaacccccttgtggatagacccctaccgtccttcactttgggttcaccgggac

SEQ ID NO: 42271 - DNA, 403 bp, Glycine max
ggggaaataataaatacccaagcctcttaatcctacctggtgaaattgttggttctttatgcccccctctaatgaccattgcctcacttctggcccttaattggttagaattttaaacccttttctcaattaaaattttggcttccattaggggcatgtttctaaaggcttcccccctggccaaattcattaaacttcttttcctggtgctgaatcccttgtaaaaattttggaaggaaagcctgtcttaaatctgggggtgaaggcaaataacacataattttttaaaactctcccaatatttatataggctctctccacataaggtcttttcactgaagtggcttaagcccgaaaaatcttttctgaaggttgggggcctggaaatttggaaaaaattttc

SEQ ID NO: 42272 - DNA, 507 bp, Glycine max
  unsure (1)..(507): unsure at all n locations
agcttgcacaattacacagacaaacatcaaatttcccattttatgacacactctcaattggggtctctcaaattgattccaaccttcaacaagttcaaagcttgcaaaaaatgggtggcacaattacacatacaaacatcaaatttctcattttttaagacacactctcaatcggggtctctcaaattcattccaacctccaacaagttgaaaccctgcagaaaatgacaaagtggagaaaaaaattaaggtgtgtgtaccaatggagagatctctaatggcagaagaggtagcaacagtgcgctcaaattgggtcatctgaccaatcttctccctcacagtcatgcgggaaagaaggtcttcacacgagcttcaatttgctcttcgggattcttgtacacgcaagccatggctccttggttgaacttgaaggtggttagggagtgagcgtgttaatgtttctgtangcaaccaacaaacgatgaacacaacataccagaacagaac

SEQ ID NO: 42273 - DNA, 544 bp, Glycine max
tgttcatccaccttttttatctcacaaaaacccttaagacctttccttgccataaacctagttctttccctttggatttcgttcctccattaagaattttttatgaaaagcatacgaggcggaggtggtgatggtggtgccattattccacttcatcatggatgtggaaatataagggtcactactactaacccttccatgtgttcagttggtcctcctttcacagccatagaaaggtttttgtggggacaacagcaacagacacagtataacgtagcaaacaatggccatgcaagtatttttggtggttcaacctacaagtttatgtggcctaataataatagtactactcaagaagtgagctatgctgaacagatcatttttgcaaataataatgaagaggctctgaattggtcacaacaagtgtgcttcaaagaagatgggaagaatattgccaaagtggtgggaagaaaacctaagaaagggtcttctgtgccctttgatcaaaagacagtggactgatgaaaaagacaggttgagtaat

SEQ ID NO: 42274 - DNA, 352 bp, Glycine max
agcttagccctagaggagatggaccttttcaagttttggagaggatcaatatcaatgcctatagctggacctcccagaagagtatagagtcagcaccacttttaacattgctgatttaattccttttgcaagtggagctaatattgaggaggaggaactaacaaatttgagggcttttcctactgactgatggaagggatgagacatttcctcctaggacaggaccgctccttctatccactagcataatgctccaataagattgtgctaatcctgctataaaatgccttaagacatgaagcatactcctggtaaatgtgcttggtgcattagcgaggctgaaaggcattat

SEQ ID NO: 42275 - DNA, 558 bp, Glycine max
tgtaagcccaaagtattcttataaaaaaaaagatggctaataagggcagaaaaaaataagaggtgtcataagtgctaaggtaaaaaaaaaaaagtaattttgaaataagggcagaaaaagagaggtgtcataagtgccaagaagaaaaatgttgttagaggaataaaggctgaaaaataaataagcctaggcagaaaaataggtgaaagtttttctaaggatgcatgctctcttataatcctaagtttttgaaatcccagaaaaatcatgatttcttatttagctaggccccgttacaagccaataaaagtccttagtgaggaaacactacccttgtgaggaaagtgaggcaagccaacttaattgatttccgatactaactattttcatctcattgttgtttgtgcttccattgtgagattatggcaagtgcacaaaggaccagttgaaagaatttgaaaaaattgcaaatattgaaagtgttggaacattcggagtctgctctcattttttgtttttgcttgaggaccaacaaaaatttaattttggggaaatttg

SEQ ID NO: 42276 - DNA, 524 bp, Glycine max
  unsure (1)..(524): unsure at all n locations
agcttggagagactaaaaggtgtaaatgactcagtatttatataatcgaaggatacacaatccctcagtctcaaaggcaaagcctatagagacgaaaaggtgcaaatgacttggtatttagacaaccggagggtatatagcccctcagtcatgaaggcaaagtctgaagagattaaagtgtaaagaattggtatttagacaactggaaggtacacagcccatcagtcttgaaggggaagtttgaagagattaaagtgtaaatgacttggtatttagacaactgaaaggtacatagccccttgattttgaaggtgaagcctaaagagattaaaaggtgcaaatagctctagtatttagatgaccggtacacagcccctcaattntgaaggcaaagcttgaagagatgaaaaggtgtacatgactcagtatttagacaacatgagggttcacanacccttgatcttgaaggcttancctgnagagattataanggtgtaatgactcaatcttaaggcaaagtctga

SEQ ID NO: 42277 - DNA, 274 bp, Glycine max
tcctctttcttttcttctctttttttcccccgcagccgccccttttgaccctcgaattctggggccttaaaatctccgcctaaccagagaggaggaaccaaagttgtttttccttacccactctaccctttcatacaagaccactaaatctgttgcgccagagggcttgtggtacaaaattttttaatagaaaaaccctaattatccgtttacaatttttgaacttatgatcctaaccttcactgagggggctaaacgagctacaatacccccc

SEQ ID NO: 42278 - DNA, 419 bp, Glycine max
agcttgttgttttttagctagacaactttttattactattttttattttctatatctctcttccatgttattcttttcttgctcgctctctttttgctcctttttttccatgagatatgggtgctacctaaacatacgtatatttttgtgaggtattttgctatatacatgcgtgtccaaggtatcttgctacctaaacatacatatatatgttttgagagatattattgctatatacatgcatatccaaggtatgttgctacctaaacatacatatatatattttgtgaagtatttttcctacatacatgcatatgcgaggtatctttctacctaaacatacatatatattgtgtgaggtatgactaccttacgagcttgtgcttgttttatttaaattcctacgatcatgagcaact

SEQ ID NO: 42279 - DNA, 501 bp, Glycine max
tctccctctttttcctataaataggggtaggagggcataacaaaaatgttcaaccctcctggtatctgaggatcacttaaaattagtgagaaaaattatttccgtaaaaaaaatccaagccaaggcgcttctgtaacgcttccgagacgtttccgtgggtgatttcgcgaagattttctgtcgttcttcggtcttcaaccggtaagttcccgaaatcgaactttttaattcattctatgtacccttagtggtccccacttgttttgtgtgcttttatttttatttcatttactttccgtacccccttttgacgtgctttagtcatttatttaagtcattttctcgcctaataaaaaactaaaataaatttccaccgatcatttgaattgtaatgtcttttaatttctgttaaaataaaatccgaccgttcgggcatgccgtaaccacgtttaaaacaaaaaaagaggcgcaataataatcttttaatcaaaaaatatcttt

SEQ ID NO: 42280 - DNA, 395 bp, Glycine max
agcttgtaggattatggggtacccatcacatgtggtactatgtggcggtcgggcgagggtgcacaacaagtgttccacatacacaatgcgcgcataaatccaccatcccctgttgcccacctacaactgagctcacgtactgccacgtagcccatatcctcgtttctctcaacaccgggtgcccatcaatcctcccaagcttccacaacatccaagcaaaacaacattcaaacggcacaagctatcacagccgagcaaaacatagcaaaggctgagaactctgctcgacacaccaaccaaaatcacagcttttctcacttaaagaccccaggaacaattactttgctgcagggcatgagacgttggattaagctcaaactattactggaagtcta

SEQ ID NO: 42281 - DNA, 522 bp, Glycine max
tgtgcaaatcaagtcactcccgcattttatctctagcatgcattgtatgttggtctcgtcctttgtcacgggaagccggaaggtccatatcaccttcttaattgtacacatggggcactgcgcccccaaatgcgcaagtaagaagagataattttccaggctctcgtgtccgtaaaatgcattcatatcatgcatcgcataagcatctcttcataacatcataatggacatatcctgcatttgtccgttatcatattccggcctcacattttgcatgagtcatggcatcatcatgcatatgcgttcaacaaactttttgatctgcaaaattgcataccatttgttttcatgtttgctcatccttgtgttttcctctacaaaacaaaaacaaaaaagggggaagcgtgaaacttcacactacattcttagtttcatgtgttaggcaccacgagccaaccatgttgggatcataaacccatttcacttaaaaacaaaataattgaacatggtacctaatgcatg

SEQ ID NO: 42282 - DNA, 482 bp, Glycine max
agcttccatcaagtggttatcagagcacaagagcttcaagttggtgctccttaaacctccattaatttttttttctttaccttctcttccatcgctgtttcttcatttttctccatgtatctcctcacatgtcttgttctaaatgttgttaacatgattctttatagtttccaccgattaaacttgctatagaagttagatttgattttctatggttcaaatttcttgttcttgttcttgaaccatgaattgtgctgagtttacgttcctttgagttctgtcttgttattttttgtgactgatacctaaaccataaaattcttacaaatatattatagtagaagaaaacctcacaaatctggagtgacttgttcacctattgtagttttgtcatagaagtcatgtctagtcatgaaacttgtcacataagatttcttatgccgcgctgaattatatattcttggagctttgtctaactcatt

SEQ ID NO: 42283 - DNA, 516 bp, Glycine max
ttacagcagatgccactctactcctagttcttgaaggatatgctaacaaggaaacataagtatattcaccaggaaaacatcgtagtggaaggaaattgttgtgctgtgattcaaaagatccttccaccaaagcataaagaccctgggagtgtaactatttcttgttcaattggagaagtcattatgggaaaggctcttattgacctgggagccaacattaatttaatgccactctccatgtgcaaaaggttgggagagttggagatcatgcccactaaaatgactttacaactggctgaccgctccattaccagaccatatggagtaattaaagatgtgctggtcaaagtgaaacattttatcttcccgacagactttgtggtaatggatatctgtgaagatattgacattcctgtaatattgggaaagccattcatgttaactgcaagttgcatagttgatatgggtagaaagaagctggaaatgggttttgaagaacagaaaattgatttttga

SEQ ID NO: 42284 - DNA, 1137 bp, Glycine max
  unsure (1)..(1137): unsure at all n locations
ccgcagcacatgccactattgcatcgtcacctaccacctctctcatctgtatcttgatgaatcagtatatacttcttnaatcccccctagaagagnnttgtgactccactggaacgccacgacctataaancnacctgcatgcatgcatgcttacccatagaagatcgggacaggtgcccacgcttttttgtaagtggaacagaacttacatagcccttgatccatcccacaggaccattttagacaccaactccgttctacatgacttgcgtatttacaacatccggtgggcgttattcaaccctcaccactcgaaggcgacagcataatatagatgtaaatccctcatagaactcggaaaaaataccttaatcgagataggtcccaccaaatacacatcctatgcctcactactagcaccactaacgaggatcacatacgcgtaatcgtctttcccacttctaacacccttgaaagcgtcaaagaccccctagcttcaacacagtaaaataccctagtctgcatcntacacagcgctcactcaacacttctgcacttaaaactactgccttgtcctacacaacaccattgtcattgacaagaccgactctctctcatcacaactacaccttctacatcttcctatatctcgccgtgattaccttcactcagtgtagcggatccaccacacccccctcgcgctattgacagcgctatgcacttgcacaattacaataacagagtaacactacaccactatgtgatagcacacacttataacgagaaatctcgactataagaacctaacaattaaatcaacgataatacaactttctccacgttagggaacactatctccactacaacatataaaagcggctctaggccttattgatacacanaccttctctcacaacattttcttagccgcatgccattcataatcctctataccatctgagaggtaacacccacactctaatcacacatgaaacagacagccctcatccacgatataatacgacatcgccgtctacacatctctgacaaacgcagacacacctcagtggtctcttttctcgtaccataatcacaccacatcattcaataagatacttcataattctttcggaccc

SEQ ID NO: 42285 - DNA, 511 bp, Glycine max
taagctcgttgttgctgccccacagagcccctcggaacttgttccggccgtgctcttccctacgagccctttctgtctcttgctccaaggccttggtggtagctatatttacatttcttagttcggcattctcctttcgcatcttaagagctgtcgatttgaacctttctttgactgtttgagcttgctctagttctgccctggggtctgcacctcttcgtcttcctccggtgcctcaacttcctcccctttagcggttctcaaccacttacagtagccaccgatgggcccattgttactgcctctgagctctttgtccttcttttgtaccacttctcatgctttgcggaccttccgaagtgtctccacgttggtctcattgaaacctcgtgaaatgacaggcgcgatttcttcctctattggtgctcctctcatagggtagccaagttgtcttataaaaagaacgggattatagctgatgcaacccctcgtccctatcaagggaacattc

SEQ ID NO: 42286 - DNA, 1007 bp, Glycine max
  unsure (1)..(1007): unsure at all n locations
agacatactatacatataagtcttgtaattactaaactattctccaaacatgtgtagtgtaatatagagtatttataatcactattntannncncanacncagaaaagagnnntttgatgaacactagtacgtactgcgngacctaaanaaacaacctgcacgcatgcangcntggtgtagacttaaaacgtgtgaaatgacgtcattctttttattattccaaagatacacaatccctccgtctcaaaggcaacgcctatagagaccaaaaggtgctataagatcttgatacttaggaccacctgggacataactagtcgggaccaacatgatggcagatgattattagattaatctgttgagaatgggtaatcatactactggaaggtgacacagcccatcaattctgaaagctacatgagaagatatgtttgaccacatcacactgttgttcagactactgaagcgtgaataacaccctagactttgaaagagagacctaaagacatttaaatgcgctaatggcactagaattgaaaagaccggcgcacaacccctcagctataaggccaagctagagacaataatagtgtacatgactcaataattggacagcttacagttcatacctttttagaacaagcgcacccctgttatataattccgaaaataacaaaaaaataaccgcatctctcatcagatccttctacacgaatttgaacaaacccacggtatacatctctattgtgcaaaagatccggaacaatcttgacagataaatccctgttcataggacatcatggaataccttcctttctccccaaccacatgggaagatacaatgacaaaatttacaaaactccctccccatccacagggagaactaaaccagcctttatagctctttatgtcctcctaacaacggggaaacttgcgtcccttaatattatgacattctcgtttgggcaacactattttcataccagcaatcttatatcacactccc

SEQ ID NO: 42287 - DNA, 503 bp, Glycine max
tctcaaggaggtgagcttagttattagaggggtgtgcctagctaagctctagcttcttaaggaagttttctcaaagaagcttctcaaggaagttttctcaagaaagcttctcaaggaagctacctaatctataaatagaagcatgtgtaacacttgttgtaactttgatgaatgagagtcttgtgagacacacttcaaacttcaaattctcctcctcttttcttccttgaatttcatgctcccccctctctctttctctctctctttcttttcctccattgaagcatcctctccaagcttcttatctaaggcacattcttggtggtgaagctccttcttccatggcttattccctagtggatggcgcctcctctcacctcttctactttgtcttccactgcatctccatggtgaaaaatcaccattgaaggacctcattgaagctcaaagatccaacctccataaaagccccacaagcaacttccatcaaaatacatatctcg

SEQ ID NO: 42288 - DNA, 538 bp, Glycine max
agcttcttattcttatacaagatttaaaaatattcatatgtttctcattctcaagatagaactcaacttgaatttttaacttatttttattgagtctcattttatcttttcccacacacaacaattcaaattttgacttgggaaaattatttttccaatgattaagcaaccttgcttgtagtcatttatacaagcaacttatgtaagcattttaaagaattcattaatttgttctaatagtattctcaggtcagttaactacaaacaattatgatttcttcaggacacacatattctccttgattctcttgaaattgaactcgttatgtaccttaattttactgaatggggtgtgattctgtgtatgtttaggagaaaagaaaggataaaatgtcttcgtctgtggacatgattttgattatattgtcatcttaaattcaggggaagaaggaggccaaggttttcttttttcttttttaagggtatcatgattacggtggggactattcacaatattacttaattatgattattatct

SEQ ID NO: 42289 - DNA, 485 bp, Glycine max
tgcgaataagatctcgaatgaaaagaatttcttaattttattggttatctaaacacattataagaatctatggaaggttctaaagctatctatctgtctgaacctaaacacatttggttcaactgaatcatcccacgattgaaaaccaggtagccgtgtcatttaaggaaaacatcatctcgtaaccatgaatatatttgaaagcacaaattgtcttactcttttctgttaaattttaggaaacaactgatgaacaacactagttcaaatgggtttttagccgaaaaaccaaaaacagtgtgcatggctatatacaagttacaagatgccattatccttgtggagacgtcaaattaaaaaggttctaaagtaatctcgtgcaaagtacaaaattcgggagttaaatccttttaagattacagtttatctagggaaaatcagaactatccctagagacaagcaacaggactaaaaagcctttggaa

SEQ ID NO: 42290 - DNA, 491 bp, Glycine max
  unsure (1)..(491): unsure at all n locations
agcttataagaacaaaattgccttaatcatttccaaatatgcatgtgaattaggacacatcaacaagaatcaagccaaggctattgtgcaagcaatcaatggggcaaaacacaccaaatgattataatgatggatggctcaaattctcacaaaggtaaaatcatcactttcaaattgagctttcaaaactatcatgacatgtagagaagaatcaaggatttcaagtcacaaaatgtcaagaacttttattttcaaaacaattacccatttcttgaacatatcctataattcaaagaaaaacatgcaaagtcgtacgtgcacacgaaattgacccaaaatattaaactgaaaatccgacgaaactaacaacattaacaaattaacacaactaacaacttaacagaaccaacaaaactagcanaaccaaagaacactcccccccatacttaaacaacacattgtcctcaatgtagcacaattaaaagataaaa

SEQ ID NO: 42291 - DNA, 364 bp, Glycine max
taatgtctacatgtggaaagtaaaaaaatgtttgctctttcactcggggaagatgataattatcacctcaatacacaatgctaaattttctctttattattcttatagaatatcttgaatgctaaacatattataatttcttgtatgggtgttggaaacacttttattttactatcatcttattaatcatatttaaaatgtcaatgtttcactatgctatactctcaaaatcattatataacttacgcttgtgctaaagcgattgatgtataatatgctgaatgaattcgttcggcgtccattcaatatatatggcatatgatcgagttgcccggcctagtcaccaatttttaatatgggggtg

SEQ ID NO: 42292 - DNA, 349 bp, Glycine max
agcttgtaggattatggggtacccatcacatgtggtactatgtggcggtcgggcgatggcgcaccaaaagatgtgcacatccacacatcgcgcataaacccaccatcccctgttgaccacctgcaactgagctcacgtactcccgtgtaacccatatgagccgttctctcatgaacgagtccaactaaatattgtccagcatgtcccggactcaagtaattcaacattcaaaccacgcccactatcacagacaagaggaacaagggaaaggcttaaaaatatgttcaaaacaccaaccaggactcgcagattttctcacttagagaccccacggacaagtgttttgtgc

SEQ ID NO: 42293 - DNA, 537 bp, Glycine max
ttgaaatggacattgaggtatctaaatggatctttgaaagttggattaaggtataagaagatagcacatgaggtagcaatcacaggctatgtagatgcagattttgcaggaaatgtatacacaagaaagtccttaactggatatgtgtttactttgtttggagcaacaatcagttggaaagcaaatcaacaatcagttgttgctctttcaacaactgaagcagagtacatggccctagctgaaggagtgaaggaagcaatttggctaaaaggaatggtatatgaacttggaatagcacaaccttgtgtcacaatttactgtgacagtcaaagtgccattagcaaatcaccaaatttaccatgagaggacaaagcacatagatgtgaaactacacttcatcagagatgtgattgaatctgaaaaggtaaaggtggagaatgttttaacagaagaaaaccctgttgatatgttcacaaagttcctatccagtgttaagttcaagcactgccttgacttgattaattttgaagatgccta

SEQ ID NO: 42294 - DNA, 369 bp, Glycine max
agcttgatgatgttattaaaggctttgcactacctctggcagtaacagtgacaaagatgatcataagtacgtttacaacttgacatcaaattttacttgagattttataatttctgatacttggttcacttggacataacagtggggagcaattgatggaagatgaatctcaaattgatctaaggagaaggaagaaacttgttcttgatggtgatttggaaagacaaatcaaagatctccatgagaagtaggtttgaccagatcaaacttttgtctgaactttggagcatgatttaaattagagccttgtcaaaaagaaattcagccttttttatttccatttgtttacatcattggtacaaacattct

SEQ ID NO: 42295 - DNA, 554 bp, Glycine max
  unsure (1)..(554): unsure at all n locations
tgcctcaaagaggtccaggaaggacaaggcggccgaaggaactagttccgctccggagtacgacagtcaccgctttaggagcgctgtacaccancagcgcttcgaagccatcaagggatggtcgtttctccgggagcgacgcgtccagctcagggacgacgagtatactgattttcaggaggaaatagggcgccggcggtgggcaccactggttactcctatggccaagtttgatccagaaatagtccttgagttttatgccaatgcttggccaacagaggagggcgtgcgtgacatgaggtcctgggttaggggtcagtggatcccgttcgatgccgacgctatcagccagctcctgggatatccgatggtgttggaagagggccaggaatgcgagtatggccagaggaggaaccggtctgatgggttcgatgaggaggccatcgcccgactgctatgtataccggggcaggattttgcccggaccgctgcaaggaggcgagtgcgaatcatgcgcaccaacatgaccaccctgacccagatatggatgacgt

SEQ ID NO: 42296 - DNA, 507 bp, Glycine max
tagcttaaaaacccaaactttttaaaacttctatgctacatgacaagcatgacgcatcgactccaatcaagcgcttgctgatgagcaaaccatgaaaatagggacttacaccaaatgattataacgatggcgggatcggcactttgcacctgaaaaaccagggagatgctatttcactggtgtgtagatatatgcgaatatatggcataagaatatgttgcaaagcgtgtgaatatatggcatgaaaataccttgcaaagcgaatgaatagtaaataatgcatttcaaaaatgtatatttgtggataggtagcgtaaaaataccttttaaaatatgtatatttgtggataagtagtataagaagtctttaaaaaaaaatgtacctgtgccaaagatggcacgagaatgcttcccacatgaatatatgatgtgggattgcccctcaagagttacgtagatggcatgaaggtttcttttaaaatgcaagtgtgtgcgtgacgtgagatt

SEQ ID NO: 42297 - DNA, 442 bp, Glycine max
actctaactgtctaaatattggacttagaaaactttttgttacctcactaaaattcgatgaatatgccctctttttttcatcggtacggattcctccctttgtaaaacccaaatgctaattttattgcggcacttatacatcaaacatttgggaagccgttgaaaacgcaccttttgtactctcctttgtggcttcaaatacaatatttaaaagacctacttaacaatggtctgaaaatcataaaatatttttgtcgtgcgctttaaaggatgagaacattattacttttgccctacgaatggattaatttctcacggtttgacattggaagaaggctaacgatatgtgggacactcttcaattttcacattatggaaccacttatgtgacaccatctaggatgaatactttacctcatgactgtcaattatttaggatgaa

SEQ ID NO: 42298 - DNA, 335 bp, Glycine max
  unsure (1)..(335): unsure at all n locations
gcttatatatatatctatatataaaactcaatacaatcatatntctttcttcttaattntatcttgttcgtaaaaattcaaatactacataaactaaataatgaanataaaaatttatttgaataaataattaattaaagttcttaaaatatttttatgagaatggggggaaacatgataaagagaagacgtaaaanattatattcattntaaaaaaatgaatttttaaattataagataattaaagatgtttatttcttgtgtacaaactattttgttgagcaattgtgagcctagagcccaccaatgtattatgttgtaatgaagcttattca

SEQ ID NO: 42299 - DNA, 394 bp, Glycine max
  unsure (1)..(394): unsure at all n locations
gtgtgtgtcatctgataaaagtgttcgttggtgcattanatccacctcaagtccatgttgatacaccactctgcttgtctcccttgagacacactccagtaatggtgaaatcactttagcgatgagcacgtctgtccacaacatgtagtgtgtcttttgagagaaagagagaggttaatttttttattgttctcttacttcctttgccttcgacagatcctagaatgttgttcaaacattctctgtanaatgaatctcaacacataacaattaatttagtcttaaatgcttactaaaacttaacatttgtatgctttcgtttgatctatcanatgcattcatctcatgacatatangatgntagctttaaancttataattatttgcatctaat

SEQ ID NO: 42300 - DNA, 257 bp, Glycine max
  unsure (1)..(257): unsure at all n locations
tcctgnagatatgtctcggaggtcaagaaaccttgcggacgtcaagtggggtgctattgcccaaaaccaagcttgaccaatcccgacccaacccgggcatattcggtcagtgagaacctgtgatgtacctaagcaggcgagctcctggcagtcaacagattaaaggaacaaagaccacaaagcaaggaggcttgtggtggctggccagctgtgaaacttgactgatatgtgagatatgatctctggtaatcgattac

SEQ ID NO: 42301 - DNA, 238 bp, Glycine max
tgagattctcctggactctactatgggcaatttcattggctcccttaatcatgttcaattaagtgggaagcttaagtcttttaatcccaaagacgtaacttagttaccatgtgagaggaatttggataaatgaaaatagttttggctgttatatgcatgagtatatcgatgctctgttgcgacaatgttttataaaaaagtacctaccacatagagagtggctatgcaatctggaatg

SEQ ID NO: 42302 - DNA, 457 bp, Glycine max
  unsure (1)..(457): unsure at all n locations
ctggtagcagtaaaattattaatcagctatatatcacgggtgatattaaataaactgcctagttataaattatttcatgcattgggctgataatagctagtcattaagatctctatacacaaaacagaggccttcaagttcaatgaagttaactacttcagtacttcatatatgggacgcagtatatataaaatggatacttctttgccgaaaagattaattagtataaatattttaaacattctatatttaaaatggatactttgtaattaacaatatatatatactcatttcttcttttaaatgaatacctgttaattntatttgattacatttaactacacttgtcgtacagatttngaaaccagcttttacaataatagctgatcacgagatgaaatgaccttttgtattgattcgtggcacatatagtatcaagtacactttaatagctgta

SEQ ID NO: 42303 - DNA, 386 bp, Glycine max
  unsure (1)..(386): unsure at all n locations
agctgtgatctaccaccaccgccgccaccatcatcttagttntctattattgttaatattactagtactttgttttctagccatgtatttggctatattatgacatttggataatttagtatttctttattcgcatggtttgattgaacaattatgaattatgttatatgactatgtggtttttatatatttgatctattcatgtttcttgcttcatgattggtttatattcttcaatgtatgacttacgaatgattaatagtatatgattgtcttatacttgttacgcactttggctntttgttgatgccaaaaggggagagaaatacgaattaaatcaagaactcacataagtaatcaacttaatttcaaagtaagcataaact

SEQ ID NO: 42304 - DNA, 472 bp, Glycine max
  unsure (1)..(472): unsure at all n locations
cttgagcttcaagccttggcctntatgttgttcaccatgttgctcccctatctctagcatcttccatagacaataaatgactagcaaatcatggttactcgcttcttggagtgtgccaactcaaggcaacacagagtgcatgcaaatccagtgcacaattctcccaaaagatgtcaagaatttggatttaaactcatcatcattctccttcaataactttttcataatcttgctctntttgaggcatgtgatgtcaaacaaatcaccatagagccttttgctgtcaacatgtacccncaaaagatttgacaaatgcttttctatgattagaaccttagtactcttcagaatagcctttaaggtgaagttggtattgtccaccaccagagcaacaaagaaatctttaccaaccttcatagacaagtcatgaatataaagaccctatcacttgatctcacaataatgtaagatg

SEQ ID NO: 42305 - DNA, 376 bp, Glycine max
  unsure (1)..(376): unsure at all n locations
agctggagacgaggaagtgtagaagggtgaaacttcctgcntttattgttgaccacagagtggtacctgcagatatgtcgcggaggtcatgagaccttgcggacgtcaggtggggtgctattgcccaaaaccaagcttgaccaatcccgacccaacccgggcatagtcggtcagcgagaacctgtgatgtacctaaacaggcgagctcctggcagtcaacagataaaaggaaccaagaccacaaagcaaggaggcttgtggtggctggccagctgtgaaacttgattgatatgtgagatatggtctctggtaatcgattaccaaggaggggtaatcgatacgaggcttaaaatgaaacaggacgctagatggctct

SEQ ID NO: 42306 - DNA, 324 bp, Glycine max
  unsure (1)..(324): unsure at all n locations
ataagcgcgggtctgggagacaaaggtcaagtggtcgcgatatacgaagatgatgtttcgagtacattagattcggtacgaccatgccctcctgatttccagctgggaaattggcaagtggaggaacgccccggcatttacgcaacgagcataatgtaaacctttacgggtttaaaagctctatagttgggcctaggctttagagtttatccttttgttaaggctttgngtcttttgttgttgattntataatacaaggatctttcttcatctgttcctacgtctctacccattctcattcantttgcatgttacttctttttc

SEQ ID NO: 42307 - DNA, 338 bp, Glycine max
  unsure (1)..(338): unsure at all n locations
gagcttngtgatcctcaatctaaggatctngacaggacatgggtagtgagcggacaaaggttgaagcaatatcatggtagagctattgaaaaatcgaacactgttctatgcttcgaaccaggataaattgaagttgcgtcaagctagtgacgttaaaatagcgcttactgtgaggcaacccaacatttctttcccttttctctttttcactcttatctcttgcatgtagttaggataattgcttgtgatcgtaattaatttttgcaacttgtctagtagtgaacaacgaggtttttaaacccaggtgaatagatagactaaaaagactcagataattc

SEQ ID NO: 42308 - DNA, 147 bp, Glycine max
agcttgcaatctagtatcttccaagacttggctcgtacgcaagacgagcctagatccccgaatttcgacaaaggcttacaaggtgttctccctaagattctaaatgagataaggttcttcaggaaatatgcacaccatgttgccatt

SEQ ID NO: 42309 - DNA, 501 bp, Glycine max
  unsure (1)..(501): unsure at all n locations
tttagcttcatcacaattntagctttcatctcctacaagtacttattgaaaagttaacttataaatgggatctgaaagacaacaaatgatagttaccatataaccagtccttgaagtagacatgaagtgcagatgaaaatntctcgttgcgactttcttctaaaggtgcttctcgtaagagttgccttatctcccctaacagtgacttaaaacaataattgaacaaagagaaaattgatgaacttgaagtgaaaattgagagagtnttaatcattttcactanggtccatcgataggtagacaaacaagtcatatgtcattagatgtgagtattgtgatgattacacaaaaatctaatgattcattaaataattacattgttagaatcactagagaaactctacaagtacgcaacctcattagtggcttgagtcanaccctacaagtacgcgacctcatttgtatatatgcatttgtatgtcaatattttggataaatatg

SEQ ID NO: 42310 - DNA, 368 bp, Glycine max
  unsure (1)..(368): unsure at all n locations
agcttgcttctacagaatattccaccaaagtcttgatagagagaatcttcgatcactattgtcacaaatatggaggaaaaggtggattttgatgaggttattccttttaacatgtgattttccaaatgcttagtggagcttcagatcttgaaataactatggcagcttctagcaatggaactaaatgatcatttgtcggcgttcaagttggtgttgttgtacaaaggagcttcagccttgataaagtatagtgcgttcccattatgcaaaaatccatgatgctgaactagttntagtttttcctatcgagatcaatcgattcactgctagacttaagtgagaaatttaagtccatctttgcaactagt

SEQ ID NO: 42311 - DNA, 201 bp, Glycine max
atctgaaacactacatatgatcgttaccatataaccagtccttgaagtctacatgaagtgcacatgaaaattctcgtttgcgactatttctaaggagcttctcgtagagttgccttatcttccttaacagtgactaataacaatcattgaacaaagagaaaattgatgaacttgacatgataattgagagagttctaatca

SEQ ID NO: 42312 - DNA, 204 bp, Glycine max
  unsure (1)..(204): unsure at all n locations
ctaactatacttgagcgtcgattttacgactcatcaactcgagaaagttcgcgctgagtgctcaagctcaaattcaattacagcgtttattctcatggngtgattgaacaaacatgagagttaagagttattgtcgtttgagttggctcataggatcaacattcaatttcgagcgccccgatatattacctcactgaatcggac

SEQ ID NO: 42313 - DNA, 344 bp, Glycine max
actcggatgtcttattgagtctcgtaatatatcgacacgctcgagattgaatgttgaagctctaggcctattcaaacaacaataacgttgtactcggaagtgcgattcagtgacgtgatatatcgggacgctcgaaattgaatgttgaacctctgagccaactcaaacgacaataactttttactcggatgtctgattgagtcccgtattatatcgtgacgctcgaaattgaatgttgaacctctgagccaattcaaacgacaataactttttactcggatgtctgattgagtccctaatatatcgagacgctcgaaattgaatgttgaacctatgagccaatt

SEQ ID NO: 42314 - DNA, 411 bp, Glycine max
  unsure (1)..(411): unsure at all n locations
agctntatcatttatattatggcaaggaatgaattgtgccatcttagagaacttgtgaacaactacaaaaacaaaatccttttggtccttcaacccttgaggaattttcttttgtgaaagctcaatttaattnttattaaatgttttgcattcctatttgaaaatacttctttaaatcccttgaaaagtgactcatcacctataaacaaagggtggttagaatataaaacttcacattcctcattacaacaggttaggatagaaacaagagtatttttcctttgctttatctttctctctctattctttctctntcaactctntcttttaactntttttctctcgaanatctttctctctcaattgtttttctcttaaaactttctctctcaaatctttctcaaattattt

SEQ ID NO: 42315 - DNA, 407 bp, Glycine max
  unsure (1)..(407): unsure at all n locations
tctagcactggagtagatgacttgataatgtattgcttaatctcattattttaaaaattaagaaatcattttgcaattataaaatctaaggtgtctcaagttaagtagttactctaacaaatttaatattaaaatagatttgcgtataaaagtttttaagtctatgtagtattgtagaacttacaaatttaaaatatataactcatttaaacaatcatgaattgtgaatatttttgttccacgaagtcataagactgataagtgataatcatgtaaaaaaatagagtcaattaagtataaactcgtctactattactatcgctttatntatatgattaagaatcgtacccttgtcatagtttctaaaacatgtacgatatataattcgttgaagaagaatcattctc

SEQ ID NO: 42316 - DNA, 385 bp, Glycine max
  unsure (1)..(385): unsure at all n locations
agctntaagagtcttgtgtaagggccaccgcataccagcttctatcttttggngatccattgataccccatccttagagataatatgcccaagatatcctatcttagtttttccaaaagtacacttcttctgattggcaaacaaagagtgttctgatagtctggccaacacttgtctcaagtgctttaaatgaccctcctttgttttgttgtaaaccaaaatatcatcaaagaaaaccaagacataccttcgaagaanaggcttaagggtggcattcatagcacattggaaagttgctggagcatntgttaatccaaatggcattactagagaatcgtaatgcccttgatgagttctaaaagctgtttttggaatgtctgcctcg

SEQ ID NO: 42317 - DNA, 476 bp, Glycine max
  unsure (1)..(476): unsure at all n locations
tataaaatngaaaacaagaactgaacacgggctactcaacatattatagcttgtactatgtacgggtgttctcccttttcaaacctccatatgacaatccaagcaattagtttcacacatgaatcttctttcttatgtttttcatctcttgaataacacattaacaattaatatactaaaattagcaataacattactccgaactcaaaagttatgaaattagagtcatacctttgcttaacaaagcaatatataagccttttgctttacatgtctaccaataaggtgtcattttcttagcttcgcaactgtccacacactactagaaaatannggtttaatatattttttttcatgactntcaacgtaacatcntgttttaaccaatgttgaaaccactgacgttaacattatcannatgtatcatcgttttcataaagccgatgttaacataccctacacatgtcgtataataa

SEQ ID NO: 42318 - DNA, 338 bp, Glycine max
  unsure (1)..(338): unsure at all n locations
agctntggttcanaagttgctcgtgagaagatctactntgaagttggatgaggtgaccgttgctcttatagaaaatgagagaatgatgagaactgaaatgctgatgatgaactccatgcactagctgtggtggagtcttagtgagggagaaatcatttaagtagacatgatgggccaagaggaagatcaaaatcgcaatcatgtccgcaacaacatatgagtaacatgtaatgttactactgtggtgagaatggtcatgtgcaagcgaggtgcaaacaaatgaaggaagacttgaagaaattatgagatatgaacaaagatggtaccaactctcaagc

SEQ ID NO: 42319 - DNA, 376 bp, Glycine max
  unsure (1)..(376): unsure at all n locations
acctagatcttcanaccttcgattctcactcgattcttcaccaaatcacgtcccgtaaagcccaatcttcttctttttcactcctctttcacttccaccgatcaaaatccagaaaaacttcatcaaatggcagagccatcaaagaagagaaagggatcatcttccaccgccaccgctgctgcccatcgccgtcacggcccatccggagcacccacagcacctattcctccttctctgtcatctccaagatcatcaacactgttttcatccgatgatcaacgtctacggtacctttctcagttttcttctagaataatcttagaccctaagtacctagacgtagagttctttaatgatgaaacgtttgattgctatc

SEQ ID NO: 42320 - DNA, 413 bp, Glycine max
  unsure (1)..(413): unsure at all n locations
agcttaagtgaagaaatctgtntattgagagacaatgaatacttgaagatgaaggcctacaaatactaaaatctttgaagaaataggttgcgaacccatgcactaacattcaaattctttctttgaaatactctttgtaaatttctgtatagtttgaaaagactctcaaaacactttgaacatcttgagagaaaaaactaagtgttgagattatatatccatctgtaagacaattaatagtcattgcacaacaaacaagaaacctattcgtttggtatagagtcaatggtagtttggtaggacaaagaatattgtgttgtatcaagcttgcgggtagatccagaagtggtcatgacataatacttgtaactnntgaaagttagtgaagcttggtggtagccaagaactggaca

SEQ ID NO: 42321 - DNA, 408 bp, Glycine max
  unsure (1)..(408): unsure at all n locations
tatcgctattggcagcagcgggacgcaggcggtatcgccattagcatcagcgatacacttgtatcgccattggtagcagcggaacaaaagctgagtcactgcgcccatgccgctattcaaactggtgagacatgctgactaagcatgtcgccattaggactggcgggacatgccaacgtgggcagtcccgccattggcgcctgcggaacacgtaggggtggtacgttgcatgtgggtttgcagtgtttcagtctgaaaaagatgggtaggcttgcagtanggggttgcagtgtgcagatgggtaagcttaaggtttgcagttctgaaaagcttgcatgtgaacgttaaaaatntgaacgttgggtaagttttcagctataaaananatgcttgaaccttgattgttac

SEQ ID NO: 42322 - DNA, 402 bp, Glycine max
  unsure (1)..(402): unsure at all n locations
aacattcatttcgaggctctcgatatattacgggacttaatcaagcatccaagaaaaaaattattgtcgtttgaatttgctcagagattcaacattcaatttcgagcgtctcgatatattacgggactcaatcagacatccgagtaaaaagttattgtcgtttgaattggctccgagcttcaacattcaatttcgagcgtctcgatatgttacgagactcaatcagacatccgagtaaaaagctattgtcgtttgaatttgctcacagattcaacattgaatttcgagggtctcgatatcttacgggactcaatcagacatccgagtgaatagttattggtcgttgaattggctcagagcttcaacattcnatttcgagggtctcgatatattaccggactc

SEQ ID NO: 42323 - DNA, 389 bp, Glycine max
  unsure (1)..(389): unsure at all n locations
gctggaactacttcacatggatntgatggngcctatgcaagttgaaagccttggaggaaagaggtatgcctatgttgttgtggatgatttctccagatttacctgggtaaactttatcagagagaaatcagaaacctttgaagtattcaaagagttgagtctaagacttcaaagagagaaagactgtgtcatcaagagaatcaggagtgaccatggcagagaatttgaaaacagcaggttcactgaattctgcacatctgaaggcatcactcatgagttctctgcagccattacaccacaacagaatgggatagttgagaggaanaacaggaccttgcaagaggctgctcgggtcatgcttcatgccanagaacttccctataatctct

SEQ ID NO: 42324 - DNA, 355 bp, Glycine max
  unsure (1)..(355): unsure at all n locations
tgcttgtgaaatctcaggatggaccattgngtctagcccagctcatcaaagggtgagatntatttgatagtatgatgaaaaattgcaagaatctattattccgaanattaaaaatataaattgttacttgtcccttttttcttggctaggtttgaatctgttctcagcactttggaagatgcggttaatgatgcccccaaagcaccagagtatcttgggccgcattttgccaaagctataacagagcatgtagtctctttgatagagattgagcggttaatacatgagggtggagaggaaccggcgagcctcttataagctggacttgcagctgatgttcttggagcaccttgga

SEQ ID NO: 42325 - DNA, 125 bp, Glycine max
ccgtaatgaatgcacccatatacaatcaaggctgctaatttacatagatgattgacacgtacttccaaagcgtaatagtttcttacgtaacacacctgagtggctgaatttatatacatgcgtac

SEQ ID NO: 42326 - DNA, 433 bp, Glycine max
  unsure (1)..(433): unsure at all n locations
tcctcaacatcaaagtaatacaacattcaaacagcacaagctatcacagccaagcaaaacagggcaaaggcagaatactctgcccaaaacaccaaccaaaatcatagcttttcacatacaaataccccagaaacatttccttcgttcccattttttaaccgttggatcaactcgaaatttttactggaagtctctagtacataagcctacattntgaccgttgggatctactagcaaacatccagaactcattctgcactactctttccacaaccagcaaatgcatagcaatttttctgcacttgtgcaaaattctgctgcacaatttcatagcacaaatctgcacaaagagcagatttcgaagaccacacttcccctcatccaatcttgcccaaatcaaatcctacaagtcccaaatcatgtatcaatcatg

SEQ ID NO: 42327 - DNA, 368 bp, Glycine max
  unsure (1)..(368): unsure at all n locations
agtttccgactatgctcttgtgtggtggatcaagctacaaaaggagagagcaaganatgaagagccaatggttgatacatggacagagatgaaaaagatcatgaggaagcggtatgtgccggctagttactcaagggacttgaaattcaagctccaaaaactaacccaaggcaacaagggggtaactatggctcgatttcttaatggatgtgctcatgattcangcaaatattgaagaagatgaggaggtaactatggctcgatttcttaatggtttgactaatgatatccgtgatattgttgagctgcangagtttgttgaaatggatgatttgcttcacaacagcatccaagtggagcaacaatta

SEQ ID NO: 42328 - DNA, 331 bp, Glycine max
  unsure (1)..(331): unsure at all n locations
ctcagcctgctgncacggagctntacgactatgctcttgtgtggtggaactttgctcacacggagagagcgtgatatgaagagcctatggttgatacctggtcagagatgacatagatcatgacgaangcggatgtgccggctagttactcaagggacttgaaattcatgctccaaaaactaacccaaggcaacaaggaggtaactatggctcgaattcttaatggatgtgctcatgactcaagcatatattgaagaagatgaggagggaactatggctcgatatgttaatggtttgactaatgatatccgtgatatcgttgagctgcagg

SEQ ID NO: 42329 - DNA, 339 bp, Glycine max
  unsure (1)..(339): unsure at all n locations
atgcaagcttggctctggccatgagaaccatctcattcttaagatcatccatcttagaaaagatgttcctatcaagtaagttctcttctgcatcaaacaaatcaaatttgatcttctgatcatctacaccaatttccattttacctttccccatatccactacacaattggcggttaacatgaatggatgacccanaatcaatgggatgttagcatcctcttcaatatccatgacaacaaagtccatatggaatgtagattgccgcaccttgaccaaaacatcttcaatcacgccatagagccatgtaatataatgatctgccaactgcaatgtcattc

SEQ ID NO: 42330 - DNA, 370 bp, Glycine max
  unsure (1)..(370): unsure at all n locations
taatgctaagagatgatattgannattggaccactataaagtagttgtgttctagtgcaggtcattaagcactggtcgaattcctgcttgcctccttcaaaagcatttcttaaagattaaattattattccgtgataaaaatcttcaacaacacatttctcctcctttctgttgggtcaccactccggccgatcagctttgaccataaacccaacatgataaaaagtaacacacaaagatgatggcaacaattataaaaaccaacttttatatattgggcttcatcatcctgaggctgggtttccctcatcgtgcagatacaatacacgaatctagtctaataaaaatgaattttgctctagtaaaagta

SEQ ID NO: 42331 - DNA, 442 bp, Glycine max
  unsure (1)..(442): unsure at all n locations
agcttctgttnntcaatttgagcatctcgatatgttacgggactccatcagtcttccgagtgaaaagttattgtcgttcgaatttgctacgagcttcggttntaaagttcgagcgtcttgctatattacgcgactcaatggaacttccgagtgaaaagttattgtcgttagaatttgctacgatcttcgattntaaatttcgagcgtctaattatgttacgagactcaatcagactctcgagtgaaaagttattgtcgttcgaatttgctacaagcttcgattntaaatntcgagcttcacgatatattacgcgactcaatcggacttccgagtgagaagtattgtcgtagaatttgctcgatcttcattttaanatcgagcgtntgatatatacggggactcatcgactttcccaaagttggaaaaatgggttattttggt

SEQ ID NO: 42332 - DNA, 300 bp, Glycine max
  unsure (1)..(300): unsure at all n locations
agcttcttggtgttccttttcccatcgaaattcaactgtattctttaatcatagtaaaggtgaaaccactttagttcttcctgacagattagaaatggatgttctaagaaaattcaccttacctaataatgattgaagttggttttctctacttcaattcccttntgatggataatgaaacccaagaaatcacatgcagatacaccaaaagcacattttaattgatccatctttagtctatgtggtcaagatgattatctttcgattttgattntacaacaacatcatctatataaacat

SEQ ID NO: 42333 - DNA, 304 bp, Glycine max
  unsure (1)..(304): unsure at all n locations
gtgacgtgctcatgcaacaattgttagcgcgggctatacgagacatcttgctgaaccaagacctgataatgataactcgcctgtgctttntcttgcatgctatatgtagcacagtcattgatccaaccatgtctgatgagttggaaaatgatgctgcaattatactctgccagccggagatgtattctccctatgctttctttgacatcatgattcactagattgtgcatctggtcagagaaatcaaatgctgtggtcttgtttatctacagtggatgtacccggttgagcgatacatgaagat

SEQ ID NO: 42334 - DNA, 399 bp, Glycine max
  unsure (1)..(399): unsure at all n locations
agctntactatgcagagaatatccaatgaaaatactcttcatctgacttagcatcaaattntcctaagttatcttttccattattcaatacaaaacatttacaaccaaagatatgaaggtgtgagatgtttggttttctgccattgaacaattcatatggagttttctttaaaatgggtcttattaaagccctatttaaaatgtagcatgcagtgttaacgacttcagcccaaaagtattttggaagaggagtatcatttaataaagttctagcaatctcttccaaagatctatttttcctttcaacaacaccatcttgttgaggggttcttggtgcagaaaaagtatgctcaatcccatgcttatcacaaaataattcaaattctttattttcaaact

SEQ ID NO: 42335 - DNA, 384 bp, Glycine max
  unsure (1)..(384): unsure at all n locations
tccanagatgggaatcgcctggtatcatactgagttgtgggtctagaagcagtgctcttcctcttcctggatgccatctacaataaaaaagaaccatcagtttattagaccagaagtttatctagattaaaaccgaaatcaaaaactgaaattggcaacgtgcgcttagcgagatgcagctcgcttagtgcgccttatgaaaagcaacacaccggcttagtgcaacaggccgcgcttaggcagtgataacaaaaattntttttctgcataattggcttagcgagataagcactcgcttagccttatgcatgccgcaacgaatactgcttggcccacgagaggtggtgttagctcgacaacacttacaaatttgactgagtatat

SEQ ID NO: 42336 - DNA, 351 bp, Glycine max
  unsure (1)..(351): unsure at all n locations
ccttgacttggtagaacctcttgctggtttgatttgttcccatgcttgctaaagtgagacaaaagctggtgcaaatcanaactccgatatctcatgggtggaatggatgaatgcatgaaggaatgcatataacacagatgtaatctatgaatgcggnggtccggngaattcgtccccttcttagacacaatgtctaggggtagcaaagtgccccaacgtacgttnttaagaaggcgacacggaccctccgttggtttgtatacagaagggatcaagacagaacccatatgcgatgcctatgcaaaagacacaatgcgggaatgtacacagtatgataatattcactgaaca

SEQ ID NO: 42337 - DNA, 355 bp, Glycine max
ctccatcattaggattagtacctgacatctcatacaaacaaatcaaacgtaacatgacaattatagttgctgtttgaatacctcacccactcaagtgtatcacacaattatggcttttctctaatgaaacactcttgccttttaccactctaattccccttgagttcttaggcaattcaagagattatggccacaacaaagaacaattcaccaatatgtgtaaggtaaggctagagagacaaggaaaaggttaaccaagataaaggctaacaatgtttttaggcacaaatgaaggaaataaaattcagaatttaggaattcaagtaacaatccttcatgcaaccaatatattacc

SEQ ID NO: 42338 - DNA, 415 bp, Glycine max
  unsure (1)..(415): unsure at all n locations
gcgtaggtaaaagtcacatattatttatattacactgctcactatcgatggggatgttttacgttgctatattattatcattattattattatttagttatctagataaaatgaatatcaattgtatctaagttaatcgtctaagctttttacaagttcaaggaattattctatgcaataaaataattgtcttacttaaaaaaaagttttaatagttttgaaacattggagcacacattgaaaatctgcaaacatggattaactaaactcctctctctctcttaaggatgaaagggataaaggtctatttccaagggatgtcacataatcacaaaaacagagaagactatttatgtatcccanaatacctaacaaagatgagatgatatgtaacatccacaataatcaacaaaat

SEQ ID NO: 42339 - DNA, 404 bp, Glycine max
  unsure (1)..(404): unsure at all n locations
tgctgcacaactgcaggagcaaccaataacctttctagctnttccttccgaatcaatcttgcacaactgcacagggagaaagtccgccaaaattaaagcacagaaacaatggcataaattaatccattggaaggcataaatatagaatagtcataatcaatattaaatattatccaacaaaaagtaaatgaaattctccaaaggaatgaaatcaacaaggcttactatcaatgacacttacactagcccattctccaagggtctttgcacccggaactatcagtaggctaacattgtgctntgcacaaagggccttagccagtataacttagtcaggttggtcacaatcttctgctagaacgcagttgcacatcatgcttctcaatcccttttgcaccttcatg

SEQ ID NO: 42340 - DNA, 379 bp, Glycine max
  unsure (1)..(379): unsure at all n locations
agctnntgggctgaggacctatataacagtaccatggttntagtttagagagttntagggagaggagaataattttagggttggattaagtggttgaattgattacggataaatcctcgcctaggataagagacttgcttgtgaaccaagggggaacaacatgttttaattctgttatttctttaattcaaatttgcttgcggtttaatttacaaaacaaacaacccccccccaattcgttactattttattactatctgttatgaacgtttggttgatcattgctcgttgggagacgacctangatcacttcctagatactgcatttntaatgtttattttattcgggtacggtctcgatcaaatatggtgtcgttgc

SEQ ID NO: 42341 - DNA, 367 bp, Glycine max
tcttcttcatcaatagagtcattcgcttcttgaagatcaatggcagtacaatggagaacgaggaacggtgattggagatgccactctgttagtcatcttatacgactaacttttgatagaaaacttttacaaaatgtatatattttccccaatctatggctatttttgtaggattctaaataaatgttgctttgtttctatctgcgctcactataagccttgtgtatggaattaatgtcaatttctcttcaatttcaggcaaaaaggagttattttgaagaagtgctaaagttaatgtctcgctaagcgagctcaatgcgcttatcgagtgtcattctctaaccaagtcatcaatgtgcttatcaga

SEQ ID NO: 42342 - DNA, 338 bp, Glycine max
  unsure (1)..(338): unsure at all n locations
cgcttctacctatgtggcaaggcgggcttccttcactttcttgtctccaacgcgagctttgaccactgctcttccttcccgcgatgcttcttttcatgtccgcctgagtgggcttatagcctagaccatacttcccacgatttccttgggcatttatcaagctagctatgccgccgttgtctttgcctaaacccattctgggttgataaccgatccccaacataactcgggccatcattactgctgcatcagacagacaaggctgcccagagaaagagtccacggaggaaatgctgaccacctcagaagactgganagcaggatctaatgattcttct

SEQ ID NO: 42343 - DNA, 445 bp, Glycine max
  unsure (1)..(445): unsure at all n locations
acactcagcttataagagacctaaataaaggaacagagggaccgaatgtctgtgggacagattggtctggtgctgccttcttttggtatagtgctgcatctagatgtatccactttgatctaggaccatggtgcacactctatactactccataataacaaggtcattgcttgcgaaatttgtataagatttttaatttgtaaaaatcagttcctttagaacaagagcatgattaattccgtgtaacaaattgtgttagttagtgggagaaggctttcttgttgttgatgtggttctgatttattatgatgaaataaactgcttctcctgcaccttagctaatgatagtggtaggtttattggctaaacttaggtttgtggtgcatttgagggactatggcgatgtatntgttttcccanatacaagtataatggaggcatctat

SEQ ID NO: 42344 - DNA, 180 bp, Glycine max
gcagctttaacatctaccttctagttgggaggattgtctactactcctagacatagcctccaaaggagcatctgaatgcgaaggggaccttgtgggtattgccatgactctgtgcaaataaaacaaattcattaaagaataagcaattgaaacaacatataagtatgaaataaaaaatat

SEQ ID NO: 42345 - DNA, 319 bp, Glycine max
gtctcagcgtctgtgcgagacagagaccaacatgttagccatcatcatcgagtaccaagaagaattagatctatcctcgacccatgagcacaaagtgtctgacgagtacgcccgagcgttctctataaaagaggttatgggaagggtgatcgacttgttacatcaagaggcaacactgtggatggaccgatttgctcttactttgaatggaagtgaagaacttccccgattcctagccaaggccaaagcaatggcggacacctactctgcccccgaagagatccacagactttctctctattgtcagcatatgatagac

SEQ ID NO: 42346 - DNA, 529 bp, Glycine max
  unsure (1)..(529): unsure at all n locations
aaaagatagattgaacatgagacccttaatacgaaactcaagatgaacgctgatgcttgttataanagagccanaggtctgttagatctgttctcaggcatgctcaagggagactatgactcgtgcactgtcataactccatattttatgggtggaatggacgaatgcattagggattgcctattgcacacatgttacctttgatagctgaggctctatgatattctcctattaatatacacaacgactaaaggtcacattttgtactattgtactcaaaatttaaagctactcactcactatgatggtgatccttcaaaatggattcatactattatcgtatacgatgaactaacatgatagcaatgctgcatgcgtttcgatgaatatattacagatcgtagctaacgaataaagtctatacatgtaagaaaatggacattacggtcgtgaatcccatcttggtgataatgggaaacctgcctttaggtgtgtaaataaccctcggtcgttaagaatttctcactcg

SEQ ID NO: 42347 - DNA, 385 bp, Glycine max
  unsure (1)..(385): unsure at all n locations
tcttgaaccttgtttaagtatgtntcattatgttacttatgatttangaacaatgattcatagtacagcttggtatgtggtgttgtgtcaattcttcagatggtcccgctcgcatgtttgttgtatctggatgtgttgcaattgatattacatcatgtaatttccgtttgattttgtattcataattggacagattcacgtgccacttgacccgcctcaatggacactggattcaagcaaattacccagatcatttactgagacaactaaagccatagtcctgaacaggttagaaatccaaatgtataattccctccactttagatggtcttcattctcatcatgggaagcctcagattagtccccttgacatccttctatcaat

SEQ ID NO: 42348 - DNA, 231 bp, Glycine max
taagagacttagttaaaatatcatccttgggactcaaaatggcccctttaatttataatcttgtgggactgttgaggagacccattagcatcttctggaggaagctctcagagacgcccaactacaagtcaagtgctacttgaagctggtttaatagaattacctggcagtggatattgcttaaagattttggctgtagtctaggagggaccctaaaattaggatttttca

SEQ ID NO: 42349 - DNA, 353 bp, Glycine max
  unsure (1)..(353): unsure at all n locations
ctcatttcattattgcaatgtgaccaatatttgaataatgatatgaaagtaagtactacagtataatgtaaatgtcccaactccctgtgaaaaattatttgcccttggcttgacaatttaaaggctatnttaagaaccaataattntgttattgagtaaagattattggcgaattattacccatatcttgcattagccttctgttcgcgtctctcacgataagctggagaaaattcanacaagagttaccattaatttatagtcactttgagataataacaagtaatgttgaatacatctttattcttaatagtagactacnatatagagattggnaagtaatatttttttat

SEQ ID NO: 42350 - DNA, 336 bp, Glycine max
agcttaaaaagctagttattaatatattatgtatttgataacactaattgttgaaatatctaataagtgttaaatgacacaaaaataataatatcatgatttatttgaaaaaaggtaattggaaaattcaataaatatattaatgttaaaaagaaaacatataccaaaagctacaacttagcattttctaagtagtgtttcaaaaaatgctagaaactattaaaaacaacttgtttactgaacattcaaataagtattttagttagtaaaaaaactagaagctagctgaatatgttttgtcaaacatattcgaaagaattataatcaagatcaact

SEQ ID NO: 42351 - DNA, 344 bp, Glycine max
  unsure (1)..(344): unsure at all n locations
tggatcacgaaccttacgcgcattcattcaaattctntctatacaaagctatatataaattcttgtaaagattagaaaaactctaaaaaaaactttgattatattgaggagtgaataggcnntttagtccctatcttagtccccattttgcaaattaatccctatcctatcgaaatgtataaccaagactctatctttacactctggtatgcaaataagtccctactattaaaatccaatttccactgctagtcatatgtctatgtggcaagtcaactgatgaactaaaaaaagtgaaacatgggaaatatcgtgagcgagctaaataatccacagaggggatg

SEQ ID NO: 42352 - DNA, 360 bp, Glycine max
  unsure (1)..(360): unsure at all n locations
ctttatcaacataaaatttgttacaaattgtattggatgttatttacgtatttaacttaatattactggtgagggtggagtctgtgtcaatctttatgatatatggatttaagatcaaacttgattttttttaaatatctttctacaatttgactctaaaatagtaaagaaagaaagatgcatgccactaaagttaaaaacaagtcaattacaatgaaaataaagaaaatggagtataagacgaaaggcagtgaatttaaataattggaaatataaaagaacaagaatgtaaatcaaacaagataacttnggaaaaatgtaatatatatatatatatatatatatatatatatatatata

SEQ ID NO: 42353 - DNA, 505 bp, Glycine max
tcgtaacacagaaatttcctgaagtcggtctgaacaaaatgtggccttgtctcttaagtcttccatagaagaactaccgggccaaatcttccacagtcaggttaatcgttcccaagacatacttattaagaagttataataaagggtaaatacatttatgcagtgagaaagtgatatatgagaaaaataaaaaattcaaatttaaaaaaattttaaatgcttaaaaagtacaataaacttaatcttataaataatttaataacaaattgatacctaaactgtataatttaatgtcaaattaattctcgaaagatataatttattatgaaattagtctttaaacattataatttaataacaaaataactttctaagatcaatatgtcatactcttctgtacatttgatcattaaatctaaattctttcttttaaagaataatctatcactgtctaatgatcttaaggagcacaataatatttattctattataaaactctagtcta

SEQ ID NO: 42354 - DNA, 391 bp, Glycine max
  unsure (1)..(391): unsure at all n locations
agctntaacattaattaaaagctcactgttgcaggtgcaagcacttatggtaattnttatgcatgtgactgaacttgagccaatttatatgaaataaaataaatgcattctcagggtttcgttttgctgaatgctacaggctttgcaaaacttttttgctgctttagtctattctgcaaatactagttttgattctctgctggagtcactactagcctgtgctaagccttctccacagtctggtggcattgctaaacaagctntgcattcaatagctcagtgtgttgctgttctatgccttgctgctggtgatcagaagtgttcatctactgtgaaaatgcttactgacattctcaaggatgacagcagttctaactcagtaaagtttttc

SEQ ID NO: 42355 - DNA, 401 bp, Glycine max
  unsure (1)..(401): unsure at all n locations
agcttctaaagtagtataatgaagttgactatgatgaggagttaatatctgacctccaatactagaatttgattcanaagctacagtggagatcggaatagctaacgcatcccttgcaattgcttgtagtattggctactttaactcattcaatttccaccacattaagatatcaaaatctgaacttcttggtaaaaattcctcctctaagtaatgatctaactccgttttcatagttgatgttcttgcccttttctttctttgaatgtatctatcataatcacacaatttactctnttcatcacttaaccacattggtgattanaagaactagtagaatcttgatgctctttggcttgatattccgaaaccaaatcataacacaagtttccgatcctatt

SEQ ID NO: 42356 - DNA, 354 bp, Glycine max
  unsure (1)..(354): unsure at all n locations
cgcgctgagcgcgactatgaaggcccaaagcccacttcagcaactataaatagagagccagtcccaaggaatcaacacatctcgcctcagagcattgttctcagcactccaagcctgagctctcccttctttctttatattctttgttttgattgtccctattctttctttcacccccagttgtaagccctcaatggccatgagtggctaatcccctagctagggcctgacaggcttaaaaagccaatgatgtacggtgtgcttcaagaattatcaatgcaaagggaatntattccaggttnttctattctaattcttttcttgttatcttgcatttgctcttaaatttctttt

SEQ ID NO: 42357 - DNA, 345 bp, Glycine max
agcttcatgatgttgaatcaagattgattcaagttggtttgatgataacaaagatgatgacaaaaagcccaagagaatgatttcaagattgagtcaagaacaattcaagaatcaagagaagtttgatttcaagattcaagagaagatgaattctagattcaagagaagaaatcaagaagacttcacaagggaagtattgaaaagatttttcaaaaaacaaatgtcataccctaatttcgtccggggactattgcttgatggcatgcaacctttgattgaccacttcgaagtacttagcaccctttgttgcacaatatgtgaagtcccgagacacgccggaaatca

SEQ ID NO: 42358 - DNA, 451 bp, Glycine max
  unsure (1)..(451): unsure at all n locations
tcacaaccaanatgcctttcaatttcttcagctgtaccggctggcttcttcacccctgaagcatacatacacataccaacttcactaccaaaggcatttctcccaagggaatatttcaatcttttatacagagcagaagataacatgtactttcaagttccatgataaaggaaatattcaagaaaaagctctaaaataaaaggcaatactcactatgtcttatgactntaattccaattgccccttcaagcatcctagcttttgaaccgtcatggtcatattcatgaagtcctgattcataacatcaataaaacaacacanaacactntcagtgacttactgaacaactactaccataaaattcagaataatttcaaaatgcttcaagctagaattacccgcagagttactaaatactgcaatatcatgaccaaactcccgattacaacac

SEQ ID NO: 42359 - DNA, 330 bp, Glycine max
  unsure (1)..(330): unsure at all n locations
tcccctgaaccacagacttcanagcgcgactagcggtggaactcgacacagaccagatacccagacaaatgagaaaggtgttcactgttgctcgccacgacgataccgaacaccaccggcaacagggcgaggtaaacctccccagtctccttcttgcatgtgatcaaaaacgcaaaaatcgcggtgaagaacggcgtcgttgcgccgatggcctgcttgaaggaaacggcgaggtagcggagggaggtgttgccgcacacgacggagaagcagaagatggcgctgagagcgaagatcttgaggaactgcttcttggagtggatgtgctgg

SEQ ID NO: 42360 - DNA, 249 bp, Glycine max
  unsure (1)..(249): unsure at all n locations
ctgaagaagctgctgctcatgttcaacatgatccggtggagattaattgatctcatcctcatttgtcacaagatagtgacatggagttgatggtaaatatttgtcacaacaaagtagttttatctcaacctcaattgttgcagcactccattcttatatattacaattattcatgtttggcatttacatgtangtccctgcaactattgttccaccaatagcaaggaataagctagccattacaagagc

SEQ ID NO: 42361 - DNA, 453 bp, Glycine max
  unsure (1)..(453): unsure at all n locations
tgatgcattgttgaagtattgtatatttcacaaaggacatagggttgaatcaatttagattaaaacaacatggtccatcacatcttgtcaaagtgaatctggaaataacacatggacatcaacagttttcaatttttttttgtaaattggcataattatgtgttggcagtagacaaagaaacgatgtaacttgatccatcttctgccccaactttgcaagctggttactttgatgcatgaccttgacttgatgaacctttccttanaaacatgtgcttggttcaaccccatagtccgaggaatagcaatcttgattgccaatactccaaccacatctcatagagatgaaagacttangcatacttatgctatgcatggcacatgcaattatgagatgccctangaaccatcattnntctagttaaccatgcattaggtaccacgttcacatga

SEQ ID NO: 42362 - DNA, 399 bp, Glycine max
  unsure (1)..(399): unsure at all n locations
gcaagcttatggagcttactgtaggacacgacaagtctcatacgacaatatggccctccttaaattgcgatttgatttctctgcaatgcgagcagcaaaaccaggaggaagttgcagtccttctttcttaccaatgaattctaaaacttgaacaatctgccatatagatttccaaagattcaatagagatcaatattcaattcagagaatgggtaagctaaacatgatcactatatataatatataataacgtccatttgaaatggtatattttggttgttgcataatatatgataaaccttggatgccattggtataccctntaaagcaacaaggaacaaaaagtaaaactaanaatagaatttcagaaacagaacctaattatagctaatccaggca

SEQ ID NO: 42363 - DNA, 314 bp, Glycine max
  unsure (1)..(314): unsure at all n locations
gcttcctccagaatcaacagccttctggaggaatcttctggagggcccaagtgggtctggttgctatttgcacacccatttctactaagtacacccccctgcctttttttggtgattcttttttcgtaaagttacgggaacttacgaatttcgtaacgatacttgttttctttccgtaatgttacggaaccttgtggattacatgatcatcccctttntgacttacgaaatgttacggaacctcactaattgtgcaacgatgcttccatttgatttccggtgtgtcacggaaccttacggattgtgcatcaata

SEQ ID NO: 42364 - DNA, 412 bp, Glycine max
agcttaagaaaaagatggcctcagcaaattccttatttccggaagtggaattctatcaatagacctccaatctttaatggagagggttaccactactggaaaacccgaatgcaaatttttatcgaggcaatagatctaaatatctgggaagccatagaaatagggccttatatacccaccacagtagaaagagtttcaatagatggtagttcatcaagtgaaagcataaccatagaaaaacctagagatagatggtctgaagaggatagaaaacgagtacaatacaacttataagccaaaaacataataacatctgccctacgaatggatgaatatttcacggtttcatattgtaagagtggctaggaaatgtgggacactcttccattaacacatgaaggaactacaaatg

SEQ ID NO: 42365 - DNA, 515 bp, Glycine max
  unsure (1)..(515): unsure at all n locations
tgattcacanatccagccacaactcaacttcatcataggcatcatgtaggaaacttagaaaacaaaaaaaagttcaacaagactacttctaggaattgatttagaacatgttatgaaataaataacatgcatgaattagactcaaaattcaaaagataggctaagaatgacaagaatacatgaacaaatgtatctagaattcaatcaacaaaataaaaattcaacataaacttagaacataatgtgacaattattatgactaaacatgactctaagacaacatggattaagtgatttacacttagatttttgtgtttttttttaatcaatattntggaagaaaatntggatataaggttcagcacaagaatattatgaatganaaatgatagaacctaanatcaaaacaaaaacatgattcaagagtagatctacnaaattngaaccatagaaatgcaagaacaagtgtagatctaagaattaatcgggttattttttttaatctactctaaaca

SEQ ID NO: 42366 - DNA, 340 bp, Glycine max
  unsure (1)..(340): unsure at all n locations
atggtccaaccttgatatatgtagttagtattggaagagaaacagggagactatgtcaactgtagtagttggaatgtgctttttttctttagttaagattgtattaacaaattcaaccttacacttgttatccatatttgttgacttataactagtcattaaagaagcattactcttggatgaattctctttttgtttattgcgtaaggtctaaatacattntangaacaaataacaagcatcctttagtttagaagattcttcaattatgtgttatatcatacatttgtgggtaattgaatgttattttgaggataactgctatcaaaatatatctcat

SEQ ID NO: 42367 - DNA, 371 bp, Glycine max
  unsure (1)..(371): unsure at all n locations
tctcatgggacttcttattgtacattatccatattctangtnnttgggagaaatggttaggatggatcaaacaatgttggcttcaactcacattttcatcttggtaaatggaagtcccacatatgaagtactcctcacatgggattgagagaaggggatccaatggaatcatttcttttcagcattgttgcagagggtttaagtggtatgatgagggaggctattgcaaaaaaattattccacaaatatcccattgtgagagatgacattgaggtaaatcttttgcaatatgatgatgatacattgttcattggagaggccacatataataatttgttgactattaaaagcatgcatgttgagatgttatg

SEQ ID NO: 42368 - DNA, 331 bp, Glycine max
  unsure (1)..(331): unsure at all n locations
tggagattattaagagatagttggccgacaagacaaaacttgcagagagacagatacagctcacagattcactntgtcctctctgcaaaacccaacaagaggatgcatcccatcttttctttcactgcagcaaagttccaaagctgaacccaacaagaggcttggaataatgatcagcaggggggttgggggggtattgtccttcaaaataagctggaaaacttcaaagctgctataaagcagtggagcaagggagaggggaatattatatccaagaagatcctcaacattcagcanaaactaaatgatgtggagatctagcctctcatcg

SEQ ID NO: 42369 - DNA, 460 bp, Glycine max
  unsure (1)..(460): unsure at all n locations
gagttgccatggtatggngaaattttttctaccccatatacatatataataatagtcgttctgatacatggagcanaagttatggctgttttaagttntgctaaaaataagttctcaaatttttttgaatctctcaaatccagccacaccaagtgttcctggtatttttcacacaaaatatgagtcaaaagaacttcccacacaaaaattcagccaaaaataacaaccctaactatcaaaacaaaaatcgccaattaaattgtaaacagccgttgctaattcagtcgctaatgtaatgctgtgtgaacagtaacatagaatcagtctctaattctgtcgctaaacactattcacaacanaacaaaaactgagataggaaaagtactgaacaaggggtattactaaatggcanaacagaacatcanataaaacagaataccacactaacacaacacgaaca

SEQ ID NO: 42370 - DNA, 388 bp, Glycine max
  unsure (1)..(388): unsure at all n locations
gcaagcttagttgcagaaagcctatcccttggttgatcaatgaacttatcaatgaaagccttaacctcagaatatgccccctgaagaagaaatcaaattagatagaaatggacttaattctcattgattgataaaatacatttacaagagtatataaccatctgcctatgttgtccatacataataatatctacatccttcctattagaattctaaccaattccttctagaaccaactcaataatatatctacttgtaagacacataatcagtcaatttctatggtgctaccacattccttntgggcctgctagattctccagtttggaccttcacaacagctatatcatcaatctggtcccctcaacctcaaatgtactatcactat

SEQ ID NO: 42371 - DNA, 343 bp, Glycine max
  unsure (1)..(343): unsure at all n locations
ctttccaatctgacattcaccacagatgctgccttcttctattgtcagattggcgatgcctctaacagcacctttgtcaatgattatcttcatgcctcttaagtgcagatgtacaaatctttgatgccatattctgacttcatcttctttggaggatagacatgtggaggagtagctggcttcttgaagtgtccataagtaacagttgtcctttgatctgcttaccttcattagaacttcactcttctcatttgtcaccaagcattctgactttgtgaagcttacattgaatccttcatcacacagctgactgatgctgatcangtttgcagtcagtcccttc

SEQ ID NO: 42372 - DNA, 412 bp, Glycine max
  unsure (1)..(412): unsure at all n locations
attgctattatgtatcacgcagtttatatgtaatttactttctacttaatgattgcaaaataatgcaagttatatttaatttaatgtttagttaatattttgtaagagttttgtttagctgatatatacatggaactagattgcattaaagttagattttttaacagaaaaggttatttaagtattttgattntagaataaaataaaaggaaatgtaattggcccttgtgcttatttaatgtcaaaattcctaatattntttagaggcatttgnggaagctttccttgaacacaaggactgttctagggactcanaagtgaccaagtttttggtttggttgtggctggaggcttctttgctctattctttgtgagacaactacatattagccagcaccatgactggcgatat

SEQ ID NO: 42373 - DNA, 315 bp, Glycine max
  unsure (1)..(315): unsure at all n locations
ctgcagcttgaattgaatatggaagctctcgagatatacaaatggtcataacttttcactcggatggccgattcaagtgcataacatatcgagacgctcanaagtgaacaacagaagctctcgagaaattcaaatggtcataaagtttcacatggatatccgattctgtgctataatatatcgagacggtcgaaattgaacaacgactcgagaaattcatatggtcataacttcccactccgatgttcgatgcacgcgcataacatatcgagacactcggatttgatcactggaagctctcgagatatacaaatg

SEQ ID NO: 42374 - DNA, 313 bp, Glycine max
caatactacttctacgaattgacttagaacatggtatgaaataaataacatgcgtgaattagactcgaaattcaaaagatacgctaagaatgacaagaatacatgtacaaatgtatttagaattcaatcaacatatcaaaaattctccttaacctagaacattatgtgacaattattatgactaaacatgactcttagacaacatggattaagtgatttacacttagatttttgcgtcttttgttaatcaatattttggatgataatttggatattattgtcagctctcgaatattttgaatgataaatgatt

SEQ ID NO: 42375 - DNA, 374 bp, Glycine max
  unsure (1)..(374): unsure at all n locations
agcttctagatatattacgcgtctttatcggacatccgagtgnaaagttctgaccatttgaatttctcgagagctttcattgttcaatttcgagcgtctcgatatattatgtccttgaatcagacattcgtgtgaaaagttatgaccacttgaattctcgagagtgtccatcgatcaattttgagcgtctagatatattatgcgcctgaataggacatccgagtgaaaagntatgaccatttgaatttcttgagaacttccgttgttcaattttgagcgtctcgatatattatgcgccgaaatcggacttccgagtgaaatgttatggccatttgaatttctcgatagcttccgctgttcaattttgagcgtct

SEQ ID NO: 42376 - DNA, 166 bp, Glycine max
actccttggagtacccttgctttgtggtcactgaaaccccgcgcgatgaaaggcgtgatgctttcgtctgatggcactcctctcatggggtagccatgctgtcttatggcgaggacgggattataattaatacaaccccctgttccatcaagggaacattttgaca

SEQ ID NO: 42377 - DNA, 268 bp, Glycine max
  unsure (1)..(268): unsure at all n locations
atctttgagcttcaatgagggtcctttaatggtgatttccaccatgaagatgtagcanaagacaaaggagaagaggtgagaggaggcgtcatccactatggaataagccatggaagaaggagcttcaccaccaagatgagccttggataagaagcttggaaggatgcttcaatggaggagaagaaagagggagagaaagagagaggngggagcacganattgaaggaataaaagagggagagaagtggaactntgaagtatgtctcac

SEQ ID NO: 42378 - DNA, 416 bp, Glycine max
  unsure (1)..(416): unsure at all n locations
tgtcgttatccagtggtgtgtgngttaattatgagcactcttgagtcggttcacttgtaggttctcanaatgctgcatttggattattntagcattntagagggttgatatctcgtaggtgtcccattctcaaggatttgcaagcgagtaatgttttggaagcgaataagtttgatgttgtagagtttcaaagcatgaccatgttggttagggcaaatatttgtgataattatgggtttaagtttcctctgaaggcagcgtgtaatgtggaatatttgcgattctgacatatcaatgcaaaaggaaaaaaacatttaatttgtttctttgtttttcaagaaattattgtgtgatatgagaataacacataattatgtcccgaccaatctaatgacatcaaaagttaataaaaacct

SEQ ID NO: 42379 - DNA, 242 bp, Glycine max
  unsure (1)..(242): unsure at all n locations
tgaggctgaagaagctgctgctcatgttcaacattattcggtggagattaatagatctcagtctcatttgtcacaagatacagacatggagctgatggtaaatatttgtcacaacaaagtagtcttatctcgacctaatttggtgcagcactccattnttatatattacaattattcatgtttggcatttacatgtaggttcctgcaactattgttccaccaatagccaggaataaactagc

SEQ ID NO: 42380 - DNA, 339 bp, Glycine max
tgatgcattgtcgaagtattgtaaatttcacaaaggacatatggatgaatcaatggagattaaaacgacatggtccatcacatcttgtctaagggaatctggatataacacatggacatcaacagttgtcaatttttttttgccgattggcataattatgtgctggcagtacacaaataaacgatgtaacttgatccatcttctgccccaactttgcaagctggctactgtgatgcatgaccttgacttgatgaacctttccttaaaacatgtgcttggttcaaccccatagtccgatgaataccaattttgattgccaatactccaatcacatctcat

SEQ ID NO: 42381 - DNA, 415 bp, Glycine max
  unsure (1)..(415): unsure at all n locations
cttgtgtccaggaggatatcgtatgtttttgtaacattcatcaatagtgtgatntgtgaatccataatgtgtacaaaccttgcttcctttcctatcaaaactccctttatcaaagcttcattggctacttcctcctcctctagaagtataatttggaggaaaaccatttttcctataacatttgtccactatgtgattatccttaccacagtaggtacatgatttcgatgaaagtgagcctgttgcattgatgagactagtgtttcccatcagatcactattattgatctgcctttcttgttgaacaacatatgagaagacctttgctatgctaggtaatggatccatcatcactacattggatcagacaatgccaaaatgataatttatacctctaagaaactgcataacttgg

SEQ ID NO: 42382 - DNA, 484 bp, Glycine max
  unsure (1)..(484): unsure at all n locations
gcacagagtttctgcaccacattgtgtcctcttatgtggtgaggtaaacccttcaattacagacttgaagcatctgaatcacttgaatctaggcaacagtaactttgaaggtatccccattccaaaaatttattggttttctcaatatgctgcgttaccatgacctataccaggcaaaattttctggaatggtccctactcatcgttggcaattgtcaaactagatttaaacctgtgcgttgcgcggatgatttaattgttttttctcctaataaaggaattattntattattcttataatangagagatatgagttttgtgtatgaaatgcaataaatattgtagcaatttatgtgatttagcttcactaaaggactaaaggtaaatgatgtacatgacttaagaaaattntcagaacccctcatcttcttagcctgcaatanaatagctatatttcacattacttaagtcattctaaatact

SEQ ID NO: 42383 - DNA, 321 bp, Glycine max
  unsure (1)..(321): unsure at all n locations
tatcaaatatttgntatcctttgacgtattattagtcatatcttatttaaagatgcaaagatgctatagtgctaatatgttcactcttacaacgataaggaaagactcttgaaattaagaatggtattttttttttccttttccttctggtagtgaacaaccacagtagaattaccagacaacatgaatacagagagaagatgcatcattagattagcttgtgagttaccattgctttcagatcatcaccatttggattttcagaaaattgaatgatgcggcctctgacatctactttaaccaatccataatctgatgcac

SEQ ID NO: 42384 - DNA, 395 bp, Glycine max
  unsure (1)..(395): unsure at all n locations
tcctttcggtctggtactgtggctttctactctatattatctcctcaaagactctctttaatttgtgtggtagttagtcctaaattctatttcaatttttcaatcatgggagtttattaaatagacaaagaaaatcagtttactaaatttcaagcttagtttacttgctttcacagtttaggtgaagcttaatcatgtcaattaattctattctttttactggaatggatctaaaaaatatgataactatcgtgcatatatttatgacagtataataaacattaatttgcacagagataagaccatgactaaatataaatgaagagaggtaggacaaaataggatgaaaattacatttaatagtgtattgactaagataatcttatntatgtatt

SEQ ID NO: 42385 - DNA, 409 bp, Glycine max
  unsure (1)..(409): unsure at all n locations
gaatgccgcgaggaaactgtcccttgagtcccatgttcgatagtttgagattcaagaccatgttctcatcagggtgccaacactcaaccccattaaacctgctgatatacccttcagttttgttgttgaaatccctagagaacttcacatagttataggggtcttcaagggactctttgatactcttcaagcagaagatattagtgttggtagttgattagatgatagttgatagttgatagtcttagagaattgttttagaacgaaggctatgtcattgatntcttggattgtcaattacaacataccaattgcctatttatatgctcaagtcaccaacctctcaatggtggtgaatgtttctacattacnttangtctntctagaattctcatgatagaatagtatc

SEQ ID NO: 42386 - DNA, 359 bp, Glycine max
ttccgcttctcctacagcgttaccttctcaatctgaactctgtacctattgaccagccaaacgctgaccacaccttctctgcacccactcctcgtagaactgacagaattcttaccagacccaccaaatacactgactatcagaccagtttcacatcagccactattaccaatcatccatgcactaaacaccctatttcttctgtgatttcctataacaagctctcttcatcttatcacagcttcattcttaatatctctgctcattctgagcctaagtcctataatgaagcctgtaaacatgattcttgagttaagctatgcatgatgaaatttctgctctatagaggaataatacaa

SEQ ID NO: 42387 - DNA, 176 bp, Glycine max
atgatacaccatacaagattcctaacgatatataagtatgtgggccattaggtgtatcatatgctgacgatagccgacaagcccatgaatctcttccggggcggagtacgttggcgacactgctttggccgtggcttgcaatcggggaaggaattgacgtctgttcaaagtaagag

SEQ ID NO: 42388 - DNA, 348 bp, Glycine max
  unsure (1)..(348): unsure at all n locations
gaagtgataggtacaagcctatttgcaagctttatagagcccgggtagtcgaagagaagttcaagtccatagccatcaaagtctgaacagagtatgatgaactaagggacgtcaatatggccaccgatgaagccttggaatgagaaaccaagaaggcccgaaaggaagaacacgaccaaaacaagttttgaggggctttatagggcagcaatagtgagctcatactccgaagaggtgaaaggaatcatcacgggtcataggcatgatctggaaggacgagctanaggcttgccttangtcgaaaagaaatttgtcccaacagttaaagtgagactgaaaggaatatgt

SEQ ID NO: 42389 - DNA, 175 bp, Glycine max
agccattataatttcttgagagctttcgctgttcaattgtgagcgtatcgatatatcatgggcgtcgatcatacattcgagtttaaagttatggcacgtgttaattagttcagagctttcgtggtcaatatcgatggactcgatttatgatgcacgtgaatctgagattcgagtg

SEQ ID NO: 42390 - DNA, 418 bp, Glycine max
  unsure (1)..(418): unsure at all n locations
actcaaatcagcttctaaacccctcatttagtggattntcaaggtttgagaagtgaaaatgagaatggngtaaacttggagcaaactctcatctcanacaagtctatatcatcaatctaaactcgctcaaactggttttacgacaaaaactctaccgaatcaaaatttgactcctcaacacccaattttaccctagaaatggctcttgttttcactttggtcactcatattcctcatttgcacagtctaagctttctcataagtcctaaatgacatttcaaactaagattaactccctttaacctccanataccactaaatccagatttggccttccaactctcaaagcctcactctttntccactcataacaccacattctcactttctaaccctangttaactctacccttcatct

SEQ ID NO: 42391 - DNA, 354 bp, Glycine max
  unsure (1)..(354): unsure at all n locations
aactggatgcattggttaacttggtaacccagctggctntgaatcagaaatctgtacctgttgcaagggtttgtggtttgtgctcctctgttgaccaccatacagacctttgcccttccatgcagcaacctggagcaattgagcagcctgaagcttatgctgcaaatatttacaatagacctcctcaacctcagcagcaaaatcaaccacagcaaaacaattatgacctctccagcaacagatacaaccctggatggaggaatcaccctaacctcagatggtccagccctcagcaacaacaacagcagcctgctccttcctttccaaatgctgctggcccaagcagaccataca

SEQ ID NO: 42392 - DNA, 317 bp, Glycine max
  unsure (1)..(317): unsure at all n locations
ttgtagttgtgctcgaatgtatgatctatctccgatgatatatcnacacnctaaaaagggaacaacggaagctcttaagagatgcaaatggctatcacttttcactcggatgtccgattcacgtgcatcatatatcgtgacccttgaaattgaccacagaagctctacgcaaattaaaacgggcataactattgagtctaatgtatgatcgacgcctatcatatattgtgacggtcaatataggacaactgaagctctcgagaaattcaaatcgctataacttttcacttggatgtcagaatcacgtgcatcatata

SEQ ID NO: 42393 - DNA, 311 bp, Glycine max
  unsure (1)..(311): unsure at all n locations
agctcctgaggatctagatgcgtgctatagaacttggtgtaggtggtgtagcactcctcgggctccagaaccaccggggtctccaggaatgtgttcagggaatccccatcaaactttataagcttcccccatacttggacctgccccgaggacttatcctctggatcatataaattggcataaaactcattgaccagggccacatctatatgaccatcangctacctagtcaaggctttatgccactgcctcctttcaagctccctacagaactcgtcgtactccataatgaataagttagcattcctctt

SEQ ID NO: 42394 - DNA, 418 bp, Glycine max
  unsure (1)..(418): unsure at all n locations
cctctagagacatcactatcgctgttatactacacacatgagcccacttaaaggtaagggatgagttactcatgcttagggattagaataaacatatgtaaggatccctaaagatcaattctgggttgttttatgaaattcaattatgttcccatgcttttaatcatgaattgactgtgtttgataaaccaattgatgtctcgatgtagaattgttgtgaaattgatgtgttttattcccttgtctcatgctttgaaaatttatctatgattataatatgtgtctttctcttgtttctcgtacttataaattgtacatttgatttctttattatcgtgaattgagtgtgctntcactacatttgtgtcacgagatatctatttcattttaatatattatnntgtcaatagctactgac

SEQ ID NO: 42395 - DNA, 296 bp, Glycine max
  unsure (1)..(296): unsure at all n locations
ctaacccatggaagcttctaatatcttctccatattttgagacgggcgattcttggatggccttgattctcttagggtccactcggaccccacttctacctacaacanagacggagaacactatgttatctacacaaaaaggacacttctctatatctgcatatagagtgtttntcctaaggactgaaagaacttgcctgagatgacctaagtgattatgatngcagctactgtgcgctaaattatcatcaaaacaaacaactacatatctacctatgaaatcgctcacacatgat

SEQ ID NO: 42396 - DNA, 307 bp, Glycine max
  unsure (1)..(307): unsure at all n locations
agcttctcaggaggtgagcttagttatgagatgtgtgtgtgtagctaagctctagcttctcaaggaagttttctcanagaagcttctcaaggaagttttctcaagaaagcttctcaaggaagctacctagtctataaatagaagcatgtgtaacacttgttgtaactntgatgaatgagagtcttgtgagacatacttcaaagttccacttctatacctcttttattccttcaatttcgtgctcccccctctctctttctctccctctttcttttcctccattgaagcatcctctccaagcttctta

SEQ ID NO: 42397 - DNA, 396 bp, Glycine max
  unsure (1)..(396): unsure at all n locations
cgattcattctatgcacccatcgtggtccacattgtgtttcngtgcattttattctcgtnttgtttactttttatacccnctgttgacgtgcttaagccattntacttaagtcatttctcgcttaacttanaaataaaataaacttccaccgaacgtttgaattgtattatccgttaacttcggttaaaacgaattccgaccgcacggtcgtgccgtaaccacgttggaaatcaaaaagagataaaaaaataatataaataaaaaaaaaacatcttttagtaaaataaagcggaaaatcaattggacgttntctctttgggatttctcattcttaatcgaatngattaataactaaagtgaaactaaagctaaaatcaactcgcctagtcaagctc

SEQ ID NO: 42398 - DNA, 349 bp, Glycine max
  unsure (1)..(349): unsure at all n locations
agcttgtaagnatattaattagtcattgtggtatttaattctttggtcatccttcagagcatctttgatggagattaacggatcatttggatcatccatccctatgacaagtgagagaacatgagttagctaattaataaaagtgatggattattaaaaatatatgataaagattcattctattctaaattatggaatgtggaaattatataaaatgtatattaccaaatacaattgttagtgttataaaaaagtattggtacaagttgattcaatttgaaaatagatgaaccacactaatggtggttctgagtgaccttttaaataatcatgcattcaaactggggcg

SEQ ID NO: 42399 - DNA, 470 bp, Glycine max
  unsure (1)..(470): unsure at all n locations
gcccgttcaccgttgaccctattattcgctcttttttgcattccatttcattccaactctacacacattgtcacagaaactaaatagtcttttctttttttttatgtcaacaaccacagctacaccactaaagcaacatctttttttttttcttcatgttgctattatgttgagataataggaaacgtggatctccttgtttctaatctcaattgggttttgacacaatgtttatctatgcagctagtaatcactcatcacatctcggtttggaatttcaatgaatggtgaatngtgctattaatgtcatcttaaaaacttttcatttgtggagggtcatgttgtattgcntgtgtatgatcatacccttcttcattgtctttgtagtttgacaatttctcttaaacattgcaagtaaccatggttatgatgtgccaatagggaggaaggctgaatagtatttgagacta

SEQ ID NO: 42400 - DNA, 297 bp, Glycine max
atatggattatatcagttatgtcgggaataaagaagatagcacacgccactttgaacatgtaacttcatgtttatgattagctcagtacaaataactattgcatgataaacattattctaggacacaatcatagtttgaattggatcatcattcacaacccaacaaggcgcttgatatccattgagtaagtgagggctggattacaaccattatatgaatttattgccacgattcaggtgacatcttctgtgggatggaattgatcccaaaacacataaatggttctattctggcat

SEQ ID NO: 42401 - DNA, 275 bp, Glycine max
ctctgcacacaagtgtgtcacgcaagtgtcaatgcatacaaacaactaacaatcacttcccaattttgcactccatctcattccatgcaatcatatatacacaatgcgggtcagatggactttattaagcttgtatcgtggacaatgtaccaaacaactcatgtgttctcacagatgctaagcttatgttataatagagcattcacctatcccctattgtcttactatcatgacttgcttgctacatccctctctcattctattaccctactaac

SEQ ID NO: 42402 - DNA, 384 bp, Glycine max
tgagaagctggagcttagctacgctcgctcgtctattgtctaagctcagctccttgagaagcttccttgagaagattactatagaagctagagcttagctacacacacctctctaatagctaagctcacctccttgagatgagaagctagagcttagctacacaccccctataatagctaagttcacccccttggctacatacatggaaatacataataaagacccactacaaagactactcaaaaggccctgatatacaaggctaaaaccttatactactagaatggcttacatacatggcctatgagaagaagataacctattctaatatttacaaagatgagtggacccgaccttggcccatgggcttacaaatctaccct

SEQ ID NO: 42403 - DNA, 358 bp, Glycine max
  unsure (1)..(358): unsure at all n locations
tgagatagagaatagtgacatggaaaattgaaggaagaaagggagagaagttgaactntgaagtatgtctcacaagactctaattcatcaaagttgtgacaagtattacatatgtttctatttatagcctaggtcactaactaaatgaaaagtgaatttcattttcatttcatgcgaatctaanaggaatattccaaggatatgccaaaggcatcttaacatattccaagaatatgccaaaggcatcttagcatattgcaagaatatgccaaaggcatcttggcatatttcttttagatgctacaagaatggaaggtgttactctaacacatgggaaaggaatatgccacaagaatat

SEQ ID NO: 42404 - DNA, 352 bp, Glycine max
  unsure (1)..(352): unsure at all n locations
tgtgtatcactatccactacaacagcaaaatacattgtcattggaagatgctgtgccaacactctctatatgaaacaacaacttgaacactttagggcaacccttgatcccattcctctaccatgtgacaacatatgtgctattaatctgtctacgaatgcggtcgtgcattcgatagctatacatatatagattagacatcattgtctaagagatcatgtatcanaaagtgattgttgcattgagtttgctgatagtgaacatcaactagccgacatctatattaaacctctttctggagataggttcttctttattataaatgatctaggtatcctagatggatcgagta

SEQ ID NO: 42405 - DNA, 342 bp, Glycine max
aaatctgtccagacgataattgttaaactgccatacagtaagagaaagagttgatacagtattaaaaaaagaatttaatacaaaagaagtttaatgatgatacactagccgtgtataataatttatactatcatctactcgtgaattattattgatatgatttttagacgataatatcaaattattttttattataagagcgtaatctgtatttatatatatataaaaacatagttttctcgtagagattcattaaagtcttttacacccgatacctacttggatccaattgtgacgtagagaatcataccgcacgtgaagttctttgtttcatggattcta

SEQ ID NO: 42406 - DNA, 359 bp, Glycine max
  unsure (1)..(359): unsure at all n locations
tgaattgtatactcattgtgatgttncctgattctagcatccatggcagcttagatacttcataatgtgtctcacatactgtccaaggacaataatgcaccgccatgtgtttaggaaaataatcattcaaacatcaattatgagggatgcattccacctatgattgtggntcccctatagactaatgtacaaaaaaaatgagagtataactcctttatattctttaactgacccaccttgaatactgtatcatcaacgataatggactttaaattgcacaatatgcggagaatgcgtcgaggtaatatatcttagccttgggggcataagaaacaatctcataacataaatattaatgt

SEQ ID NO: 42407 - DNA, 353 bp, Glycine max
  unsure (1)..(353): unsure at all n locations
ttaccgaaagcttggcacaatatttttttttttgccgacattgtgcaattnttttcttatttttcaccaacgccaggcaataattgttttagtacgatcaagctaattttccttgttgatttcgctctatgataggtttaccatcgaggtcgcctttggtatttcatgggaactcaaccgccgttgtgtttcggtcgacatttgcctgcgctggtagaagaggcaaagaaaaatatagcagaccttggcagcaaaaaaaaaatacctcgacaaacttggataaaaaacaattctagccgacatcggccaagaaagattaccggtcgctgtatcccaaaaagaatcaccggatg

SEQ ID NO: 42408 - DNA, 352 bp, Glycine max
  unsure (1)..(352): unsure at all n locations
gatctgaagcattcttattaagcacttcagctnttgctttcgtgtagcttatgagaaatgtcatttcttcttctttctttcttccaaagtcatttctaaagttccaagcactttctccatcacccacagccaccattagccaccacaaaccatcgttgttctccacaccgagaggaacccttcaaccgaagtggaatcttccaacttggcttgcggtttcggtagagaacgaaaccctaatctgacctttcgtcttctttcgaggtaaccatggttctacacttgtttcttgttagtttcagcttgtctttgcatcttttctgactntggaaccgccattgcatgtcttatg

SEQ ID NO: 42409 - DNA, 272 bp, Glycine max
  unsure (1)..(272): unsure at all n locations
gcttttatgttcttatgngccatttcatttattaagactctngatgaccatcgaagttcaagtaaatgtacaaaacaatcattttcagcattgaacatttagcccttccagaaatgaattgttaaatggtttatgatataaggaaacgtgtggtcatgtagtttatattaaattcatcttctgagatggattgactattcttgtgttggaacaggaatcacaagacactctgcaatgcagaatcaatcaaatttagttatgtttcatagatc

SEQ ID NO: 42410 - DNA, 384 bp, Glycine max
  unsure (1)..(384): unsure at all n locations
agactgcacaggatatgataaggtttatctaacccctttatttatctaaagcagaatctgatcatagccagagaatatcttcaatttgctcacgaaaaccttacaaacaataacatgaatggagatagaattgatagagtgaggcagctgacagaagaggttattaatcttaattaattggaggaaaagatgcttatgcagagagcaaaagtggattggataaggaaagatgatgggaataactcatntttccatgctattataaaaagcagaaataatagaagaaatatatacatgctgcagaaaactgatggaaccttgcttgaaaccagtctgagatagaggatgagatcatggatttctacaagaaactcatggtgactg

SEQ ID NO: 42411 - DNA, 123 bp, Glycine max
acacacacacacacacacaaagcaagcaaaagatgatgtaattgtaacacctccttggtttcttcttctgcttgtaccgtaataatgcagaaactctttcttggcttgttaactcacatgctg

SEQ ID NO: 42412 - DNA, 442 bp, Glycine max
  unsure (1)..(442): unsure at all n locations
acttatgtgctcttatgaagtatctattttttntataaaanaaattgatacatagtcatgagttcaaacaagtgtaagatacgtgctcaatacatgtataatacattntgtctttgaactccttaaaccaaattgtggctaatttcctagaccaaatttacgctcctctatttttaaactaaagcacatttgcatttgtagtttgattgttggtatttttatctttntattatatgtgatattgacggtgatataattagattatgtagttntttttaatactttataaataaaaagctataagcttttaaaattaatctaatactaaaattagaaatactacaaaatatatttttatcaagaaaatcacagttaaaattataaaaaaaaatggtacatanatatgttatttatgtaatttacattttaaaagtaattaaca

SEQ ID NO: 42413 - DNA, 371 bp, Glycine max
tgaagcttaagaaggatcttgcttgatcgatggctcttggcgtgatcagatgacattagccaagaatgtctcgttcaacatcgtaaacgagaagactactgcagacttaataaaggcgttatcatatatgtacgagaagccatcgacatccaacaaagtatacttaatgcgtcggttgttcaacctcaagatgggagaaggtatctttgtagctgatcatattaatgagtttaatactattcttgcccaattggagtcagtgaagattaaatttgaggatgaggcgaagacattgattctattgtcatcattaccagatagttgggctgcaactgttactgcagttagtagttcaacaatggagaacacat

SEQ ID NO: 42414 - DNA, 347 bp, Glycine max
  unsure (1)..(347): unsure at all n locations
attcattctatgtacccgtagtggtccacattgtgtttcgtgcattnttattctcgttntgtttactttttataccccctgttgacgtgcttaagccattntacttaagtcatttctcgcttaacttaaaaataaaataaatttccaccgaacgtttgaattgtattatccattaacttcggttaaaataaattccgaccgttcggtcgtgccgtaaccacgttggaaatcaaaaagagggtgaaaataatataataatcaaaaagacatcttttagtaaaataaagcggagaatcaatcggacgttttctctttgggattctcattctaatcgaatgattaatact

SEQ ID NO: 42415 - DNA, 279 bp, Glycine max
  unsure (1)..(279): unsure at all n locations
agctnttggaaagtgctanttttcaccttctcgctaagccaatatgttggcttagcgagcatccgctaagtgcaacactcctgngctaagcgcgaggaagaatccagaagaagatgaattgtacaggttcgctaagcacaccacttcatctctctaagcacaccgcttcaattcattcgctaagcgagaaaggcacgctaagccaaaaatcactaacatgcgctaagcggtccatacgtgcgctaagcgcacgagcacgaacaaggccacctatttaag

SEQ ID NO: 42416 - DNA, 437 bp, Glycine max
  unsure (1)..(437): unsure at all n locations
agtataggcatatcatccttcaatcatagtattgttgtccctaaatgaacacattntctctcttaagcttgtgtctaaagaatgtgatcattgaggcattaaatgcatatactttttcatgctgagaaaccactcttcatcgttggcaagttgaacactatagcaggacaccacttctctttgggccaaagcaggtttatgtagtagagtacctcctttgatggtgattgaggaatttcagagcttgacttcatttattcttcatangttntgagagatcttangagaatgtctttacaaaatagatctcagacacaaagtattaaatgaagttntaaatgtcatatttaatgtcatgagatcataattctatcttgttatcgtgtgaaacatttcgtanaacatggtttgatagcacataagacacaacttttaac

SEQ ID NO: 42417 - DNA, 309 bp, Glycine max
  unsure (1)..(309): unsure at all n locations
agctntgatgatattgtcttcaccgatgaaaggatcaaagtgggtctaaaaagagacaaatatgatcatcatgctntgataaatgccacaaaaaaactatggcaaatgaagagggtgagaatgagggagaagcccatgctgtgactgccattcctatacagccaagtttcccaccaacccaacaatgtcattactcagccaataacaaaccctctccttacccaccgcccagttatccataaaggcaatccctaaatcaaccacaaagtctgtctaccgcacttncaatgacgaacaccacctttagca

SEQ ID NO: 42418 - DNA, 428 bp, Glycine max
  unsure (1)..(428): unsure at all n locations
tctgttgttgatgcaaagtgtgtgttaagaaacaagctggaagaaataggtaaggatgtgaggaacaagcctacgcttgtggccaaaggttactcacaacaggaaggtatagattatactaaaacttttgctcttgttgctcatctaagggcgatactcattntactatcctttgctactcatcatggtatgatgttgtatcaaatggatgtaaactgtgtgttcctcaatggacttatcaaggaagaagtctatgtgaaacaaccccctgnngttgagagttctatctatcctcatcatgttttcaaacttaataaagctttgtgtggtttaaagcaagcttcttgagcttggtatgaaaagtaagttcgttttaattgaaatggtttatagaggaaaggaatactatgctattagaagatatggag

SEQ ID NO: 42419 - DNA, 226 bp, Glycine max
aatggaaaagagagtagttatcaagctatatagatgcttatatgacaccgaatcttccactggttttttctttatatagaagattggaacttctgaggtgggacccacttcgcaagggtctagattttcaagagatgaaatggtattgaagtattcccctgtgtgctactattctttctggaaactatttagatgcattataggggggtgcagccttggttttatt

SEQ ID NO: 42420 - DNA, 466 bp, Glycine max
  unsure (1)..(466): unsure at all n locations
gatgttcttgagatagttgcgtggaatcaatgggtgagagggacgtatgattatattntataattattatacaacatanaaaataacaatgtcccacacaacattggagtttcttcattaatttctggtaggatccatcttggaggataccatacttcatttgtgtcctatttttatacttacttaccatgagatggataatgctatagtgacataaaatacatatttgtatgcatttcatgcaatgttataagaaccactctagtcatttattcggtcgaaataatagattaacagatcagtaattgatttggtttgatcttttatataaatatatatataacataatttgattaattaatcaatatgaaagtttaattaataattattatcaaattctaacaatgcacacnatcaaaacacgtngannataaatgaaaagattntcatttattatatattaact

SEQ ID NO: 42421 - DNA, 462 bp, Glycine max
  unsure (1)..(462): unsure at all n locations
acactcaagcccgtcgctggagctaacccatcaactgtcctaactctntcagactggtgactcctatgctcttgaccttgacttgatagaacctcttttttagcataggcgcctgactcgatcccatgtcttactaaagtgaaacaaaacccagtgcgaatcaagactccgacatctatcatgggtggaatggatgaatgcatgaagaaatgcatatgacacagaccctccgtcgagattgtcctcttcttagatacaacattcgggcagcatggctcctgatgtatgcatttaataaagcgacacgaaccctccgtcggttcttgacaaagtgaggggatcaagacgcaacccatgcatgatgcggattgcgaaaaggcacaacacgaggatgtacatagtatgacaatatctcacaataatcatacagcanaggcgtacatgacatttttatactacatg

SEQ ID NO: 42422 - DNA, 306 bp, Glycine max
  unsure (1)..(306): unsure at all n locations
ttcttttctcatccttcaaagcatgtttgatggagattaacggatcatttggatcatccatccctatgacaagtgagagaacatgagttagctaattaataaaagtgatggattattaaaaatatatgataaagattcattntattctaaattatggaatgtggaaattatataaaatgtatattaccaaataaatttgttagtgttataaaaaagtattggtacaagttgattcaatttgaaaatagatgaaccaaactaatggtggttctgagtgacctttntaatcaatcatgcattcaaact

SEQ ID NO: 42423 - DNA, 388 bp, Glycine max
  unsure (1)..(388): unsure at all n locations
tattcattcgctcttttcttgcattctatttcattccaactctacacacattgtcacagaaactaaatagtctttntcttttttttatgtcaacaaccacagctacaccactaaagcaacatctttttttttttcttcatgtggctattatgttgagataataggaaacgtggatctccttgtttctaatctcaattgggttttgacacaatgtttatctatgcagctagtaatcactcatcacatctcggtttggtaatttcaatgaatggtgaattgtgctattaatgtcatcttaaaaactcttcatttgtggaggttcatgttgtattgattgtgtatgatcatacccttcttcattgtctttgtagttagacaatttctctta

SEQ ID NO: 42424 - DNA, 532 bp, Glycine max
  unsure (1)..(532): unsure at all n locations
ggggagaggggnttttnaccatctggacccgtggatctttgagaaacntcacgcatgcaacgctgangattatgggtagccatcacatgtttactaagtggcggtcnggcgatggggcagaacaagttnttacatcattactaatcgcgcaaaaacccaccattccctgttggccaccttcaactgagctcacgtactcccacgtagcccatatactcgttttttcaacaccggggccccatcaatcctcccaagcttccccaacatccaggtgattcaacatccaaatcatcacaaactaanaaaccaagcaaaacagggcaaaggcagaaaactcttgccaatacttcaaccaaaataaccagcttttctcacttaaagactccagaaacattccttcgttccattcgtaaccgttgatcgatggaaatttactgaagctctagactaagaccatttcgaccgtggggaatgctttacttagaacaaaaacaattcccaaaaaacttaatttctcggggccttacttgtt

SEQ ID NO: 42425 - DNA, 466 bp, Glycine max
  unsure (1)..(466): unsure at all n locations
acaagattatgcttatcttaacgcagaaaatgtcatgctaatccccctgatttgagagcgaactcacgtaatctatttatgcacacgcatacatgtggaatatccaaccatttatatcaacatagaggctatccaacacattctaattgtcacacacatatacgcatttgaaaagaacatacattctcacgcccaaggcattgcgtcaaagttcacacttaattatatcctaaacatttactattacaaactacttacacacatttgaaatatatatcatacaaaatttattgtttctctcacatttatttatatgcatttggaatgctaattacatcccgcacacacctgcattcaaaaagaattccatgctatcatacatncatttaagaaaataatcattcacactctggcaggaatttcatgcnncctttatntacctatatatacataccattgaaaagca

SEQ ID NO: 42426 - DNA, 353 bp, Glycine max
  unsure (1)..(353): unsure at all n locations
tgcacgcttgagagtgaacaacggaagctctcgnattttaaaatggtcttaacttatcacacggacgtgcgattcaggcgcataaaatatctagacgctccatattgaacaacgaatgctcttgagagattcaaatggtcataacttgtcacacggatgtccgattcatctacataatatatccagacggccgaaattgaacatcggaagctctcgacaaattccaatggtcataacttttacaaggaagcccgattctagcgcatcacatattgagatgctcttaattgaaacctgaagctctcagaaatcaaatggtcatacttgtacacggagtccgattagacgcatat

SEQ ID NO: 42427 - DNA, 88 bp, Glycine max
tataccgagacgctctaaattgctcaacggaagccctctagatatttaaatggtcctaacttatcacacagaagtccgatatacgtgc

SEQ ID NO: 42428 - DNA, 345 bp, Glycine max
  unsure (1)..(345): unsure at all n locations
catcaactatccatattccttaattcatttaatacatgtgaacttatttcaaggattacctaatgaagacccctatgcacacttggcaacattcattgaaatatgtaacactgttaagattgtcggtgtaccagacgaagctattaggctcagccttttctcattctcattggcaggagaagctaagaggtggatccactcattcaagggcaacagtctgaanacctgtgaagaagttgttgaaaagttcctaaagaaatacttcccagagtccaagactgcagaaaggaaagctgcaatctcttcatttcatctgtttcctgatgaatccttgagtgaagcatt

SEQ ID NO: 42429 - DNA, 376 bp, Glycine max
  unsure (1)..(376): unsure at all n locations
acgtcccttagttcatcatactcttttcagactntgatggctatggacttgaacttctcttcgactacccgggctctttcaagctctgcctttagggcttgtacctcatcactttcttccaaagctttaacctcatcgtctctcacagtttttagatttgggagccaatccaatccttgtgttcggactctcagccacttatgatagccgccgatgatcccattactgattcccctaagctctctgtcctttcttcacgccgcatcccatgccttgcgaactccttggagtaccctcgcgtntgtggtcactgaaacctcgtgcgatgaaaggcgtgatgctttcgtctgatggcactcctctcatgggacatcct

SEQ ID NO: 42430 - DNA, 185 bp, Glycine max
aaatttttccaaccaatcccctaaccaaatcatgtgccactcaacgactcactctccactaccatatccttttcttaaccggtcccataattctccaagcttccaaacatcagtatttacattcaacagccaaactatccagcaataaacaggcaaggcaatacattgccaaacaccaccaaaat

SEQ ID NO: 42431 - DNA, 449 bp, Glycine max
  unsure (1)..(449): unsure at all n locations
gagagccattttcacttgagcgtttcagcctttgctttcgtgtagcttaggagaaacatcatttcttctcctttctttcttccaaagccatttctaacgtctcaagcactttctccatcatccacaaccaccattagccaccacaaactgccgttgttctccgttgaaaccccacatcgagaggaacccttcaaccgaagcggaatattccaacttgccttgcgatttcggtagagaacgaaaccctaatctgacctttcatttttccttcgaggtaaccatgattccatgtttgttccttgttagtttcatgcttgtcttcgcatcttttctgactttggaaccaccatngcatgttntaacgcttctttaaaaccttagacatagaactntgaaacgttatttttatgaaaacatgtatcttcgtacctacactgaccccggcacat

SEQ ID NO: 42432 - DNA, 401 bp, Glycine max
  unsure (1)..(401): unsure at all n locations
tctaccgtcnaaaacattgtcggccagcgctngtaaaataattgcgcaatgtctgctganaaatatcagttggggctatttaactaccgatgctggctactgttctttctattccacccctgaataatacttggacgatgtcgatttggaaatgttcgatcggagtcatccggtcatgcttctttttgagacctcgatctgtcatcttttcctggccgacgtcggctggcatttttttcgatcaatatcggtgaatcatgctttttgccaaggtgggctaacgtcttcgtggctgatgaaatgagagcatgccagtgtcggccgaaacacaatctcgcacgaaaaaccctagccgacctacattgtaatatttgtaagcaataccgaacaacaaagaaata

SEQ ID NO: 42433 - DNA, 233 bp, Glycine max
ctctcaatactatgaatctctccactttctagcctgttgttagaatatcaccaagttgcattccagtattgcagtacttcaagtcaagttgtcttttgctcatctcttcacaaataaagagaaatcctgtctctatgtggtatgatctttcctgtgctactggattcatggccaacctgatagaggattagatgtccacatacaattcgactgaccgctaaatttctatcttc

SEQ ID NO: 42434 - DNA, 419 bp, Glycine max
  unsure (1)..(419): unsure at all n locations
tctaactatatntacatgtggcatatatatataacacatcactatatatacatatatagaataaaaataatacacaagcaagatattcaaactcatgaatttcctaattagttcctaaagtatacttaagcaaatacatatattttatatatgaaattgaaatctaaaacaaaatcactacagatgtatcattatatatatatatatataacacattagaatcttatatacatataattctatatatggaaaacaaatatacatatatgactaaacatattccaggcaaccataaaatctagccacgagaagttagtcaatagaagactatgatcaattataattggtgaagcttcgcattctaattcacaaaaacatcggttcatgcattgtaccaatattacggagattaatcacaa

SEQ ID NO: 42435 - DNA, 317 bp, Glycine max
atataaaataattattattggatattttgaacacatgtgtaataacaataataataaaatagagggagagaaggcatagttccactgagcagaaatcacagccctttattaagcttggtctgctttgtgttcacatccctatccgtccatgccagtagacaacttcttcacgctaagtcgttagctctgtgcgtgcgtgtgtttgtttagctgtacttttgtgttggcaaaagtgcccctgcatggaaccaaaatttcaagaataaggcgtaagcttcttttgctcacaatggcatttgataccccgtagtacttta

SEQ ID NO: 42436 - DNA, 376 bp, Glycine max
tacttttctatcactaactatgataggaatgggagtgtgggattagatgttacggagatgcccaagatatggagggtatatgctaggagaaacaaaggtgagaaaaggaaagatgatgtggcaagagagtagcacaggtgggattactgtgttttgcttgaagcactcctttaaattcaaacagtttgaattctatggtttatatctccctctattttcccttcacgttgtaccatggatcctagacacttaaaatcatgtgacttgtatggtatggcctcccattttagctctaagctcaaactggtgcactttctgctaatcatacatttcagatactatgtttaactttctacttatacaaagtctgtgttct

SEQ ID NO: 42437 - DNA, 402 bp, Glycine max
  unsure (1)..(402): unsure at all n locations
aacaccagcacgggtcattaagaatctatttatagggagttttgaagaacctatttgctcgtaaacttgatgganagtcttacctagacaccttgagaatatagcataacttaattttgaagtgattaaattcagtactgctgtattataaatccttgtaactggattatataaattatctaaaattaagttattctatattctcagggtgttgcccaagtgcaccccttgataatntgctattatccttgtaattggattatataaattatttaaattctccatagtctaatacgtatcctactatatatgatcaaaatatgtaggttagatgaatttatttccaattacaataggttatgtaatgacctgagcgaatgcgtatcataattaattagaaaa

SEQ ID NO: 42438 - DNA, 375 bp, Glycine max
aacttcgtaccccattgcccagatgctcttcgctatgcgaaggtatggcggagggacgtaacagtaatgaagcaagataaaagaaaggcatgtacggactgagaaatataacgatgaaaggaaaaaggagggggaatccacaccaatataaatatttacatgctatataatctggctgtgcagttcccattgaactgcgatcataattagaaattaaattgtaatcactaatccaaattgacactacattatattatagctcacatatttcacaggtcaatgaaataataaaatggataatcacacacttcaaatagggaatcaccataaatactacagattttgattgttaatgctcaacatacacccagcaat

SEQ ID NO: 42439 - DNA, 380 bp, Glycine max
  unsure (1)..(380): unsure at all n locations
agcttcctcggggccatttcctacgagaacaaacatttagaagttagttntacaagataatgcttgtcttaacgcanaanatgtcatgctaacccctccggtttagaacgaactcatgcgcacgtttaaagtaacacatttatgcacatgcatatgtgtagaatatcctactatttatatcagcatagaggccatccaacacattctaattgtcatacatatatatgcatttgaaaagaacacacattctcacgcttaaggcgttgcgtcaaaatntacacttaactatgtcttaaacatttgctatcacaaactacctacacacactcgctcgaaatatatataccatacaaactttcattggttcactcacatttatg

SEQ ID NO: 42440 - DNA, 319 bp, Glycine max
aaattgtttccgtaaagaaaatccaagccgaggcgctttcgtaacgtttccgtaacgtttctgcgggtgattttgcgaagatattcaaccgttcttcgacgttcttcgttcgttcttcgtcgttcttcggtcttcaactggtaagttcccgaaatcgaactcttcaattcattctatgtacccttagcggtcctcatttgttttcacgtgctgtatgttcatttcatttactttccgtatccacctttaacgtcctcttgtcatttacttaagtcattatctcgcctaatcaaaaatacaataaacttccaccgatcat

SEQ ID NO: 42441 - DNA, 264 bp, Glycine max
  unsure (1)..(264): unsure at all n locations
gaacttgtgttgctatgagctatatattataattgggcagcgcatttgcttggaggtcgcagcttgatgacagaactttatgaaaatctctttgccgcccaattcctatgggatagacttgttctaatggtattttactggagctcacccaatggtgtgtttttgaatgggtgtcaatgcaatttggcatgtcacatcaagttgttgcgatacgcatactacataaatntcttgatctcactacccattcataagcatgtcatg

SEQ ID NO: 42442 - DNA, 178 bp, Glycine max
  unsure (1)..(178): unsure at all n locations
ttacgaaatggttcactctgcaccaagacatatcttataactatagaaaaatgcacccatgtacaatccaggcacttgcgttacctagatcatttatatgtacttncaaggtgtatttgctacctacatcacatgcacttnctttgctaaatatacatacatgcatactcaaagcatt

SEQ ID NO: 42443 - DNA, 187 bp, Glycine max
ccaaatacccaaccacaatacccatggctcaaagcgactagtgcatggcctatacactgactactactaccttagtgaaacaaaatatttggcccatacagatgcctattaacacaccttaagaacagggattaccttcttggcgacataactgacttttaatgctgtattcaaatatatggacagc

SEQ ID NO: 42444 - DNA, 376 bp, Glycine max
  unsure (1)..(376): unsure at all n locations
acaaggcatccgaaggaactatttccgctccggagtatgacagtcaccgctntatgagcgttgtacaccagcagcgcttcgaggccatcaagggatggtcgtttctccgggagcgacgcgtccagctcagggacgacgagtatactgatttccaggaggaaatagggcgccgacggtgggcatcactggttactcccatggccaagtttgatccagaaatagtccttgagttttatgccaatgcttggccaacagaggagggcgtgcgtgacatgagatcctatgtaaggggtcagtggatcccgtttgatgccgacgctatcggccaactcctaggatatccgttggtgttggaagagggccatgaatgtgagta

SEQ ID NO: 42445 - DNA, 344 bp, Glycine max
  unsure (1)..(344): unsure at all n locations
gacaaaagcaaggctcttgctcctacgtatcctctaatgaggaactcagacctacgtagttctagataacttgtgagacttgaaaaagtctccaccggaagatgctgacatctccggaaagggtgcagatgaccacattggcctttgctcatcaatcacacttggggtcactgaatgacgaggtgcggataaccgtaaggtgtctccgcgggctaccagctcttgggtcatggtaacaaatagcggtgcggtcgacaaaagcaaggctcttgctcctacgtatcctccaatgaggaactcanacctacgtagttctggataacttgtgagactctgaaaagtct

SEQ ID NO: 42446 - DNA, 427 bp, Glycine max
  unsure (1)..(427): unsure at all n locations
caccaccaagagagtgtctgggataagaagcttagagagggatcttcaatggaggaagagaatgagagagagaaagagagaaagtggcatggataattgaaggaagaaagggagagaagtttaactctgaagtatgtctcacaagactctcataaagttaccacaagtgatacacatgtttctatttatagcctaggtagcttccttgagaagctagagcttagctacacatacccctctaatagctaagctcacctccttgagaagcttcctttagaatctaaaacttagctacacacacccctctaatacttaagctcacctccttcagataagaagttagctacacacaaccctctaatagctaagctcacccncatgcgaaaatacatgannaatacaaaaagtccctattacaaagattact

SEQ ID NO: 42447 - DNA, 398 bp, Glycine max
  unsure (1)..(398): unsure at all n locations
agctnggatgtctttctctttggtttgtaccttgcagtctcanaactctcctaaatatgctcctttcaattaaactctcaaaacattggttgttacatcttttaatgcgaaacagatgcaacaaaaagaaggatgctagattggggatcacgagttatgataattgatggaattgcccaaggagtcctttatcttcaccaatattccaggttccggatcattcaccgagatttaaaagctagcaacatattgttagacaccaacatgaatcctaaaatatcataatttggaatggcaagaatatttggtgagaatgaacttcaagcaagtacaaaaagaatagttggaacatagtaagtcagataaaagaatattattaatggtataagtaatcatat

SEQ ID NO: 42448 - DNA, 197 bp, Glycine max
  unsure (1)..(197): unsure at all n locations
ttatcaataaagacaagttgagttttattcagaagattagagattatctcttttatcttagtgagagtgattctcctaaattcttgagtgattcaagaacaccttggctgtatcaaaggactntcacaacctttgtgtgttgcccttgctggaaagagtgaatctttccttcctttcatcatcacccttggtctttc

SEQ ID NO: 42449 - DNA, 566 bp, Glycine max
  unsure (1)..(566): unsure at all n locations
tggaatgaaaaggttaaaccctttgaaaccgatctagcacctgagatcctctgagtcacctccggcatgcaagcttagaattatacaataacacttttttcccataccatgaagtccttttaattatcatgctatcatggaacttcttggtcttttctttgtagaacttggcattctcgtaggcttctaggcagatctcatctaactcactcagttgcagctntctttcctcaccagcttgatccatagagaagttgcaggtcttcactgcccagtatgctttgtgctcaatctccactggaagatgacatgcctttccaaagacaacccgataaggagacattcctatgggtgctttgtaggtagtccgatgtgcccaaagagcatcatctagcctggtactccaatctttcctgcttggntgcacaatcttctctaaaaatctccntgatctccctgtacaaatttctgcctgtccattggtttggngggggggtgnggntnattaaantngggttgggaaataaccccccttggtggggaacacaacccccccatttactttn

SEQ ID NO: 42450 - DNA, 403 bp, Glycine max
  unsure (1)..(403): unsure at all n locations
gatgctcataattgtagcatttgatagtctacatgctcaagtctagcatgccacagggtaggactatcaacttggctggttcttttgacatacacctctcctgcagataaaacaaacaaagaattcttccttttttcttccaatatgatgtcagcatcaatatttctcacatcattcaggattntgacgctattggggccaaaaagaagatgcttgcctgagctagtcatttgtgagacataaatgacattnttctttaagccaggaacatgatagacgtcactcagctgaacttcattgttgccagcattgatctttacagttccctccttcacaacaggatgtgttgtgttgtgttgccagcagtgactatgactctgtctccattgtgatgatgcatttc

SEQ ID NO: 42451 - DNA, 184 bp, Glycine max
  unsure (1)..(184): unsure at all n locations
agcttanataggtattctaatattntctntatcttcaagcctatgtagtcaatagtagtcatagcgtagtggagtggccccttgtcaccacaattacctcacacaatgaaggagcactcattgcatgatcgcagttggtgtggcgattttgcacctgaacttaaattctatcaaaaactaaaaa

SEQ ID NO: 42452 - DNA, 364 bp, Glycine max
  unsure (1)..(364): unsure at all n locations
ntcgccgcatgcaagcttcaccggatgacgccaatcgaacatttcctaatagacatcatccaaataatattcacggattgtatagaaagtagaatggccgacttttgtcgttgtaaggccgcgactgatatttttcagccgacgttgcacaatttttttacaaacgctggctgataatatttttctatggtagaggtagctcttttgttcggtgttgcagtaaaaatttactatgaaagtcggctatgttttcaaccgaagatgtgttgtggccgacaccgtcaagttttcatttgcttggaaaggaaaacgttagcgaacctcggaaanaaaaatttgattcaccgatactgattctaaaaaa

SEQ ID NO: 42453 - DNA, 479 bp, Glycine max
  unsure (1)..(479): unsure at all n locations
cgcanttggaattgcgaaagctccactccatcattaggattagtacttgacatctcanacaaacaaatcaaacgtaacaagacaattatagttgttgtttgaatacctcacccactcatgtgtatcacacaattatggcttttctctaatgaaaacactcttgccttttaccactctaattccccttgagttcttaggcaattcaagagattatggtcacagcaaagaacaattcaccaatatgtgtaaggtaaggctagacagacaaggacaaggttaaccaagaaaaaggctaacaatgtttttaggcacaattgaaggaaataaaattccgaatntaggaattcaagtaacaatccttcataaaaccaatatattaccttaaagagatnttttaaaanaaagttcttcaagcatgaaaccattcagcccaattttttttntgcttatacgaaaattctgttttttttatatataac

SEQ ID NO: 42454 - DNA, 307 bp, Glycine max
  unsure (1)..(307): unsure at all n locations
gagattanaaaccattaatggctaccttggatcgcattcaatccacatatatatatatacacacacgtttgtaagtcaacatttaagtttttttattaatattttatatatactttacaagtcatcgctaaaaaattattattaaaatattttttacttttctaaaaatttaaaatttaaaaaatatgatttgaatattttatttttttatcatcattaaataattcaaattaactattcttattgattagaatagtttttttaataaaattaaagtatttaaaattctcaccaacataaatttatc

SEQ ID NO: 42455 - DNA, 428 bp, Glycine max
  unsure (1)..(428): unsure at all n locations
gcttactagagcattgcattaatttaaggtatatattatctttctttcacatgannaattgggagtacttatgttgtagcaaagtccattaaattagaattttgcactgaataaaataacaaattgngtagaatttactggtaagagtaacttgtaatctttcttctagattatattgcgagtagtgtaacgatggattttaagaagatttcatgatataaaaaaaaatgaaagacaattaaaggaaaattgtaagatttattaccctgttcagcccttanatttttgtccgttactcttgtatataatcaacaatggaagggtaaaaaatcctttattggggacaaaagcatagtccatatattttngtganaaaaaaaatattatanattctacaaagatataatctcatgaatttcatattttaa

SEQ ID NO: 42456 - DNA, 235 bp, Glycine max
aatatcaatcgtggctatctaacgaccgatgtcaggtatttctgtttcaattcaatccctgaataatatttggatattgtcccataagaaatgttcgatcggcgtcatcaggtgatgcttgctatatattatagacctgctggatcggtcatctttcctggccgacatcgactatcattctttttatcagtgtcggtgaatcatagtttttggccgaggtgggctgatgtttttc

SEQ ID NO: 42457 - DNA, 321 bp, Glycine max
tctcgatatgtgatgtgcctgaatcgaacattcgagttaaatgttatttcgatttgaatttcccgagagcttgcggtatttaattttgagcatcttgacacatgatgcgcatgaataggacatccgtgtgaaaagtttggaccactatatattctcgagagcttggttgatcaatttcgaacgactcgatatgttatgcgcctgaatcgtacatacgagtgaaaagtgatgaccatttgcatatatagagagctttcgttagtcaatttcaatgcgttttatatattatgcgcctgaatttgaccacgctgtgaaagttat

SEQ ID NO: 42458 - DNA, 94 bp, Glycine max
  unsure (1)..(94): unsure at all n locations
agatattanaaatntaagaatctatctttcaatcatctctcaacatcatctttcaactctttctacagaattatctgattcatttctcttcatc

SEQ ID NO: 42459 - DNA, 434 bp, Glycine max
  unsure (1)..(434): unsure at all n locations
tgtcccgctttgggtgggaaatgatagtgagactcaacttagataccttccttatgctacaacaattgcagcaagacccactatctacaatgagataacaatttttgtttaaaaccttgcatcttgtatgaaagatgttctctctttgggtttggtttaggtcacaagattgaatcccaaggaaccttctcaccattagaagatcaccttcttcataggggtaaacctcttcaatatgctcatcacccttggcttcaccctcacttccacttgaggaaggagaagaggtagcctcctcttggctactatagatgccttgacccctcatcatcatggatttctttgtggggcattaaaagcaatgtggactttcctaatacatatgaagcacttactgntactagttctatcttgtgaactagcctttggagtga

SEQ ID NO: 42460 - DNA, 488 bp, Glycine max
  unsure (1)..(488): unsure at all n locations
gggaagaggattggtcatgagtgacgcattcttaactcacctgcngcatgcaagcttatattatcagctcaaaaagatagatagactatacttgatctctgatgaaaaaacaagctcgggcgtaaaccaagtctagtcatccaataatgataacacaatatattcacacccgcttctcatatatatacttggtgagatggctatgccaaaatcagcttatatgctactcactaaatccacttaagagaagattaaaatacttgattaatcccggtactcagaagactacatgtagtctcctttatgcaaatagaaggttactagtgaacttgatacaacgagcctatgcctttccacctgatatataaaattatctcttatccaacaaaatgtttactaaaaaatttgctccacgagactattcctcacacaatatatataaatttgtcctttgcaaccttgaaccatatatttgcctatgcgccctc

SEQ ID NO: 42461 - DNA, 533 bp, Glycine max
  unsure (1)..(533): unsure at all n locations
tcaccgatancctatccnncttcgannngtttttttaatttatttgnnnnnnnnnacaaggagcgtgatcgctcgatngcgcnaccatacanactcaagcccacgcttggcgagtctcacgagntcacatagacatggctcgtactttttagccacgatgcaacaccacaggcgagttgaaacccaatgcatacatcatcccgggccaaggcaccataaaaccaagcattccgcttggacgaatatcaaatgatcacaaaaaacaagggacaacctaagtaaacgacgaagctactccacagggattgaaaaacctacggcaaacatgtcaccgcgccaaagctcgaaaaaagcgagggacgcccatggagagccaataaaagaaccaagacacatcttaacaaagacacacgtacgtacagaaacaccacaacactcggaagagaaccttaatatgatctgtacaagacggcaaaattataacaaacctaaagactcaacctgcgacaaaacatattgtaaacaatgactcc

SEQ ID NO: 42462 - DNA, 184 bp, Glycine max
ctctgctagagtttcctagcattagagagaaagcgaaggaattgaagcctcaatttcattgtctccatgtaaggggtatttctctctctacaggcattcattagcaaatcccaatggtatgaacctacgaaattgagtaccataaacgatttctgagtttcaaaataatccaacggttaacgag

SEQ ID NO: 42463 - DNA, 418 bp, Glycine max
  unsure (1)..(418): unsure at all n locations
tgtgctattccaagttcattaatcatacctttaagccagattgattccttcactccttcagctagggccatgtattctgctttagttgttgaaagagcaacaactaattgttgatttgctntcaaactgattgttgtaccaaacaaagtaaacacatatcctgttaaggacttccttgtgtctacatttcctacaaaatctgcatctacatagcctgtgactgctgcctcgtgtgctgtcttcttgtaccttaaaccagctttcaaggatccatttagataccttagtgtccacttcacagcttcctagtgtgcgctgccaggatctcccatgaatctacttataatacttacagcatgagctaagtcaggtctgctgcanaccattccatacattatgcttccaacaccactggcat

SEQ ID NO: 42464 - DNA, 545 bp, Glycine max
  unsure (1)..(545): unsure at all n locations
agggaggggtttgatcttgttacgctgtttcatgcanatcacgcactgcagcttaaanttgaattaagacgttcagaaactgctggtaatctattaccatatatgtgtgatcgcatacacagcgcacaatttgaattcaaatttaatagctgttgtaatcagtttggccactggtaatcgattacatcctctggtgatcgattaccaaagagtacatttgtttgaagagacttttaacttanatttttggccaaaccttttgctacttaattggaattcccttcctatntaatataccccttctaagactctagagactgtcttgatcatccctcttgaatatctctaattctttgtcttgaataagctctgagacgcatgtgaacctttggataatccaaacatttagctatattctttgtctacaagtttcacacatcaccattgcaatattacacatggaatgtgttgaccctctaggtctgaatttagagggagtacttgccttactctggtgagaatatctagttactagacttattttn

SEQ ID NO: 42465 - DNA, 442 bp, Glycine max
tatgcgcatatttccttacaaacgttctcttgcacaagacattctattaaccgtaaaaaatgcacccatatacaatcaaggcagcttcgttacctagattatttacacgtacttccaaggtgtatttgttacttacatcacacacctccttggctaaattcacatacatgcatactcaaagcattttggggtaccaaaaattgcacatgtgcacatcttggtatttctaacacctatacatacacaaacttcatgatgaatcttgactatctacacaataaggtgctacatttcatgctcttttcaagtttttgctacctaaagccgcatgcaaattcaagtatattttcctttgctgactaaaattgtattcaaattaagaggaatacattttttggtaatgtatcttctttacataacatgcaacatatttatgtatatt

SEQ ID NO: 42466 - DNA, 260 bp, Glycine max
  unsure (1)..(260): unsure at all n locations
ctattaactggctcaatcataatgtcaacaaaatagcattccattgattctgtccactctattgtagaaccagcatcgtanacatttgaacaaatgccattcttctggtcaccttcaaattagaaatatccataagaattcgcaaaaaatggcgatgcaattgaccatattggacatttcacaaggttagcagtaacaatgtgataaacaagatatattcaatatctagcattggctcgccttctatanagtgtaatagt

SEQ ID NO: 42467 - DNA, 429 bp, Glycine max
tgtagggttaggaatggcggataagaatagagagagagttccttttctgggaagtgactatattctagtagccgcgtgacatgagccttcgcattcgcccagaatacaggaacaaacttggaatgggcaccaggcgcaaccaattctgttcaaacattctagttccgggtgttactaggagcacccagaatttttttctggggcacccaaaaacatagtggaagaataaaaatctctttcacaacaatgagtaaatagacgttataaataaatagtattgctatatataaaactaatcccgtgttaagaaggcctcaagaattattagcgaacctattcagcgaatattgatggaatttggactcacaagaatgggggtgcaattctagttattcggatgaaattgataaaaataaacacaatctttat

SEQ ID NO: 42468 - DNA, 459 bp, Glycine max
  unsure (1)..(459): unsure at all n locations
acccgccatgaaccacgtgacacccgtgagtcacgcganctcanagatacctgcggctgcagcttgtcaggaatacttgtagagccttggtattgcatttcctcttcaactagatacgatgacatgtcaaatatgcttctgctgccaggtgaatttataccgagaaaatttttgttaaataaaaaccctcaactggatcatttagtttggcctttaattaaattagtttgttagtctctgaattcgaatacttcttctttaaacatacagatgaattgggggtagtgatatttttactattgagggctaagaggcattttaacatgaagctgatacaattaattatgactaaccaaatgactattgaggaaaactattacccaaatgaccaaatatgttcttgaagacaaccaagtgagttgtatgcatgactctacattgttttaatgggtacattgt

SEQ ID NO: 42469 - DNA, 276 bp, Glycine max
aaactttatgatatatgacgcctatcttgagcctaatttaatttcatgaataaaagaatgatttgaaattgggaccatgttatctgaatacttagctcttgtatatattttttcttttaatgaatttaacatttttttggttctcactgttattattaatactgtgttgattgacattctcacattatggactccaaacagcttgcttgtatacttcatattcacccattaatgtggtattactgatggcctaatcaatgggtatctaaactaact

SEQ ID NO: 42470 - DNA, 327 bp, Glycine max
  unsure (1)..(327): unsure at all n locations
ggcctatcactaanataaatcttaatggttgatgacgccatgatctatatctttcaatagctgtgtgaatacttgtatgatatgttgagaagtaatcgactgatagctcatgtttttcaaaaccattatattgtagtaccatatttttgatatattaaaactgtctatgaccatcttgggaagacgttgattatttatttgtgttacaacaagcgtctagcaagtcgctaccttgtcgtgtaatcgatcactagcacatctgctaagggtactcgattacaacattcctatcaccgatcacgtaattgatgaccacattcctgatat

SEQ ID NO: 42471 - DNA, 128 bp, Glycine max
  unsure (1)..(128): unsure at all n locations
agcttgctctaaatttacattgatgtgtgtatttatggngggagggtgtatgccatttttgttttaagagtaatgtcccactggttaaactaactcttccaatgtttgccttcgcaggaaatggcccc

SEQ ID NO: 42472 - DNA, 432 bp, Glycine max
tgtctcagcggttatgcgagacaaagaccaacatgttagccattgtcatcaagtaccaagaagaattaaatctagccacggcccacgagcacaaagtggcggacgagtatgcccgagtgtacgcggaaaaggaggctagaggaagggtgatcgactcgttacttcaagaggcaacaatgtggatggaccgatttgctcttactttgaacgagagtcaagaacttccccgattgctagccaaggccaaagcaatggcggacacctactccacccccgaggagatccacggacttctcaactattgtcagcatatgatagacttaatgacccatataattataaaccgctaggaagtttctattgtcgctcagatcttgactagttatgacttttctgaataaaatgagtttatcccacgtgtttactccaaaa

SEQ ID NO: 42473 - DNA, 285 bp, Glycine max
cgcatatgtctcttgttgaacttatcctaatttaaacagcattataagcacaacataataaaaactagaaccctgcacattatgtctagcactacagttatctagccctgctatatcaagttccaaggaaacaatacatttgttaatgctaaagttcctaacagcacacaccaatgggtgatcaaaccacaagcatgcatacaataagcttagatagaaacattgaacccatgaaaataacctcaaatagataataaaaatatttacatcaagtactcagtagaa

SEQ ID NO: 42474 - DNA, 407 bp, Glycine max
tatactataaaagtcatattctattggattcgagggataaacctttataggattttcctagaatctctacctggtcaatcatgtctagtagcctttgagagtgacaagtggctttgacatataagggtatgacacctcaacatgaaaactctatccaaaatttctaaacatgaccttgtgaaaggattacccaagatcaagtatgagaaagatagagcgtgtaaggaatgcatcaaagaaaaacaaaccaaatctagcttttagtctaaaaatgcaataactacttcaaaagtcctagatttactacatgtagatctttctggctctaccaaaaccttaagcctatgttaaaagagatatgaatttgtgatagatgatttctttagattcacatgggttttattcct

SEQ ID NO: 42475 - DNA, 278 bp, Glycine max
  unsure (1)..(278): unsure at all n locations
ctatcaaaaatctattgtttgtgaaagtcaggagtggcttactgacaaaaagtacttgggtcttaatctcacggagagattaaaggttatgccaggagtggcctaaagagtactcgttgtatccacaagtggcatagagaatacttggttgttatcaaagaattgattaacaaaacctttcaagttttgaaggaaaactggatgtagcccaagagtggggatanatcaatataaaacctctatatttttacttgctatgtataacataggctcataac

SEQ ID NO: 42476 - DNA, 371 bp, Glycine max
tcaatcccttctctttctctctaatgtttgagaactctatcagattaatcagaggaaaaattgaggaatctcataaaattcttagagatgccgctatcgctttcaaaaaacacgtgagtccgcttagaggtaagggatgagttattcacaattgacgattagtgagaacatttgtagggattcttagagtatcaattggaatggattttggggtggttctgcaatttttattttgtccttataattataactgtgaatcatatatgaattatatatgtttaatgaaccatttgatgtcccaaagagaaattgttgtgaaattaatgtgttcttgtgtggagtgtaaacccttaaaaaaattgagctctttt

SEQ ID NO: 42477 - DNA, 455 bp, Glycine max
  unsure (1)..(455): unsure at all n locations
ggttgacttttcaagaggacagacccaacatataaacaaacttgctttgccatcatggagaggggtgggttaatgccatcgaggtgagtaggttacaccggcccaaacatttgaaggacataacgacctccagaaggttatctacaaagccttgcaaaaggtgggcatgattccccacggcgggcgcagaanagattcttgcttaatgcatctgggtgaactgcatgacatggannacatgttggcggtaagagatctattacaatagatgatataccaacgcccgcttgaggtcngcagtgaaggggaggaagaacaacatgtatacatgcagtcngtagatgaanaagggtctaccaagccctaactttttgtantagaacttaccagggacacggctccncaagactcaacaccctcggnagatcgggtagagacctatctcattccttacg

SEQ ID NO: 42478 - DNA, 380 bp, Glycine max
cgagatgaggaagtgtagaagggtgagacttcctgcttttattctttgaccacaaagtggtacctggagatatgtcgcgggggtcacgagaccttggggacgtcaggtggggtgctattgcccaaaaccaagcttgaccaatcccaacccaacccgggcatagtcagtcagtgagaacctgtgatgtacctaagtaggcgagctcctggcagtcaacagataaaaggaacaaagaccacaaagcaaggaggcttgtgtggtggctggccagctatgaacttgattgatatgtgagatatggactctggtaatcgattaccaagggtgggtaatcgattaccaggcttaaaaatgaagacatgaggctaagatggtccctg

SEQ ID NO: 42479 - DNA, 352 bp, Glycine max
  unsure (1)..(352): unsure at all n locations
cttgacttggttcattntcacccctacttttccagatacacttggatatctcctatcanatctaaggctgaaactctttatgttnttcaagcttttaaatcaatggttgaactgcaacttaatactaaaatcaaaagtgttcaatctgattggggggtgaattcagacctttctctgctctcctaacatcctatggcatctntcatagacttatctgtccccacactcatcatcaaaatggtgtggttgaaagaaaacatagacatantaattgattangccttacattattgcatcatgcctttntacccttacagttgtgaattatgcctttattactactgtctatcta

SEQ ID NO: 42480 - DNA, 463 bp, Glycine max
tacgtgacactatgaaactaagcttagttgtataaaatcttgcccctagcccaaggttttaagaaagggtgttgctatggtacccttacaataatctaaagctatgtgtggataaaagttgaaaaagtatttttgatggaaaaaaatcgacaaaattattgctttcagagcgaaaaaacttttgtactttccaaccaaattccaaacatgtcctagggttttggtattgaactaattactggatcagtttgaacataccaaagaagtaagaactctagtagaaatttccaataacattatcaaaacccttcgatttcccagagtgccataaaatctctttaagaaaatgatcttcaaaaagaaatacgactgtgaagtcatgcttatatagtcatagagtttctaaaactagccagaaatagagtgagcccagtccatcatatatgaaagttaaaacacactt

SEQ ID NO: 42481 - DNA, 500 bp, Glycine max
  unsure (1)..(500): unsure at all n locations
tattggtcgggatcgtgaaactattggttgttggtcataaggataatagttcttatctgattangtcangggcggccggcccgggggttacccgtgattggtaatggcataaccagaaagaggagtaggggagacaagcttatgcgctgtgtagcgcaacccatctatttcgggtacagggacgacgaggggttcctggatnacattcaagaaacaatgtaattgattacactcttgatttaatcgattaagtgttcttgatcacttttgggaacacttttcagaatgatgtaatcgaatactatatcctcgcaatcgaataaaccagaagactcgaaaacaatcatgatctcannnttgagtgtgtnattgactatgaatatatgatantcgattanactagagacatgatttctctanncaagtatcaagactttatgtatcgattatacgcatgtggtaatcgataaaccnatgagtatatacacatatgatttttn

SEQ ID NO: 42482 - DNA, 392 bp, Glycine max
  unsure (1)..(392): unsure at all n locations
tgatccttgaatcttgattcttgaattcaactttcctcttgaatctggaagtgttcttcaacttttcctcttgagtcttgaattgttcttgattccatcttaaacattttgaacttattctttgattgacctttgagatttttttcatcacctttgtcatcatctttgttatcatcattgttatcatcaaaacatctttgaatcattcttgattcaccatgaagctntgcttctacatttccaagttagttagttagtaagagtcatttttgtacaaaatacatttttagaaacttctagtgcaaggtttagatcaaactcttttctctctttntctcttacttgttcttcatatttcttcatctcttcaacattgttcttctcttttcttt

SEQ ID NO: 42483 - DNA, 197 bp, Glycine max
gcttaagctgtcagaagacttgcttattcatttagtgctaatttctctaccttcacagtttagtcaatttaagatctcttacaactttcagaaggagaaatggtctctcaatgagctcatttgataatgtgttcaagaagaggatagactgaagcatgaaaggactgaaagtgctcatgttgtgagtacctctaaag

SEQ ID NO: 42484 - DNA, 436 bp, Glycine max
  unsure (1)..(436): unsure at all n locations
tgtccagctggccactccaacatctagtccatgaatgagggagtatggatatgaaatattggccgcttgaacttctggtcgtgctttactggtgaaatattatggtgtagaggagctagagtagtcctctagagtcactctcggtggcgatcatctgccattttcatatcaagaccagtttcaataattcgattaaaaccaccaaaaaggatatttgagaaagtctacgttttttcccgggatcaaaataagcaactttctctaactcgggcaaatacaaaatctccattccacttccaatacgatacctaaagtcaacactataccaagctacaaatttaaccaatgaataaacggatacaaatcagacatgaactagaagatagagcttgtaaacctcanatctaactcaacaacaatacgcattatgacatat

SEQ ID NO: 42485 - DNA, 178 bp, Glycine max
  unsure (1)..(178): unsure at all n locations
gccggccgttaccaattatatgtttgacactatcataaattctgcattcatcgctatatactattcagcgatcaaccgcgttaagcaccatactgcttaaaaataccccgcctgcctatcgagttgtgaattatanatttgctctgaacaacaacgatggactgattcgcgattccct

SEQ ID NO: 42486 - DNA, 563 bp, Glycine max
  unsure (1)..(563): unsure at all n locations
aggggacgtgnnnttgttgcccgtagaacccgctgaattactttcanangcacgcatgcatacatatgcatgcgaaatgtaattatgaaatttatattcccgaattatcaccttttcctatnaaaccctgcattacgagacatgttcaatcattttgtttctaagtgaaaccgggttatgatccccacatggttggctcgtggtgcctaacacatgaaactaataattgtatgggatagatcacgctcccccctcttttagtttgttttgtanaggaaaacgcaaggatgaacaaacatgaaaacaaatggtattgcattttgcacatccaanaattngctgaacgcatatgcatgatgatgccatgactcatgccaaatgtgaaggccgaatatgatcacngacaaatgcctgatatgtccattatgatgtatgaagagatgttatgcgatgctgatatgaatgcttttaccgacacacaagccagaaatatntctttttcttccatttggggcccatgccctgtgacaattataagtatatgaccttcgttcatgacaagg

SEQ ID NO: 42487 - DNA, 447 bp, Glycine max
  unsure (1)..(447): unsure at all n locations
tactcagcttacaagcaagcttccatcacttcttagcctttntctctttntgagctttctttgaatctctttgatgagaaaggccaattcttcttcatcttccacaaaaatctcataatcgatattctaagaatcagaatatgctactgagtttagtgttgtggaatggtgttttgtcttagttttcttacaatccttgagtgttattgcttcccctttaggtagcttcatctcatccatcagctcttactcatgaacctttagtgagccaataagttcatccattgccaaaattttcaggtttttggtttcttttatggtagtgacctttggtctccagaatttacgctgacttcttagaatcttcttgattctctggtgtgtggtctttctttctactaaagcattcaaatagtggaattggtgaacatatcttttatggactca

SEQ ID NO: 42488 - DNA, 370 bp, Glycine max
cacttgacttgatttgcaaacgttactactgtttttcgtatataaatgccgtcacgtatttatctctgtgtcattacaatttctatcattctgtgcggaaactagcccaaagataaactgtgttaactgtacagcgggaattctatttttattactaaggtacacgttgtacagatttgaatagatgatgattattggaatggatgcatcgtacgttgtaataattaactctagcagaaaaacttatttatcatatttggtggctatcttcactctgaatggagaaaatacttcgtgaaaaatatgccatgaagagagtatgagagaagagagattgtgatacagtcacttagttcataaacagcctctt

SEQ ID NO: 42489 - DNA, 556 bp, Glycine max
  unsure (1)..(556): unsure at all n locations
cgcggattgaatccatcttgtngcgngatcgtctccgtgaacctgcanagatgaactgcaggcattgcagctngttcagcgggagggcatctattacaacatatgatagatcaaggccgacttgaagtcaatagcgaggagaaagaggaacagcatatctgcctgcagtcggcagataaggaaagtcctatgaaacctaaacccttggtgatacacttcaccaggggcactgctccccaaaggccccgagtcccctcggcggtatcgggcgttagacttgttcctctcacttacaaaaatagcaacacagtcccatggaagtacgcccctccaggcgataggaagggagaagctaccaacatcggctcactgtcagccaaagtaacccacatctctggcttaagtggcatacctgcgccgtcgtgtgttcgcaccccgactaccgcgcacccataacgctagaagaaaacatgtgatcatggacatacatctgggatcccgcccgtcgagattgtcacagaaggttgtcaggaaaaggacacgcagaagagttcgt

SEQ ID NO: 42490 - DNA, 431 bp, Glycine max
tcagaccacaacaacacaaaatctaggtatccaaaacccctcaatttaatggattttcaaggtttgagaagtgaaattgagaatggaataaatttgaagcaaactctcacctcacaccagtctataacatcaatttaaacttgttcaaactggatttacacctaaaatttcgccggatcaaaattggactcctcaacacctaaatttaccctagaaatggctcttgttcactttggtcatttatttttctctctagcacagcccagactttctcataagtcctaaatggcatttcaagctaggatcaactcactctaacctccaaataccactaaatccagatttgaccttccaactctcaaagtctcactctttttccactcacaacaccatactctcaccttctaaccctaggttaactctacccttca

SEQ ID NO: 42491 - DNA, 413 bp, Glycine max
  unsure (1)..(413): unsure at all n locations
gccataataataaatcttctgatcgcatgttcgttggacactaatgatcggagacttatatctacttttgcggagaggtaacataaggaaactattaatttccatcttccagtaggagaagtgaccatcaccctggatgatgtggcatcgttgctacatcttgccattataggcgccattcatagctntgaagaatttcttgtgatgaagtcgctctcctgtagtggaaattcttgagttagttcaaaagaactagagctagacagtcaatgtcttaacatatgtatgatatctgngttagacattatcgaacaaatgtgcgcacgcagtgattgaatactcagcatattgtgtattatagatgcacctcttgtaacagatgcactatggcatgtgattctgagattcggacc

SEQ ID NO: 42492 - DNA, 410 bp, Glycine max
  unsure (1)..(410): unsure at all n locations
tctcccncaattntctataaatagggggagaagtgaagtgaattatggttcagccccttaggcacttctctctctttcgaatttgcttggaaaaattgtttccgtgaagaaaatccaagccgagacgcttccgaatcgtttccgtaacgtttccgtgaggaatttcgcgaaggtttcgactgttcttcgacgttcttcattcgttcttcatcgttcttcaatcttcaacgggtaagtacctcgaaccaagcttttcgattcattctatgtacccgtggtggtccacattgtgtttcatgtatttttattctcgtttcatttactttttatacccccttttgacgtgcttaagccattttatttaagtcatttctcgcttaacctaaaaataaaataaatttccactgatc

SEQ ID NO: 42493 - DNA, 310 bp, Glycine max
tggattgacgctcgttggagatattaaatgactcctttatgatgaatgtggcttgggacttctgtaataaaattggatgttgtgggttcaagtaattccgtcaaaatatggttgtggggaatgagttatgcccatagtggagaaaaagatagcacggtcacatttatggaatggtgtgaaacatatgtgggactgttttcttttgaattgtgagatgaataggctcactgatatgacgtgaaagaattctattgatggagtgttttctgtaacgagtacttacctcgttaattgcaaaatttgatggctc

SEQ ID NO: 42494 - DNA, 429 bp, Glycine max
  unsure (1)..(429): unsure at all n locations
ntgatgcaacatttggagaggttaatgaaacaacgagatgatgctctctatgagaggttggatcaaatggagaatagagatcataatgaagaagaaaggaggagaagagggaatgatggtgttcctagacaaaaccaaattgatggtattaaactcaacattcctccatttaaaggaaagaatgatctggaggcctacttggagtgggagatgaaaatagagcatgtattctcatgcaacaactatgaggaggacaaaaaggtgaagcttgccgccacggaattttccgactatgcccttgtgtggtggaacaagctacaaaaggagagagcaagaaatgaagagccaatggttgatacatggatggagatgaaaaagatcatgaggaagcantatgtgccggctagttactcaagggacttgaaattc

SEQ ID NO: 42495 - DNA, 400 bp, Glycine max
cataattaaaagaatgcttacttgaccacgagaagcttgctttttatactttctcatctagaaatcgagatggtatgtctttctctaaacatgacaatcaagaagctcaatatatatatatatatatatatatatatatatatatatataatctgtaaaggattaaattcaaaagagaagtacacaaaccttgaaaaaatggcatataaacttcttttccaccaatgacctactgtttgttcagctgattagaagctggagaaatgaagtatatattccccccctccccctcccctaatatatatttctttcttcacttatttctactctcagtaactcacataagaacctgtacttaccaaatttgaagttgtggtataaaatgtatgaagttcatacc

SEQ ID NO: 42496 - DNA, 122 bp, Glycine max
gcttcagtcgaagaatatctgccatttctttttgttcctctgccaaattcctctacaaattatctaactgtctctctctcttacttagcttcattgtactcttcttcttgagatctccctcg

SEQ ID NO: 42497 - DNA, 424 bp, Glycine max
tcgggcttctcaatttctccaagttgctgcatggaatggcaatggtctgtatggtggtcagcagaggagcacaaactacagacccttgcaacaggtacagatttctggttcaaggtcagctaggttaccaagttaaccaatgcatccagtttgccttcaagcttcttagtttcagatgatgcagctgagtttgtagctacctcatgcactcctctaatgactatagcatcatttctggcgctaaactgctgggagttggaagccatcttctcaattaaatttctggcttcagcaagagtcatgtctccaagggctccaccactggcagcatctatcatacttctctccatattactgagtccttcataaaaatattggagaagcagctgctctaaaatctgatggtgagggcaactgacacata

SEQ ID NO: 42498 - DNA, 284 bp, Glycine max
  unsure (1)..(284): unsure at all n locations
agtcacctgcngcatgcagcttgttaagagaattacatcagcagttctgtttgaagatgtgaatgcacccgagagagctacctgctcttcaactttgaaagactgtaaattccccgagtacctcatgccttcaccctggggaactgagtctaagggagtttcactcatgaaggtttgcccatatacatattgttctcttaatggccatggccatggtcatggtcatgctcctttgcctccattgaagagcttcatgtcagcaaggaagcatcttttggagactc

SEQ ID NO: 42499 - DNA, 435 bp, Glycine max
  unsure (1)..(435): unsure at all n locations
tatatgcgtcacagtaagtcctgctcttattatactcacatgttctatctttttaatctacttttatagtgtacagtctaaaagtatgattaatatttttatttttactaaaaatgttttatttttaatatatatctttacttattaattatcatttcccttttttattactctattattatgattatattaatatcctatttattagtcaattctcatataacgtcaagttaattaaaaacaaataaaaaccagtaatagtaagtgacgttatatcaaatttttaaaggggttgatcaaggaaagactcaaatattcaaagggggtaaacgaatagaggtataaagaataatanangtagaaaaatattaacagcacacaatctagtctctcatacgttntctattattattctgaaaattattactaccttca

SEQ ID NO: 42500 - DNA, 321 bp, Glycine max
  unsure (1)..(321): unsure at all n locations
ttaagtcacctgcggcatgcaagcttgagatgangaagtgtagaagggtgaaactttctgctnttattcgttgaccacagagtggtacctggagatatgtcacggnggttaagagaccttggggacgtcaggtggggtgctattgcccaaaaccaagcttgaccaatcccgacccaacccgggcatagtcagttagtgagaacctgtgatgtacctaaacaggcgagctcctagcagtctacagataagaggaacaaagaccacaaatgcaggaggcttgtgtggtggctggccaactgtgaatcttgtgtgatatatggg

SEQ ID NO: 42501 - DNA, 403 bp, Glycine max
  unsure (1)..(403): unsure at all n locations
tcatgtgtttcanatcatggtttctattcatttctttcttgcttgtaacaactttgtacattgtctagtcctacgacctttctgtctatttctcttttgctttcttccgacctttgatcgggaattttttctttttcttgctttccttcaatctttgattggggattttctctttttcctttcctccaatctttgattggggattttctctttttcctttcctccaatctttgattggggattttctctttttcttttgctttttgaaacgtgtaacatcctggaaatttctacccggaatttttgaaaacaatgtattttgaatgattatatatatataagtattattcattgtatatgcagatatgttcttggtagaagtagggatagtgggggcaagata

SEQ ID NO: 42502 - DNA, 432 bp, Glycine max
ttgcctttagggcttgtacctcatcactttcttccgaagctttatcctcattgtctctcacagtctttagatttgggagccaatccaatccttgtgtccggactctcagccacttatgatagccgccgatgatcccattactgcttctcctaagctctctgtcctttcttcacgccgcatcccatgccttgcgaactccttggagtaccctcacgttgtggtcactgaaaccccgtgcgatgaaaggcgtgatgctttcgtctgatggcactcctctcatggggtagccaagctgtcttatggcgaggacgggattataattaatacaaccccttgttcccatcaagggaacatttggacatccttcgcatgaagatagaatcctgattcttccttccttctagcgagggaaccaattaacaaacgcccctc

SEQ ID NO: 42503 - DNA, 417 bp, Glycine max
  unsure (1)..(417): unsure at all n locations
tgcttgtggngcttctatggaggctggatctttgagcttcaatgaggtcctttaatggtgattttccaccatggagatgcagcggaagacaaaggagaagaggtgagaggaggcgtcatccactagggaataagccatggaagaaggagcttcacgaccaagatgagccttggataagaagcttggaaggatgcttcaatggaggaaaagaaagagggagagaaagagagagggggggagcacgaaattgaaggaataaaagagggagagaagtggaactttgaagtatgtctcacaagactctcattcatcaaagttacaacaagtgttacacatgcttttatttatagactaggtagcttccttgagaatctttcttgagaaaacttccttgagaagcttctttgagaaaacttc

SEQ ID NO: 42504 - DNA, 219 bp, Glycine max
gagtcttcacaataatcatcattaagcagaatactaacaaatctacccatcatatctcccacaaccccatacccacgaaatttaagagagaaagaagtccaccccaacctgaattttcgaagtcccactcgtagccacgcacttcacgaccccgaaaatgctctcctttcacgatttggggcagaaatgagcaccacaggttgaagctttgtgtggagc

SEQ ID NO: 42505 - DNA, 378 bp, Glycine max
  unsure (1)..(378): unsure at all n locations
tcattntttattggttgaagatataagaaggacttaaaattgttagattcgctactgaaaaaaatagatgtcgtgttagggttgatgtttgcggttctgaaattctctgtttattttatcaattatgggttttagttaagatacatagagactgcaattatatgttgataatgagttgttgctgttcattttaaactgagtgagatgtgtatagtgaatcaaaatgatgcctatgatgagattcattttttgctactcctacttgattatgttgtggttgtggttggtgtaagttaaaaattatatttggaaaaggatggtgtaaaattattgattgaaaggaagcttgatggagctgtgagctatatggaactgagt

SEQ ID NO: 42506 - DNA, 461 bp, Glycine max
  unsure (1)..(461): unsure at all n locations
caccccctctcgccctcaccatccaacccatnttaactaactaannnnnaacccaactgtcctcgtngcaacnnnaaaaaaancnanccanaggaaaaaaacaagaaagaagaacatttattcaaccccacccctccccccgcgcagcacagcacccaccaccccccccgcccaccctccacccacccaaaccaccccgcccaacccacgccacctccacccacccccccccccccccccccccccccccccccacccaccacacccccacccgcccacaccacccccaactccccccccgccctcgcccccaccacccccccaccccgcgccccccgcccaccccccccacaccccccacacccccacacacgccgccccccaccccaccaccccacccccccctacctcccacacaccccccgccccctaccgcccacacccccccccctccaccctcc

SEQ ID NO: 42507 - DNA, 142 bp, Glycine max
agcttaagaaaatggcctatcatactacttatttcccgagggaagtcaataaatacgcctcctatctttaacggagagggctaccattattggaaaacccatatgcaaattcttatagaggcaatagaattatatatttggg

SEQ ID NO: 42508 - DNA, 381 bp, Glycine max
  unsure (1)..(381): unsure at all n locations
tgagtgtgagcatacgtaagaatgcagaaggtttgatggttcctgttaattataagagtgaagagtagctgcgggtccttatttgttgaggccggtatagccttcgcagagacattcttcatttgtagataatagtagggagcttataaatagtgttatagataatatgtagttcatagataaaagctagaagataatcataccctgctcataatgcatggccttcattatctgtgcactggtntgatgtgggaacctctaagcccatcttctctattatatttctggctcaacaaggggcatgtttccaagggctccaccactggccgcatcaatcatacttctctccatgttactgagtccttcataaaaatattggag

SEQ ID NO: 42509 - DNA, 129 bp, Glycine max
tttcaatttatgattatggtttttttgatttttaattgtaatatttggtactcttaattctataaatttgtgattttagtccctctcagaatattaattaataattatgaatattagagatattaaatt

SEQ ID NO: 42510 - DNA, 269 bp, Glycine max
gttcacgagcatgggtggctgctggtggaggcactcgaattcccctgctagacctcggggtgatgacactcacatgtttcagatactgcacatattgtccgaatattggaactgaacctgggtcatctgagtaaccatctgccccatctgaattggcagaccctgaatggaagctctttgctgttggtaacattgcatattctggatggtcatttgcctcactaactcttttaaagaaggttgaggatgggcattagatgctggttgtc

SEQ ID NO: 42511 - DNA, 183 bp, Glycine max
  unsure (1)..(183): unsure at all n locations
cggatgttcgattgagtcacgtaatacatcgaaacgctcgaaattgaaaacagaagctctgtgcaaattcaaacgacaatacattttaactcggatgtccgaatgagtcccgtaatatatcaagacactcgaaattgagaatnaaagctctgaacaaattcaaacgacaattactttttactc

SEQ ID NO: 42512 - DNA, 424 bp, Glycine max
ataactcggatgtccgattcaggcgcataatatatcgagacattttgatattgaataacagaagctctcgagaaattcgaatggtcataacttttcacacggatgtccgattcgggcgcataatatgtcgagacgctcgaaattgaacaacggaagctctcgagaaattctaatggtcataacttttcactcggaggaccgattcaggcgcataatatatcgagacgctcgaaattgaaaaacggaagctctcgagaaattcaaatggtcataacttttaactcagaggtccgattcaggcgcataatatatcgagacgctcgaaattgaacatcgaaagctctctagaaattcaaatggtcataactgttcacttggaggtccgattcaggcgcataatatatcgagacgctcgatattgaac

SEQ ID NO: 42513 - DNA, 390 bp, Glycine max
  unsure (1)..(390): unsure at all n locations
cttcatgttgctttccctatctctaacgtctcttgcatacaattnttttggtgccattaggtttttccctagtcatctatgttattattattttttaatgtttatacctccatgactctcgtgagcattggctaggtataactgactttgtacttcattgaatatttctacttttttctcctcccaagattntttccttgatctttgctaacgtgaaacagaatttgcatttatctttctcgcttaatgcttactttttctaattggttgtatctagcattntgtttgcctataaatcctatgtttccgtttctccttcttcaactcttcctttgttntgtaacctcgttagtcatacaaaaataccttgaactttntatgctcttctac

SEQ ID NO: 42514 - DNA, 389 bp, Glycine max
  unsure (1)..(389): unsure at all n locations
ntctcttttgtgcaactatctcatcctctttttcaggtgtatgatgaagcttgacaggttcaggtgcaggtgttgctactggtggaggcacttgaattttgttgctagacctcaaggtgatgacactcacatttttcggattctgcacagtttgtcagaattttggaactgagcttggttcatctgagtagccatctgccccatctgatttgtcagactctgaatggaagctcttgtctcttgctaaaattgcatattctggatggtcatttgcctcactaactcttctaaggaaggttgaggaggggcattagttgctggttgtctttgttgtgattgttgctggtgtattggaggaggaacatatggcttgcttgggctagcaacat

SEQ ID NO: 42515 - DNA, 642 bp, Glycine max
  unsure (1)..(642): unsure at all n locations
agcactctacgactcacgtcgtgaatttaaatactnctactggcaacctctncacnannnnnnnnnaacgnnaagacgcntttgagccatcttgtacaccgtctgcataacanncgactgcangcatgcgatcgtgtggtcctcctactcaacatgccactactctctacacatatctacctgcctcgacacgagacaacctaattacgctcgcaagaccgctcagagcgtggaaggatcatatactatatagggtccacacaatacaccgggcaagatatgtggcactccaatagacataatacgcctctatgtcagctctagcacagaaacacgaatgtccataccttatcagccaggctattaactgacagcgaatctctaaccactctattatttgaatatatngcaatcttcttatcacgtggcaagtantaatttgctctaagctcacattatctatattcataagtatccattggcattctctacaggccataattactcgcaggggtcttacggtaccgtatcagcacttacaacgaagacccacactcgtcgctctatatattngcaccagntccatactcactctacttaccaactcacgtacataactgagagtcagagagcttggtctcg

SEQ ID NO: 42516 - DNA, 398 bp, Glycine max
tggtgctgcgtgtccaagctagaagacattttttatctcatcttttcttcagtagtggactttattttccaaaggattcctttttttttttctctgtttcggtgccacaagccacaagcagggatggtgggatcagtaattgagagattactaataagagctgaatttgagagacatgggcaaggaaaaagagggagaaggaaaaagaaaaacggaaagaaaccataaaaagaaaaaagtctaaaaaatttcaaaagtttgaatgtgattgtctaatgggtatgataaaaatctcaaaagtttgaatgtgattgtctaatgggtatgatatttatattttctactaaaaaatctcataaaatttatcaaaatctatttaaaaaaaacattaaaatttg

SEQ ID NO: 42517 - DNA, 330 bp, Glycine max
tcaccccataggtcagaacgaatattaccgtctatcaatcgttatctaataacttctatacgatgtctatatttgttctcgactactccatcttgctgacgggaattaggacctgatgattgacgacgaataccacctgattgcataaaataagccaactcatttttatagactccctctccattatcataccagactatctttattgcagtatcaaattgtctgcttatcattttgcgaaaatcttgaaaaacattacacacatcacttctgcgtttaagaaggtataatccagtgatacttgtacagactatcacaaatgtcacacac

SEQ ID NO: 42518 - DNA, 281 bp, Glycine max
agcttctttgagaaagcttccttgagaagctagagcttacctaaacacacccctctcataactaagctcacctccttgagaagctagagcttagctaaacacacccctctcataactaagctcacctccttgagaagcttccttaagaagattcctaaagaagctagagcttagctacacatacctctctaatagctaagctcacctccttgagatgagaagctagagcttagctacacaccccctataatagcttagctcacccccatgacaaaaaacat

SEQ ID NO: 42519 - DNA, 405 bp, Glycine max
tgcttgtggagtttctatggaggatggatctttgagcttcaatgaggtcctttaatggtgattttccaccatggagatgcagcggaagacaaaggagaagaggtgagaggaggcgccatccactacggaataagccatggaagaaggagcttcaccaccaagatgagccttggataagaagcttggaaagggtgcttcaatggaggaaaagaaagaaggagagaaagagagaggggggagcacgaaattgaaggaaaaaaagggagagaagttgaactttgagttgtgtctcacaagactctcattcatcaaagttacaacaagtgttacacatgcttctatttatagactaggtagcttccttgagaagctttcttaagaaaacttccttgagaagcttctttc

SEQ ID NO: 42520 - DNA, 439 bp, Glycine max
  unsure (1)..(439): unsure at all n locations
tatcaagtagagtntataggataagagtntatctaanagctctactgtgaaaaactcattttgtataaattattaccttcctattaataatttgattatcacctattcaattattataatttattacatacaaaatatagtaatatcattagccattaatataattaataataactttgtgcaggaagatgtaaaatataagaataaatatccatttcagttcttgaaagtgtcaggtaacatttcagtcaattcctaaaatataaaaaattaaattttagtcattgattgttaaaaaagtacaacaaaataatcctatcattaactctttagtgttaaactacacgattttgatagcacttgtcggcattggccagaacatagcacttatcgatggctctaagaagaaagatcttgttaaagccatggaggaatgtaa

SEQ ID NO: 42521 - DNA, 467 bp, Glycine max
  unsure (1)..(467): unsure at all n locations
ttaactgtcctttggcttggcggncacgctcaacaaagtactttcgatacctactgtacgttgatttcaccaatgctgttatgggaatgttgccacnatcctttaaaaccttattgatacattctgagagggttcgtgtcatgtggccatatcgacgtccttctctatcataagccatcgtccattttcctttgaaatgcaatcaatccatgtggctatggctggacttagtcaagaaatttttctatattttgataaaaaatgtgctttgcaggagtgcangctgcatanaataagttatgaataaccattntaagtataaatgaaagttaaataaactttgatatcaaatatgaaatcttacccaattcttccacatttccttttgtgtgcattattgaattttcatagaagtgcctgcttgtgcccacgcacatacatataaccgtgggaggtgccaccagtgt

SEQ ID NO: 42522 - DNA, 424 bp, Glycine max
  unsure (1)..(424): unsure at all n locations
ntagttgttggtgctgatgttagtatgattggaccgtttggtgtggggttctactctacatatcttattgtcgaaaaggtcattgttaccaccaagcacaatgatgatgagcaatacatttgggagtcccaagctagaggttcattgatttttacctgcttccatgtgctactcgtgccaaccatattctctatctccctctacttttccttacctctcacatgattcattataatgttatgaatcttgttatctcaattggattccttgattttcattttaatagtcgagaaactaactctgttgtattgtatagatggatattttgagtattngtgctntataataactattctttcttcattacacaactctagcatatnctggattttagcttaccagtggttgatgactctcctaaagg

SEQ ID NO: 42523 - DNA, 180 bp, Glycine max
aactaaaatatatcctgcttccttttttatgttcatattcaaggcctcagaataatgatcttgagccttgatataaactaaaccgctctgttctacccgataaatttctataaaactgggaacagtctgacttcattgatattatcccccactttgcctcattttattgagcctctattg

SEQ ID NO: 42524 - DNA, 404 bp, Glycine max
  unsure (1)..(404): unsure at all n locations
tctccttgataaatgtctatccacttcaacatgtntattgctatcatgttgaactggattgtgtgctattgctatggctgctttattatcacaaaacagatccattgtatcttgagctgaacacatgacttcttctactaacctttttaaccagagaagctcacacactcatttagccatacctctaaactccgcttctgcactagatagagcaaccaccttctgttttttactcctccaagagacaagatttcctcccacaaatgtgaggtaacctgatgtgtgatttctatcagtaatactccctgcccaatctgcgtcagtataaccttgaatgtgctgatgcttttttttgcaaacattagtcctctccctggtgaagatttcaggacctttatatcaaa

SEQ ID NO: 42525 - DNA, 544 bp, Glycine max
  unsure (1)..(544): unsure at all n locations
cggattgttcctgttaagacttcgcgccgcgaacctaagagantgcagctgcagcttgctaacacctcattgatcagatcttatagntgttcccaacacacttgtntgaacaccgagagaagtatattctcatgctgagaacagtcnanacatttaagctggaacatctagaanattataagcatttaaccatgggatgtangtgtaggtttggaattgatgcaaatcttttccattggaagtgacattctggtggggaatggtctttccatattgctgtccangagcttttgccaggtggtttattgtggaaatcacattactctgcaatgccgaacaatcatcttactcaccaaaaatgaaaaaaacaagaagtgtaaaacaagaatcagaagtacatattcccacttccagctttttattgggatatgatatttgaataataagtgaagaggaatctacgcatctcttccacatttacttatactcccaaacctaatacagaaagactgctctatctatatgttactcgatagtatcaccg

SEQ ID NO: 42526 - DNA, 365 bp, Glycine max
tgagagagcccgggtggtcgaagagaagttgaagtccatagccatcaaagtctgaaaagagtatgatgaactaagggacgtcaatatggccacagctgaagccttggaacgagaaaccaataaggcccgaatggaagaacacgaccaaaacaagttttgaagggctttatagggcatcaatagtgagctcaagctccgaatacgtgaaaggaatcatcacgggtcaaaggcatgatctggaaggacgagctaaaggtttgccttatgtcgaaaagaaatttgtcccaacagttaagcgagactgaagggaatatgtgggccgtcatcgatgagtgcaaagagaagctaaatctagcggcgactca

SEQ ID NO: 42527 - DNA, 528 bp, Glycine max
  unsure (1)..(528): unsure at all n locations
tctaacaatcatttatnanngttntataantcnacacntacttactcanacctaaannnnnnnnnnaaggcgcgtgatagctcgaacgctngcanacccgaacnaacaaacacngccngaaccaaaaaatggaagacactctccatgttatcctttacacggancacaccccatcgtgcgaaatgcattagtcaccaccaccaacaaagaagctctgccagccgacgaacaagacaaaccattgtgtgaatcaaagacagcagccaaatgcgaaactcagaccgtaaacaaccactacggggcagcccaggagcagactggagcacaatgcggcgacatacatgcaggaatagggaagataaggaagatgcaaccacaacgtcagagagacagatagatagcaaaccataaagtggccgataatgcggagtctcgcggatgaacggtgctcctggatacgatacgcaacaacataatggccagtatgccagcgtgtaagtgggcaaacacccaaaatagagtaggacg

SEQ ID NO: 42528 - DNA, 373 bp, Glycine max
  unsure (1)..(373): unsure at all n locations
gtgggtacttcacataaacttcatttatgaatccatttagaaaggcactntngacatccatctgatacagnttaatgtctttgtgtgctgcatangctaagagtattctaatagcttctagtcttgctactagtgcaaaggtctcttcataatcaatcccttggtgttgattatctccttgagcaaccagtctagctttgtttctaatcgcttctccttcttcattgagcttggttttgaacacccacttggttccaatcactgattgattcttaagaggnggaacaagattccagaactngttcttaatgaattgattagttcttcttccatagtagtcacccaagaatcttcactcagtgctttatcaata

SEQ ID NO: 42529 - DNA, 338 bp, Glycine max
  unsure (1)..(338): unsure at all n locations
nttatcttttctgccaccagaataatatcaacacactttcaatgtttatcacgtgacacggttaacaccccatcatgccacatgcatcaatcatctcaaccaacgaaaaaactattaaaacaaaagaaaaagaaaaaccattgcaatttagtaaatactgcaaaacaaaggccaagactcaagagtgtaacacagacgaagaaaaggaaaagaagaagaagaagaagaagaagaaaaatttaacgataatacaatcggttatattttaaataaataaaatcgaagaagaacatgagagagagagagagagaaataattaaaaaattgcctttaatttg

SEQ ID NO: 42530 - DNA, 273 bp, Glycine max
  unsure (1)..(273): unsure at all n locations
actttttcagctccatcttctttgcaaaacttctccttttgattcattggaattgcaggtggattgcacccttccatgttgaacttcttgagaatntcatttgcatatttctcctgcaaagaaatatttcattctgtttttgatacaccttataccgagaagaatgtcatcttccaagtctgtatttcaaaacatctttatttctccttgacttgcaatatgctcccgctgcttccgaaccagtaatcatcacatataagatactcagttttc

SEQ ID NO: 42531 - DNA, 433 bp, Glycine max
ttacaatttgaattaaaacgttcagaaattgctggtaatcgattaccttatatgtgtaatcgattacacagtgcaaattttgaattcaaattttaatactgttgtaaatcagttttggccactggtaatcgattacatcctctggtaatcgattaccagagagtaaatttgttgaaaaagactttttaacttaaatttcttggccaaaccttttgctacttcaattggaattcccttcctatctaatatatcctttctaagactctagagactgtcttgatcatccatcttgaatatctttaatttctttgtcttgaataaagctttgaaacgcatgtgaaaactttggcatcatcaaaacattccgcttgatcctttgtctacaccttgttgtggtgataaacaagaaaggcatgaatcgttgctagatcta

SEQ ID NO: 42532 - DNA, 431 bp, Glycine max
ttgcatgtttatagatttctagagagagaaaggtccaagttttctatagttttgagagcttttgctgtgagaagactggcagagaactgagcgagaagaggaagccatcctgagagtatgagatgagtctgtgagtgattgtgaggttctagaggtggaggagacatccccactacttttatttcttcaatccttcatttttctcttctctttgttgtaaaggaagcttcccagatatggagagctaaatcctctgttggttcttccttgtaggtacttgatgtaaatacttgtatatctatttaatgatgtttagtgtgttctctatgttattagtacttcatttcagtgtgcattttccttgatcatgtagatgcatgctttgttaggatcattcaacagtgaaaattggtctgattcttataacttga

SEQ ID NO: 42533 - DNA, 131 bp, Glycine max
gcgatgcgatatcttagccctaaactgtttttaagtttactgttctgggaaatgtatcgtccaattccactctacaccgaacttagtgtagccgggtgcatgatgactactcctaatgcctcctactgccc

SEQ ID NO: 42534 - DNA, 286 bp, Glycine max
ttctcagcttctatgtcttcttgtagaacatctgcctcatcattctgcatgatgaaacatatgattaataaaatttcatatatttccacctctacattacaatggacacactctaagtgttttctactttctagcattgataaacaactaaataaagacaatggctacaaatcacatgagatctactagaacattttcacctcttggaagtctgaagccaaatactaattgtctttcatatgcatcctattgcattattcatgtatatcacaaacaagtcagcaca

SEQ ID NO: 42535 - DNA, 374 bp, Glycine max
attcacatgaaagggctgtgggtataaacgattgaaggtgaggctgctcccacgtatgatatctaaaatgggctagcataacatattcctgtgtcagagctacttatgtaaaggattattttacaaaactcaaatggtacaaacaacattcagggggcaaatagacagagctgatacaactggtatcacaaatacaaaaattcacactacagttcacatagacgcagagagagaaaaaggaaccagctattatctattgattactgaaaatagtgtctcagcactctcctctacaatgagtttcccccaaaatacctctgctatatctactgcaccactatttataataattaacttctagctcgctaactcct

SEQ ID NO: 42536 - DNA, 329 bp, Glycine max
  unsure (1)..(329): unsure at all n locations
tgcctttggcactgaaggtatgtacccacttaaggcattangatcatacttgcttcacttgctgtattatactcttctagtatcacctaatttaatcgttatttatctatnaaataacttatntgatatcattgatagccactgcaaatttcatcctttttacccttaatttttagctctctgaaaattcttaaaattgaaagggagaaaaaagaagggagggaaagaataatctgattttctcattcaaattactcttccaaaagctgtgnttttgttcatgattgtaatggtgtttatccgtgggtacctgcagatgaccataaacc

SEQ ID NO: 42537 - DNA, 326 bp, Glycine max
ttatcaagtatatcgacccttgaatcttcgacgaattggatatgccagccatgaagaacaactcgcatgtgtaaattgacaaaaatgaagacattgaaagagccccaaagatcttcaatatccatgagtgcagtggctactttatcttttgtgcaccgaatttcaccataaagcccactggccactgattactttaaactagcttgttttttttttatctgtttaaatattctttaggcacttgtttgccttctttttttcaaacaagtttttgatccttttaaggcatgaagtgcaagaagaggaggacgatcataccatcattt

SEQ ID NO: 42538 - DNA, 366 bp, Glycine max
  unsure (1)..(366): unsure at all n locations
taaatctaagcttactcggttttctctttcgatgggggcantttttttagtctttnttaggactatattgagtgttaggaaaatgagctttacattctgcaatttacaaggttgtcgtgttgttagcgttgaaaatatttccccaagtattctcatgccactaccaattctttagtaactagacaggtgcgtccactagttattcgaaggccacaattagccttcaacganggagagagagagatatagaaattctcataaaaacatgatctggtgaacggtccttttcttctaggtccaatagttgaggacaaactaacacaacttttctaactcgcattgttcaggagttgaatactgtgaatt

SEQ ID NO: 42539 - DNA, 509 bp, Glycine max
  unsure (1)..(509): unsure at all n locations
tgggaagtcccnttgagncccctgtganaccgatctcgtacccgngatcctctnagtcgacctgcggcatgcaagcttgtggactatacctctctatcgaanacggtcgtgtttctgtctaggcccggattcaaagcgggctgcagcaccggcttcgcttccctaactgtactggaagcggntgccgtggctttatcctctatggttntctagaagtntaacatgaccttcgagatggaaccctttgatctttaaggccgatagatcgcctttatctgttcttgccgcctcttattatccattttttggatcgagtggtatagggtgccttgtgtttcttagtatgagaaaatctaaagaaataacacggtgagttgccaccaaacatgatatgcaatggagatcggacactggatcacccaaggtttttaaacatgagagtcaaactctatttataaaaaacaactttctctaccaatttacaaaggttcacaaactaccatctattt

SEQ ID NO: 42540 - DNA, 395 bp, Glycine max
actgatgccttggcacctggtactttctttcctgaaaaaaaatctacacctgttgcaagtgtctgggtcaatgttcttttgcagataccatacagatctctgtccttctttacagcaatctggagtcaatgagcaacctgaagcttatgctgcaaacatttataatagacctcctcagcagggaaaccaacaacagcagaataattatgacttttcgagcaatagatacaatccaggttggaggaatcatcaaaatctgagatggacaagtcctccacaacaacaacagcctgtccctcctttccagaatgctgctggtccaagcaagccatatgttcctcctacgatgcagcagcagtcacaacaaagaccacaagaaactgatgctcctcctc

SEQ ID NO: 42541 - DNA, 406 bp, Glycine max
tccatcaaggagcacattggtgtcttcttaccaagctcctcattgcattctgtaatgttttcccttcccaacccatagaattgccccaatgatctactttaataagtatgaattctccatctagcaagtcccacacatctagcatatttgtataacctctagtccttttttttttacctaaatcattcatggatatgacatttatcataaaaggaccgaaaattataattacctttaattgaactttcacttgcacttccaagagaagtataagactcaacatgactttcttcttgtatgtgttgttctatttgcgattgttgatttagttaataaaaaaaattataaaaaaattcaatataaaataatgaaattaagttaataaaatctttatacctttttcaaa

SEQ ID NO: 42542 - DNA, 326 bp, Glycine max
  unsure (1)..(326): unsure at all n locations
actattatattacggaaagaatataaaagaaatattatagtgggaaaatatattctntagtggacactctcacagttcatgttntacaatatgtctagactgcagcanaatcaaacgaanaatgctcgcataaattattggatttatatccttgtctccccaagaaaaaacagcagcctgtgtttgcacatgtcagtttcttcagagatatcattggagttaactgatccaataatattaggacaaaagttagatccctattagttntgatgttttcttttgaaatacaaatatgtatgtattacactccaattatataaactttg

SEQ ID NO: 42543 - DNA, 440 bp, Glycine max
  unsure (1)..(440): unsure at all n locations
tcttatccaaagctcatcttagtggggaagctccttcttccatggcttattccctagtggatggcgcctcctctcacctcttctcctttgtcttccgctgcatctccatggtgaaaaatcaccactgaaggacctcattgaagctcaaagatccagcctccatagaagccccacaagcaagcttccatcaagtggtaatcagagcacaagagcttcaagtaggtgctccttaaacctccattaattttttgctttaccttctcttccattgttgtttcttcatttttttctccatgtatctcctcacatgtcttgtactaaatgtttttaacatgattctttagagtttccaccgattaaacttgctatagaagctagatttgattttctatggttcanataaccatgaattgtgttgagtttagattcctttgagtttt

SEQ ID NO: 42544 - DNA, 349 bp, Glycine max
  unsure (1)..(349): unsure at all n locations
gcgcgggtctgggagacgaaggtctagtggtcgcgatatactaagatgatgttccgagtacattggatttggtacgaccacgccctcctgatttcagctgggaaattggcgggtggaggaacgccccagcatttacgcaacgagcataatgtaaacctttaccgtttttaaaagctctatagttgggcctaggctttagagtttttccttttggtaagggctntgtgtctttaaattttgaatatataatacagggatctttcttcatctgttcctacatctctacccattctcattcatttgcatggttacttcttaatttctgaaacgacagatccgatgacgagtt

SEQ ID NO: 42545 - DNA, 427 bp, Glycine max
  unsure (1)..(427): unsure at all n locations
ntatctgaagaactcgccaagcgcacttactgttctaagcgagttcatcttttgaggatgaacactcatcctcttgctgaactacctgtggctaagcgaggctgaatcgctaagcccaggtaacttaaccatttttttttgtgatagccacatgttagacaagtggcctcagatatcttaagaaggggggttgaattaagatatcccaaactacttccccaattaaaaatctatttatctttttattcaaattataaattcccttaacaatgaacttcttaaatattgattcaaataaaacaagttgaatatgaatataaagcaataataaataaaggagtttaagggaagagaaagtgcaaactcatatttatactggttcggccacacccttgtgcctacgtccagtccccaagcaacccgcttg

SEQ ID NO: 42546 - DNA, 429 bp, Glycine max
  unsure (1)..(429): unsure at all n locations
ntgttcgaggtacttacccgttgaagatcgaataacgatgaatatacggatgaagaacgtcaaagaacggtcgaaaccttcgcgaaattccttacggaaacgtttcggaagcgcctcggcttagattttcttcacggaaacaatttttccaagcaaattcgaacaagagcgaagtgcctaaggggctgaacccttttccttctcacttcctcccctatttatagcaaaataggggagatgcttgccggccagctcgcccaggcgagcagggttgcttcctccagaagcaacagccttctggaggaatcttctagagggcccaagtgggcctggttgctatttgcacccccatttttactaagtacacccctctctgccttttatttggtgattcttttttcgtaaagttacggaaacttacgaaattcg

SEQ ID NO: 42547 - DNA, 151 bp, Glycine max
tatagtcgggcttatacgaccgatgtgggatatttgtacaattcacccctgattattcttgatttgccaatcgaaatgtccacggcgtaacatgaacgcacgcttttatactaacctgtggactgcatctatctgccgaatcagtatgttt

SEQ ID NO: 42548 - DNA, 162 bp, Glycine max
tctcgatatgcgaggtgcctgaatcgaacatccgcagttaaattctttgcgattagaatctcccgagagctggcggtattgaatttcgagcatctctactcatgatgcgcatgagtgggacatccgtgtgaacaatgcctgaccactagaattactcgagag

SEQ ID NO: 42549 - DNA, 254 bp, Glycine max
  unsure (1)..(254): unsure at all n locations
ggagaggatctctggcttgttgtggtgttatgaggagaatcctgagctgtgtgcaaaattgtggaccaatgtgttgatcatganggtgttcttgaggtggtggttgttgttgttgttcctcctctcatagagcttgaacccttgctgcttctttggtgttgctttcattggaggaatgttgaagttcttcgatgatgatgattgtggctgaactacatcttgttagtgttgtcgttgtcgtagtagatgtggct

SEQ ID NO: 42550 - DNA, 419 bp, Glycine max
tgtcgcacggctggacatgatatatgtcagggtttggtttagttaattgataaaaggggatgtatcatgagatgtctgcgggggtttgacccatgcgggcgccgaagtgacagcgtgggcatctccctccttactctttgcaccagttgctccaattcttttagcattggcacttgtggaggaaacgtaatcgaacttccctcttttcaaccatacttcaattctttcctcggcgaatacttggtccgcgaagctggacggcatgtaacctaccaacttctcatagtaaaacactggcaaggtgtctaccatcatcgtgatcatctccctttcgaccatgggaggggccacttgtgctaccaggtcactccatcgctgtgcgtattctttaaaggtctcaccttccttcttgacatatt

SEQ ID NO: 42551 - DNA, 158 bp, Glycine max
ctgcagcttaaacagacttcgaggttctcctgggtatacatatctctttgtgctccgtgtctacaacttgcaaactaagaaactcgtcatcagtcgagatgttgaagttgatgaatatgcttcatggaattgggatgaaaaaaaagcggagaagaacg

SEQ ID NO: 42552 - DNA, 436 bp, Glycine max
tcgccaagtatccctattgaaaaacctttattcaaacctttcttagttagtgagaaggctaaacgaaaatttagggaacttagaaaaactagatccttaattgaaggcgtaggtgataaccatagtgaattacttaacaagattggtagtttacttaaggtcattccagatactcctcaagcctcggaaaatacttccaaaatggtaacaagaagtacctccaaattaattaatgttattaatgaagatagtgaccaaaactcagataacacaactgagataggatcagtgtcagaaaagaatataaatccaattaattccaaacactggaaaacaccctccaagttatattatcaacgtccaactgcccttgacctactattagaggaaagagggtgaaaacaatttcagagttttagtgcaaacaacatctatg

SEQ ID NO: 42553 - DNA, 151 bp, Glycine max
ccctcattttgtttagaatggacaattaacccacgaaagtcaattgaagatatcatattcaactgagcccttacttttcaaacacccctacttttaaaaaagaatatttaatttccacactttatgattatccactttatttaccctccaa

SEQ ID NO: 42554 - DNA, 424 bp, Glycine max
  unsure (1)..(424): unsure at all n locations
ggacctataaaactaagctatgctgcnacattataatagacctcctcagcagcaaaacctacaacagcataataattatgatctttcaagcaacagatacaatccaagttggaggaatcatccaaatctgagatagacaagtcctccacaacaacagcagcctgtccctcccttccaaaatgttgctggtccaagcaagccatatgttcctcctctaatgcagcaacaacaaagacaacaagcaaccaaggctcctcctcaaccttccttagaagagttaatgaggcaaatgaccatccaaaatatgcaatttcagcaagagacaagagcctccattcagagtctgacaaatcagatggggcagatgactactcagttgaaccaagctcaatcccaaaattctgacaaattgccttcacagact

SEQ ID NO: 42555 - DNA, 474 bp, Glycine max
  unsure (1)..(474): unsure at all n locations
aggggaagganttgttcatgtgatccctatatacancgacgcngatgcagcttggtatcaaatttacacacgcgcgttctttttcagtttcctttagcgccttgtgaagttctttctattctcaatcaactttcttgctcttgtctctactgctgttagctacaattcttttgtgttttcctctcaagatactgatgctaaattaccaaatatacctcttgctgtgggataacctcaaatcctcaaaggaagtgttgtgggttgacctgccaaaactggaatgcacacttttgttagttgcgtgttgcccagtgacactgataaaggtgttatactgctctgagtctcaacatacaaataaagttgtttatgattcctttacatgaagtgaaaacctcaaatatttcatcaactttaaaagtctttttgtaccaagtacttatctctttgttttatgacatatctgagctgctg

SEQ ID NO: 42556 - DNA, 439 bp, Glycine max
tgcgataggctttcttgagatcctcatcactggcattacgatcttcctgttgaagtttgtaatagtccacacccattttccgatttgccttggccggaggaacgtgcgcgtagtttagagtcaccggtggaagaaagagacgaaacaagtcatatcccacacacacaaaaaaaaaaaaaacttgtctgggctcaacacacttgtactttgcactattactaggcccagttctccatcaactttggagtcatatgttgttttttttctttttctttcttttttatttatttatccgtaaaaactaaaaacaggacaaaatatttacagcaatactgacagtcctacactgaaactatagaccttttggggtctttttctatcttttaggattcatttgcatgtcaagatatgataaaatatgagaataaaataaaataaa

SEQ ID NO: 42557 - DNA, 317 bp, Glycine max
  unsure (1)..(317): unsure at all n locations
gaacttgaagaacaaccaaaaacccacttcaattgattcatactatcaaggatcaattgntcatagacaacgaaacccttacttggggaaactaagagaaaatggaaaaagagaaaagagatgactcataaaccaagaatgattggagaagacaanggaaagacactcacctagaatgaggcacatgtggaacaatgactccaagatatttgatgatgccaagaatcagagtaagcagtccaagatcatgatcaaaactcaaaatcagtttcaaatcagatcagacatcagttcagatcagatcaaacatcagttca

SEQ ID NO: 42558 - DNA, 425 bp, Glycine max
tgccacccagctcgcccaggcgagctaagttgcttccttcgattcaaccgccttctggaggaatattctggaaggcccaagtgggcatggttgctatttgcacccctatgtttactaaatacacccccttgctcttttttggagatgctttttccgtaacgttacagaaactttacgaatttcataacgaggcttgttttctttccgtaatgttacgaaaccttacagattacgtaatcatccccttttttgccttccggaatgttacagaactttaccgattgcgcactagcacttccttttaatttccggcatgtcatggaactgtacgacagctttatgcaatatacattcagcaaaactttgtgcacatttctatataaaggagcttgcggcgtcaaagcctcaaatgcattaacacttgg

SEQ ID NO: 42559 - DNA, 214 bp, Glycine max
  unsure (1)..(214): unsure at all n locations
tttaatttatgttatctttgctnttcatgcattcaatcattggaacttgttgtatgatctgtacatangagtatatcagctaatctttgaatgtttaacataagggtttcaatttcttggaaaaaggactaaaaaataacttagaaaacttttttttctaaaaatagtcctttcgctaagcgcaagcctcatgctaagcgcatctctgttcatg

SEQ ID NO: 42560 - DNA, 373 bp, Glycine max
ctgtgagctagcaacagtgcttcaacttcttcaataggaagtgtgttgaaatttactttttataactgagaagataccaatgactactcctgtattcactcaagccaatgatgctgacctgtccaaactgtcaatccaaatagttcttccatttgacaaagaaacagaaaggtatgtctactgagttttgcttgttttgaaatttgaataaattttgtgctaagagatgcttgccttggcttaataaagaaatacagttttgtagaaaataataaacataaaaaagtgtaatatctttagttgaatttaaaggtttgtgcttactgttttaatgttgaccagtttgccaaatcctaatcaagaaacagctcgc

SEQ ID NO: 42561 - DNA, 459 bp, Glycine max
  unsure (1)..(459): unsure at all n locations
ctctaatattccaatgaacattattagagaagaanattatggggttgtcaacattcactttttggcccacactagtgcaaaaaatgtctaatattttcttcatagcatcaacctgcaccaagtttgcttctacaaaaagtagaagatcatctaccaaggcaaggtaagaaatttttggaccaccttcagataattgaataggcttnncaattntcttgctcactacatgattagttaggtgaaatannattctcatgtanagaacaaatagatatggggagatatgatcttcttgccgactccctcgaaagaatgaatnntctagagcttctcattacactactctggganggangggatgaatgcacatctanntcaantgananacttcaagaaatccatattctcatggatcagcataactctattcagctatctatgcttttatatcacttgatg

SEQ ID NO: 42562 - DNA, 418 bp, Glycine max
  unsure (1)..(418): unsure at all n locations
tgcccaggcaagctgtttgcttaggcacaaagtcattttatggcccaggcaagccaaatgctagcctgngtgagctagggtctagaaaaatccagaaaagaccctattgcccccttccttggtatctttttgttttcttgatcaaaacatcgagtgattccttgcttcgcactgtaactggcgccaaatactataattcgactagcaagaatcataatatcatattgaatgatatttttcggacgaattagggtctgacagttgcccctctttacttatcttttattgaaaatgaaaaggtaagtaaagataaggacactaatttcatttgagcgatcttgttattcgaaatcgggcactagaggaaacaaaggaagtgaaaccaaaatagcaaaaggacatttacaatgaaatatca

SEQ ID NO: 42563 - DNA, 418 bp, Glycine max
  unsure (1)..(418): unsure at all n locations
cctataaatctaagcttgaatcaagacttcttcgtttgaatcgacattttcattttcatattaaagacaaatgtaatttctttgttattattggatttgttatgatgattgaacattggaacctactgttgcttgccaattattttgcatgtattctaaacttttgtctgctttctctctgttntggaagaaaaaatgtgtttttcttgttgtttattgaagatatgtggaattactcttcaaagtttgtaatgaagacttcttcctttaaaaagacattattgtgttacttcctaatatcatcaattgcagcatctttgttgtttactgaattaatttgttgcattgctggaatcaactgttgcttacaaattattctgactgtccctcttgttggttgttttttatcatgataaaa

SEQ ID NO: 42564 - DNA, 434 bp, Glycine max
  unsure (1)..(434): unsure at all n locations
tggccaggttctgaggtgagatgggtcacaggtggccatgtgtcttccttcattctccacaatgatgagtttcgaagagccattaaagatggtcttgatagattaccatggaaagagtctcatttgtgataaataatcctattgcacatgaagaggaaattactttttcattgttgattgtacagtggtcctgtccatttctaatactcacctaaacttgtaacatgcataattgatttcatatcttcatatccaaatggagagggaaggagttgtgaattgtcatcaagaaaatgtacattgaagttaaagccatggggatagaagtttgtgaaaaaactgataaaattgttgaatgggaatttaacggctctgatctgttntaacgttttacttgtgatatccattcgtccgactaatttcagtcctttatg

SEQ ID NO: 42565 - DNA, 291 bp, Glycine max
  unsure (1)..(291): unsure at all n locations
tcagaaagtcgtatctagtcaaggtctgagagaccatacaagtnttctagtgatttctaattatgtgggccattaagtctatcatatgttgacaatagtggagaagcccatgaatttcttcgggggcggagtaggtgtccgccatcgccttggccttggctaacaatcggggaagttcttgactcccgttcaaggtaagagcaaaccgatccattcacatggntgcctcttggtgtaaagagtcaatcacnctttctctaacctctttttccacgtatacttgggcatact

SEQ ID NO: 42566 - DNA, 423 bp, Glycine max
  unsure (1)..(423): unsure at all n locations
ntacagcagattttagtaatgacccactaacctagaattaaaataacttaatgccattaacctaggtaattaaaaaaaacttaatggctgagtataactgaaattttggcaaccaaaagtcacccccaacagccaacaagtcagccaccatttggtctcccaaaaggctgatgcctaggttgccaattgggcccttattacaacttgaactaaacctaactaaagccctttaattgattaacccaaaacatatttttggtcagccaactttacaaggattgggccattatttagacaaactaaacactctaaaaattgagacaaagtggtgtcatttagtcctcctccatttgggccatgatacaactcacaaccttggacttttctccttgaaactngngcttgtattcaatagtatggaca

SEQ ID NO: 42567 - DNA, 530 bp, Glycine max
  unsure (1)..(530): unsure at all n locations
ntgnatcctctttanacctgataacatctcgacccgcgatctcttagtcacctgcggcatgcaagctnttatccacaataatcactcgaatccgttcaggtcccacgccttaacagtcttttacttttatcggntaanatgaacctttccaaagtctaaaatcaaccctacgcgtaacttttctggctttcaaagaactacatatgtctgagttcctcatcgcaattaaggatacgtangagcaagagccacgctcttgttgaaccccaaaagtanacaaacatataaaacgggaaaataaacaaatattggagtcatgattttgcacattcgattaaaggactgccgtcccttaggcgaacgcctgtggtgcaatacctctcccctccgtaacaactcccaatactttatccttcaatcataaacccctttcggtttctaacgtcttctcaataacggtggtgtgactcgtcgttactttctcggagaccaccatggtcttgattgtctccgccggaggtagtgcgacg

SEQ ID NO: 42568 - DNA, 421 bp, Glycine max
ctagaccttgttgaagagacaaaatgatgcaatcctaccccgcatgggcattggctagaagactccaagtagattgggctagagatccaaggaaaggccctagggttctcatgagccttagggtagatttcgagcccatgggctaagtatgagcccgcttatctttgtaaatattagaataggttattccttcgtctaggccttgtattttggccattctagtagtatagggttttagccttgtatttcggggcattttgagctgtgtttgtaataaggacttttttttgttattttcatgttttttgtcatgggggtgagcttagctattatagggggtgtgtagctaagctctagcttctcatctcaaggaggtgagcttagctattatagaggtatatgtagctaagctctagcttct

SEQ ID NO: 42569 - DNA, 303 bp, Glycine max
  unsure (1)..(303): unsure at all n locations
ttaagtcacctgcngctgcagctntcactcgcatgtccgattaagcgcatattgtatcgagacgctagaaatctaacaaaggaagctctcgagaaattcaaatggtcataacttttcactcgcatgtccgattcaggcgcataacatatcgagacgctcganattgaacaacagatgttctcgagaaattcaaatggtcataacttttcactcggatgtcccattcacggcatagcgtatcgagacgctcgacattgaacaacgggatttgtcgagaaaatcaaatggtcataacttttcact

SEQ ID NO: 42570 - DNA, 374 bp, Glycine max
tctagaaggagatcaacttgatgttctatgcttcttgaaggtgtcagtccatgaggaatctccttgggaaagacatctttaaattcctgcaataagggttgaacactaggagaaacataaatagttaactgattagaattatcactctctctctcttgtgtatcactcttttcctcgggtgtatcactcttctttttcatattcctttgtggtgcctcactattttctttctcttgttctctcttttctctcattctgatttggtcatcacacacttttctaggggatagaggtttaagagtaaacgaggaagatttggctattcgtctgtagggctcttctttgttacggttcaacaaacgttgcatttgtgt

SEQ ID NO: 42571 - DNA, 354 bp, Glycine max
tgtggatcaatggaagactaaaaataggacgcatgctattactattctatcaattcaaaaatgtctgagaaaagtgactagtgtatattccaaacagtcaccgatctatatttctgctaagcatatcacatacataatgaattaataaaaacaatcatatggcttaatattaaaatgcatcagacatccttacatccttcgcaaagactcatctttctttaccataacctgatatccaatagagcatacaggatatgaaacatcttcaataacatcaagcacatactaagattgtctataaagcaatgaaatcatagatgagcttattaatgagacaaattacatataaaatgg

SEQ ID NO: 42572 - DNA, 415 bp, Glycine max
gaccatcaaactcagctgagggagtgaagtggagccactcacactgattttttctcgttggttcggaattaacaggtcaagtacgtatggagaatctgaaactatctcggatgctgtgaaagtgtggattttgacgtttccaattcttaaggtaacaatccattcgctcttaatattagtatagtatagtaatagtaatacatacatgaattatttgttcaacaagaagccttaacatgcatcctctataattgttgatatttatatggatttaactaatttgaaatgaaatctattaaataaaaaatggacttcatatatttaatatcatttgataaaaaacaagtatttagaagactcaagagagaatattaataaccacccagcgcatagatcaattgacgttggattattc

SEQ ID NO: 42573 - DNA, 198 bp, Glycine max
ttaatatagcgaagaattcattttgcggcgttgagatgagtagtggttggagtctccatgtatcgactaatgagtctaataccatatagaatgcctggtcttgtgcacatcaaatattgcaaactacccatcaaactcttgaaatatgtagcattcaccttttctgcttcgtcgaactttgataacttcattttgcac

SEQ ID NO: 42574 - DNA, 412 bp, Glycine max
  unsure (1)..(412): unsure at all n locations
tcttanagaggatgaagggatacaaaaactcaaaagtagcccttttgtcaaagagctaactcaatatctctctcttaagttttagctttgatatcaataaatgaaagacaatacttgtattttcacaagttttccttgttattgcaatttttcaaaagttattctttctgttttgacatgaagcaatagttctgcctccttttgtgtctatagctttgtgtccaagatctgatgtttaggagtatgtttgtgttcctgcatttgaactcaatgtggataatctgagtgttgcagaatatctccgactcaaagaagaacttgtagatggatagtaagggttgtttgacttatctctgttatgtaaattattttctttattactattgaatgttgtatttattgcctacgatat

SEQ ID NO: 42575 - DNA, 258 bp, Glycine max
  unsure (1)..(258): unsure at all n locations
tggacttaccttgaattaatttctttgatagcccttttgagccttgtttccctttccttggtntgaagctcactacaagccttaagtgaaaaaccatgatattaccatatccttaaggaattttggagctttggaatttgtttgggaataagtgtggggggtttttgtttcattggacaacttgttttgttggctatgcttcatgatgtattntgggccatacttgatgtacattgtatatttgttaaatgttggaca

SEQ ID NO: 42576 - DNA, 442 bp, Glycine max
tgctcaattgctccaggttgctgcatagaagggcaaatgtctgtatggtggtcgacagaggagcataaaccatagactcttgctataggtacagatttctgattcaaggccagctgggttaccaggttaaccaaggcatctagtttaccttcaagcttcttagtttcagctgatgaagatgaattcgtggttacttcatgcactcctctaatgacaataacatcatttctggcactaaattgttgggagttggaagccatcttctcaattaaattcctggcttcagcaggggtcatgtctccaagggctccaccactggcagcatcaatcatacttctctccatgttactgagtccttcataaaaatattggagaagaagttgctcagaaatttggtggtgagggcaactggcgcatagttttttaaatctctcccagtatt

SEQ ID NO: 42577 - DNA, 427 bp, Glycine max
tcaggaggatacgtaatttagagaaacatcaaatttctttacttacatcaaatttctaatagatacacattttgtcttcatatataaccgagtaaaactataagtttttttttcaagaaaaaactgtaagttaattatttaggtatggtattgcatgattcctagaacaataatttctcttggacggttttatgcattcaaggggtcaaagtttaagatccaagttggtttgccacttgttatcttgtccttggacctcttcctacctcttgtcttatgcaatgtaccttacctgatttttctccttggtgaatgaatacataataataataataataataataaattatttattgctaatcattcactccttttattattattattattctcatgattaatatatataacttgttccccccgcatc

SEQ ID NO: 42578 - DNA, 285 bp, Glycine max
  unsure (1)..(285): unsure at all n locations
agcttcaattcgaagtctgtccagaanacaagtctacactttaattaaatattaactgccaatgtttgcaagcataagataggaagcaatatgcagaacttttctctttttgaaattcttccttcaacgttgaagtaaaaggataaatctaatgttttcaaacaacctaatttcctcaaagaatgagatgataagttgctaatggatcacanattcaaagggaaaaaaactgaatcagaatctaacaagatggagtaaaaaaaaatcactaatagaatgagagac

SEQ ID NO: 42579 - DNA, 420 bp, Glycine max
  unsure (1)..(420): unsure at all n locations
tgtgaaatgtctcttaatcaagttcctgtgaaaagaattaaagcagaatggtgtgataagaatactgagattatgttgaaagtgtgcatagaagaggtgaatgctggaaataaacctcacaaccacttcactaagcttggttgggcaaatattgcagaaaagttcaataaggcaacaaatttgagatatgaatataaacaattcagaaataggtgggattctttgaaaaaggaatggcaattatgggctaagcttattgggaaggacacgggtcttggctgggatggggagaagagaaccattgcagctagtgatgaatggtgggaagccaaaattcaggtatttgttattcaacgaaaatagagtttttgtgcatttttggttttattntgcttcatctctgtatatcatcacaacttc

SEQ ID NO: 42580 - DNA, 552 bp, Glycine max
  unsure (1)..(552): unsure at all n locations
ggcatggnnnttgatcctgtgatcccctgagtancgcgatccttaagtcacctgccgcatcaagcttggacgattaaatctttatctgctagaatacttccacaatgagtcaagagaggataatgataaaaatagacccgacaaagattntcaatgaaggcctcaagaaacttcatgcgttactattagttcatcattgcatgatcaagtcttttggccatacttgnacccagctagtgcctaaaccaagttaactagtgacctatggcacccatgttcataaaaaaaagtaccaataattgaagagaaggttgttgcactgcttaaagtgaactttgctccttgacatctgaaggtgccanaatctcattaaaatncatgaggagtatncacggcactttatatattgagtgngggaacataactgatctaanggagaanaaaatatatgcggtggggactgcatnacccgcaggcatgttcaanggttatgcacaagagatcanaaaggaaccacttgnagaaataactaattgcttgatcatcgacttn

SEQ ID NO: 42581 - DNA, 382 bp, Glycine max
tcaacgaataactacttagcagttaggataccattattgtcgttacgaacgatgccattgtaaccaactataaaggatgtaaatcacgcggatagacgcaagcaagaacaaacactcttttctcatcccttctatctctctctctctctctctctcttatccttcttctcgagctcgtcttcttcgtggagacttactggatctccaagagacaaaagtcgttggaaaagagggtgaagagcttgctagagtgggagatgaagaaggtggacttgggagttggtaggagattggacagcaaagagaagggagaatcaaggacatatagggaaagaaaaaaaaaatagaaaagaaaaaaaattgaacccttaataataaaaaa

SEQ ID NO: 42582 - DNA, 455 bp, Glycine max
  unsure (1)..(455): unsure at all n locations
ttgtttgttgaccaccgagtggtacctggagatatgtctgcggggtcacgagacctttggacgtcaggtggggtgctattgcccaaaacaaagcttgaccaatctccaccacaaccgggcatattcagtcagtgagaacctgtgacgtacctaaacaggcgaactcctgacagtctaccaataaaagaacaaagaccacatagcaaggaggcttgtgtggtggctggccanctatcgatcttgagtgatatctacaattggcctctggttatcgattaccaacggtgtgtaatctattactacgcttaataatggagacacgaagttgagatggcctctcggtatctattaccaagggtgtgtatctattacaagctttaaattgagacatgaagttgagattgcctctgggtatctataccaacgggcgtaaccattacaggcttaaaatggan

SEQ ID NO: 42583 - DNA, 428 bp, Glycine max
  unsure (1)..(428): unsure at all n locations
atttacgttctggatatcaccagattagagtggcaccggatgactgtttcaagactgttttccgcactgttgatgggcattttgagttcctagtgatgccatttgggttatccaatgcaccttcaacattccaggcgacgatgaatgaggtttttcgcgcatttttgcgaaaattcgtgctagtattttttgatgacatcttgatctacagtccatcatgggacactcatattcagcacctacagcaggttttagagctattagaccagcatcaattgtttgcgaagctttccaagtgcgagtttgctgtgcctactgttgcatatttaggccatattatctctcangagggagtagctgctgacccanagaagctgaaagtgttcagtctttggcccctcttacaactcactgcccttccggatttt

SEQ ID NO: 42584 - DNA, 298 bp, Glycine max
  unsure (1)..(298): unsure at all n locations
agcttaacattgattactaatgacattccaatgtctgaatgggcatacaaaggaaggatcatacacatgcatanttcttcatatctagatatangaacacgtcatcaaccaaaggttgttccaaccaacttggtccttctagctncttattcaattatatgtggtgtgtgattctattagaagtacctttatgaagaagcggatggagtatttattactatttgtttcatactactaataatttagaattacaactnagaaagttttattacaaactatttagctttaattcttatta

SEQ ID NO: 42585 - DNA, 428 bp, Glycine max
tcaagacatttagcatctgcaagttacaaagctctagctttaatcaaccacacatggcccgagccatataccactacagaaattgtagcacaagccaatgaagccacccttctgcacacacacgcctcatttagttgcatatcactcattcacagtattcaaagaagagtgattttgtaggtcatggttttacctatcttattaccattgataagaaagccttgctccacttatacatttattgtctgcctacaaatacacttcccatgctctgaatctatgcacatgtttaataatcttattaactcagaaagttttatccaaattattcttttatcttttgtcttttcttattttggtctaagtagcagcatgctagttgctttgatcagtttgtcctctgtaattgcttccccaagttcagcatt

SEQ ID NO: 42586 - DNA, 267 bp, Glycine max
agcttgtgacccaatccaatgcctcttccttcgtgtccacggagatataccagcacacccctaccagcagcctcaatctgttgcatcgcaagtgcaagctgatttccacagtcacatctggcagatccaaatatgtctcctgtcagacactctgagtgtactctcacaagaacatcttgtccgtctccaatgtcaccctgttaaataaaaaatgtcagaaccacaaaatggtttgaagttgaccattgaaccaatcaatcgaagtaa

SEQ ID NO: 42587 - DNA, 420 bp, Glycine max
  unsure (1)..(420): unsure at all n locations
nttacccattgttctcgctacttaatcaggaaccagatgctcttatctgtttctttagctgcccaaaactgcatccactttcctgtctgtccatattctttttatacttgcattgaagattttgttttgcacaaaccttcaatgcaaatataattagtacttaccgtttttctatcaccccgaagaagaaatcacttgtcctttaatatttcaattatcaactcacattttgtatgtaccaaaaaaaaaactcacattttgcattcaccgaaaggccaaaacactgtgtttggcatgcgaaagattttttttacgcatgcatgcaaaagattaaacatttgacttatttatgatatttcattcattcaatactaaggttttcttatcaatcattcaatcctaggttattatttatattat

SEQ ID NO: 42588 - DNA, 150 bp, Glycine max
ctctggtgatgtgtctactattattgtgatcatttctttctccgtcattgagggagacacttgtgctgccagatccctccacctttgggtgtattctttgaaagatttgtgtcccctttttgcacatgttctgtagttgcatcctatctg

SEQ ID NO: 42589 - DNA, 429 bp, Glycine max
tatgcgcatattttccttacgaacgttcacttgtcaagacattctatcaactaagaaaaatgcacccatatacaatcaaggtagcttcattacctagattatttacatgtacttccaaggtgtatttgttatttacatcacacacgcctccttggctgaatttacatacatacatactcaaagcattttggggtaccaaaaactgcacatgcgctcatcttggtatttctaatacccatacatatacaaacttcacgatgaatcttgactacctacacaataaggtgctacatttcatgcttttttttttcaagtttttgctacctaaagccacatgaaaattcaagcatattttcctttgctgactaaaattgtattcaaattagaaggtatatattttttgtaatatgttttcttcacataacatgc

SEQ ID NO: 42590 - DNA, 278 bp, Glycine max
  unsure (1)..(278): unsure at all n locations
gctgacagagacttgagaagtttgtattatctcacttgaagctgtgagtcttcattaattaatagcccanaaatacattattgtaacaaataaatcttatttgatgttgtcaggcagaatttgaaatcacagaggcttctgtcagtaagacgaanaggaagctacttcataccgtgagcgagagatggaggcagtttaaatcacacctcacgaagaaatgggcccttgcagccgatcatgacggtgtggaggacactgtctgtgagaaatacgacatc

SEQ ID NO: 42591 - DNA, 188 bp, Glycine max
cacctctgatactgattctcctcccgcatcaacatggtggaagatcaccagccaaagacctcatgggacctctaagatgcaaacatcatttatgcccaacgggcctggttccatcccacatagatagccctgtgcactatgaacatcattattaagcgtaatttttgcatcgtccccaaaacaagctc

SEQ ID NO: 42592 - DNA, 539 bp, Glycine max
  unsure (1)..(539): unsure at all n locations
gcnaagtggaattggaccatgcgtcncgcgatccttcagtcacctgcggcatgcaagctgtggtcgngtttcatagtgttgactatgtctatccaaattatgcgagacatagtcngatgatgagagccttggcatattaccatggcagagggtgtacnccctacattcatccgactaaaatgtgtaagaccactgtaattgatagttctagtggcatttgaccaatgtcctatttttatcttaagatagtgaaaaataatggttaggatgggtgtgagattcgagacatcaacacaacatcgtggttgctatttatgtgtgtaaaacatcgtttccgtccttgtgtctggttgacgaaataagacgactctttccttacatttatgttcaagatcaattggacgccgatatttctcttaagctacattgctaccttggagagcgatccttaatagaggcattgtctcttcatcaatacactgatttattgtccttcctaaatggcttacaatgcataaagatgtggagtcttactgtcn

SEQ ID NO: 42593 - DNA, 441 bp, Glycine max
  unsure (1)..(441): unsure at all n locations
ttcaccccataattgccccanatttgagcaaatttgctttgattcaaaattcacttttatgaatgatgctctcctacaacctaagacaaggtagaaggagataaactgtacaggctcaaggttcaatcaaataatcatactttcagctcaaaatgggtgtaagggataaatcaatcatacacaaagtaagctttttagctaagtggctctcttcaatcaaaacatggccttcatcatcttcaatttcacgcattcattccatacttagagattcatgcaaaaatcattactcaatgttagtcgtactctcacaattaaagatcagactctcactgcgttgcggctaatgcattccgtcacaatcaacctgacaaaccacctaacatattcagtcatgatcctaattccatgttctttctcttctaatgactacatgctcat

SEQ ID NO: 42594 - DNA, 416 bp, Glycine max
ggggtacccatcacatgtggtactaggtggctgtcggtcgatggtgcacaacaagttttccacattcacaatgcgcgcataaacccaccatcccctgttgcccacctccaactgagctcacgtactcccacgtagcccatatcctcgtttctctcaacaccgggtccccatcaatcctcccaagcttgcacaacatccaagcaaaacaacattcaaacagcacaagctatcacagccaagcaaaacagagcaaaggcagagaactcttgccaaacaccaaccaaatcacagctgttctcacttaaagaccccagtaacaattccttcgatccaattcgttaaccgctggatcgactccaaaattttactggaagtctatagtacataagcctacattgtgaccgttgggatctact

SEQ ID NO: 42595 - DNA, 203 bp, Glycine max
ccactggctttttttgcacactggtcaaaccccccttggtatacttaattcgaaatggcgtttgtattaacctatccacccaacttgttcagctgactgactgccgaggctacagctcttattcacaaagcatttggcgtccccacggtgtcttaccactcacttgagctacaattaattttccccttaatcccttttttcaa

SEQ ID NO: 42596 - DNA, 434 bp, Glycine max
  unsure (1)..(434): unsure at all n locations
ntctgcagggaagctaagtgtgaagtatgcaatcctgcataggattggcgctgcaaactgggtacccaccaatcatacttccactgttgccacaggtttgggtaaatttctgtatgctgttggaaccaagtccaaatttaattttggaaactatatttttgaccaaactgttaagcattcagaatcttttgctgtcaaattacccattgccttcccaactgtattgtgtggcattatgttgagtcaacatcccaatattttaaacaacattgactctgtgatgaagagagaatcggctctgtccctgcattacaaactgtttgaggggacacatgtcccagacattgtctcgacatcagggaaagctgctgcttcatgtgctgtgtccaaggatgctttgattgctgaactcaaggacacatgcaaggtgctgg

SEQ ID NO: 42597 - DNA, 200 bp, Glycine max
  unsure (1)..(200): unsure at all n locations
gatagttgagttagttacacgcagagataatgtgttgcaacaggcangttgcctataaaaaatgcttgggttgagagggagtgttatgaacagaggataaaaacagaatgcagagacacaganggtagaagcttaagacagagacagaagganatttgcttatattcttcacatcttcttctaataatacaccacctata

SEQ ID NO: 42598 - DNA, 306 bp, Glycine max
  unsure (1)..(306): unsure at all n locations
tgccactggtaatggcgggaacggcgatgncttcttttcntcttcgggaccgggcccgactgggagagatgaataagcccataccaccattcgtactggcgggacaaggctgactatgagagagaagagaaacccgccattggtgctagcaagatatggagagaggagagacccgccattggcactcgcgggacatgccaaaatgttgctccttgacgaatattatatatttgctctcaattctatggtgtattataaatctatatatattatctctttcatttcatttccatcttcttcctatta

SEQ ID NO: 42599 - DNA, 429 bp, Glycine max
tgtaggattatggggtacccatcacatgtggtactaggtggtggtcgggcgatggtgcacaaaaagttttccacatccacaaagcgcgcataaacccaccatcccctgttgcccacctccaactgagctcacgtactcccacgtagcccatatcctcatttctctcaacaccgggtccccatcaatcctcccaagcttccccaacatcaaagtaatacaacatccaatcatcatggactaacaaaatcaagcaaaacagggcaaaggcagaaaactctgcccaaaacacaactcaaaatcacagcttttctcacttaaagaccccagtaaaaattccttcgttccaagttggttaaccgtggatcgactcgaaaattttactggaagtctctagtacataaacctacattttgaccgttgggatctact

SEQ ID NO: 42600 - DNA, 427 bp, Glycine max
  unsure (1)..(427): unsure at all n locations
cggatgccaattcttgcttagttntgggtaagtaaactctttatcctcatcttcttcctttgctcttcatcttcaaagctcaagaagctcacttctttaatttttttttataacaattgctcctgggtattctttgtgaccaccactattacaataaagcattttcaagtcagttatttggtccattccacgatggtttttgaaccgacttaaaatcttagaatattttttttattttaaaaatgtaaaaagaaattgaggatttgaagatggttttgtaaataactattttagaaagtcattttctaagacagttcttcaaaaaaacaattttagaaagtgcacccaagtgctctttctcactcccaactccattttttaacttgtagctcctatgtatggagggggtttcctcttttcatctatg

SEQ ID NO: 42601 - DNA, 363 bp, Glycine max
ctttcggaatttgcaaggtatagcttgttaatttatgacagttttcaattttcttcggttccaaacatgatgtctcaagaagcaatacctgctccttccaacaataacaacctcagagactccacggttcaacttcatgaaccaaactcaaaccctaatcctaaccctaattcggttaagagaaaaagaagcctacccggaacaccaggcaagttattatttaattaaatccttctcttctgcatactatatatgtacttactgttctgattcttaattcagaaaaaatatatttgtaattaattacgggttaattatgtggttgtgggtgcatggaccaagcagatccgaatgcagaagtga

SEQ ID NO: 42602 - DNA, 223 bp, Glycine max
atatctgctggctgatcattagaaccaatgaactcagtgaccatctccttggacagaagcttctctcgaatgaaatgacaatcaatctctatgtgcttagtactttcattgaaaactgggtttgaggcaatatgaagagcagcctgattatcacaatacaacttcattggcagctcttcacaagaccttcattcctgcagaaactgttaatccacatgagctc

SEQ ID NO: 42603 - DNA, 432 bp, Glycine max
tggtgttttgtcttttggacccatggtgcttatgttggtcatacatgtagactttcgttgttaaataaggacaccatcggattgcgttcgaccactgtttacaggcattattgttagttgttcttctcgactgctatagtatgcaatgttctgcgaaagtcgtatttgaggagttgcaatttttcaatagttactgcagcaatgcaaggaaaaagtgagagaaatataataagagaaacctggaccaattctttcttttattttacttttttggtttatttctctctcactgcattgttgcaagtttgcaagcttaatgctgttaaatatgaaatggatacctttattatgccaagatatcattagcatttgaatacggaatctttattgctaaatcacgaaagatctggagaccggttctgcatattatgt

SEQ ID NO: 42604 - DNA, 512 bp, Glycine max
  unsure (1)..(512): unsure at all n locations
gcctcggcnatgaacctgattnccttgaacatctcgaccggatcttaagacacctgcagctgcagcttntgtaagacatactgacttgctntccaatctgacattcaccacagattctgccttcttctattttcagaatgggaatgcctctaacagcacctttgtcaatgattttcttcatgcctcttaagtgcagatgtacaaatctttgatgccatattttgacttcatcttctttggaagatagacatgtggaggagtaactggtttcttgaagtgtacatacgtaacaattgttctttgatctgcttgcctttataaaacttcctcttcttatttgtcaccaacattctgacttgtgaagttacattgattcttcttccacaactgactgatgctgacaanttgcagcactccctcaccaccgtacttgttcgaacaagaagccatatggactacctttccttcagtgattttctttataccctctccatgcacatactatgagcagg

SEQ ID NO: 42605 - DNA, 294 bp, Glycine max
tcacggaaaacggttccgaaacgtttaggaagcgcctcggcttacattttcttcacggaaacaattttttcaagcaaattcgacagagagagaagtccctaaggggctgaaccccttccttcttcatttcctcccttatttatagcaaaatacgggaggtggttgccgcccagctcgcccatgcgagctcagcttgcccaagcgagccatgttgcttcctccagaagcaacagccttctggatgaatattctggaaggcccaagtgggcctgggtgctatttgcacccccattt

SEQ ID NO: 42606 - DNA, 379 bp, Glycine max
tgaatcggacatccgtgtgaaaagttatgaccatttgaatttctcaagagcttccatagttcaatttcgagcttctcgacatagtatgcgcccgaatcggacatccgtgtgaaaagttatgaccatttgaatatctcgagagcttccgatgtttaatttcgagcgtatcgatatattataaacctgaatcggacctcagtgtgaaaagttatgactatttgcatttcgcgagagcttccgatgtttaatttcaagcgtatcgatatattataagcctgaatcggacatccgtgtgaaaagttatgaccatttgaatttctcaggagcttccgttgttcaattttgagcgtctcgatatatgatttgcctgaatcggaca

SEQ ID NO: 42607 - DNA, 420 bp, Glycine max
  unsure (1)..(420): unsure at all n locations
tgcagcttatatggatccggcgttactcagactattgaatagtgggaaactgctctatctcaccgtggccaggccaggtgtttcctttttttgtgagtgatgtgagtcaactccttgagactcaatgagatagccactaagatgcagtaattcgacttttgagatatctctagggttctccaggaaaggacatgcagacattgttggttatgtggatgtagactgggcaagttctgctaatgacagaaaatatactacgtgttatgttctttttgttttgtagtttccagatcactcattcatggtgctgtaactatcttgagttntggcctcaanttatttgaaagaaatataaacagagttntttgttcgcttcatcttaatttgttttgcctttatatattatgtaatggtaatatc

SEQ ID NO: 42608 - DNA, 370 bp, Glycine max
  unsure (1)..(370): unsure at all n locations
gacaacagagganagtgggccccaaactacgaagggcctttcgntgtaaaaagggctntctccggaatggccctggtgctcaccaacatggatgacgaggagctaccttcatttatgatactccgangnngncaagcgatactacgcttaagatctggggcaattgaggaagtcgctgcatgtttgttattttaatatntatgtgttcttcttggtttcccccaaggattcctatcctctggaattttctcatcgcaatcttntacaagaaaagaacgtangattgaggttctgcgcctcgtggtgtgctctanaatatgtgtagtatttgaaacctgagcctttcgctcagccatgggatgccccagcg

SEQ ID NO: 42609 - DNA, 143 bp, Glycine max
gctcacttgaaggagtggggattttccctatctgagagatctgagattgtaattaatgtctctgggggggtcactgagcaggcgtatggcgcccgtggtctggtgggagagaaatttaggtggggcgttgaaaagaaggaaaa

SEQ ID NO: 42610 - DNA, 305 bp, Glycine max
  unsure (1)..(305): unsure at all n locations
tgcttaccacctcgaaagactgattagcggtttctaatgactcctctgcggcctccacataaggcatagaggatgggcagctcacctatatgtcttcctcgcctgatacgatgaccacatgcccttccactacgaatntcaacttttggtggagtgtagagggaacaactcccactgagtggatccacggacgccccaacagacagctgtagggggggttaatatccattatttggaaggtaacttgacaggtgtgagggcctatctgtactgggaggtcgatctctcctctaacctctcggcgg

SEQ ID NO: 42611 - DNA, 471 bp, Glycine max
gcttgaccaatcccgaggcaacccgggcatattcagtcattgagaacctgtgatgtacctaaacaggcgagctcctggccgtcaatagataaaagaataaacaccacaaagcaaggaggcttgtgtggtggctggccaactgtgaactttgagtgttatatgggatatggcctctggtaatcgattaccaaggatgggtaatcgattacaaggcttaaaagtgaagacaggaagctaagatggcctctggtaatcgattaccaaggggtgtaatcgattaccatgcttaaaaacgagatcaggaagctaagacggcttctggtaatcgattaccaaggggtgtaatcgattaccaagcttagaaatgaacgcagcatgttttggaggcctctggtaatacaataccaagctgtgtaatcgattacacagaagaacatgccactgtttatcgattaccagttatgtgtaatc

SEQ ID NO: 42612 - DNA, 239 bp, Glycine max
ttgagatgaagaagtgtagaatggtgaaacttcctgcttatattcgttgaccacagagtggtacctggagatatgtcgcgcgggtcaagataccttgcggatgtcatgtggggtgctattgcccagaaccaagcttgaccaatcccgacccaacacgggcatattcactcaatgagaacctgtgatgtacctaaacaggcgagctgctgccagtcaactgatgaactgaacatagacca

SEQ ID NO: 42613 - DNA, 434 bp, Glycine max
  unsure (1)..(434): unsure at all n locations
agcttgactaggcgagaagatttagccttattttcactttatttattagtcgattcaattaagaatgagaaatcccaaagagaaaacatccgattgatttttcgctttattttactaaaagggtatttttttgattattatattattattttacctcttttttgatttccaacgtggttacggcacgaccgaacggtcggaattcattttaaccgaaattaacggatgatacaattcaaacgatcagtggaaatttattttatttttagattaggcgagaaatgacttatataaatgactaaagcatgtcaaaagggggtatagaaagcgaatgataacgaaaataaaaatacatganacaaaatgtggaccaccacgggtacatagaatgaattgaanagctcggtttgaagtacttacccgttgaagactga

SEQ ID NO: 42614 - DNA, 521 bp, Glycine max
  unsure (1)..(521): unsure at all n locations
tgggacgattgtncccanctgantaccgtcgcttacatactcaagcttctaaacttactacagaatgaatctctgataccactcgtgtgacagtggctcaatatccaagaagggggggggggtgaatttatatatgacatactatctccccataaactatatctagtattaattttactaaacaacccaataattctgtttgataggcactccttaatcatatgaccattatcctctcatttgaattaaaagaactaacactttcgagttgatggcagctaaatgcacactatattttactggatcagccacccttgtgcctacattaatctcaatcacattcttgagactttactatatttcgaattccttctctagatactgaaccgccatggacaaaccttcctttgccttaaactctttacaacagagaaacgcgtctctactccttttgaaattatacaaacatataacattctctttgaagagaatgtgacattacacactcattatacttatcc

SEQ ID NO: 42615 - DNA, 444 bp, Glycine max
  unsure (1)..(444): unsure at all n locations
ttattaccttgcgttctaatgttatatatatatatatatatatatatatatatatatatatatatatatatatatatatatatatatatatatatatatatatatgacatttctaaatactcccgcgaacatataataaaaacaatctttttattatcatgtgatgctattgatatggaatatatatcagttttttttaatgagtaatctctcgaaaaatataattaactatctctagtggatatatctctctcaaactatatttttatatatacaaaacttgaataaaaaatcttacttagaggaccgctattataattggccggcgagttatatatatgtgacgggccgcactacttatcatctccttctatatattaaatttcccaacaacagaatgtatgggtaaatattctctctattctgagagcaacttgtgggtcn

SEQ ID NO: 42616 - DNA, 373 bp, Glycine max
  unsure (1)..(373): unsure at all n locations
ctagataagtattaaattgttttttcataactgagtagcagatgaatctttctcaaaaccttttaccaaagagtttgtactctctggtcatcgattaccagattattgtaatcgattaccagtagcacaatggttttcaaaaagctttcaacttaatttacaacggtccaattgatctcaaattattgtaatcgactaatgtttncgtaatcgattaccagtgtgtttgaacgttgaaattcatatccacatgtgaagagtcacatccttctacaaaaaagctatgtgtaatcgagacactgatttgtagtcgataccagtgaagtttctgagcaatcgaaaatgcactcttcagtgttttgactgttcaatt

SEQ ID NO: 42617 - DNA, 572 bp, Glycine max
  unsure (1)..(572): unsure at all n locations
ccacaccccctcnccaactacccctacaatntaatcatctgctccaacatnnnnnacagaggnnaatgaatatgcgtaccggccccnaaganacccagcgtcaaactnaaaaggaagatagggagaacttcttctcttatcctngacgaggattctgaggattctgctcaaattacaatgttcctcttggcgcgggggttctactgcaagcaatggcggctcatggcagccacccgtagtcctgggtggtggatgaagagatgttacggttcgggtggccgtttggagaacacgacagtgaaaaattgcgttcttctcgtcgacgaacgtatttataatctacagatctccgctaacgatctcgtcctgccaagcaagagtccacctttttcgctcagcgtgcaaaatctcgctcaatgcaacttcttctgcactatggctcgctcagcgcaattccctcctnggttggaattgcccttaaccctcccttcttgcctagtgagacaacatacagtgtcactctcaaaaatcccatagcacggctgttaataattgtcttatgaagctctccg

SEQ ID NO: 42618 - DNA, 419 bp, Glycine max
  unsure (1)..(419): unsure at all n locations
agctttgatgatatggtcttcaccgactaatgatataaagngagtctatacagagacaaatctgattatcatactttgattaatgctaaaaaactatggcatgtgatgaagatgagaagaagggagaaacctatggtgtgactgccattcttatacgaccaagtttcccaccaacccaacaatgtcattactcaaccaataacaaaccttctccttacccaccgcccagttattcacaaaggtcatccctaaaatcaaccacaaagcctacctaccgcacttccaatgacaaacaccacatttagcgtaaaccaaaacaccaaccaagaaatgaattttgcaacgagaaagccttataattcaccccaaatccagtgtcctatgctgacttgctctcatatctacttgataattcaatg

SEQ ID NO: 42619 - DNA, 430 bp, Glycine max
  unsure (1)..(430): unsure at all n locations
actcagctggtctgatttttctaagttgttaacaagcttagaacaatatacttgtccttcgtntaactgtatntgggcgtgcggccacgatcaacaaagtacctttgacatctactatatgttgatttgaccaacgctgttatcggtatgttgcgacaatccttcataaccttatttatacattctgagaggttagttgtcatgtgaccatatcgacgtccttctctatcataagccatcgtccatntttcctttgaaatgcgatcaatccatgttgctatggctggactcagttgacgggagattttctaaatttgataaaaaatgtgcttgcaggagtgtacctgcacaaattagtagcccaacaattttagtatatataaacttaattaacatgacatcataatgaatctacccaattctcacattc

SEQ ID NO: 42620 - DNA, 332 bp, Glycine max
taacccacctggccttgaatcagaaatctgtatctgtcgcaaaggttagtggattgtgctcctctgctgaccaccatacagacctttgcccttccatgcatcaacctgtagcaattgagcagccttaagcttatgctgcacatatttacaataaacctcctcaacctcagcagcataatcaaccacaacagagcaattatgacgctttcggcaacagatacaaccctggatggaggaatcaccctaccctcatatggtacatccctcagcaacaacaacagcgacctgctccttccttgcaaaatgctgctggcccaagcagaccatacatt

SEQ ID NO: 42621 - DNA, 441 bp, Glycine max
  unsure (1)..(441): unsure at all n locations
tgtgcgaatcanatcactcctgcatttcatctctagcatgcattttntctttctttacccactcctcacgtttggttntttatggaaaaacaccataactaaacgcgccacaaggcatccctatcgcaccagatccaaatctagaacgatgggtgatcaagaggagacacaggaacagatgaaagccgacatgtcggctctgaaagaacagatggcttccatgatggaggccatgttangaatgaggcagctcatggagaaaaacgtggccaccgctgccgctgtcagttcggttgccgaagcagacccaactctcttggctaccgcacgccatcctccctcanacatagtatggcggggaaggaacacgctanggcatgacggcaaccctcatctgggatacaaccgagcggcttacccttatggattgccgccatctac

SEQ ID NO: 42622 - DNA, 317 bp, Glycine max
atgttgatatgtgtacagcctctgcacaaatttaatctcatcctatctacaagttgacactgatggtaaaagtcaccaagatcaacttgaacacatgtctacatgcaagtaatcccccttaggaggcaagacaattaactttgcaaccaaattccacgtgcatagcacaaaccaactagcattctgattaatgaattatatagcttacatagagaattcacattttattcaaaacaatgttattattgtcaagaaagagttttgttctacttcttccatttgtctacaccattaaagatttatatgtaatataatca

SEQ ID NO: 42623 - DNA, 342 bp, Glycine max
  unsure (1)..(342): unsure at all n locations
tttcacctgtcttcactagatcngagccgtctttagacttcttatacattgttccaccttgagagttaagcacacaattaaagatgcatctttgtttcccatcagaccatgcattagacataatagtacaattatgcttgactcattgctccctagggcctgtcatcaaatctttagggtatgcaagtttcttcttcaagagtggaacaccgataacatattattgcggaaggcagaaagggataatattattaatattaaacattagtaccagaagttctaattagtaatacaacatcagctatgctgcccacctcccaaataacatggataaacccatct

SEQ ID NO: 42624 - DNA, 408 bp, Glycine max
  unsure (1)..(408): unsure at all n locations
agctntgagaaatatcaattgacaatttctntttactcggatgtccgatagtgtccatagtttatcgagacgctcgaaactcacaagcgaagctgtgagataaatcaatcgacaataactttgtactcggctgtccgattgtctcccgctgtatatcaagacgttcgatattcagaatagaagctttgagcaaaatctaacgacaataactctttactcggatgtccgaatgtggtccgaagtatatctgagacgctctgaactcacaacggaagctctgagaaaaattaaacgacgataaccttttactcggatgtccgattgtgtcccgtagggtatcgagacgctccaaattctaaacagaagctctgagcacaatctaatgacaataactacttactctgatgt

SEQ ID NO: 42625 - DNA, 473 bp, Glycine max
  unsure (1)..(473): unsure at all n locations
tagccgaattcagatcgaatngaagttagcttagctgaaccttggccagcttagcggaatgaatcagcctcagatgcaagggttgggcgctaagtgcttgagactcatggcttagcgcatgaacagagatgcgcttagcgcaaggcttgcgtttagcgaaaggactgttntttttttttcagaaaagtgttttctaagttatttttcagtcctttttccaagaaattgaaacccttgtgttaaacattcaaagataagctgatatactcctatgtacaaattatacagcaagttccacatgatataatgcatganaaaacagagataacaaaaattaaaactgggttgcctcccaagaaacgcttctttaatgtcatgagcttgatgcttttatctcactgggtgatcaaatgaacagagccctgtgtccttgtanattcttcatcatgatacaattttaacctctggtgata

SEQ ID NO: 42626 - DNA, 317 bp, Glycine max
  unsure (1)..(317): unsure at all n locations
tctctatctaaaataatatatggtgtccaaattatccacagaaaagctactaacacattcttattaacacgttatttataataatactcgaataattggttaaaatgtgattgagattaattaccaaataatgcggctataactttatatatctcattcataattttgtaatggcttaaataaattttaatcctcggaattaggtataaatctatttatcgcttccccacattatanaaaatataattaaaaatttattcctttaatcaaatataaaaaatattataatatatttttcaaccttataatatattaaa

SEQ ID NO: 42627 - DNA, 344 bp, Glycine max
  unsure (1)..(344): unsure at all n locations
ctgnngttggagttggaatgcaatgaagagagagaaggtgatggacatggatatggacacgaagagaatggaaattgttgtctttttcttcccctccattgttgctgcgatgagagtgaaagtggaggaagagaataaataagcaaagagggggtggaaactctaaaggcaatgggtggtgttttgacataactggtacacatgatgaagaaaaatggaattttactgtattggcgattttaacaaatactgacagttntataaccgccgcagattgtgttatcagatatttaacagacacgtcatcacttaactgacgacgaagatctaaaacaaaacttttc

SEQ ID NO: 42628 - DNA, 463 bp, Glycine max
agcttgtctcatcatttatgcgagacggagaccatcatgcttgctatcatcgccaagtaccaagaagagttaggtctagccacggcccacgagcataggatcgcggacgagtatgcccaagtatacacggaaaaagaggctagaggaagggtgatcgactctttacaccaagaggcaaccatgtggatggatcagtttgctcttaccttgaacgggagtcaggaacttccccgattgttagccaaggccaaggcaatggcgaacacctactccaccccagaagaaattcatgggcttctcggctattgtcagcatatgatagacttaatggcccacataattagaaatcgctagggaacttgtatggtctctcagaccttgactagatacaactttttgaaataaaatggagtggtcccatgtatctactccaaaaagcttgtgcaaatcaaatcactcctgc

SEQ ID NO: 42629 - DNA, 380 bp, Glycine max
  unsure (1)..(380): unsure at all n locations
tcagctaagaaaagaggcctagcaattcctatttcagaaggaatctatcatagacctcaatcttaatggaaagggtaccacgactggaaaacccgaatgcaaatttttattgaggcaatagatctaaatatttgggaagccatagaaatagggccttgtatacccaccacagtagaaagaattacaatagatggtagttcatcaagtgaaagcataactatagaaaaacctagagatacatggtctgaagaggatagaanacgagtacaatacaacttanaagccaaaaacataataacatctgccctgggaatggatgaatacttcanggtttcaaattgtaagagtgctaacgaaatgtgggacactcttcgattaac

SEQ ID NO: 42630 - DNA, 343 bp, Glycine max
  unsure (1)..(343): unsure at all n locations
gagcaaattcaaacgacaataactttttactcgcatgtctggntgagtcccatattatattgagacgctcgaaattgaatgttgaagctctgagcaaattcatacgactataaccttttactcggatgtctgattgagtcccgtaatatatcgagacgctcgaaattgaatgtttaagctctgagcaaattgcaacgacaataactttttactcggatgtgtgattgagtccctgaatatatcgagacgctggaaattgaatgttgaagctctgagctaattctaacgacaataactttttactcagatgtctgattgagtccagtaatatatcgagacgctc

SEQ ID NO: 42631 - DNA, 450 bp, Glycine max
  unsure (1)..(450): unsure at all n locations
ttcaatctaagcttaacattcaatntcgagcgtctcgaatattacaggactcatatctacatccgagtgaaaatatattgtcgtgtgaattggctcataggttgaacattcaatttccagcgtctcgatatattacgggactcaatcagacatccgagaaaaaagctattgtcgtatgaattggctcataggtttaacaatcaatttctaacgtctagatatattacaggactcaatcagacatccgaataaaaagttatcgtcgtttgaattagctcagaggntatacattcaatttcgagcgtctcgatatattacgggactcaatcagacatccgagtatacattattgcttttgaatggctcaaggttcacattcatttcagcgttcgattatacggactcatcgacatcgataaagtaatgcgttgattgctaagctaacttatt

SEQ ID NO: 42632 - DNA, 454 bp, Glycine max
  unsure (1)..(454): unsure at all n locations
agctntggcttgctgtttcaattgtctcaaacttggtaacttagttaatattttttgtattttatttatttagttgtttctgttctgataatcaaattagttgttttagatattataaagtttgtatgtaatgaaatagttttaggtattgtaagttattagttttgtatgctaagttagttttagttcttagttttatatggtacattagttttagttttagttttatatggtacgttagttttagttattgtaagttattagttttgtatgttagttttagttttagttttctatgctacgttagttttaattttagttttatatggtacattagttctagttattggaagttattagttntgtatgttagttttagttttctatgctacgttagttntagttttaggtattttaagttattcagtttgtatgctaaattagttctagtttt

SEQ ID NO: 42633 - DNA, 336 bp, Glycine max
  unsure (1)..(336): unsure at all n locations
acattgagtgtcctcattgatatgttctacaggtgattttgtatgaatttctaattgtcataacatgattcatggatatgatctaagcattctttctttctttgcattttaagccactggccaaacaactatctcaatgtatattattttatcatttgcaatccctttgagttaaacacttgatattatgttgaaacactaacctatgataaaagtttcctaccttaccttangttangagagcaagggtgttttgatggggatttctatcatttggtgacaaatgtgatgtaaatactttcgtttatgggtattataggaaattacatatttatc

SEQ ID NO: 42634 - DNA, 409 bp, Glycine max
agcttaaccaatatttaagcaaaaatacaccattgaacttaacttacactactaaaaaaataagttttagcatcgtcctattaacatcggttatgataaaaaccgatgttatgtaatacacggtggcatttatgaaaataaaatatctttattaacatcggttatttgaaaaccaatgttgtaagtgcttagacgaatatcgatttcaaataactgatgttaacaacacgatttaccacgattttaacattggttatttgaaaaccaatgccgtctaagcacttacaaatagatgttgatgtttttaaataacttctcacggcgaaccctttggtgtccatgaaattcattctctctctctctcacccaactctctctcaacccttgaagtacaagtgcaccgaagata

SEQ ID NO: 42635 - DNA, 572 bp, Glycine max
  unsure (1)..(572): unsure at all n locations
gatggttttcnaatgtacctgtgatacggtgctaccattctcaacctagaatatacaataacactctttgcgcgaccatgaagtccttcttaattatcatgctatcatggaacttcttggtcttttctttgtagaactaggcattctcgtaggcttctaggcggatctcatctaactcactcagttgcaactttctttcctcaccagctngatccatagagaagttgcaggtcttcactgcctagtatgctttgtgctcaatctccattggaagatgacatgcctttccaaagacaatccgataaggagacattcctatgggtgctttgtangcagtcctatgtgcccaaagagcatcatcaagcctggtactccaatctttcctgcttcgctgcacaatcttctctaaaattctcttgatctccctggtagagaattatgcctgtccattagtttggnggtggtatggtgtggataccctgtgtacaaccccgtactttntaagcaggcatacattgatttgttgcataaatgggtcctttgtcactaacgaatgctntaggtactccaag

SEQ ID NO: 42636 - DNA, 327 bp, Glycine max
gcttatccttattgcagacagagggttcatgtctgtctaaatagaccaataatccagttctagaatagttcactcctccccaaaacctcgttgatcaagaccaaaacattttcaaatcttcggtttgggtcgcaacagataatcttttccctttcatttgctcaccaaaaaatgcacgcgttgttaacttcattctattattattgagtaaaacattatcatgtttagagctgactcaacacacgcgtgaggttatttcttctttcatttactcacacaaaatatggaacatatattatcgtattatataagaagggaaacacattc

SEQ ID NO: 42637 - DNA, 229 bp, Glycine max
tacctcatgcactactctcaagactatagcatcaatgctggcccccaactgctaacacgtagacgccatattcttgattgaatttcacgcaacagcacgagaaaccgtatacaatggctccaccactgcgcccatctataaaacgaatctccatataactgagtccatcataagaacagcttacaataaaatgctctaagatacatggtgagggcaagaggcacatcga

SEQ ID NO: 42638 - DNA, 374 bp, Glycine max
  unsure (1)..(374): unsure at all n locations
atcgcggacgagtatgcccaagtatacacggaaaaagaggctagaggaagggtgatcgactctttacaccaagaggcaaccatgtggatggatcagtttgctcttaccttgaacgggagtcacgaacttccccgattgttagccaaggccaaggcaatggcgaacacctactccaccccacaagaaattcatgggcttctcggctattgtcagcatatgatagacttaatggcccacataattataaatcgctagggaacttgtatggtctctcagaccttgactagatacaactttntgaaataaaatgagttggtcccatgtntctactccaaaaagcttgtgcaaatcaaatcactcctgcattttatctc

SEQ ID NO: 42639 - DNA, 364 bp, Glycine max
actatatatgtgtgagtcgttcgttatctctacctgtttaaaaatgtgataattcactcctcatgtgttgtttatgtttggatcatgtgatgatcttaaaccttgtgtttgtgagagcaaatggctccgtgaattactttaagaaaccttgtgatggaggactccgagacacaatattttgatatgatgtaacattggcacaagagtttttattttatatgcatgacgtatcaaacatgtcattttactttatttgataaacttgaacagtcttgttgtaagtcataaatatttctaagaagatttatctggtaacagtgaagcgaatgtgagcattacccacgtcgactgatttacgatttta

SEQ ID NO: 42640 - DNA, 529 bp, Glycine max
  unsure (1)..(529): unsure at all n locations
agagtgcccaaatgatatgatgcgatcgcgngacccngatagttanactgcaagcgtgcgagctctggcttgctgaatggatagacatgatacttgtcacggcgtggataggttcaaggattaaattgatgacccacattctgttcaggacaccaaagcaaaagatgaagatcttgtaatatttggcatgaatgaaatacatgcacgtattgagacgcattagtgtcgaatgctaaaggacatgtacctgttagtgttatatgcggcgcgaataatacgcttacgcacagaaggtacgctgggtattctaaggagaagaccatttgaggtgcgtggtagccttacttctattttgttatgcggcgacaattctgatttgagcataatatggcccatcacaagaacttattgcaaattattactggtgtctgtcaagcctagatcacgagcctactttacttcttattnttacgttatttaagttactccattcgtgagcgggaaatttcttacttacgtatggtagctc

SEQ ID NO: 42641 - DNA, 358 bp, Glycine max
gtatgcccgagtcattcatccctatgagatgttgttgaagtattggcgaacagaattgccattccttggattatagggttgaaccaagctcatgctattacaaaaaggttcatcaagtcaagttgaaatatggaagtaaccgtcttgcaaaattggggcataagatgaatcgagtcacatcactgcttcgactactgccaaacatatttaagattattgatgtccttgttacttccagtttcaccttgacaaagatgtcatggaccatgttgaaaatctaaattgattcaaccccatatcttgcgtaaaattccaatacttaactgtcatcattccatgcatctgctttcattggtgc

SEQ ID NO: 42642 - DNA, 348 bp, Glycine max
atgcagcttgtgggggacatgttgacatgtttttttatctgacatttatctttaaaattgcctctatctattttcagatggtgaatgcctctaacaacaccttagacaatgattatcttcatgcctcttagaagcagatgtcaaaatctgtgatgccctattctgacttcctctgctttggaggatttacatgtggaggagtgactgtgttcttgagatgaccataagtagcggctgtacttcgaactgctgcccctcattaaaactttactcttcttattagtcaccaagcattctggcttggagaaggatacattgaatccttcgtcacactactgactgatgctg

SEQ ID NO: 42643 - DNA, 177 bp, Glycine max
tgacaagctatagcttatcgacgcacacaccgtttataactaaactcacctccttgagaagcatccttgataatattccgttagtaactacagcttatctacacacacatctatgataactaatctcacattcttgatacgagaaacttgaactcatgtacacacgcctataatatc

SEQ ID NO: 42644 - DNA, 467 bp, Glycine max
  unsure (1)..(467): unsure at all n locations
agcttcaatgtnntttttttctagactgtattctccatttcaagtcaaaattggataaatctaaataaatttatttcaatatcttcatgtaaattgacaaatctcttcgactcagattcctttttgaataacctatcaaatcaaagttatatctaaaataagaaaattcagcaagaaaaaagtgagagaagattatatttatgacttccaccaattcaatgaattgtcacagatattcgatgcttccatgacctattcgtcatccctgtgaataaatcgcgcatagtaatttggaatgggatgtcatacactcataaaaaataaaaaggattccatatactgaattctgcatctttttcctaagttaggtgtactgacttaattcaaacatgcatatgatccattatagtggaaatntcttagaatatgattctactgattatgggtcaataaaccgagaaatcttg

SEQ ID NO: 42645 - DNA, 426 bp, Glycine max
  unsure (1)..(426): unsure at all n locations
tcatacctctatcattgtgcaatttgtttagactacctccaaatttctagatatacactacannaaanagcatactttcgatggtcaaaatccgtcggatacctcaaaaatccgtcgctaagtcaaaattcccgacggatttctaatagaccaaaatccgtcagaaaattgatcgtaggaaattntaaccgatgaatnttaactatctgttggaaatttccgacggatatttccgtcagaaatgctantttataaacaatggtttatatcatttgttttttatttttatcatttaccattgataatttaacaattattgtttgcatttatattatttaacgtcaaaatttgaattaacacatacatgtaattaatgaaatgttcaaattcataaatccaaaacaaagagtanaatacatcattaag

SEQ ID NO: 42646 - DNA, 198 bp, Glycine max
atttcgagtgtctcgatatattatgcgcctgaatcagacctccgaatgaaaagttatgagcatgtgaatttctcgagagctacctatgttcaatttcgtgcgtctcgagatattatgcgcctgagtctgaccttcgaatgaaaagttatgaccgtctgaatttctcgagagcttgcgatgatcaatttttagcgtctt

SEQ ID NO: 42647 - DNA, 300 bp, Glycine max
  unsure (1)..(300): unsure at all n locations
tagcttggaacatattatatcaatccgaggcctctcttaagatntagacaaaatatctgctagttgattatttgagctgacaaactctgtagctatctccttggacagctacttctctctcacaaaatgacaggcaatctctatatgctcgggtctctcatgaaacactggaatagaggcaatacggaaggctgcctgaattcacaatacaacattattggctgaacttcacagaattttagctctagaataaattgcttgatccacactaatttccacgtgactgatgccatagccctg

SEQ ID NO: 42648 - DNA, 457 bp, Glycine max
  unsure (1)..(457): unsure at all n locations
tcgatgaaaacatggtagcataaccctttcagcctcctaaaacaactcatgtgtttacataaacaaatgttttactaagaaaatatgtgtagcacatgatactagtacgttgtctgattagttaagccacattctgaaacacagcttccaacagaaaagtttacaaaaatctagaaaatggtttaatgtcaagttttatatcaaactgtgttagttctctggcatagcctctttagaaatgaaaccatgaatcataaacaatagaattataatgtatgaagtagcaaactggctggatatattcttatctgacaacattntgtggtcattgtaaggttttaaaaattacgatctggatacaaacctcatcagcataccattcttaagatctttctacaagtctataatgatcatgttgagcacatganatgtctcagtactttgtgccctccctgat

SEQ ID NO: 42649 - DNA, 383 bp, Glycine max
  unsure (1)..(383): unsure at all n locations
agcttctntaagaagattcctaaagaagctagagcttagctacacatacctctctaatagctaagctcacctccttgagatgagaagctagagcttagctacacaccccctataatagctaagctcaccccatgacaaaaaacatgaaaatacaaaaaaaagtccttattacaaagactactcaaaatgacccgagatacaaggctaaaaccctatactactagaatggccaaaatacaaggcccagacgaaggaaaaacctattctaatatttacaaagataagcgggctcatacttagcccatgggctcgaaatctaccctaaggatcatgagaaccctagggccttcccttggatctctagcccaatctacttggagtct

SEQ ID NO: 42650 - DNA, 292 bp, Glycine max
  unsure (1)..(292): unsure at all n locations
acttgtgaaagatagtcatgagggtgggctcatgggccactttgggatagacaagacgcctttcttactcaaagaaaagttctattggccccatatgaagaaagatgtccataagcattgcactacgtgtgtggcttgtttacaagccaagtctanggtgatgcctcatgggctatacacacccttacccatcccctctacaccttgggtagacattagtatggaattnttcttgggcttcctgaacccaaagaggtgagactctatctttgtggggggatagattagcaag

SEQ ID NO: 42651 - DNA, 411 bp, Glycine max
agcttggaacatatgaaatcaatccgaggccttcttatagatttagtcaaaatatctgctagttgattatttgagctgacaaactctgtagcaatctccttggacagctacttctctctcacaaaatgactgtcaatctctatatgcttggttctctcatgaaacactggattagaggcaatacggagggctgcctgattatcacaatacaacttcattggctgaacttcacagaattttaactctataataagttgcttgatccacactaattcacacgtgactgaagccatagccctgtattctgcttctgcacttgatctggcaacatgattctgcctcttgctcttccaagagacaacatttcctccaataaatacacaatattctgtagtagaacgtctatctatg

SEQ ID NO: 42652 - DNA, 415 bp, Glycine max
  unsure (1)..(415): unsure at all n locations
catggtagcataacccttcagcctgctaataacaactcatgttgttacatatacaaatgttttactaagagaatatgtgtagcacatgaaactaatacgttgtctgattagttaagccacattctgaaacacagcttccaacagaaaagtctacaaaaatctagaaaatggtttaatgtcaagttttatatcaaattgtgttagttctctggcatagcctctttagaaatgaaaccatgaatcataaacaatagaattataatgtatgaagtagcaaactggctggatatattcttatctgacaacattctgtggtcattgcaaggttntaaaaattaggatctggattacaaacctcatccagcataaccattctttaagatcctttctcacatagacctatgaatgatcaatg

SEQ ID NO: 42653 - DNA, 472 bp, Glycine max
  unsure (1)..(472): unsure at all n locations
agcttgcatctacatgaatgactcttaagggaaaatggatttgaatgaagatcaaaatactttaaaaaagtatatataacattaaattttttaaagcactttatgaaataaccttaagcaagtaattcacatatcacattcaaaatcatgcataatcatttaaaaaaatagtcattgtatatattcaattatatcaaaataatcaacacaagtattgaagaataaagatcacagacattatctaatttttaaaaaaattcatgctttgagaaagaaaattaactcaatcaaaacatataaacacatactcacaatttcaatcaatcaagacaaacaaataaaatttttgttagtcatcatataacaagttaattgaaaggaaagtttcaaccaaattaattntaaaagagaatggtgttgatgttacctttttcatgatttaagtgcctagatcttcanagatggaagtcat

SEQ ID NO: 42654 - DNA, 395 bp, Glycine max
  unsure (1)..(395): unsure at all n locations
tccgaaacaaaacacaaaaccaagcaattcgaaacataatccatcatcaacaccaccgctaccaccatcaatatcttctcatgggtgggtggctttattggtatttgggcattttaattcacacacttcaattctcgtgttcagtcagaaccgtccatggcttgatcccacaatccccaatccaatgcagcagttcaggctgcaccctccgcaactcctacggcgcgtggggcgaccgaaaagactgttctgccctcaacgtgacatacccaacaaccgaagaacagctccgttcggcagtgtcctacgccgtcagaaacaacctcaaagtcaanggttgtaccagattctccacaccattcccaattatcatgcccacatgaaaatacaacaac

SEQ ID NO: 42655 - DNA, 462 bp, Glycine max
  unsure (1)..(462): unsure at all n locations
agcttgtgcaaatcaaatcactcctgcattttatctctagcatgcattttttttctttctttacccactcctcacgtttggttttttagggaaaaacaccatagctaaacgcgccacaaggcatccctatcgcaccagatccaaatctagaacgatgggtgatcaagaggagacacacgaacagatgaaagccgacatgtcggctctgaaagaacagatggcttccatgatggaggccatgttaggaatgaggcagctcatagagaaaaatgtggccaccgctaccgctgtcagttcggctgccgaagcaaacccaactctcttggcaactgcgcaccatcctccctcaaacgtagtaagacggggaagggacacactgnggcacaatggcnaccctcacctgggatacaaccgagcgacttacccttatggattgccgcccaactactcaccacccgtcct

SEQ ID NO: 42656 - DNA, 429 bp, Glycine max
  unsure (1)..(429): unsure at all n locations
tgttctatcttcatatcagattcactccaagcatatcaaatatagaatccatgtcaatgtcctcaagaatatacctttcgaaaacataaaacataaaacaaaactctaaaagtcctaggtaataaaaagtaaaggaaatagtcatgcaattagtcctaaatgacacaaaatgaatgcaaacctaatgaattaatatgcaaaaacatggtataaatatcgcacgtcagtatattaataatttataagggagttgactgtaatattattggttttaaaatctgactggtaatagtaactaatatattannattttacaagcacttgagtgatatactccctaaatattntcactatttacctaaagtatgtntagaatattacttataatggttacaccaatgctatatggctatcctatgttgacaatgt

SEQ ID NO: 42657 - DNA, 382 bp, Glycine max
cacctgcagctgcagcttcgaagaaggatgggtacatcccttatgcagagcttgaaagagcccgggtagtcgaagagaagttcaagtccatagccatcaaagtcttaaaagagtatgatgaactaagggacgtcaatatggccacagctgaagctttggaacgagaaaccaagaaggcccgaaaggaagaacacgaccaaagcaaagttttgaggggctttatagggcagcaatagtgagctcaagctccgaagaggtgaaaggaatcatcacgggtcaaaggcatgatcttgaaggacgagctaaaggtttgccttaggtcgaaaagaaatttgtcccaacagttaagcgagactgaagggaatatgtgggccatcatcga

SEQ ID NO: 42658 - DNA, 536 bp, Glycine max
  unsure (1)..(536): unsure at all n locations
agggtgccnaattgaatcgatgctgatcgcgngaccncnnatagtntanagtgcaggcgtgcaggctcgagtctatatgattgtcttatgccggatattggttatggagagaatatcaaaagcctgtggataagattatattactttaacaatgtgtatagcaactttatgaaagaaccttaagcccgtgaatcacctatcacatactatatcttgcatactcatttaataaacttgagtttgcctatctgatgttgtatgcacgaggtcccctcatctattgatgagtattgaccacagaccttgtctaatatttaaaagagaagatgctatgcgatagattgtcaactcaagcgcatcgtatacacacactacaactggctacacctttgacagacaacanatatatattttgatcttcattatataagacagaatgtgaaacgatcgtttcacaccaagtcattttaacatagagtggggtcgatgttctcatagatggagatgagccatatctccaggagggaatcatggtn

SEQ ID NO: 42659 - DNA, 373 bp, Glycine max
  unsure (1)..(373): unsure at all n locations
tgcgcagcccaccatcttttcatagtagagtaccgattatgtgtctatcatcatgattatcgtctccctttccatcattgagggtaccacttgggccgccagatccctccaccttttgggcgtgttctttgaaagatacgtctccctttttgcacatgttctgtagttgcatcctatccggaaccatatcaaaattgtactgatactgcctaacaaaggcaaccattaggtccttccaagaatggactcgggaatgttccaagttagtgtaccaggtaacagctaccccagtaagactttcttggaaggaatgtatcagcaattcctcatcttgtgcgtattgccccatcttctgacaatacatctntagatg

SEQ ID NO: 42660 - DNA, 447 bp, Glycine max
  unsure (1)..(447): unsure at all n locations
tcttaagcaccgcggctgcagcttgtgacttttacataaaacgttaaaagtcatattaacataatttatgattcaatgtcaatgtgaattttttttacaatgtcattacatgatcgatcattaaactcttcttataacaacatggtgttatctttgtttaagaaaatttctccaagttacaagttaattaaaatatcgatgactaagctttcgacaagattaaagtgacgttgtttctatcaaaatattgtctttcgataaaagatggtttcttgaccaaattattatgcacatggaagaatagagtgctcgcacgaggagtttgaatttgaatntgaaataaaagttacaaaagttagcgaagaaggttacttgaagacattatacgtcgntagatctaaataattaagaacttgttggactcgtgtcaaaaatctataattccaa

SEQ ID NO: 42661 - DNA, 282 bp, Glycine max
taataccctccacaaggctttcctaaacaactgcccaatattattttggattgtgtcccaatatttcttgaagaaaacaaattgaaaaccatctatgttaggcagtttatgagacttcttacacataaaggcgtgcttgacttctttctttgagactatgccagtgagggcttccctaacttcatggctaagcgtaagaaaagggcggatgtcaaaaatggccatcgagatgtcatggggaaggcaaaaaaggttttggaaatatgattgggcctccccctc

SEQ ID NO: 42662 - DNA, 431 bp, Glycine max
  unsure (1)..(431): unsure at all n locations
tgcaagctttgctaaagaattattgcattttgaatcactcatgcatacgcgtgtgcatgcatatttgttatcttgtgacaggggtaagatcgttttaagcaatagtcaaataccacgccaaatccaagacagaaatgaactgaggtaagtggtaatgtgaccacgatttgttgcgcaatgtcatttcttgctttcaggtacttgnggacaggcatgaatggatgctangcccatgatcaatagatcgttgtcccacgtccagctccagacaatcgagaagcgctactgggaggcagcctagtatcctttaaattcctacctattattatttaagatgatgatcggatgcctaacttaccctaggggtttcgagtaagtgaacgttgtccaatagagagcgcgtattttcttcaaaaagaanaagaaagcac

SEQ ID NO: 42663 - DNA, 359 bp, Glycine max
cttctccattccattctgcgtggaaatagacacctccggcgtaggaatgggtgcagttctatcccagaagaaccacacaatcgccttcttcagcaaacccttctgttctaagctccttcgtgcttccacttatgtcagggagcttgtcgccattaccaccgcctttaaaaagtggagacaatacttattaggcaatcctttcactattctcacagaccaccgtagcctcaaagaattaataggtcaggccattcaaacacctgaacagcaatgctacctggcacgattactaggctatgactatacaattcactatcgtgtcggaagatccaatgcagcagtcgatgccctctcacggt

SEQ ID NO: 42664 - DNA, 317 bp, Glycine max
acccgccgcatgcaagcttctcgcattatagagaaatatcctgatataatacctttaagattgtactctgtttaggtaccctgcctatatatttatttattcttttaaaactcttgttcatatattgcaattgtgtgcatgtgattgtggagaaagctagaagaagtgacattccagacattgataagaaaaacagaattcattttcttactacttttgtcccttttgattaggttccaggcctgataatgttgcttactacttcaaagtttttattgtgggggggggggggggctatatgtttccttatgtcaaaa

SEQ ID NO: 42665 - DNA, 514 bp, Glycine max
  unsure (1)..(514): unsure at all n locations
ntggaattganacccattgctttgancgcgatcgtcgnanccagcganccgctagagtgcacccgcgggcatgctaacttattgtccgttgaattttctctnaactttatcnttcgatttcgagcgtctgtgaatggtactggacacgatcttacatgctcgatcatatattatgttcttatgactgcctggcgagatcctcgttcaataacaagcgtcccggtctcttgccagactcaatctccatgactaagcttacgacttgattcgagggacggcgtctcatatcaaaacattgactttcgagcgactatggtttcgtgacgaccttattatgcacatggaataatagattgctcgcttgaagagttcgaatatcgtattcatataaaagttaccggctcgagcgattagggaacttgacgacattccacgacttagatcttagtcttggacgtgtggactccgcaaaaattttagcggacatttgtgcggaattataaacatccttacg

SEQ ID NO: 42666 - DNA, 207 bp, Glycine max
caataacgttttactcgaatgtctgagtgagacgcgttacatatcgagacactcgatatagaatggtgagcgtttgagcatattttgacgagcaaaaaatgtttatcggatgtgtgatggagtcccgatagatatctagacgctcggacttgaatgatgaacttctatcacaattaaaccacaataacttctctgcctgatggctga

SEQ ID NO: 42667 - DNA, 471 bp, Glycine max
  unsure (1)..(471): unsure at all n locations
gcttcattttggttntcaaaatcatctacaataactaagccatagtaattaccacccaaactcatagttcttgaaggaccaaataagtctatgtgaagtagttcatggggttttgaagtagaaacgttttttcctttgaaaagaatttttaacttgtttccctttttgacacgcttcacacaattttttttttcaaacttgagttttggaataccaattactaagtcctttttaactagatgattgaggtgatgcatgtttatatgtgcagctctacgatgccataaccaagaattatcaatcttacttaccaaacaactaagtttatgaaatgatgcatgttcaatattcaacatgtagatattacctatccttttaccaatgtgagcaacctcaccgaacatagcttcactaataagacaacaattcttggttgaattcaatttgaagcccttgtcacatagttgacta

SEQ ID NO: 42668 - DNA, 395 bp, Glycine max
  unsure (1)..(395): unsure at all n locations
tgtaataaactattaattagctattatcacaaggtttgctccctgcctaacttcaatcattagttatttaataagttgttgcagagcaaggaagaaaatgcaacgaacaatttgtaattntaactttttaccatgtaaacctacaatttcacttaattcgatatcaattttatttttcttcaatccgaaaacatcttcagaacattgacagcatcaacgaacaacaaaatagcacgagtttcagctntcaacgtgctttatttaatttcgtaaaacgaaaactangtcctaccggtggaaggatcgtaacgcgaccaaagcttggtcttcagcgtgtactcggcgttgaggaagcgaacccagacgcgttcatggcttccgtcgggttcgtcaac

SEQ ID NO: 42669 - DNA, 404 bp, Glycine max
agcttgggtgtgtctctctcttgctcatacgatctacatttaagcattacttgctttactctccttacacatattcttatttgagcgttagagtcctttattttgcaggtcccctctcctatcaaaggcacttctccaagccgatgtgtgaagttcgggacccactcaaccacatccacactaacgtgtcacgattctggattttagtaagaatatttggcgcccaccgtatggccgcggtaaaacataccttgcgtcttcctatcaatcctcttacatccatccatggttagcactaggtttggccttagacacaagacccactatacagactctagtctttattcagtggctatgacaaacacaaaccctctacaacaactccaaaaccgcatcgcagagat

SEQ ID NO: 42670 - DNA, 406 bp, Glycine max
  unsure (1)..(406): unsure at all n locations
gttgagttntattcagaanattagagtttatttcttttatcttagtgagagtgattctcctaaattcttgagtgattcaagaacaccctggctgtatcaaaggactttcacaacctttgtgtgttgcccttgctggaaagagtgattttttccttcctttcatcttcacccttgttctttcaaaccacaattccagaatatccacctctgcccagaattatgtcgtggccataactcccattntacgcactcaaattaagtgattcttgagcctaaattgactttcaaaacgagacctttcacctcgttttggaatcacctcacttggagccctgtagcttcagttattgccatttctatatttctgtccagccaccacttaacctacatnttaccatcccattca

SEQ ID NO: 42671 - DNA, 450 bp, Glycine max
agcttgccacccagctcgcccaggcgagctaagttgcttccttcaaaaggcaccgccttctggagaacttcctagaatgcccaagtgggcctggttgctatttgcaccccatgtttactaaatacaccccttgccttttattgctgattctttttctggaacgttacggaaacttacgaattacgtaacgatacttgttttctttccgtaatgttacggaaccttacggattacgtaatcatcccttttttggcttccgggatattacggaactttacggattgcacactaacacttccttttgacttccggcatgtcacggaacttcccgggttgtgcaacaatgctttcttttgacttccggcatatcacgaaacttcacaatatgcttaacgatgggtgccaagtacctcgaagtggtcaaatgagggtcgcatcccaacaacagat

SEQ ID NO: 42672 - DNA, 334 bp, Glycine max
  unsure (1)..(334): unsure at all n locations
acaagtatcatactctgcctgttccagataatttgaagcctaaagaggaatgtggattgcattaactgacaagtatttctaaaaaaagaaagaaaatagcaagattgatccatatatacatgcacagtttgtgaacttagaccatcacaatttatactcactttggttactgctcgtagaacaaagagaaaagtgaaatacaaatntctaacacgatcagggtatcttaggactcggtcatacatcaaagtaacaaagaaatgttgcatagtgaaatgaaattgtgagagcaaattgagaaagaatagataataattattaaccactgggaggg

SEQ ID NO: 42673 - DNA, 471 bp, Glycine max
  unsure (1)..(471): unsure at all n locations
agctntcactntgccgtttggtttctgtccagatcactccttcaagcttggaactctagaacttaaatagtccccaagatttatattcttcaatacttgccctgaagacaattgatgttgaacaaaaattaatggagtgcaatttcatgaataaagtagtagttcaaaaaaagaaggatcatattaaaagagtaaaagaagaagagaaaaacacagaaaatggacatacttccaaaccaatatttacaaagaaccaacctccattcttacaacaccaagaaatatattgcaaacaatatatgcctttctcgttttcggtaaccaaaccaaattcttatagcaataagctcaattttaaaaatgatatattttcaagagagtaagcaaaacaaagaaagattcatggcaagttcatatctatcaaggcataacaatctcaacatatgcagtgagcttaaacacatttagaat

SEQ ID NO: 42674 - DNA, 458 bp, Glycine max
tcagtcttcctacttttgtgttgtgaccatagagtggtacctggagatatgtcgcgggggtcaagagaccttggggacgtcaggtggggtgctattgcccaaaaccaagcttggccaatcccgacctaacccgggcatagtcagtcagtgagaacctgcgatgtacctaagcaggcgagctcctggcagtcaaccaataaaagaacaaagtccacgaagcaacgaggcttgtgtggcggctggccaactatgtatctaggtggtatatgaaaattagctacatgtaatcgtttactattcgagggtaattagcttacttgtaatcgctaagtagcttctggtaatcgattaccaatcgtgtgtaatcgaatacatagtattataagtcacttggtatcgattaccagttgtgtgtaatcgatacatagtgctactgctactgtaatcgataccattat

SEQ ID NO: 42675 - DNA, 455 bp, Glycine max
  unsure (1)..(455): unsure at all n locations
agctntactatgtgtntggatggagaatntatttatttctangaaattcaaattcatagcattttgattgccttgatttaaattcctttcattttgtaaatattttgtttggataaggcaattcaatttcttgtattttaatttccttgcttggacaaagtaattcatatcaatgaaattcaaattttcatttttaaatatttatttaaaaattaaaatttcaatattgaatgaaaataaacatgagtcattttttaaatagttaaatattcaaaataaatttaatgttataaaatatataataataaattttttaaatatttaataattaaataatcaaaataattttaatgctaaacaattntgaatcttatacaatattcttgtagtaacacananaanaaaacttggattaaataatactgcaaaattaaaagatgaatgatatgtaattc

SEQ ID NO: 42676 - DNA, 321 bp, Glycine max
  unsure (1)..(321): unsure at all n locations
gaggacgagagagaggaatctctatcaatgganatatgaataaaggaaggcgagaccatatactacctcttgaatcgccatggacatctgatttcaagattcaagaatcaagtttcaagatttaagtttcaagaatcaagaatcaagaatcaagaataatccagttgaagattcaagaatcaagtaaagactcaatcaagataagtacaaaaacgtttttcaaaacattgagtagcacatgaatttttcacaaaaccttttgccaaagaagttttactctctggtgattgattaccagtttattggtatcgattaccagta

SEQ ID NO: 42677 - DNA, 532 bp, Glycine max
  unsure (1)..(532): unsure at all n locations
cggcgcggggaattgatatcgatgccgatcgcgnanacgnncanactctacagtggaggcgcgcgcgcgtcagcttgcgttctcgagagcatctcctatttcttcatttcagcctctgccttctcggagcctaagaaaaagcgcgacctcatcttctttctttgatgcaaagcacagggctaagaagcaaaaacgttcttcctctcgcacaaacaccattagccgccacccactatgactggtttccattgaaaacccacaccgagaggaacccttgaaacgaagcggaatctttcctctttcttgcgatgacggaagagaacgaagaccctaatctgacctttcgctttccttcgacgaaccatggttctatgcctgaccctacgacgaatcatctagacttagcctctttctgactctggaaccagcattgcctgtcttatgcttcctttgaagcactctacagaacgagacttgcgacattaaccttcattagatgcatgtatttcgaaccttactgaaccccgccacn

SEQ ID NO: 42678 - DNA, 287 bp, Glycine max
  unsure (1)..(287): unsure at all n locations
gctacctactgtataaatagaatcctgtgcaacacttgttgttaccttgatgaatgagagtcttgagagacacaactcanagttcaacttctctccctaatactttctttaatttcgagcacccccctatctctttctgtgcctctttcgtttcctacattgaagcatcctctcctagcttcttatcccatgctcatcttggcggagaagctccttattccatggctgattcactaatggatggcgccgactcttacctcttctcctttgtcttacgctgcatctcc

SEQ ID NO: 42679 - DNA, 412 bp, Glycine max
  unsure (1)..(412): unsure at all n locations
acgcagctgcgagctgggtgtnttatgtgctatacgatctcttttgagcatacttgctttactgtccatacacatattcttatttgagcgttagagtgctctattttgcaagtcccctctcctatcaaaggcacttggtcaagcccatgtgtgaagatctggacccactgcaccacatccacactatcgtgtcacgattctggatattagtataaatatttggcgcccaccgtatggccgcggtaaaacataccctgcgtcttgctatcaatcctcttacattcatccatggatagcactaggtttggccttagacacaagacccactatacagactctagtctttattcagtggctatgacaaacacaaaccctctacaacaactacaaaaccgcatcgtagagatggagc

SEQ ID NO: 42680 - DNA, 257 bp, Glycine max
atactcaagcttggagcctacgatatatatgctccaactggatgtggagtgttataattattgagtataactatgtgtatctctaaaatagatatctgtatttgctttagcttataatagaagacaacagtgtgtcctgtgttatcaaagacttcaagcttctctcttctctttgtatatatatatatatatgttatttgaatgaaagaagcgagtgacaagttttcctcactaccttaaaagctaagtgagtgaaa

SEQ ID NO: 42681 - DNA, 520 bp, Glycine max
  unsure (1)..(520): unsure at all n locations
agaacggggaattgaatcatgcgatgcgngacccggatagttanagtcaagcgtgcgcgcttgcacttctgctcaaacacgcagagcaaagtgtgcttctcttgcgaggcgccctcttctgtacaacattacagaatgcttctgcgtgccgggctgcaaccatgtctgaatagccacttatttctcccctggccgtgaaacatgtgatggctatgatgcacgcttcttactgcctctacaagccataacgactctttattgctctactgcatgaatggtcatctatcacattacaccatcttacaatacattgactttcaggaatatacctctcgtggcagagaccacgctaagagttaaatctgacctgcgggctgactgaacaacaaactctattagcagatgcgtcaatcttttgattcactgttaatctgatactgggcatttgcaaacaatcctccacaaaccttggaccaccggtgaagaatgtttgacctcattgagctgtgtcacaccaccn

SEQ ID NO: 42682 - DNA, 368 bp, Glycine max
  unsure (1)..(368): unsure at all n locations
cacactntacaaccattccttgtttagaatcatactataggatatcatcttttattaccatacttcttctcgaacgaaaatactatcttaaagattgttatttaattattataattagactctttgatttcttaacgaaattctcatatatatattcataaatttatgtcctttaagctcattaattatctgactaatccccaatcttctttgtttactgttattacaatagtattgtattcaattgatacgatttgcaacacccaagtgtgccaaaaacacacgcttgatatgatgagaaaaagagaattacaaccattaccattaacgatgtgctcggattcatagttagcatgcctcaacttgag

SEQ ID NO: 42683 - DNA, 379 bp, Glycine max
tagcttgtaactctagaacttaaatagtccccaacatttatattcttcaatacttgccctgaagacgattgatgttgaacaaaaattaatggagtgcagattcatgacataaagttgtagttcaaaaaaagaaggatcatatttcaagagtccaataacaagagagccacacgggaaatggacgtactttctaacctctatttgcaaagaatcaacctacattcttacaacaccgagacatatattgcaaacaatatatgccgttctcgttttctggaaccacaccgcattcttatagcaataatctcaattataaaaatgatatatgttcaagagagtcagcaataccaagaaagattcatggcatgttcatatctat

SEQ ID NO: 42684 - DNA, 377 bp, Glycine max
  unsure (1)..(377): unsure at all n locations
ttattcctccgtaacaattgttgctactagcttacttntgctagtttctctcctatgcctccgaacatagtcgaaaattattacatagtacccttgaagtatccaataaatagtaaataaataacagattttattactctgtcatctaatctaataatgaataaattattcaatagacaacttttactggagaataaactaaactaaaatgctaatatgtgcagttccacggaaaccaaaacatattattattaaaacgaaaacaaaaaagaagagaaaaactctctcatatgaaagtctataagactgagaataaataaaacctactgctatccacacacgactactatatatatactatagaaaaaacctaccat

SEQ ID NO: 42685 - DNA, 438 bp, Glycine max
agcttcgtccgcagatccctcttgtaagactatgcttaacttaaacaacattatcatcacaacatattcagaaaaccaaaaccccacaatccatccctgagttattttgtcctgcttctgtcaagttctaaggcaatagtacatttcccaatgctaaagtcacctaacaatagagacaaatgggtgatcagaccaagagcatgcaataattaagcattgaaagaagcattgaacacacaaaacacaattaattagatatgaaaagtaaatacatcaactgttcattagaaatccccaactagggtttttagccagccatacaaggaaaccctaacacaaatgagatagagagtacaaaataattgttgcttacacaagaaagggcatccctcatcctcttcttagcacctcacaatcactctaacactcactagtctc

SEQ ID NO: 42686 - DNA, 320 bp, Glycine max
tgttgtctattttgcattctttacactgcattctaagcacccacgggtgtgagtaaaaaaaagagggggccctacacccacgttcatgggaatttaaagagtggaggtgaatctatcatcatgctaggtctccgacttgcttgataatagtgaaacctcgtctagagctttctctctttataatgtgttgtcgctggtattccataccgccacaacattattatcttgagtgatgattcctctataaaacagccgtgtgagttatgaatatgtggggagtagttattagagacccctagatattgtcctatgttcccaat

SEQ ID NO: 42687 - DNA, 366 bp, Glycine max
agcttggttcgaggttcttatccgttgaagattttataacgatgaagaacgaatgaagaacgtcgaaaaacgattgaaacctttgcgagatttctcacggataacgttactgaaacgtttcggaagcgcctccgcttatattttcttcacggaaacaatgtttcccagcaaattctaaagagagagaagtgcctaaggggctgaacccctttcttcttcacttcctcccctatttttagcaaaagaagggaggtggttgccgcccagctcgcccatgcgagctcaacttgcccaggcgagcagggttgctttctccagaagcaaccgccttctggaagaatattccggagggccccagtgggcctg

SEQ ID NO: 42688 - DNA, 279 bp, Glycine max
gacaagttgagttctattcagaaaattagagtttatctctcttatcttattgagagtgattctcctatattcttgagtgattcaagaacaccttggctgtatcaaacgactttcacaacctttgtgtgttgccctcgttggaaagagtgattcttttcttactttcatcatcacccttgttctttcgaaccacaattccagatcatccacctctgcaccgaattatctcgtggccataactcccattttactcactcacattaagtgattcttgagcct

SEQ ID NO: 42689 - DNA, 221 bp, Glycine max
gttcaccaaagcgactccataaagcaagacgctactcttatccacttggtgtaactctcaatctttaactacctccacgaacaataaataccaaatttttagtttcttttccactatgcaaaagtctcattaaattattctgcttcaaattgagtgaagtccttgtccttatcaactaaacataccttggttgtgcctctctctctctctctctctctcta

SEQ ID NO: 42690 - DNA, 502 bp, Glycine max
  unsure (1)..(502): unsure at all n locations
tgagttcttcttcatctcttccncagacttatcctatcctatgccacccatgtaacttgttgcaccaggaacttggagcatccactacaagaagcgaaagtaaagggtaaattgatttgatcaaagctactatagattcagagtattactaagtactaacaaggtagatacatacttgagcaaccttgattgaattatgagtggcaccttccagcacacaaacaaaaaaaaaattgtagaagctgtcattatgaaatatgcacttccactgttcattntataaagtttgcttatgatatttaaatattaaagcaattatataaaatccaatactccggatctaatgcaatacctccaacaatgttctccacattataatatttagccaattcttgatacctgagacaattgtgctgatcacataactatagaacgaataagagagatctaaattctatcaaataggagaccgatatcccttcattattgaatgagttgtact

SEQ ID NO: 42691 - DNA, 455 bp, Glycine max
gcttcttatctaaagctcatcttggtggtgaatcttcttcttccatggcttattccttaatggatggagcctcctctcacctcttttcctttgtcttctgctgcatctccatggtggaaaatcaccattaaaggaccccattgaagctcaaagatccaacctccatataagctccacaagcaagctttcatcataccccactccagaaaactgttacaaaaagatctttctattcctttatttttttctattttacacacaaaataaaattaaaacatatatgttcatgcatgaatacatatggttgaagttgaggttttgagatattgtgatgagtggttgattgaatacttgaatatcatggcctctgttcttgacagtggcattcttaagcttatagtacttcttaagctcccctaactttgcaccactcttactctgtggttagacaaatc

SEQ ID NO: 42692 - DNA, 83 bp, Glycine max
ggaagaactaaaatgttcaaccctcctggtatctgaggatcacttaaaattagtgagaaaaattgtttccgtggaaaaaatcc

SEQ ID NO: 42693 - DNA, 351 bp, Glycine max
gagaaattgtatacgctccaattcccacaacaacgagccggaacttttaatgtaagcctggggtggcgataaattaactaatcgcattaattgtttgctcttactacccgtcttattaaggaagatgtctgggtactgctataatgatatagaatatcaagcaaatgcgaaaattgtatgaataagagtcattgtgtaaacaaagagagttaaggtaataattaattttaagatgttaaaggtgagctaagccgtcaaaatggatttattagataaataaagtctagatatgtctaatgatttagttatgtgtagatttggtataagtaaataatatatcggttgcagttg

SEQ ID NO: 42694 - DNA, 451 bp, Glycine max
  unsure (1)..(451): unsure at all n locations
agcttgtagaatggctagacatgatacatgtcatggtttggtttggttcaaagataaaagggatgccccacattatttccatgacacaaatgcaaaaatgatgatttggaaactttatgcaaaactggtcatgcatgcacctatgtggacactcaagtgtcaaatttttatggtcatgtgatgctagggctcaagattcatttcctctattttagtcaacccaacgtttccaaaatatgttcttttatcaatttgtgcattcatccgagtccattttgggcgtctgggaaaatcttcacagcattcacccttcaggtgtatacacattttttcaaaaactagttatgatcagtgaatttttttcaaagacaagttggaagtcatctcttttcaaaagcatgttggtttttcagctagacaacttatnnttcctttttctcccttttttttt

SEQ ID NO: 42695 - DNA, 321 bp, Glycine max
agcttgatagagctctggtagtcgaagagaagttcaagtccatagccatcatagtatgataagagtatgatgaactaatggacgtcaatatggccacagctgaagccttggaatgagaaaccaagaatgcctgataggaagaacacgaccaaaacaaagttttgaggggctttatagggcagcaatagtgaactcaagctccgaagaggtgaaaggaatcatcacgggtcataggcatgatcttgaaggacgagctatatgcttgccttatgtcgaaaagaaatttgtcccaacagttaagcgagactgaatggaatatgt

SEQ ID NO: 42696 - DNA, 139 bp, Glycine max
gcttatctcgctcagcccagataacttatatattatttctggaatgtcgtctcatgctaagcgcaaccatcctgagctaagcgttattccttgcggtctgcattgggctatgcaagccttgaactcactaatgcccata

SEQ ID NO: 42697 - DNA, 496 bp, Glycine max
  unsure (1)..(496): unsure at all n locations
nttgaaccttaagccctgagtatcanacncnggcaaangccccccgcacagaggaataacagnattccttatctgtggacaataaactggagatataggtggattgaagctccgtggactgcaaataatattttgccccttcttattaaatcagngtcattgtacaccaactaatggctaattattttacaggcttcccataatctaatctaatttctaacaaaggtcattgactttaaatatcctattattaaaccagagttagaacagactaataccctttatatactatgccaaaaagaataattccaaaccagtatattgctcattatgtacgggaggtctattttaagccagtgacacccacctttatcatattaatgtacaccaccctttgcacctgacaagtgccttttcttttggttgacaaatctaatgaatttttaacctcaccttccatacaatgctgaacacttagcctttatagagtgaaaat

SEQ ID NO: 42698 - DNA, 457 bp, Glycine max
  unsure (1)..(457): unsure at all n locations
agcttgtagattaattggcatacgaattcatcttctactgaggtcgcgagtatccaaattcatctcctatagattntgagtataggcccagtacttaaatcttaataatatattttaaaacataatattcatatttcatctctttaaagttagaagtaatatttaaaattaatagatagagcagctatgtatgtgtgtgtttgtttcatgagattagtgtgttatttatccaacattttaatctcttcgatgtttctaaatcataattaattgtctcaactgcatggatgtacttaaaaaacatatttgcttataattataaatatcaaacaatcattatacaatatataaatagaggaattaaaacaatcttatgaaagggcctttaattaacatacttggctagaataaaaatttctcctcacatttataaaggtaaaactgtataattatcata

SEQ ID NO: 42699 - DNA, 374 bp, Glycine max
  unsure (1)..(374): unsure at all n locations
tgcagccatttcccttatagtcctctcacgatgtgngaggttgagccatatctttagaatgttcaaaatcaaaatgctcataattataatgctcaaaatcaggatgttcaaaatcaccaaccacagaatgctcagactcaccaataacagaatgctcaggatgctcaaaaggtacaaaatgttcagggtgatcaagatgcactctatgcctaactaatctatgaaatgtcctatctatnttangatcaaagggttgtaagtcacctggattgcctctagtcatgcactatatgcagcagttcatgtgtntcttaaacaangcaaaagaggtgggttaaaactacatctatactcaaacaatatccanatatgct

SEQ ID NO: 42700 - DNA, 299 bp, Glycine max
  unsure (1)..(299): unsure at all n locations
agctcgatttcttataatgaaagagaaagaatattttcttgctggccttatagtatctagttgggaccccagcagctgaagtacatgacatttctgaaggactcctctgnatgctttggcttctcatgatttagtgttgtggagagcatagcagaagcagaaagcctgttagcctgagagaatgagccaaaatgggttttgagatggtgttgaactgatcttatagcattggtccacctgcatatgccctgttctttcaaggcctccaccactccatgctctaattcctgatgaactca

SEQ ID NO: 42701 - DNA, 315 bp, Glycine max
aaaacatctaagataagaaggaagactcttttctaattaagacaaaaataaataaattatcttgcgagacaatatataatatgctcaaattataaatagcttacccagcagccaacaaaaacattaaattccaacgcaaaattaattacgagaaaataaaatatctcatgtaaaacaataacctttatatggagttaattaatgtacaccacaaaaaacagtgtatattcatatgaaaatatacttaccgtgttcctatatacaaagtacataaccttgataataaaattaatcattagaatcttcaacaattca

SEQ ID NO: 42702 - DNA, 393 bp, Glycine max
  unsure (1)..(393): unsure at all n locations
agcttgactaggcgagtcgtatttaaccttagttttcacttaggtatctagncaattcaattaagaatgagaaattcccatagagaaaacgtccgagtgatatttcgctttattttactaaaaggtgtcttttattattatattattatttacctcttttttttatttccaacgtgggtgcggcacgaccgatcggtccgatattattttaaccaaagttatcggatggtacaattcacacgatcggtggaaatttatttttattttatgttaagccagaaatgacttatataaatggctttagcacgtcaaaagggggtataataagtaaatgactatgataattataatacctgaaacccgatgtggaccaccaccggtacatacaatgaa

SEQ ID NO: 42703 - DNA, 386 bp, Glycine max
  unsure (1)..(386): unsure at all n locations
cacatttattcaacactttctggtcctcaaagagttaccaatgtcgtgtacaatataatgaaatgtattagctgagattcactaataaagttttcagcaccaggtgaatatcttttaataagatatctagctctctctttttttttttnttgcctgaaagaaatcattataaacacacatgtggaaaaagaagtggaacaaagttgttcagatattttcacctcaacactatttgtgtttttatcctaatatttatcaccccttacttaattaaaaacttttttnaattataattaattataaaatcaaaacaattactaattaagacaattactaatttattttactaaatatttttacttcaatacattaaattaataactttc

SEQ ID NO: 42704 - DNA, 458 bp, Glycine max
  unsure (1)..(458): unsure at all n locations
gcttcgtgcgcagatccctcatgtaagactacactcgatttagacagccctcttaggtttagactaacttaaactgagtttcgtccgcagatccctcatgtaagactagactcagctcaagtagcttacggatgtttagcctaatttagcctaagcttcatccgcagatccctcatgtaagactaggcctaaactaaacaacattattgtaacaacataaataaaaccaaaacttaacctgcagatccctcatgagaggctaagtttcaatcttgcttcaatcaagttctaaggcaacagtacatttcccaatgctaaagtcacctaattgtggacacaaatgggtgatcagaccanaagcatacaaacattaagcattgaaggaagcattgaacacagaanacataatcaattagatattaggtatttacatcaactattaattagaaatccccaac

SEQ ID NO: 42705 - DNA, 463 bp, Glycine max
  unsure (1)..(463): unsure at all n locations
gagaacaatgacaattgaagaatcaattcatgcttcctttgatgagtctaatgctatttctccaagaaaggatattntatatgatattacagaatctttagaacaaatgcacattcatggacaatattctaaaggaaaaggagaaggaagcaatgaagatccaccaatagaagtcaaagcaaataatgattttccaagagagtggaaaacttcaagagatcatccccttgacaacattattggtgacatctcaaaaggggtaacaactagacactctctcaaagatntatgcaataacatgngctttgtatctatgattgaacctaanaatntaaatgaggccataatagatgaaaaatggataatagctatgcaggaagaactaaaccaatttgaaagaaataatgnttgggagttagttgagaaacctganaactacccaatcatttgaacaaaatgggtg

SEQ ID NO: 42706 - DNA, 414 bp, Glycine max
ccttgtttcttttgcagaaaacaaaagtatgctatatcttttcattctcttctccctttgccaaaaagaattcaacaaggactaatcgccataattctttttgtgtctcttttctcccttttccaaaagaacaaaggactaaccacctgaattcttttgtgtctcccttctcccttttcaaagaattcaaaaggacacagtctaagaattcttttgattcttccctttcccttaaacaaaagatttcaaaggactaaccgtctgagatatcttttgtttccccttacaaagattcaaaggactaatcgcctgagaaatctttgtcttaacacattggagggtacatcctttatggtacaagtagagggtacatctacttgggttgctgtaactgagaacaagagaggtaaatct

SEQ ID NO: 42707 - DNA, 445 bp, Glycine max
  unsure (1)..(445): unsure at all n locations
tttttttttttgggaagaacctattatatcttgngagacttacgtatcacatggataagcccatgaagataatgaggtacaacttcaactgtcatgctaattatatctgggatcaaatgagttcgtaaataaaagtggatggtggttcttgattggccattttcaaatgtataatgtttgatcgtgattttgaatgtcaaggacaatatacacttattaaggattgtttactatctagtttgcactaactcgtgtttaataatattcaatangctccatctgatcacaaacaagtagcatgaccaaataagcctaaaagagagcaacttacatagggtaagaaatcagtangagataattcananattgtgtgattctcttgtcagaagaataatatcttatcaaaaagaagaataatgcattatcttaatntatcatctacact

SEQ ID NO: 42708 - DNA, 445 bp, Glycine max
agcttgaacgaatataagatacatcttcttcatctttggtgattcttgactccatctcattgaagcgcatatccacttgtaattccaaagtgtcaaacctttcaccaacaaaggtttgaagaccatcaaacctgtccaaaatctttgaagtgttgaaggaaaagggtaacaagatgaggctaaagcaatggagcattcaatcgcaatgccttatgcatgcgatatctaacaagatgtgcccaatcaatttgtagacctttatgaaaggcccacataacaatgagatcttcttcatatacctgagcaaggtttgaagatctcggaagcaagatgcgaacaattagttaatgaaggatgcgactttcaaaagccaatgaaccggcaagaaagctttcggtcatatccgcttggttggtgcaaaccaaccggtgggcatcatgtacag

SEQ ID NO: 42709 - DNA, 387 bp, Glycine max
  unsure (1)..(387): unsure at all n locations
gaaataacctcanatagataataaatatatttacatcaagtactcagtagaaattcccaacaaaggattttagccctccattacaagggagtaactttcacaaataggagaacggttttagagaaaataccaaattacaaagtagtggggatgtctcctccacctctaagaacctagaaaataactctaaaacctagaatctacctagaagttaggacctttgctttcttgctcagctcttcctctgttctctgcacacaattcatattcaattcatacctctttcacgtcatcacgctctctcttnttttctgtgcaaatcaagcttaaaaagggctatctgacctcgaaggcatgcttagcgccattctcgcacttagcgcgagt

SEQ ID NO: 42710 - DNA, 469 bp, Glycine max
  unsure (1)..(469): unsure at all n locations
agctntcataagtaanatcnagtgcaaccatcttcctaagagtcctctcacgaggtggaggttgaaccatgttcttagtatgaaaattagtagtgaaatgctcaaaatcagaatattcagaatcaccctcaacagaatgctcagaatgctcaaaatgcacagaatgaacaagatgcacactatgcctaactaatctatgaaattttctatctattttaggatcaaagggttgtaaatcaacaggattgcccctagtcatgcactatatgcagcaaataatgtgtttctcaacaagcacctaacaagggggtaaaactacagctatactcaaacgatatcaaaatgagctgaaattntgtgaggaacaccctaaagtcattaaaagatagcacaaaattttcaaacaaaaatntaaagtataactatgaaaactacctaagcaaagtttagaagaatatgacaataatac

SEQ ID NO: 42711 - DNA, 476 bp, Glycine max
  unsure (1)..(476): unsure at all n locations
tctctgaggtagaagttacttggaatgctacctgtcatagcattatcatactattaagctcagaaggaatttctccatgtagtttgtttccaaccaaattcaggtatgtcaagttagaaagatgactcaaagctgttgggattgatccagataaactgttattggccaaattcagaattttcaaagatttaagagatcacttagaggaaggtaagtctttttcaagcatgttgtntgatgctgcaaangtttggagctcttcacaaccttcaatctcttcaggtatgtggccattaatgctattcatttgtacatcaagagatattagatgcttcaatttaccaattccaaagggtatgcttccatttaagtggcagtatcctagagccaacacttttaattcactcatgtttcaacactacgtggaattcacctgtcgcatgttgctcctattctagaactcgcactcctcaagt

SEQ ID NO: 42712 - DNA, 451 bp, Glycine max
  unsure (1)..(451): unsure at all n locations
agctnntaattgaaccataactcgatgtagactttatggccagtgctagctatgcatatatagcattcacacataattatggaataatgtgatcatcatcatcagcattctcatgtacaaggtactaaaaatgaaaagttaaaataatcttataaatatagcttgcaagaaaaataatggagccagtgcaagaaaacactttatggtggaattcatttgtaatatgcttctattattcgtgcaatctttcgttctaacctgttntaaacgcttgagcacatggagggttcttttgttgcagccatttcttattaatatatattntattgaaagaacggcaagtacgacgtatgagacgaattcataatatttaaacttatcaatctactctcttcttctaattaaacaatatttgatattatatcaagatatcttgtaataaattaaacac

SEQ ID NO: 42713 - DNA, 250 bp, Glycine max
tgatattttttttgctagaatcttctgtcaatacgacaaattcatccccgagcctgacattattatcttgatatgcaaccatgtcggtctagacgtcctatccgaactcgttgcctcaacaagttgatggtatgtgtagatagatgagaagcacatatcattgatatacttatggaaaacaccaataggagacacagcgttggatgagcattctgcttatcagccacctagttaaccaacccctctacat

SEQ ID NO: 42714 - DNA, 138 bp, Glycine max
tagacacatttacccccgccctgccacatcttacagtcctgtgtaatgcatgaagcattggtcgcataatacaatacctgttatacatgaagatttacatgaactatcgctggaaattcccaatgcggctgcatattg

SEQ ID NO: 42715 - DNA, 513 bp, Glycine max
  unsure (1)..(513): unsure at all n locations
tggacggatggannnatgtaccattgatgaccgtgacactccaagatncgcggtngnttcttagtncgcacttttgattttggaagattctatagactttcggagacacacctatcacgtggataacccgatggacatcattaagtacaactactactgacttgcctattataccctggattaattgagatcagcaatacaagagtatggcggctctcgactggcccattttaaatggataatgtacgatcgtgattttgaatgtcgggagcatatacacttatatggactgctactatgtagtttgaccaactcggtctaatatactcataggctcatctgatccaccaatcgctgataaataacctataagagaccacttcaagggtaaaaatagagggatattccaaattggtattctttgccgaaatatattttattgaagaaataatgcctatatatttatctcacactaaaaagactgcgttaaccagttgatcccattcataatcg

SEQ ID NO: 42716 - DNA, 399 bp, Glycine max
  unsure (1)..(399): unsure at all n locations
gctgcaacttctagtttctgtttccaaccttgttttttttgcagaanacaataagatgctatatcttttcattctcttctccctttgcccaaaagaattcaacaaggacttatcgccataattcttcttgtgtctctttgctcccttttccaaaagaacaaaggactaaccacctgaattcttttgtgtctcccttctcccttttccaagaattcaaaaggacacagcctaacaattcttttgattctttccttacccttaaacaaaagatttccaaggactaaccggctgagatatcttttgtttccccttacaaagattcaaaggactaatcgcctgagaaatctttgtcctaacacattggagggtacatcctttatggtacaagtagagggtaca

SEQ ID NO: 42717 - DNA, 331 bp, Glycine max
tcttgattcaatcctgaacatcataaacatcttgaacatcttgaactcatactctgattatcatgaattgaccttcgagccttttggcatcacctttgctatcatcagaacatctctaaaacaatctagaatcatcatgaagctctgcctctacacttaacagatagcgacgaatctggaaggggatctgtcatgcgcgcacgtcctcagcgcgtcatcagcttgctcatcgacgtcgtttgtcaccttccacgctcaacacgagtttggtgcttagcaaaaattcacttgctcacactaagcgcgagaatggtgcaaagcaccatgtcta

SEQ ID NO: 42718 - DNA, 410 bp, Glycine max
  unsure (1)..(410): unsure at all n locations
tgttcttngattttcctaagttctttaacaagcttataacaatatacttggccttcttttaattgtctttgggcttggggaccacaatcaacaaagtactttctgcacctactatatgttgacttgaccaatgctgttattggaatgttgcggcaatctttcaacaccttattcacacattctgatatggttgttgtcatgtgaccatatcttcatccagatgtatcggaagccatgctccatgtttcctttgaaatgcgatcaatccatgttgctatggctggatctcaatgacgaaattattctaagttatgatcatacacatgcttgcaaggagtgtacgctgcatcaaatgtgttaccatgcaaagttgtaggtagatatgtaactcacacttacttaatgtataa

SEQ ID NO: 42719 - DNA, 604 bp, Glycine max
  unsure (1)..(604): unsure at all n locations
cgctctcgcctccntccctctccgtgaaatcgacgattagttttcacggtggttagctatannannannaanaaaaagggggnnnattggatgatgcgatgtctgacaccntccannaacncagcgcnaggnngcaaccagaaaaacaggaagaaggaatggtggatttatatccgcactatggaaccacttagacagtatttaaatactcaaagctataaaagaagacctctatcaagataatcgcgttggggagctccaactaaagtatccatcgccccataaggacgctttctctattaaacgctaccctagtgttcttacgctgaagaaaaaccttagaccatgactcctcacgtgaatgaacctaactgctctagcttgtgatctcgattcctacaacaaacttggtgtaacagagttgcactaagcatacagggggaaatctactaaatcattgcactccaattccagacatacaaatttctagcttactccatccaaggcttagggtttaaataattattctatatctcaaaagccgaactacacatacaaatgagggatctagcgctagcttgtaaaattagcactaatactagcg

SEQ ID NO: 42720 - DNA, 332 bp, Glycine max
cagaggggggagcacgaaattgaatgaagaataacggagagaagttgaactttgagttatgtcttacaagactctcattcatcaaagttacgacaaatgttacacatgcttctatttatagactagggagcttccttgagaagctttcttgagaaaactatcgtgagaagctcttttgagaacacttccttgagaagctataccttagctacacatacccctctcataactgagctcacctgcttgagaagattccttacgaagatttctaaagaagctatagcttagctacacatacctctctgatagctaagctcacctccttgagatga

SEQ ID NO: 42721 - DNA, 441 bp, Glycine max
  unsure (1)..(441): unsure at all n locations
agcttcacctaagagtgatatgaatattaaaatttaagtactttgtacttatcttatttcttcaatgaagactccctttagcaccactttgaaagatccattattcttcaagttaagaaatcttgtttcatgcttttgaatctttaaggtgatgagatataatagctcaagatactcttcaaatgaaatactcccttagtcacaataagattcttatgaaaaatgtgctcacaagtttgtttatatagcccacaaacaagattaattgattatttcctgtgataatcgactaatttgatcatttggtttcttgagcatgaactagaacctgataatcaatntttttaaagataattgattatctaggactgaganattcacacaaggttgaaataaacaattatcttaagtgtataatcaattatttgcacacatttacat

SEQ ID NO: 42722 - DNA, 439 bp, Glycine max
  unsure (1)..(439): unsure at all n locations
atgggagtnttganagcngtcttgtnagcccataaggcgtaatctatcttcacagtccaatctttccttgaggatgcaacaatcttctctagaattctctttagctctctattagacacctttgcctggccatttgtctggggatgatacggtgaagccaccttatgtttgacattataatgccccaatacctaatgtagaaatgtgaagccccatcactaattagcactctgggaacctaaagcgagaganaatgtttttcttcaggaacttgatgacaatcttggcatcattctttggtgcagccacaacttctacccatttggacacataatcaacagctaccaagatgtactcatttccatataaggatggtagagggcccacaatatcaataccccaacagtcanatacttccatttcaattatgttctacaat

SEQ ID NO: 42723 - DNA, 336 bp, Glycine max
  unsure (1)..(336): unsure at all n locations
agcttatgcgcatatttccctacgaacgttcacttgcacaagacatcctattaactaagaaaaatgcacccatatacaatcaaaggagcttcattacctatattatttacatgtacttccaaagtgtatttgttatttacatcacacacgcctccttggctaaatttacatacatgcatactcaaagcatttcggggtaccaaaaattgcacatgcgctcatcttggtatttctaatacctatacatatacaaactttatgatgaatcttgactacctacgcaataaggtgctacatttcatgnttnttttttttttttcaaagttttgctcctaa

SEQ ID NO: 42724 - DNA, 358 bp, Glycine max
  unsure (1)..(358): unsure at all n locations
tcaagtaggtgcttcttanacctccattaatttntagctntaccttctcctccattggtggttcttcattnttcttcatgtatctcctcacatgtcttgttttgaatattgttaacatgaatttttttagaatttccaccaattaaacttgctatagaagctagatttgattttctatggttcaaatttcttgttcttgttcttgaaccatgaattgtgttgagtttaggttcctttgagttttgtctttctatttttgtggctgaaacataaaccataaaattcttacaaaaagaatagagtagaagaaaaccttcaaaatctagagtgacatgttcactcattgtatgtttgtcat

SEQ ID NO: 42725 - DNA, 280 bp, Glycine max
cacaactgtgcagagtggttctcaatcttatctatcatctatcatataaacaaacaatgaataaccggatagatgcctggccgagaagttcttttgttctctggatgatgtgattggctatttcttttctttcttttctataaatgaccacaatattaacaagactaagatggagaatcttgggtagatctagaagctggacgagcacttgatttaaatatttcatttgagtatacctacatatacccgctatgtttaggttacgtgtaacttattccct

SEQ ID NO: 42726 - DNA, 408 bp, Glycine max
  unsure (1)..(408): unsure at all n locations
gcttctcaggaagctacctagtctataaatagaagcatgtgtaacacttgttgtaactttgatgaaggagagtcttatgagacacaactcanagttcaacttctctccctttttcttccttcaatttcgcgctcccccctctctctttctctccctctttcttttcctccattgaagcatcctctccaagcttcttatccaaggctcatcttggtggtgaagctccttcttccatggcttattccctagtggatggcgcctcctctcacctcttctcctttgtcttccgctgcatctccatgatggaaaatcaccattaaaggacctcatttaagctcaaagatctagcctccatagaagctccacaagcaagcttccatcaagtggtnatcagagcacaagagcttc

SEQ ID NO: 42727 - DNA, 502 bp, Glycine max
  unsure (1)..(502): unsure at all n locations
tcttgaganagcctcttaatgaaacttcttgaggaagctacatgaagctgcctcggtaaaaattcttcccagcctttgttaaccgttggatcttctcgaaatttggtctgcagcttcacaagacacttgcccatgatctgactgttgggatctttgagaagatgtctggagtgtgctcgaagcttccgttcccgagagcatttcttatttaaccatttcagcctttactttcatgtagcttaggaaaaatgcaatttcttctcctttatttcttccaaagccatttctaacgtcccaaacactttctccatcacccacaaccaccattagccaccacaaaccatcattgttctccattgaaaccccacaccgagaggaacccttcaaccgaagcagaatcttccaacttggcttgtggtttcgatagagaacganactttaatctgacctttcattntctntcgaggtaaccatggttgctaagctgttcttgtagttcatc

SEQ ID NO: 42728 - DNA, 459 bp, Glycine max
  unsure (1)..(459): unsure at all n locations
agcttcatgcttaagtatgtatggcaaaacttctttactgttgttcaagacatacaagtgagcttgtaataaatcttctagacttggagtgatcacatgtagtcctcttgaacccttaccacccactctgtcatcatgccgagacttaagaaggccaacaggtttagccttctcaatgtattctgaacaaaattcaatggcttcttctgcaatgtacctctcaacaatagatgcttctggatgatataaattctttgtatacccttttaagatcttcatgtatcgctcaaacgggtacatccaccgcaaataaacaggaccacaacatttgatttgtgtgaccagatgcataatcaagtgaatcatgatgtcaaagaaagcagggggagaatacatctctaactggcacagtataattgcggcctcatttccaactcatcanactgacggatcaacgac

SEQ ID NO: 42729 - DNA, 507 bp, Glycine max
  unsure (1)..(507): unsure at all n locations
ctcagcttaacaatcatgcttatggtcacacacaaagaagaaaaaaataagaattagtctacacatgttaacacattgattaaacacactcatttgcaacacacctgcaagttcaaggtttttgacaacgttaatacacacatcaagttttcaagaccccttgtatcacctaacggcttgccatgacatcctaccgcacttcatgaattatagagatggctagtcttataactcatgactcaacagtggatttatggtataacaaacattaaggatgcaagacacatacaagcattattatcaagtctcatttgctcatgcaaaagaaagcacanataataattcaagcatgctcaacaaagtaatcataagtaaccacacagagtgtacaccagaatatgataagcacataacacactagccgagaaatcaacctgctctgataccactaaatgtgacaccctctaccncatacatatatactaataaaaggaagaatatcataat

SEQ ID NO: 42730 - DNA, 456 bp, Glycine max
taagtcacctgcagcatgcagcttaacattgaaatgtacaaacggcctatctactttccgagattcaaactttcagaaacagactctctgttaaacgtatacacacatgaaatattttcaattgtaagttaggaatttatcctagtatcttctatacatttagtattaaaaaaatctcttgtttttttcttccttctatcactatccattaccagctccacccttgtcattccgctgttagattaatgtaactaattgggccaatcacgatcactaggttcagaatgcagtccattaagtagatcacagatagttcatgcccttaagaatgtggagcactactaaaggttaacaaatcataagaaattggacacatagcatctttagagctatattgttggggggtaggtgactgggtgatgcactttgccttcccaccacctcctgaatagctcc

SEQ ID NO: 42731 - DNA, 382 bp, Glycine max
  unsure (1)..(382): unsure at all n locations
aagaccttacatcatttatgaaatgcatattattaccaaatatcaatatgtcatccacatacatacattaaatgacacatccactataatcaaattgtntcacatacacacatttatcactattatngagttgaaaatcatatgaaagaacaacttgatcaaactnnttgtgccattgctttggagcttgtttcanatcatataaagaattaacaagtttgcaaactttcttttccatacctggctctacaaagcctttgggctagctcatataaatgttttcttttaattcaccattaaaaanatagcttttacattcatttgatgaatntccaaattanaaatacaagcaagtgcaattaaactctaatatagtaattta

SEQ ID NO: 42732 - DNA, 364 bp, Glycine max
  unsure (1)..(364): unsure at all n locations
gagctcgttgcacaaagagagagaactattacttgcaagatgtctctntcgacacctatcagagctgctggtttatataggtctcatcttcggtgtcacacaacgggggaatcttcgcgtggccttccatatagtcctcttaagagaatgcaatcctcacctttttgcgttagagcacgtgctatgcattacagatcttgttccgatggcgagtgcggcgtaccacatcttgacgatatttattggtcataggactcaatgcatcctatacgagtgtccctataacacgagtctttgacactgaactctgaatgaagttgaaatgccattacacatattgtgtcagatcatgactctctctctc

SEQ ID NO: 42733 - DNA, 355 bp, Glycine max
  unsure (1)..(355): unsure at all n locations
aagacgaatctctatactattgtatatgaataaaggaaggtgaatccatatattacctatngtaaaccatattcatcatcatttacaaactattcatcaattgaaaaataagaagattgttcaaaaataacctccacgaaatatttgtcccatgaatatgatagggaaagtaacatcacaaggagtaattgtatttcttcaatcagaaattgaccatttctatactacctttatgcatatctctccagtcagcaactaactatcctttcttataatggaagataaccttgtaaccccatctggagctattacaatcataaagcatcgctgtataggacccataataatgattact

SEQ ID NO: 42734 - DNA, 394 bp, Glycine max
  unsure (1)..(394): unsure at all n locations
tcttgaagaaggatagcagatatatggttattgctgctaacactgaatcaatgagggttattctaccccccattgatagatatctttgcttccattttgtaagttcaacctcgcattcgctaataatgggctgccacacagacgtattgttagagctgacccctgcacgaattccaaggtaggacaatggaatatccatctgactacaattgagagaagatgctgcctccttacaccagtcctcggatttgcccaaacacccaaattttctcttattgtaggtgatcttaagaccagagaccaattccaagctttacaagatacaatgtagaattggttccgtatcttctccatatgcaatggccaccttcacgatttganatcaaataaagat

SEQ ID NO: 42735 - DNA, 383 bp, Glycine max
  unsure (1)..(383): unsure at all n locations
tgggcttgaccctgagtcagtanacatcacncanagccccaaccccnncaccgcggacacgaacttaactaaangntnggtaaggaatganggtttatatagcttttaggaatnagatgaaaatcttcttgtagaatgcacaaggtaaacatgattttttctaagacaaattaatgaatactactttctaattgactccactgtattcaacttctattgcacatcaaagatgtgttttgcaacccagcaatccttaactcatttgataaaacaaatctcgagaacggattgcatctcttcagtacaaatatacattaaatatggttttctttacaccataagcccttaacctacactcgaatcatacagaacttagttcactt

SEQ ID NO: 42736 - DNA, 428 bp, Glycine max
agcttacatatatctgtattagtagttacagattttctttaccgacacatttattggttgattattatttctatttagtttgaggcaaaatgatatattttcttgtactaatattccaattttctaatattgcaatttcactcgcagagcaaatatggcacatgctcttatcatgagtttcgaaaagaatatcacaactacaaaaagaagcttctacatcggttgaaaaccggtatctacgacgggccccacaccgtctttgttccagatgtcgttgtatgtcgacaacaacaacatcggtcattctaagacccgtctttgtaatgcaagaatacaacgtcagtggctataatagaatagacgttataaaaaaagattcaacgacgcacatattataacaacccgtcgtgttttggtccatttaacgt

SEQ ID NO: 42737 - DNA, 428 bp, Glycine max
tccacaacatccaagcataacaacattcaaacagcacaagctatcacagccaagcaaaagcagagcataggcagaatactctgctcaaacaccaaccaatatcacagcttttctcacttaaagaccacagtaacaatttcttcgatccaattcgttaaccgttggatcgactccaacaatttactggaagtctatagtgcataagcctacattgtgaccgttgggatctactagcaaacatcaagaactcattctgtactactctttccacagccaaccacacataagcatttttctgcacttgtgcaaaatcatgctgcacaatttcacagcaaaaatctgcacaaagtgcagatttcgaagatcacacttcctctcatccaatcttgccgcaatcacttgctacaagttccaaatcatgcatcaat

SEQ ID NO: 42738 - DNA, 324 bp, Glycine max
acagcagattgtagtaatgacccactttcctagaattaatataacttaatgccattaacctatggaattaaaaaagaacttaatggctgagtgttactaaaattggggcaaccaatagtcactcccgacagccaacaagtaagccaccatttggtctcccaaaaagctgatgcctaggttgacaattgggcccttattacaacgtgaacttcacctaactaaagcccttgtagatgattaacccaaaacatatctttggtcagcctactgtataaggattgcgccattatttggacaaactaaacactatcacaatgaaacaaa

SEQ ID NO: 42739 - DNA, 281 bp, Glycine max
  unsure (1)..(281): unsure at all n locations
cgcacaanaaaacctagccgacctacattgtaaattttttatgcaacaccaaaacaagagaactttctctgccgtaaaaaaaaacattgtaggccagcgagcgtttttaatataaaatggtccatggccggctgaaaatattcaaccgggcttcttgaccaaggagaggtggctattgaattttctattcaattcctgaactaaaatatgctgaagtccggttagaaaaggtcgaaccgcctcattcctgaaacgcctcttttatacacctatagggcatg

SEQ ID NO: 42740 - DNA, 387 bp, Glycine max
  unsure (1)..(387): unsure at all n locations
agcttcagaaagaaagtcattntactcctaaatatatattattgatgcctaatatttaagcagttttactcactatccaagcatccttactaattcttattgtttatctggagttgctcgttatattattaccttttagatcataaaaccagcacataagccatcaacacactagcttaacattcggaatataatcccaagaatttgtacccttttacctttntgtcagatgtcgaagggaaacaacactcttgtatagaatattgtaaataaaaataacatttgtaaatttatctgtacccaaaattaaaaataaagtcctaaaaaaattctattgagatctacaaaacaagatagcccaatacaaaattgagaccaaactttgga

SEQ ID NO: 42741 - DNA, 418 bp, Glycine max
  unsure (1)..(418): unsure at all n locations
tattatgctcttgcanaatcctcctcatgttcatttttgggttcatttcagtgagttnntttttttttttgtgagcatcaatgtatggaatcacctctgttgtattgtttaatacatatagatgcgcttgtgagacttcgtgctgagtcattgtgataacgttgaatcctcgtgtacccttaccccccggtgtccgaccatggcgactttcgggcaggccgacgggttgagcacattcagtgtactgggagcaaaactcaatacactcttcagtaacatacctttcgacaattgaagcttcgggtcggtgtagattcttcgtatacccctttaacactttcatgtaacgttcaattggatacatccaacgttaganaacaggcccacacattatgatcttcctcactacatgaacaat

SEQ ID NO: 42742 - DNA, 398 bp, Glycine max
gcttggagaggattcttcaatggaggaaaagaaagagagaggggggagcacaaaattgaaggaggaataaggggagagaagttgaactttgaattgtgtctcacaagactcttattcatcacagttaccacaagtgttacacatgcttctatttatagactaggtagcttccttgagaaacttccttaagaagcttccttgagaagctgtcttgagaaacttccttgagaagcttctttgagaagcttccttgagaaacttccttgagaaacttatttgagaagcttccttgcaaagattcctagagaagctagagcttagctacacacacctctttataagctcaccctcatgccaaatatacatgataatactaagaatgtgcctactacgaagac

SEQ ID NO: 42743 - DNA, 445 bp, Glycine max
  unsure (1)..(445): unsure at all n locations
tgactgtgtcttgaataagcataacaagactntctctgattggtgtaaagatacaatctttgctgatgaaaatgtttcataaacattaagaaagctagcagatgggcctaaaagaaatgttataactttggaaaggatacgacataaacaagtattccttttacacaaaagcacaagacgacaaaagtacaatgcaaaacagcggggtcaccctaagggctaaatctcaacacttcgcaagtgtgcatgatgacaatacctatgtaccttccatcccttactttgggttcattgatgaaatttgggagcttatctatgtcaaaattattgtatgtgttttctaatgtacatggattgatagcaacactgctgtgcggaccaatgaagtaggatttacgtttgtagacctaaagaaactatgttaccacaatgaccatttcatcat

SEQ ID NO: 42744 - DNA, 403 bp, Glycine max
  unsure (1)..(403): unsure at all n locations
agctntgctgatttagtttttgctgacgaaaggatcgaagtgggtctaaaaacaggaaaatttaattatcctgcttggacgaatgagaaaattggggcaaatgaagagagtgagaatgaaggagaaacctatactgcgactgtcattcctacatggccaaacttcccaccagcccaacaatgtcattactcagccaatatcagctcctctcattacccaccacccagtcatctagaaaggccatccctaaatcaaccacaaagcctgtctaccgcacttccaatgacaaacaccacctttagcacaaaccaaaacaccaactaagaaatgaattntgcagcgaanaagcctacagaattcaccccaattctggtgtcctatgcaattcaatggtagccataac

SEQ ID NO: 42745 - DNA, 491 bp, Glycine max
  unsure (1)..(491): unsure at all n locations
tcaagaattaatgggctcatcatactacttgttccncgaatgcaattcaattaataggcctcacatntttaatggagtgggttaccactgttggaaaacccacttgcaaatcttcatagaggctatagatttaaacatttgggaagccatagaaatagggccttatattcccaccatggttgctggaaatacaacaatagaaaagcctatggaagattggagtgaggaagaaagaagactagtacaatataacttataagccagaaacataattacatctgccctatgaatgaatgaatactntatggtatcaaactgtataagtgcacaggatatgtgggataccctacaagtaacacatgaaggcacaacagatgttataagatctangatatacacattaactcatgaatatgaactatttatgatgaatgcaaatgaaagtatacaagacatgcaanataggttcacacacatagttaatcatcttg

SEQ ID NO: 42746 - DNA, 368 bp, Glycine max
  unsure (1)..(368): unsure at all n locations
cgttcctaatttctctacaattgcatcacctctcaatgagctggtgaagaagaatgtggcatttacctcgggtgaaaaacaagagcaagcctttgctttgctcaaagaanagcttactaaggcacctgttctagctcttcctgacttttctaaaacttttgagctagaatgtgatgcctctggagtgggagttggagctgtattgttacaaggtgggcaccctattgcttattttagtgaaaaacttcatagtgccaccctcaactaccccacctatgataaagagctntatgccttaataagagccctccaaactttgaacattaccttgtttcaaggaattgtcattctagtgatatcaatcactt

SEQ ID NO: 42747 - DNA, 108 bp, Glycine max
agcttccattatttacaagattacagcgaggcttggttcaccttatgagatgactgctactaaagtagcctgccagttttaaaatagaactaccgatattctagtttt

SEQ ID NO: 42748 - DNA, 379 bp, Glycine max
  unsure (1)..(379): unsure at all n locations
atttccacacatctgagcttcatcaagtggcgtatttcccatctgtctttggtaaaaacactagctcctccttctaatagcaactttgccatgaaatataaatcttcagctgcagcaatctgaagaggaacttggaaatcataatcttttaagttaggatccatgccattggataaaagtcttttaagataatatgaatctccccttgcaactgcaatacacaaaaaactaccaacattntcaatcttcatagaggccccttatccaacaagtaaagaagcaataatagggagcgagagttgtgaacaatgtgttgcatgaccaagaccttgacggccgaacatcactgtccacgaagcgcaaacccgcgctgatcatg

SEQ ID NO: 42749 - DNA, 462 bp, Glycine max
  unsure (1)..(462): unsure at all n locations
cacctcaaggacaacatattatcttccatatgcagtcactgaaggaagttgactcatcagaagacaaaagttgaagacactatatcttccatacgcaatcacacatactaagggctcatcaaaaaatgatggtaagagtatttctagatgctaccaagttgaaagttgaatatgtgcatgagaagatttgatatgcaacatcagaatggaaggccgaagccattatgaagtctaaccttggacaaaacgttaacgcatcaacaactattccttcactttttgtttatggagcaatatactacataatgctttgtgctataaagatgtgttcaatgtaatgatgctangattccttanaaagccacatcatttcttattcataananaggatctacttcataatgtatcctttctcgactaacatcaaaatcaccattttgatgtaacttcagaatgctcatt

SEQ ID NO: 42750 - DNA, 337 bp, Glycine max
  unsure (1)..(337): unsure at all n locations
atacaactttaaaataaacgccttntatatacgcttatttaagaagcggtaggggatgagtttgtttaaactcaaaanaaacaatttaaaataacctttttttaagaagtagatacgatttgcttcttaaaataagtagaaaactttttttttttctaaatagaagtagtttagacaaacacactaaaaaacaaaaaaattgcttattttattaaaataaacagttatttcaacaaataagtttaaacaaaccgccccggatttacctcttaaaataaacagaanactgagttttttaagcataaacagtttaggcaaacacactataaacaaacag

SEQ ID NO: 42751 - DNA, 446 bp, Glycine max
  unsure (1)..(446): unsure at all n locations
tgcaagctttganaaattcanatggtcataactnttcacacatatgctagattaaggcgcatcgcatatagagagactcgaaaatgaacaacggaagctctcgagaaattgaaatggtcataacttttcacactgaggtccgattcaagcttataatatattgatatgctcgaaattaaacatcggaagctctcgagatattcaaatggtcataacttttcacatgaatgtccgattcgggcgcataatatgtcgagaagctcgaaattgaacaacggaagctcttgagaaattcaaatggtcataacttttcacacggatgtccgattcaggcttataatatatcgatacgctcgaaattaaacatcggaaactctcgcgaaatttatatggtcataacttttcacacggatgttcgattcgagcgcataatatgtcgagaggct

SEQ ID NO: 42752 - DNA, 211 bp, Glycine max
atttccagcctctcgacatattatgctcccgaatctgacatccgtgtgaagagttatgagcatttggatatctcgagagttttcgatggagaacttccagcgtatcaatattatatgaccgtgaatcggacctccgtgtgaagagatatgacgctttggatatgaccagagctatcgtgtagaattccaatgtcctatatgtgatgcgcct

SEQ ID NO: 42753 - DNA, 467 bp, Glycine max
  unsure (1)..(467): unsure at all n locations
agcttgtgcanatcaagtcactcccacattntatctctagcatgcattgtatgttggtctcatcctttgtcacgggaagccggaaggtccatatcaccttcttaattgtacacatggggcactacgccccaaatgcgcaagtaagaagagatgattttccgggctctcgtgtccgtaaaatgcattcatatcatgcaccacataagcatctcttcataacatcataatggacatatcctgcatttgtccgttatcatattctagcctcacattttgcatgagtcatggcatcatcatgcatatgcgttcaacaaactttttgatctgcaaaattgcataccatttgtgttcatgtttgctcatccttgcgttgtcctctacaaaacaaaaacaaagaagggggaagcgtgaaacttcacactacatttctagtttcatgtgttaggagccaaccatgttgggatcat

SEQ ID NO: 42754 - DNA, 466 bp, Glycine max
  unsure (1)..(466): unsure at all n locations
tgcctagagtttatttaaaaaatgtntntggatgtaacacctataanagaacattttcgaaaaaaaaatttatgatgagaagaagttcgtattgaagttgggattagaggctaagaggattgattgttgtgtggatggttgcatgttgtaatgatggagcgctaactaaatgcaagtttcgtaacaagcccaagtatcgtgcgaagactattggaacaatcattaaaaaaccagttccagtaaaggcaatgttctattttcttgtaataccaaggttgcagagaatatttgcattgatgcanattgcaagccaaaagacatgacactatgagaatagaagatattcagccatgttacgttatccctcttttggtgaagcctagagacactttgatcaggtacattgcagattntctattgatctgtggaatgtgcgacttagttatacatagatgaatttaaacat

SEQ ID NO: 42755 - DNA, 451 bp, Glycine max
  unsure (1)..(451): unsure at all n locations
agctttttggagtagaaacatgggaccaactcattntatttcaaataaaaggaagtcgtatctagtcaaggtctgagagaccatacaagtttcctaacgatttctaattatgtgggccattaagtctatcatatgctgacaatagccgagaagcccatgaatctcttcgggggtggagtaggtgtctgccattgccttggccttggctaacaagcggggaagttcttgactcccgttcaaagtaagagcaaaccggtccatccacatggttgcctcttggtgtaaagagtcgatcacccttcctctagcctctttntccgcatatacttgagcatactcatccgcgattctatgcttgtgggccatggctagacctgactcttcttggtacttggcgatgatagctagcatggtggtctccgtctcgcatatatgctgagacaagcttctt

SEQ ID NO: 42756 - DNA, 371 bp, Glycine max
  unsure (1)..(371): unsure at all n locations
gctctcgagaagttcanatcgttataacttttcactcggagatccgattcacgcgcataataacgtgacgcttgaaatagaactatgaaagctcttgagcaattcaaatggtcacaacttttcacacgaaggtcagattcacgcgcataatatatcgagacgctctgaaatgaacatcgaaagctctcaagaaattcaaatggtcataactcttaactcggaggtccgattcatgcgcttaatatatcgagacgcttgaaattgaactatggaagctcctgagccattcaaatggtcataactcttcactcggaggttcgattcacgcgcataatatattgagacgctccaaattgaacaacggaagctct

SEQ ID NO: 42757 - DNA, 397 bp, Glycine max
  unsure (1)..(397): unsure at all n locations
tntttgcacgagggctgtttcttctaatttcaaagctctttggtcacattagtctcatcttcgntggcgcacaacgggagaatcttgcctcgatcttccagatatccctcgtaagagaatgccatagctccatgcttgcgttagagcaggcactatgttatacacattctgagttgatggcaaatggggcgtaccagagcttggctatatttattctcattagattcagtcatccttaggagtgcactataaaagaatcttgactcagagactgagcgaagcntgactgcatttcgcatgtggatacgacatgtctctcttctctatacacataggcacatttgtgccggcaggttatattcactttcccaccatgaccatcgtttaacttgcttcg

SEQ ID NO: 42758 - DNA, 337 bp, Glycine max
  unsure (1)..(337): unsure at all n locations
gaggacgatagagaggaatctntattaatnggaatatgaataaaggaaggcgaatccatatattacctattntaagccatattcatcatcattcacgaactattcatcaatataaaaataataagattgttcataaataacctccacgaaatatttgtcccatgaatatgatatggaaagtaacatcacaaggagtaatcgtatttcttcagtcagaaattgaccatntctatactacctttatgcatctctctccagtcagcaactaactagcctttcttataatggaagataactgtgtgaccccatctggagctattacaatcataaggcatcg

SEQ ID NO: 42759 - DNA, 356 bp, Glycine max
agcttgtaggattatggagtacccatctcatgtgtgtactaagtggcggtccggcgatggtgcacaacaagttttttcacattcacaatgcgcgcataaacccaccatgccctgttgcccacctccagctgagctcacgtactcccacgtagctcatatccctcgttctctcaacaccgggtccccatatatactcccaagcttccacaacattccagcaaaacaacattcacacagcacaagctttcacagcccagcaaaacagaagcaatgcagataactctgctcaaacaccaacctaaaatcacagctgttcctcctcaaagaccccattaacaatattcttcgatccaatt

SEQ ID NO: 42760 - DNA, 246 bp, Glycine max
  unsure (1)..(246): unsure at all n locations
atccttatggcttgcctgcggacttcacttcctgtgccactctggaagatttatgccaagcgcctactgtcgaggggcaactccccccttatgacgactatcccgggcaatacgatgaggaatgagatacccatcttggccgcctgctccacctctaagatccgttcacacatgaactaccccaaccgaacatagtccgccatatcccngcctcaccctcacccgtgaaagaatgtgtcccttcgc

SEQ ID NO: 42761 - DNA, 454 bp, Glycine max
  unsure (1)..(454): unsure at all n locations
agcctttaacaatttatttatagaagaacattatactatgttatctataaaatatttaaacaatgacatttgactaaggaaaaatttaagatgaggatatattaagacaattgtttctgctatgatcatgttatcggcaaagtccacattttttttctacttgatcgttcattttcgtcttcatccatctcagtaggaatgtgagttgaaacaggacgtccctttgcagtcctctttttcgttggatcaggaccccacagatctccttcatattcttgccacattgattcgtgtggcaataaatcaaaggagttgtcgttgatgtgcaaaatgtgttgtaaagtgaatcacatcgacacataggtcatgggatcaacattgactgatntacaagaagccatgacgtgagaatacggtatatgtntagcctgttattcaccacactcacactttt

SEQ ID NO: 42762 - DNA, 402 bp, Glycine max
tctcaggaagctacctagtctataaatagaaacatgtgtaacacttgtggtaacttcgatgaatgagagtcttgtgagacacaactcaaagttcaacttctctccctttttttccttcaattgtgtgctcccccctctctctttctctccctctttcttttcctccattgaagcatccttccgagcttcttatccaaggctcatcttggtggtgaagctccttcttccatggctattccctagtggatggcgcctcctcttacctcttctcctttgtcttccgctgcatctccatggtggaaaatcaccattaaaggacctcattgaagctcaaagatccagcctccatagaagccccacaagcaagcttccatcagatagcctcatgaacaacctgtatga

SEQ ID NO: 42763 - DNA, 370 bp, Glycine max
atcacctgattctgggaatagactgatataactcaacagggtcacgtaaagtatgatcacatttctcgcttagttgtatataccataagtcttttaatgaaaaaatattttagtgataataacatatgtttaaaaaataaatattttgaaccacataattattttaaaatattctcgagaattaaaaagaaatttccactaatttaatattaaatacatatctttaaagatactaaaaattcatttcatctaatatttggaatatatttcagaatctatataaattctggaacaaactcctaaatttgatcaatgacctttaatagggctgtgtcggatgagtatatttaactcaacattataacaacta

SEQ ID NO: 42764 - DNA, 453 bp, Glycine max
  unsure (1)..(453): unsure at all n locations
atggacaagagaatgatcgttagtcaagatatcatagacaaaatctccaacaacaaagtccacatattgacacttctagtcaggttgtaacttgtattttntagtggaagttgtcaattgagcatcagtctgttcgtgcacctgatgaagttgggagatgaactcctaagcgatggtatatgaacacactngactatggacagtcagcaagtcaagggggccacgaggaatcatgctataaataacatggaagagactctgcccgatattgtgattaacaacatggttgtgagcaaattcaacttgacacaatttaacatcccaagattacaaatgatcaccaaccaaactctgcagaagttaccaagggaatgattaaccatttcagtctgattgtagttttggatggtaagactgctaagttgatgctgtattaaccgaatgcacaaactt

SEQ ID NO: 42765 - DNA, 418 bp, Glycine max
agctagaagaaataagggattaagctttctctattggctgaagcagattacatacctctcgaggcatgagcgtcttgggaataactctgcaagagacaacatgacaaatatctcatcaatggtgaaagagaccaacaaaagcaaacacagtggttactaattgagggtgaggtcctattcctgcctttttcccaacatctgtgtgggaaaaaagagaaaggggaattataaaaagagacaaaagtgaagagtgtttatgttacttacccaatgacatggcgaccgccatcatgaacagcttgtgatactatacccattagacctatgctttctcctccatacaccagatcgatgtggcttgagaccttaattacaacaccattcaaaaaacaatattaatcagccttgaatattaaac

SEQ ID NO: 42766 - DNA, 248 bp, Glycine max
atctgtagttgctgctgctgctgctgaatattatggcttgtgttgctttccttcactgccacgaatgattctctggctagttgtgtactggtcctgatttggcaccatacagcagcaaatataatggtggaaacatggcaactattgctgccactatgtatttatatagccgagtatacatcctatttggcagggatacgatactagtgattctgggtcttctagatcaagtatggactgttactatt

SEQ ID NO: 42767 - DNA, 456 bp, Glycine max
  unsure (1)..(456): unsure at all n locations
agcttccatcataatcgttggttaagttgtttttatccttatttgcaagatatattttgactgaacaaaagtcgttttaaagcgttgcaccatttaaacgatattttgattctttttgagttgattttagccttagtttcactttggtttctagaaagtagtgacaaagttatgcgttggctttaggctttcaaaagtccacattttcaccaaataaaagcaaagaggatcattcaaggcattggaccttaaaatggtttttaggtgatgacaaaagcttgatttgtgagttgattttagccttagtttcactttggttattagtcaattcgattaagaaagaaaatcccaaagaanaaacatccgattganttttttgattattttatttaaagatatntttttattattatattattattttgcctcttttttattntaaacgtggttacagcg

SEQ ID NO: 42768 - DNA, 441 bp, Glycine max
  unsure (1)..(441): unsure at all n locations
ttctatgtgcccgtagtggtccacattgtgtttcgtgccattttattctcattttgtttactttttataccccctgttgacgtgcttaagccattttacttaagtcgtttctcgcttaacttaaaaataaaataaatttccaccgaacgtttgaattgtattatccactaacttcggttaaaataaattccgaccgttcggtcatgccgtaaccacgttgaaaataaaaaaagaggtaaaaaataatataataatcaaaaagacatcttttagtaaaataaagcggaaaatcaatcggacgttntctctttgggatntctcattcttaatcgaattgattaataactaaggtgaaactaaggctaaaatcaactcgccttgtcaagctcgtccacaanaataagctttngaagtttgcatttcaattctctctaagtaaat

SEQ ID NO: 42769 - DNA, 95 bp, Glycine max
  unsure (1)..(95): unsure at all n locations
agcttccttacttgagaatgtctctganattgctggttntttttaccatatacccaatatgaaatttctgcttaaatgtatgtctttatgaaaat

SEQ ID NO: 42770 - DNA, 410 bp, Glycine max
  unsure (1)..(410): unsure at all n locations
gctggtatctccttcttcactatgtcaagaatcacctggttgagtattacgtgaggcagctttgataccagatcttaatagacaacaatgggctaaagctattaaatggttagctgacgatccaaaacagttagctattgtgaaagcccttccaattcaccaaaagacagattatgttttaacacatcttggagaatgaaacttggtgagtaaccttttgtctacatttccaatttcaattttcaaattataaatttgtgtctttnttatgcctaattgagctcatattttcactntagttatttatatttcctcttgtgacttatattatcttgtttgttctccnctaaatggcagcattggatgttaattattcacgttcctcgaccttttacacttgatgatgaatg

SEQ ID NO: 42771 - DNA, 443 bp, Glycine max
agcttgtctcagcatttatgcgagacggagactcaacatgctagctatcatcgccaagtaccaagaagagttaagtctagccacggcccacgagcatatgatcgcggacgagtatgcccaagtatacacggaaaaagaggctagaggaagggtgatcgactctttacaccaagaggcaaccatgtggatggatcagtttgctcttaccttgaacgggagtcaggaacttccccgattgttagccaaggccaaggcaatggcgaacacctactccaccccagaagaaattcatgggcttctcggctattgtcagcatatgatagacttaatggcccacataattagaaatcgctagggaacttgtatggtctctcagaccttgactatgatacaacttttgaaatataatgaagtggtcccatgtttctactccaaaaagcttg

SEQ ID NO: 42772 - DNA, 455 bp, Glycine max
  unsure (1)..(455): unsure at all n locations
tcaagaaaaagatggcctcagcaaattccttatttccagaaaggaattctatcaatagacctccaatctttaatggagagggttaccacgactggaaaacccgaatgcaaatttttattgaggcaatagatctaaatatttgggaagccatagaaatagggccttgtatacccaccacagtagaaagaattacaatagatggtagttcatcaagtgaaagcataactatagaaaaacctagagatacatggtctgaagaggatagaaaacgagtacaatacaacttataagccaaaaacataataacatctgccctgngaatggatgaatacttcanggtttcaaattgtaagagtgctaaggaaatgtgggacactcttcgattaacaaatgaaggaactacagatgttaaaagatctangataaatgcactaactcatgagtatgaaaatatt

SEQ ID NO: 42773 - DNA, 377 bp, Glycine max
  unsure (1)..(377): unsure at all n locations
agctngtnactgaagtggtcgaagaagtacgttattgttctcttacctaagagtgaaacacanttgaaagcattaaacatcaaagtcaattctgacttagtttcatgaactaccaacttagatgttcttgtaatgaaaacatatctaaaaagtctaatccacacagtctcgatcgataatctataaacatctagtttgtntgtaagttgtgttaatttaacctttaattttttagacaataaaaaggagagaaatataatactaagataaataaagagaaaagtctatgtttaatacgagaaatatatagagagaagtctatagtttggtcttttttttttttttataaatcatatgtatcttctacaggaagaaaa

SEQ ID NO: 42774 - DNA, 313 bp, Glycine max
cgcacatcgttcgcgtgtatgatatccactcgacaggtttgaatatatgagaccttcaatcctataatgcaacgtgacagacaaaagtgggtagataacttgaatggccattattgtcaatgcggaaggtattccgcgcttcactatccatgttcacacattattgcagcttgtggttacgtaagcatgaactactaccaatatatagatgttgtttacacaaatgagcacatcttataagcatactccgcacagtggtggcctcttgggaatgaagcggcaattcctccttctgatgatgcatggacactta

SEQ ID NO: 42775 - DNA, 315 bp, Glycine max
  unsure (1)..(315): unsure at all n locations
agcttgcattggaattgcgacagcnccactccatcattatgattagtacctgacatctcanacaaacaaatcaaacgtaacaagacaattatagttgctgtttgaatacctcacccactcaagtgtatcacacaattatggcttttctctaatgaaacactcttgccttttaccactctaattccccttgagtacttangcaattcaagagattatggccacaacaaagaacaattcaccaatatgtgtaaggtaaggctagagagacaaggataaggttaaccaagaaaaggctaacanatgttttaggcacaa

SEQ ID NO: 42776 - DNA, 305 bp, Glycine max
  unsure (1)..(305): unsure at all n locations
ccttggagctctggctagaatgaccatgttttgcaaaaaanaaaactagcaaaaattcattaaaaataactaaaacataaaattctacctaagacaaagtaaaaactgaatttaaagctaatttgattcaaaacaaggcctatagttaactaaaatgccaaataaacatcacaaaatgcatatgaaaatccgataaatttgacatttatcaatgtgccagattccaacaagacctaagagaagttcatttaactggtgtcaaaagaatattcagatattaaattggaactcctaatcttagtctt

SEQ ID NO: 42777 - DNA, 411 bp, Glycine max
cggatcttaagtcactgcagctgcaacttgagagtgccatgtatgtcctagaattatttctacgagacctccaaaaaaggcgactaaggagagcatatttatcgatcgttattgcttgcatttctattacaaggattgtccatctataggcaccaaatacttattctagctccttctactagtcctacgatggaggctaacaataatggcatttggaaatatcctaatagaaagatatattccagcagacagaatatcctaattgtccatgttatgttccttttaatgctagactccttcttacctgctaacaatatctctgtgttgggttgcctcatcataacatttcttgtcccatcacaaacaccttgttctcgaggtgttgggacctcaattccagaccccgagaca

SEQ ID NO: 42778 - DNA, 402 bp, Glycine max
  unsure (1)..(402): unsure at all n locations
ctcttgcaagaggaaatgcatttnatgatatcctcgttacacccagaaatacagcaattggtgccgctgcagctgctgctagaccggngttaggtgcactgtatacaaactggaagggggaaaagacatgagcaggaaattaacatattatcctgttgacaatttgaagatttgaaaatggaaatttccacatagccttcaagctaaaaatgtttgaaaaagtgtccagtgtttgttatataataaatttgagcacaaatcatgcctagtttaattttatgtactcctcatatagacaagttttacattgctccgatgatgtattctcatatcctttcatgaagttgacaactcatatcattaaactcangtatcacatcattntggatgggatttaaatca

SEQ ID NO: 42779 - DNA, 381 bp, Glycine max
  unsure (1)..(381): unsure at all n locations
tgtggtactaggtggctgtcggtctatggtgcacaacacgntttccacatacacaaagcgcgcataaacccaccatcccctgttgcccacctccaactgagctcacgtactcccacgtagcccatatactcttttctctcaacaccgggtccccatcaatcctcccaagctttcccaacatcaaagtaaaacgacattcaaacagcacaagctatcacagccaagctaaacagagcaaaggcagataactctgccaaaacaccaaccaaatcacagcttttctcacttaaagactccaataacaattccttcgttccggttcattaaccgttggatcgactcgaaaatattactggaagtctatagtacataagcctacat

SEQ ID NO: 42780 - DNA, 428 bp, Glycine max
  unsure (1)..(428): unsure at all n locations
cgcgatcctcagagtcacctgaagcatgcaagcttanantacatatcaatataattaagcattcttctaccanaagattaattaagaagcctccactgcaggtttggatagtatgtaatgactaattaagaggcctaaaatgcggtcactacaaatcatataatactcgcacacgagataaatgttagttagtggttggaaactacactgttaagtttgtaatagagggaaaacattttccccatcatgagttgcaggtaatagtgatgtattgatactggatgattgattgcattgccaaccattgttgttctctataatcactactacaaattacgcattctacatcggttaaaatcacctttctacatcggttgccacgcgtcattgtagtcagcgatgttgaaaatttcgtgtctttttacatc

SEQ ID NO: 42781 - DNA, 504 bp, Glycine max
  unsure (1)..(504): unsure at all n locations
ctaagctatctagataaccttaacctctnttatgttctctcagctctaaccaagataattactgtctttggtgaagtttgcttataatgtgccttaccatgatgtatttatggtactcttgcatataccccactacacttagtctaatacacccttagcttaaggtacatgattcctagttccttagttattccaaaatatcttanattagcactaggaaatttcacatatctcataaattgaaggagttgttaaagtggtggcaataatttggaattttctattccaactttntcatttggacaacctatnttaatattcctgtatggccttttcaatctcattcttaaccatggtactagctgtgagtttgtagcgtcataaacagcanagtgaagaataaaatttcacatagtctacacttaatgtgcagtactttntagaanaataatcaatcaacanagacctcataatcattcacaccaagagggaacatcacaatct

SEQ ID NO: 42782 - DNA, 377 bp, Glycine max
  unsure (1)..(377): unsure at all n locations
atattgcctgatatcgtatgtattgaatttatgagacaaatgttgtagctgatctaagacgactcccacgatcaggtttcacactacattatatttcacatatcgaaacaccatgctcagcaaaacatnggagtggagcaaccctatgttgctacgagaatcatatgggccagtgcatatactagtgaccattgctgcaaagtagcggtattagctgctataggatgctccattgcactgatatgtgttttggggaaaactggatacaccccatttatgaagctagttcgctcataacgcacccaatttgaacccatatattgatgatcaccgtcatactctgcctgcctctgtcttctacttccagactatgttat

SEQ ID NO: 42783 - DNA, 363 bp, Glycine max
  unsure (1)..(363): unsure at all n locations
gtgggactngattgcaaagaccctttgcttgttaaggctganatccatggctggagtgatggagaagagttggagcaagttntatcggcattaatcaacanaatttcaatggagganaatgttcatgagcagttaattgcatctgattgcaagttacagactctgtctgtctctgcttaaagtcctccaagttcaaccataatttcttagtgtatagtatctctcaaaatgtatcataactcaacggttattgtcttatttcgttgataagccatcatcaaatcttcaccaaaattgctaatgttggaagtgtccaaggtggacatctatcaaaaacaaatacataccgatttgcctataaat

SEQ ID NO: 42784 - DNA, 279 bp, Glycine max
  unsure (1)..(279): unsure at all n locations
tgcaagcttgtgtatcgatacactgactgttaatctttaccagngatcgctttgactttgcgattggtttaagttttctaaggtcatactctttaacggtctcctgacagactgaagagctattaagctggccttgtatgcacttaaaatgtacttccattactcttagacccaactttgcaaagttttaagctttaaacttcttctcttctttgccaaactttcaagtttctggtttcaacctgaagctcgggattatttcttatcccactccttgcc

SEQ ID NO: 42785 - DNA, 430 bp, Glycine max
  unsure (1)..(430): unsure at all n locations
cgtnagantatgctgttcatgcatacgaacaaaaactagctgctctggatacatattgtgaggcctactccattgtttggctaccaagggctgagcgcatttcctatgccttctgatgagttccattggagctcgtggccttgatcttctcatcaaggagtcttgctattgagataatgacacggaagggaaatagaaagatgatgggacccacttcacgagaaatgatcaaaaaactactccttgagcctggtaaaatgaacgtaaaaatgatgagggaggaaaagacacgaattgtgctcatgagtgacttgatgtatctaaagacagtgataatgcccactgcttatatgccagtgatcaaatggggaatgatttataattatgactgattaatgtggccatttacccattacatagatggattact

SEQ ID NO: 42786 - DNA, 256 bp, Glycine max
  unsure (1)..(256): unsure at all n locations
aataaatagagctcctatttttaatggcgtgggttaccattattggaaaacccgcatgcaaattnttattgaggcaatagatttaaatatccgggaagccataaaaatatggccttacattcccactatggtggtaggaagtaaaaccatagaaaagcccacggaagaatggagtgaagaagaaaaaagattagtgcatgttggatttcccctgcggttactttntgttccactttttcttcgtacaaatatattc

SEQ ID NO: 42787 - DNA, 313 bp, Glycine max
  unsure (1)..(313): unsure at all n locations
agaactacatgatctgcttatttataacgctgaccatccttcattaaccgttggagtttctcaaaatttggcctgatgcttcacaatagactagttcatgatcagaccattgtgatcttctgaaatatgtctggagtgagcgngaagcttcctgtcccgagagcttttctcatttaagcattctagccttagctttcgggtagcttaggaaaaacaccatttcttcttctctctatcttccaaagtcatttctaacatcctcagcactttcttcatcacccacagtcaccattagccaccacaaacctacctt

SEQ ID NO: 42788 - DNA, 386 bp, Glycine max
  unsure (1)..(386): unsure at all n locations
gtgatgaggtacaagccctaaaggctgaccttgtatgatcccgggtagtcgaagagaagttcaagtccatagccatcaaagtctgataagagtatgatgaactaagggacgtcaatatggccacagttgaagccttggaacgagaaaccaagaaggcccgataggaagaacacgaccaaagcanagttttgaggggaattatagggcagcaatagtgagctcaagctccgaagaggtgaaaggaatcatcacgggtcaaaggcatgatcttgaaagatgagctaaaggcttgccttatgtcgaanagaaatttgtcccaacagttaagcgagactgaagggaatatgtgggccatcatcgataagtgcaaagagaagctatatcta

SEQ ID NO: 42789 - DNA, 483 bp, Glycine max
  unsure (1)..(483): unsure at all n locations
agctntacctaaccatgacaatntcttggtggtaaaagaaaaaagaaaaaggaannaaaacaaaaggataaatgggggggaaaagtgcacgacaatataagacaccagatgatggtaaaaatattggaaaacagtacttagagcaaatgcattcgtacataatacaaagctaagcagcctcccatattgctctcaaaacttactagaagaaaaacaaataagctctaaaccatagagcatcagaatctgacttcataccttcaattacacaagagaaaatcaacccagcataactgtatctcanagctccaacagatttcaatgagaataacctgcatttggtttggatntaacatacccaccataccacanaacatgagtaaacacaatggagcctatcgttggccacatcatataatgatgcttgcaactaaacaagaatatacaacannaatgggcacatcaactatagaatctagatat

SEQ ID NO: 42790 - DNA, 406 bp, Glycine max
  unsure (1)..(406): unsure at all n locations
atgcctcagcaacagcttttacttctttctctggcacagcaaagcatacagaatgctcactactagcctacataaatactgttaatgattaatgccatttcttatatatcagcgtggacaactagaaaaattgaaaaaagttataagtgcacctgagatatcatgataacattagctccaacatcttttactgcaccaaaaatagcactggcagtacctggaacaccagccattccagttctgcaaaaaagcatcaaagaanaatttattggaatctacaacttggacaattaatattggttaaagaaaaccttatattaaatagaaatcctcgtgcagcaaaaaatgccaactattcatcatgtaacacaactgcaattcatgactcacccctcgacgtttacaa

SEQ ID NO: 42791 - DNA, 206 bp, Glycine max
  unsure (1)..(206): unsure at all n locations
agctngtagagaagtcttggaccggttatgtattatatctacacatactatacgcaagtggtgctggtatttattngcgtctatgcatctattgttattctacacatctttgatagagaaatgttattacacatttgatatggccttctttcacgcctctaacgggcaaactatctattttatcctgagctggcaaagtccacccc

SEQ ID NO: 42792 - DNA, 392 bp, Glycine max
  unsure (1)..(392): unsure at all n locations
atatggatactgatatttttctaannatttgagttggttgtgtcaatgcattacatcagtaaataatggaaaacaaatcaaatcaccataaaagtgtcatgaaataactactacatctaaaatgtgttgttatgacaaaaacaatgttatctaagtctaactaaagacatatttatgcatgctataacatatatatatgtgtacataaaaagatatgaaaaggttcatntgagagagagagaaaaaaaaaacaacagctcgtacttgttaaatgttcagttaaattgaaaatggaagtaacacaaataattcataaatacatcatcaatagttgtaactattatgggataacattctnttcaaaaagaaattaaaaatcaccattgtcatgg

SEQ ID NO: 42793 - DNA, 218 bp, Glycine max
aatgcactgcgcttcactatggaacaaacgttttttttttagactgtttacaagaatggctcaacattatgtagatcggcgccaacaatgtgaacccccaaagatggttgttcgcgattacaggaacacaactacataagccgataatgtagttacacctatatgcagacgtgaacgtatgagacattttgccgaaatgctaaatatgattcctgaga

SEQ ID NO: 42794 - DNA, 413 bp, Glycine max
  unsure (1)..(413): unsure at all n locations
agcttataatatatcgatacgctcgaaataattttcttatactctcgcgaaattcaaatgggcataacttttcacccggatgtccgattcgggcgcataatatgtcaagagtctcgaaattgaacaacggaagctcttgagaaattcaaatggttataacttttcacacggatgtccgattcaggcatatcacatatcgagacgctcataattgaacaatggaagctcttgagaaatttaaatggtcataacatttaactcgaatgtccaatctaggcgcatcacatatagtgttactcgaaattgaacaacggaagctctcgacaaattcaaatggtcataacttttcacactgaggtccgattcacgcgtatcatatattgatacgctcgagnataaacatcggaaactct

SEQ ID NO: 42795 - DNA, 331 bp, Glycine max
tagtacaatttcgagcgtctcgacatattatgcgctcgaatcggacatccgtgtgaaaagttatgaccatttgaatatctcgagtgcttacgatgtataatttcgagtgtatcaatacattataaacctgaatcggacctcagtgtgaaaagttatgaccatttgaatttcacgagagcattcgttgttcaatttcgagcgtctctatatgtgatgcgccataattgtgcatccgcgataaaagttatgaccatatgaatatctcaagagcttaccgtgatcaattttgagtgtctctatatgtgatttgcctgaatcggacatccgtgtg

SEQ ID NO: 42796 - DNA, 440 bp, Glycine max
  unsure (1)..(440): unsure at all n locations
atcctctgagtcacctgctgcatgctaagctttcgtttacagatagcanaaaggtntattctgattaccactcnggtatttccgcccgtcagcgtgactcataagtcattatgacagatcttgtgagcgcggaagatgacgtaaatctccgcgtgtcaacgggcttgtcggccgcgattgactaatggcgcaagagacgacgttagtctctgcgtgctatcaggcttttcgtcttacagatagctaaaaggtttatacggataaccactcgggtatctccgcccgtcagcgtgactcagaagtcagtatgactgatcttgtgagcgcataagatgacgtaaatctccgcgtgtcaacaggcttgtctgccgcgattgacgatgggcgcatgatacgacnttagtctcttgctgctttcagtgcttttcgcttacagatag

SEQ ID NO: 42797 - DNA, 446 bp, Glycine max
  unsure (1)..(446): unsure at all n locations
tttttgtatttatcacaatatgcaaatgagatgatcaaagtctaacttttcccatgcgtaaattattctctaggtctgatactatntgcaaatctttatataagtttttcttcttttatgttntatgatgtgagtgtgatatggcagagcaataaggaaagcaatttgcatccacaaaacaggagatgcagcttcttgcaagtttttgaataatcccttcatgatcggttntgggatcttgcaactnttcttgtcccanattccaaacttccatgagcttacatggctctcaactgctgcctgtatcacctcttttggtatgtattcatggcagtggctgtgtctctggtcgtctctaggtactttttgtctcataaatatcgaatagtgaatataataccgatntactatagagttcaagttctgctgtgctcctcgtttatatt

SEQ ID NO: 42798 - DNA, 444 bp, Glycine max
  unsure (1)..(444): unsure at all n locations
ttaagcacctgcngctgcagctgtccttaatcattaaagcaggcatatctacatgacctgcttcaactcctaaacaatccanaatttttggcttctggttntatgttaatacatcaaaatcttatgttttacttgtgtcatcatgtaattgtggaagcaatgccttccaaggttattttgatgatgccaaagaatcaagagttaagcaaagtttcaagcaaagattcaagaatcaagtttcaagattcaagtttcaagaatcaagaatcaagaataatcaagatcaagattcaagactcaagagaagactcaatcaagataagtattaaaaagttnttcaaaacattgagtaacacatgaagttttcacaaatcttntaccaaagagntttactctctggtaatcgattaccaaaaggtagtaatcgaataccagtagccaaca

SEQ ID NO: 42799 - DNA, 199 bp, Glycine max
  unsure (1)..(199): unsure at all n locations
gaagtgganaagtctgaaggaaaatgttcgtttatacataaaggggatgnaataatatttaaacctatatattatctgaatatctaacttaagaataaaatatttattttaccctttccactgagtatgtcctctcgtgaagtgcccatacatttatttttttattcctactcctcattgttacatgagactctttgca

SEQ ID NO: 42800 - DNA, 402 bp, Glycine max
cagctgtgacaagttgcactgctggtattatttggttctaccgacctcttggatggagaaccctctaattatcagaatgctaacagacccttacctgtgtggctaaaagatcatggaccggatagttcttacatggaggctcttcagagtaaactttacacaaggcccaaggcaggatatgagaatgaagaaagtttctcctgcttgcacatgtccatgtgaagttcttgagaatctaagatacaagatggtcataaagatatcaggattacttatttcgctatgctcttgataagtaaaacacaagagctgtgtgtcttcaccgacatctaatccttgtactcttattgaaactctgagcaatctgatgtttgaaaatgtatgggtgaatctagatggcta

SEQ ID NO: 42801 - DNA, 464 bp, Glycine max
  unsure (1)..(464): unsure at all n locations
gctaacatccncagactggccttcaacggtttctctctctatgccgtctgcgccattgacaagttacagtctaacaatactaactctgaggaatattcctctttcattccgaatcttccgcatcctatcacgttaaacgcaacaccaccgaagatattgaccgagttcatgaagccactgctggaaacagagctcanaagctacggcttaatcgtcaacgactttgcggaactcggaggagaagagtacatcgagcactatgagcaaaccacgggtcacaaggcgtggcatattgngccagcgtctcttatgtgcaaaagaagccttgaagagaaagcggagaggggacagaatagtgtggtgggagcggacgagtgcatgagatggctcaacgggaagagagtgaaatcggtggtgtacatatgctntgggagcatgtgtcatttccaggataaacaactata

SEQ ID NO: 42802 - DNA, 376 bp, Glycine max
  unsure (1)..(376): unsure at all n locations
ggatcttaagcacctgcggctgcagctgagatgaggaagcgagaagggaattctcctgctcttattcgatgaccacagagtggtacctggagatatgtcgcggtggtcaggagaccattgggacgtcaagtggggtgctattgcccaaaaccaagcttgaccaatcctgacccaacccgggcatagtcggtcagtgagaacctgtgatgtacataaacatgcgagctcctggcagtcaacagataaaaggaacaaagaccacaaagcacggaggcttgtggtggctggccaactgtgaattttgtgtgatatatgggttgtggcctctggtaatcgatcaccaagggtngggtaatcgatacaacgcttaaaaatg

SEQ ID NO: 42803 - DNA, 345 bp, Glycine max
tactaagcttgatccgatatgtgacctgctggagcggatcgttgttcaggcttagagtttggatgacccacttccggtgaagaagaaagtcagggtagacatcacttccggtgaaggaagataagtccgggtagacgtcacttacagtgaaggaagataagtcaggatagacgccacttccggtgaaggaagataagtctgggtagacgccacttccagtgaaggaagataagtctgggtagacgccacttctaatgaaggaagataagtcaaggtagatgccacaaggattaccttgataagtctgataattggttcaacaaggaacccggagagaaactctca

SEQ ID NO: 42804 - DNA, 307 bp, Glycine max
ctctgaagatgctcaagaagaatatgaccacactcgctcatacatggagtgttatttcttactccaacttgatccccacctcccacacttataacatcacattggatctggcctaattgatttatggcattattatgaagatggacatgaatctatgctacctcgtctcttaccagatttctatcattgcccaacatgactcctgcaggctaggagttccagccttaatcacagctttgtgtaaagctagagaggtcacatcagaattccagccatcatattctagatgatccaacattgacattca

SEQ ID NO: 42805 - DNA, 290 bp, Glycine max
  unsure (1)..(290): unsure at all n locations
tgtgcagatangatcactcctacatttcatctctagtatgcattntctttctttatttacccatacctcatgtttggctatttagggaagaacaccataactgaacgcgccacaaggcatccctatcgcaccagatccaaatctcgaacgatgggtgatcaagaggagaaacaggaacagatgaaagccgacatgtcggctctgaaagaacatatgacctccatgatggaggccatgttatgtatgaggcagctcatggagaagaacgcngccaccgctgccgctgtcag

SEQ ID NO: 42806 - DNA, 320 bp, Glycine max
cagtctttattattgggagccaatccattccttgagatcagactctcagccacttatgatagccgtcgatgatcccatcactgcttcccctaagctctctgtcctttcttcacgccgcatcccatgccttgcgaactccttggagaaccctcgcgttgcggtcactgagaccccgtgcgatgaaaggcgtgatgctttcgtctaacggcgctcctctcatggagtagccaagctgtcttatggcgagaacaggattataatcaatactaccccttgtcccatcaagggaacaatgggacatccttcgcatgaagatagaa

SEQ ID NO: 42807 - DNA, 134 bp, Glycine max
  unsure (1)..(134): unsure at all n locations
cgagtgtctcgatatattatgctcttgtatcggacctccgaatganaagttatgaccatctgatattctcgagagctacctttgttcaatttcgtgcgtctcgatatattatgcgcctgaatcggacctccgag

SEQ ID NO: 42808 - DNA, 341 bp, Glycine max
  unsure (1)..(341): unsure at all n locations
cctcatcggctctcacagtcgttatattttagagccaatncaatccttgaggtcggacttctagaccacttatgatagccgtcgatgatcccattaccgcgttccctaagctctgtgtgctttactgacgccgaatccaatgccttgctaactccttggagtaccctcgcgttgtggtcactgtgaccccgtgcgatgaaaggcgtgatgctttcgactaatggcgctcctcgtatggagtagtcaagctgtcttatggcgataacggtattataattaatacatcctcttagttcatcaagggaacatttggacatcctacgcatgaagatagaatcttg

SEQ ID NO: 42809 - DNA, 346 bp, Glycine max
  unsure (1)..(346): unsure at all n locations
tctgagaaaggacttcaaaagtctttcanaagattatgaacaacttcaaggaanacatgaagaanatacatatatattcttcaaaatttccacccaaccatgtgantggcttgaaactctaaagaagacaacaaagcttcacattgaaaatgagaaaatntataaagaaaaatctagtctattgaaagatcttcagaaattgaaaaatcaattgtaaggcttacaaaatgagtatgccacacttagtaaactacgtgattccctaaatgaggaaaggtgtaatctattgaaagaatgttcccaagtctataagaattatgaaaactcggagtanacataactgatg

SEQ ID NO: 42810 - DNA, 534 bp, Glycine max
  unsure (1)..(534): unsure at all n locations
atccttagagtcacctgcngctgcagctngtccctaaataagacccagaggaatactcgaaaagtagtaacaagcaatattcacgtaagcaaccacagcctgccaccctgcgccaacagcaacacctgagagaacgggttgcacgttgttgatgacaatgcaaagggccaacatgggcgtgagctctaccacaatctttctcacttctgaatcatttgaaaacaagaaagggtactggttccggaagattatcagcaccatcgagagcatgacaccgatcagagttgaagtaatcacagcaacaagaagtgaaaactntgctgttcttgggtgacatgctcctagttcatttgacaccctcacactgcanatagtaattttggtcactgactagattaagtaaatcattcaagtttaatggttatgcacaataacgtacaacagtctatactattggtaactaataataaatcattgataatantaattttaanataattattataaanataataaattattatgtaaactgtg

SEQ ID NO: 42811 - DNA, 553 bp, Glycine max
  unsure (1)..(553): unsure at all n locations
ctaagcttacatggagctacattagtaagtgtcgaggtcacaccttcatgcacaggtaactcccccacatggtgatcaccctgagtcttaagggagttccaaaaccgagtgacatacccccaagtacaagtatttccccttatgagaaacttcaagtacttactcgcaaagtttatactatttccatgcaacatgaagtatgaaacatgggtaccatcaatgcacaaactgtggataattaaagattctaagtcatcccccttcatagatgcttaaaactctctaaccactctttcctccaccagggatatccatcatggtaactgaacccnccatgtacatacacaacatacatcatcacaatgacattntcaacatcaacaacatttcatctcaatgtcattatcaacatcaacatcatctcatctcaatgccattctgaacatcaatatcatctcatctcaatgacattatcaacaacaacatcatcatctcatatcaacataataattaataacaacatcacctcatatcatattatcataacactgac

SEQ ID NO: 42812 - DNA, 453 bp, Glycine max
  unsure (1)..(453): unsure at all n locations
agctngatgaattctagttaaagactgtatttattactgtgcttctcagatagaccacaatctcctacccaagaccctctagtttctattccttgttcattgtaattattgggatttaaatcatccaagtttcacatatgttacaaaattgatgcatggcatgggaggaacaatataatataagattaaggaagacaacaacgtggccttatattttctatcttctttgntatccatgaagaacttatgttctggaatattcctacagatgttagacaagaactgcaatttatattagtatttcaaatcatccatggtgtgattgttaagttggatcacgaatctttggtattactagcaagatctagaccctttgcaatgatatatgaaccctcatagaataagaagctctagtgtcttgaagtcagcaattattacctatctgaacaatca

SEQ ID NO: 42813 - DNA, 277 bp, Glycine max
gcagtgcaagaattcatagtccaattctagaagcatgtcagaatggtgaatgggttggaggaaccgcttctggtgaaggtgtttcttaaagggctaacagaagagatcaacactaaggtaaggctctatgaaccaaaacacttgatggaatctatggtcaaggcttgtaaggtagaagataagaattatgtcttaggagaattacccgtgagtaatactaacgcgtatatattttagaaacccagttatctgggtcagagatctgtatgagaatgac

SEQ ID NO: 42814 - DNA, 417 bp, Glycine max
  unsure (1)..(417): unsure at all n locations
agcttccatcaagtggttggcccatttcttcttgactcanattcttcaagggatggcaccaatcctccttccaattcccaatatggcaacccaaaaacaaggaaacagagacaagcaataaccaaagaccatataaaatgaaatgaaagctaaaccaatggagttntaacaagacatattttcaaggattattcaacaattaaatcaatgaataggacatagaatcaagctaggactcanagagaaacttataatggctctagagtagagtaaaaaaacaaaataaaaaaagactcaacaaacccctagctgtggcacttggtttacagtaattttaaattgaaatttcggaactaagaatagtataacataggcaccaattatagaataattgttgagacnaaacaacaggcacac

SEQ ID NO: 42815 - DNA, 263 bp, Glycine max
  unsure (1)..(263): unsure at all n locations
gcctntctacaccccatttttctctctccttggcatcatgaaaaagccaaagtacttgtgaatcaaaacaaatataataatgaagtggaaacagattaattacaaagtataaggcataaccaaccaaactcataaataagacataaccaaaccagaatccaaaccagtcaaaattcaaaaccacatagtatcaaagcataaaagtctgaaatccatatactacaagatagataaagtactaaaaataataatctaagtagcat

SEQ ID NO: 42816 - DNA, 325 bp, Glycine max
  unsure (1)..(325): unsure at all n locations
agcttgtatggctgctcagatcttgactagttataactttctaaataaaatgagtttatcccatgtttntactccaaaagtcagtgcgaatcanatcactcccgcattntatctctagcatgcattcattattctttacctactcctcacgtttggtttttttaggaataacaccataactaaactcgccccaaggcatccctatcgcaccagatgatcaagaggagacacaggaacagatgaaagccgacatatcggctntgaaagagcaaatggcttccatgatggaggccatgttaggaatgaggcaactcatggagaaaaa

SEQ ID NO: 42817 - DNA, 242 bp, Glycine max
tcttatttatggcgagctgagtttctatgttgaccaaggcatcaagttttccctcaagcttcttattttcagcaaatgaagatgaatcagtggccacatcatggactcctctaaggacaatagcatcatgtcttgcactaaatagttgggagttggaagccatcttctcaatcagattcctagcctcagcaggagtcatatcaccaagagctccaccattggcagcatcaatcatactcctc

SEQ ID NO: 42818 - DNA, 453 bp, Glycine max
  unsure (1)..(453): unsure at all n locations
agcttccaggttggtataccatgctacagctattcctaccaagctgtcttgaaagaaatggnaccaacaattttcgtccgcagaatatgcccncatcttttggcaatacatccgaagatgcccttccggacatgtcgtccctttctacttatcaaagtccggtactttgaacttgggaggaatgacgatattgggcacgagacataaatctgctaaatccgagaatgggtaattgccaaggccctcgactgctcttaacctctcttcaagcgcctcaatctttcccttatcttccgcgaaggggacagattcttttacgggtgtgggtgaggccgggatatggtggactatgttcggggtgggtagttcatgtggggacggatctttgaggtggagcaggaggccaagatgggtatctccttccncatcgtcttgcccgggatagtcttcata

SEQ ID NO: 42819 - DNA, 357 bp, Glycine max
  unsure (1)..(357): unsure at all n locations
cacctatttgattntcccatgctgtctctacatacataaaacagccccaccattcccaatttgcaaaatcatattcatatatcattggggcatttcatcgagcacttggtgggcgcacgtttagacataaattgcaagagagtgggagcaatgtggcatgccccattgcttcagaatacaacctaggcctaaggccttttcattcaaatcctcaattcaagaaaacaagcaccaaagcaaaccaaaactgccttacaaatataagcatgttctcacaattcgaggcaccaaaagatgaagaaagcacatcaatggtaaagcaaaacatcaaggatggaacacttacttngtggagtg

SEQ ID NO: 42820 - DNA, 394 bp, Glycine max
agagatctatcaagagtgatagaaggtagtgcaacccaatatgaacgattggagcaagctactaggagatgctctataggcccataggaccgcttactgagcacctttggggatgctttcctataaggaggttcttggtaatgcatgccaccttctggtaggaattgagcatcgtgcttattgagcggctgaatggtgtaacatggcatttgatgaagccagtatggaaaggaaacttcaattgcaagaacttgaggagattctcttataagcctatgagaactccaagggttactaggagaaagagaaaagggttcatgactctaagatctgctggaaggagttccatattggccaaaagatgctctagtctaactctcgcctcattcttatt

SEQ ID NO: 42821 - DNA, 484 bp, Glycine max
  unsure (1)..(484): unsure at all n locations
tactgttttcgtcttaataattcttttatattgtttcactntatcaattcgttctctctagttataccaaaaccaagatttttatttcttccacatcatagcttctagaggaaggaaatggattgccttctattanggagaaaaggggaagaatatgtgttttggctgtatgcatttatgtatgcacaatgacaggttacatgtaaacactagttaacatacgtctttntctagacgtttctttntaactcattatggaggtgtacatntttactntgtgatatttattatgtttctcacttgaggtagtaacctttgcattgaccatccncattctaatattcctttgngccaatttcatttttaanaaanggtaangtacaantttagttcttatatctgacatttacttttaattagaccctatatggaaaatagtctcaattaatccctctatcataatagtntcaattgatctcgtatt

SEQ ID NO: 42822 - DNA, 355 bp, Glycine max
  unsure (1)..(355): unsure at all n locations
atttatcaaatcttattttatccagaatttattctatctagaaatttatttatccagattttattctattcagatnttatttcatcccatcttatcttatcttgtccagattttattttatttcgtttatgggcttggacttaaaatagatttgtaagctttgggactgaggacctatataacaacatcaaggttttagtttagggagttttttttcggagaggaaaataattctaggattntagaattcccagttttattactgttcatgcacactgnntcacgtagaataaaattattttttgcanatcatctctaatccatacatcttttaatattatgctctttttatttc

SEQ ID NO: 42823 - DNA, 386 bp, Glycine max
  unsure (1)..(386): unsure at all n locations
agagcccgggtagtcgaagagatagtcaagtccatagccatcatagtcttaagagagtatgatgaactaagggacgtcaatatggccacagctgaagctttggaacgagaaaccaagaaagcccgataggaagaacacgaccaaagcaaagttntgaggggctttatagggcagcaatagtgagctcaagctccgaagaggtgaaaggaatcatcacgggtcaaaggcatgatcttgaaggacgagctaaaggtttgccttatgtcgaaaagatatttgtcccaacagttaagcgagactgaagggaatatgtgggccatcatcgatnagtgcagagagaagcttaatctagcggcgactcacgagcaaaggctagaggatgagta

SEQ ID NO: 42824 - DNA, 596 bp, Glycine max
  unsure (1)..(596): unsure at all n locations
ataaatgatttccattcagttcctgtcactatanaatactcaagcctgtcacgctccaactcagacctaaacccggcaatgcatgcagcttcgtatggacctcaccagttacaagcatcgacgcattgttgatgtgctatgaagaaatgcaaatttatttgcctagtagccatctgacatgttgggaatccatcccagcataatctgccacaaactttccattttgccgtaggccanatcactatcacaaaagataaggaagatgggagaagaacgacgttaggcagtcaaagaagaagttgacaagctcctccatgcaaacttcatcagagaggttagggtctctacctggctcgccaacatcgtcatggtcaaaaaggctaatagcanatggcgaatatgcactgactacactgatatgaacagagcatgctctaaagacacataccatctgcccaacatcaacaggctagtcgatgggacgtctgggttccaggtgctaagcttcctgggatgcctaccctggatatacangaaccaggatgcatctcagacgtgacaccatgtcatcacatatacctcgacgttgattcgag

SEQ ID NO: 42825 - DNA, 327 bp, Glycine max
cttaagtcacctgcggcatgcaagctttatacatggctatcttggtggtgtgctatgttctcgacgtataatatacttacaggggcatgtgcagctctactacttccttctccattccggtgcctttgatcttcaagaagcacacgacgttattgatgatgaacatccatcgcctacgagctgcacgtggagttacatcattttctagtggggagatgacatctctaggcgactaatatgttgggcatagcgtcgatgcataatgcatattcggagacgctgggtgttgcatggacacatatataaaggcaaccttcgctgatctga

SEQ ID NO: 42826 - DNA, 540 bp, Glycine max
  unsure (1)..(540): unsure at all n locations
tgaatgttcatgcatgcaaacggacactttaatactcagctgttagacggcacaatgctaaggtgacacacgacattctgtgttttctctcatccgcgcatacagtttcttcctcgatgatntctacatgcgctgacatagttattctatggctaagcaactatttaatctgctgtccattggcatagaacttttcgcgtgggctaagtattctagcaagattataggactatccgtgtttagtttgaggcgctgattaggctgaccatattgtgttattgaattgagagattcagatgggatagactggaaatgcctactgtcgatgcgttctgactgttttatatatcaaaggctagtcatcgatttgtcacctattaattatgtggtggccatacatgttaaaatataataaggctgtgctacctatctttggaatacacagtgcctatatctggatctagaaagattaatcatgactctaactgttatggggagctatatgtatgattgaaatacgatctggtgtgaataaccgcg

SEQ ID NO: 42827 - DNA, 177 bp, Glycine max
caattattctccacatgaacataccacgattaatcgaccatacattcgagcatacctttacgggaacgtacgtactccctagttatcattatccgggactctgacaccgccaggaacgactatattgtgcacaacacatcaatatgctagatccgacacatgctatcatgatgggct

SEQ ID NO: 42828 - DNA, 330 bp, Glycine max
  unsure (1)..(330): unsure at all n locations
tgagccaaaatcctgactcaccataaaccttgacccatggtgtgaatgtcaatccttaccctcggaagcaaaaaagaatagaagggaaatttccaatcaaagaaaaagagaaggaaaatttccaatgaaagcaaaaaagaaaagaaggaaaattccccaatcaaagagtgggagaaagcaaaaagaaaagaaaggaaattcccaatcaaagaatgggagatagtaaaaaagggaaggaaagaaagttcttgaagganaaacagaatgaatatgcagagaggtcattggaccggacaatatctgaacaatacagaattgtcaccaaatgaa

SEQ ID NO: 42829 - DNA, 438 bp, Glycine max
  unsure (1)..(438): unsure at all n locations
ctgcagcttatatccacaactaatgggcaagtagttggtttaatagagagatcaagcaagtgttatagaaggtagtgcaacccaataggaaggattggagcaagctacttggagatgctctataggcccataggaccgcttactgaacactcttggggatgtttccctataaggtggtttttggtaaggcatgccaccttctggtggtaattgagcatcgcgcttattgggcggtgaagggttgtaacatggcatttgatgaagccagtatggaaaggaaacttcaatcgcaagaacttgaggagattcacttagaagcctatgagaactccaacgtntacaaggagaaagtgaaaaggtttcatgactctaagattngtaggaagggagtgcatattggccaaaaattgctcttagttaactctcgcctcaatctta

SEQ ID NO: 42830 - DNA, 358 bp, Glycine max
  unsure (1)..(358): unsure at all n locations
tctgggggacatcttgacttgctntccaatctgacattcaccatagattctgccttcttctattttcagattgtgaatgcctctaacagcacctttgtcaatgattntctttatgcctcttaagcgcagatgtccaaatctttgatcccatattctgacttcatcttctttggaggatagacatgtggaggagtagctggtttcttggggtgtccataggtaacaattgtcctttgacctgctgcccttcattagaacttcactcttctcatttgtcaccaagcattctgactttgtgaagtttacattgaatccttcatcacacagctgactgatgctgatcaagtttgcagtcagt

SEQ ID NO: 42831 - DNA, 348 bp, Glycine max
gtaagatgttgtgtctactataagattgcgtggaaattattgacgttaggtggtaataagtatgacttaagctatagtagatgattacttcaagggttcacattggaactttgtatgtcaaacaaccaataaatgaagctctttgatgctcttcacaaacttgccaagggtattgaaaatgaaatggtcttaacatctgttcacttagaagagattagggaggtgaatctcagaatgagtcatgtgaaagattgtgtgaaatatatggaagttaccacaatatctattcctcaagaacacctcaatagaatgggtgtgaggagaggagaaatagatcccatgaagaat

SEQ ID NO: 42832 - DNA, 404 bp, Glycine max
  unsure (1)..(404): unsure at all n locations
cagcccattttttagttgtatttacaatagttttcatatgtaatatgatttaaagaaaacaaaagttatgtatatatgtgattgtattataatgatttagttattgttgtgtttgattatgtttggatcagactcttgaggcattttcagccccaacagggaaaaccagcactatgggagctagattcagatcaacattacactgtcaagtttcatggtctgtatttagcaagtgatagcattagataaagagtggattattgagttgcaccagtacgttgttgtccttntcatttaatgaagcattanatattcatatttcaagaatataactggtgtatatgaacatttcatattntgtcaaaattcagttgtatactcttttatttaaatctgtctttaac

SEQ ID NO: 42833 - DNA, 488 bp, Glycine max
  unsure (1)..(488): unsure at all n locations
agcttctttgggaacctgaacaggctattaactcctctntcanaaccatgctatgtgctcgcgactggtccctttcttcccttcgcaacttgagttcactatagacacgccatagagctccaccaaatttgatgcggccatactcttccttgcggagccctcttggtatcttgttcaagggctcttgcggtaattgcattctcttcccgtaacccggcacactccttccgaacgtgtatagcggccaacttgaacttctccttggcaagtattgcctttcctaactcacttttgagagcttggacttcttcgtgctcttacggtgcttcaaaattctcttcgctgacgactattaacttggcgagccaatctaaacctcgtatatgaactttcagccattcgtggacccaccaatgatgcattacgaatgctctagctctgatctttctaacgggntccatgcctatgatctttgatagtctggattt

SEQ ID NO: 42834 - DNA, 374 bp, Glycine max
  unsure (1)..(374): unsure at all n locations
gctttccccatttgctataataggggaagaagtgaagaagattatggttcagccccttaggcacttctctctctctcgaaatttctgaggaaaattagttccgtgaagaagatccaagccgaggcgcttccgtaacgtttccgtaacgtttccgtgagtaattacgcgaccgttcttcaagattcatcgttcattcttcgttntcttcagtcttcaatgggtaagtacctcaaaccaagcttttcaattcattctatgtacccgtggtggtccagaatttgtttcatgtatatttattcccgttttcatttactctntataccccctttggacgtgcttangccattttattaagtcatttctcgcttaaatct

SEQ ID NO: 42835 - DNA, 435 bp, Glycine max
agcttgcatcccatggaggggattctagcttattgctgatggtcaacctctgaagatcctcaggaagaatatgaccacactcgctcatacatggagtggtttttcttactccaactagatccccacctcccacacttctaacatcacattggatctggccaagttgatatatggcattattatgaagatggacatgaatctaggctacctcgtctcttaccagatttctatcattgcccaacatgactcctccaggctaggatttccagccttaatcacagctttgtgtaaagctagagaggtcacatcagatttccagccatcagattctagatgatccaacagtgacattcaaagggccaaggaaagccagtggtaagagatctgatgctctctctacttaacaactcaagctactcttactaccacactagc

SEQ ID NO: 42836 - DNA, 488 bp, Glycine max
  unsure (1)..(488): unsure at all n locations
ggtgcaaataaatcactcctacatttcatctctagcatgcattntctttctntctttacccattcctcatgtttggttttttagggaaaaacaccataactaaacgcgccacaaggcatccctatcgcaccagatccaaatctcgaacgatgggtgatcaagaggagaaacaggaacagatgaaagccgacatgtcggctctgaagaccaaatgacctccatgatggaggccatgttaggtttgaggcagctcatggagatgaacgcggccaccgttgccgctgtcagttcggctgccgaacacacccaactcttttggaactgcgcccatcctccttaaacatttaggacggaaagggacacactgggccaatggcaccctccctgtgatcaccgagaacttccctttggttggcgcnaactctccccccgtttgaagatagggccatttgttctcccctgaagaacccctaaacccacaggcaaat

SEQ ID NO: 42837 - DNA, 448 bp, Glycine max
  unsure (1)..(448): unsure at all n locations
agcttccataggtggttggcccatntcttcttgtactatattcttcaagggatggcaccaatcctccttccaattcccaatatggcaacccanaaacaaggaaacagagacaagcaataaccaaagaccaaaaaaaatgaaatgaaagctaaaccaatggagttttaacaagacaatttttcaaggattattcaacaattaaatcaatgaaaaggacatagaatcaagctaggactcaaagagaaacttagaatggctctagagtagagtaaaaaaacaaaaaaaaaaaagactcaacaaacccctagctttggcacttgttttcacagtaattntaaattgaaatttcggaactaagaatagtataacataggcaccaattatagaataatttttgagacanaacaacaagcacacttccctttcactttntttntcctggatactg

SEQ ID NO: 42838 - DNA, 437 bp, Glycine max
  unsure (1)..(437): unsure at all n locations
ctacaccccattttctccnnccttggcatcatgaaaaagccaaagtacttgggaatcaaaacaaatataataatgaagtggaaacagattaattacaaagtataaggcataaccaaccaaactcataaataagacataaccaaaccagaatccaaacagttcaaaattcaaaaccacatagtatcaaagcataaaagtctgaaatccaaatactacaagataaataaagtactaaaaataataatctaagtagcatagcaaaaatacacggcttataagagacatataattagaaactaaattcaaagaaggtggaggtggtggtggaagatcgaaactctaacgaatgtaacccacatcctcttcaagctgtgtgaggcgaatatccattccggcaaaacgtgtatccaatgagtcgaaacgttcaccaacataag

SEQ ID NO: 42839 - DNA, 314 bp, Glycine max
  unsure (1)..(314): unsure at all n locations
agcttcacaaggagctacatcagtgaagcttcttcttccatggcttattctcttgtagatggcacctcctctcacctcttctcctttatctttcactgcaactccatggttgaaaatcaccattgaaggaccttattgaagctcanagatccaacctccatagaagcttctcaagcaagcttccatcagaaacattataaactatgtcagtaaggactcgcagttnttcatgaggaaaaatacttgtacttgggggcatgtcactccgtttggaacttccttgagactcaagttaatcaccatggngggggggg

SEQ ID NO: 42840 - DNA, 355 bp, Glycine max
  unsure (1)..(355): unsure at all n locations
ctctgaatccgcgacattgtgcttagcgccantctcgcgcttagcacgagtaagtggatttgagcttagcgccagtcgtgcgctgagcctggctaaagacaactgttgcgcttagcacactgatctcgcgcttagcgagcggccttgatatggatgctctgacagattcttctgtcgcgctaagcgcactgaagctgtgcttagtggtggatgcgcgcttatcccactgatgagataagctcaactgtcactnttagcacttcatgacttatgccttttttcatttgaaattgcacatatttcatcattaaattcaatggaaatattctagagacaactttaacaatagaacaag

SEQ ID NO: 42841 - DNA, 548 bp, Glycine max
  unsure (1)..(548): unsure at all n locations
agctntagctattgcatacttaacatgtaactatcntgtatattaccttactcactcgtgtacttgatggagtttgagttattntcgatgatctcattctttcctttagccccaattgtgaacaatctctagtgccatgtgttagggtgtaatcaacattatataatatcttactatagatgaacataagagaaaagcatgagccaatagcaaacctgaaaggaactcttcttatcaactggactatcatatgacttcatatgaagcgtgatggagtcaaaataaggaattagggctgattctgcaagaaccatgagtccacatatcccaagtagtgcagcagcacatattgacctaagtaaactagatttcccaccaccgttcggtcccgtcaacagatataatgagtgcatatcaacatcattacacacaacaccttctgctatgtggaaccaatatggcaataaatcacttatcttcatccttgngtgttgccattgactcacatnctgaacatatattacatgtaccatcacatgatgaatcta

SEQ ID NO: 42842 - DNA, 336 bp, Glycine max
  unsure (1)..(336): unsure at all n locations
ctaagcttaaccgatatntaagctgttntgtcacctaataaatgataatatgaatttcaaccgatcatttgtgttgtaatctcgtttaatcactgttaaagtaaaatctaaccgatcgttcacgttgtaacctcggttaaacaaaaaaaagcacaataattataaaataatcaaaatatctttaaataaaataataaaaaataatctatcagacgttnttctttggaagtttccttgaatgaattgactaataaacaaagtgaaactgaaattctgataccaatgccagatgtcgtacaggatgtcacgacatcacgcttcagaacatgcagatta

SEQ ID NO: 42843 - DNA, 521 bp, Glycine max
  unsure (1)..(521): unsure at all n locations
atcttaagtcaccgcagctgcagcttttatccaggctcatcttggtggtgattctccttcttccatggcttattccctagaggatggcgcctcctctcacctcttctcctttgtctttcgctgcatctccatggtggaaaatcaccattaaaggacctcattgaagctcanagatccagcctccatagaagccctacaagcaagcttccatcaagtggtaatcagagcataagagcttcaagtaggtgctccttanacctccattaattnttntgctttaccttttcttccattggtgtttcttcattnttctccatgtatctcctcacatgtcttgccacataagatttcttatgttgagctaaattntattnttcttgtttctttgtctaactcattngttcatgagagtatgaaaattctttagcctattattnntgttgagtcaaatctttcatgttaattagtccttaacatgtncatgcanaanntctagagagtctttgaatgtaacctcttct

SEQ ID NO: 42844 - DNA, 367 bp, Glycine max
  unsure (1)..(367): unsure at all n locations
gcttatggtgaatcaagaatgattcaaagatgtgttgatgataactaaaatgataacaaaatatgattacaaaggtgatgacaaaaagctcaatggtcaatcaaaggatgagttcaagatgttcaagaaggaatcaagaacaattcaagactcaagaggaaaagttgaagaacacttcaagattcaagaagaaggatgaattcaagaatcaagattaaaggatcaagcttcaagattcaagactcaagaatcaagagaagacttaatcaagataagtatgaaaaggatttttcaaaaactaaatagcagatgaatttttcacaaaacatgtttaccaaagagtntttactctctagtaatcgattac

SEQ ID NO: 42845 - DNA, 467 bp, Glycine max
  unsure (1)..(467): unsure at all n locations
aagcacctgagctgcatgcttgatcnttggaggcatgaaaaaaatatgatgttcttaactacctntanatccaacggtggctcagatgaggaatcacaaagagaggaagaccacataggcttaagctaanaagtgccttttctcagctgtgtcaaaaattatttttacaagaattatgaacttcaagtctgccaaacagatgtgggattatctcagatcagaatatcacggctgtgaaagaaccaaaggcatgtaagtactctacttggacagagaattcgagatgcagagcatgagagagactgaaacaattataggctatgatgactgactattaggcatagcaaatagagtgaggcttcttgtgaaggactttcctgattatagaatagttgcaaanatccttgtcactataacccgagtgtatgaatcatagatatcagcattggaggagtctatagacctgt

SEQ ID NO: 42846 - DNA, 405 bp, Glycine max
  unsure (1)..(405): unsure at all n locations
tgtctgaagaatggtggtgttgtgggcattaaatgcacgtacttatttntgttgagaaaccattcttcatcgctagcgtgttgaacaccacaacaagaaatcgcttccttttgcatcagagcaggtctgtgcaacataactcttcttttaatgacaattgagaaatttcagagtttgacttcatttattcttcataggatttgacagatcctaagatattatctctgcaaaatagatctcacacacagaatattaaattaagtcttaaatgtcatacttaatgttgtatcagatcatgatttcatcttgctatcgtctgaatatcaaatatagacttcgtgaaacatattttgatagcgtataagacgtagttttaaccttcgttttgttacatctatcaaataa

SEQ ID NO: 42847 - DNA, 287 bp, Glycine max
attactttatacgtaatccctcactgcaactccatggtagaatatcactatagggagacacttcttgtatcttatagatccaaccttcctagatgctaatgcatctcgcgttgcgcttaaacaatactgacattgcacagcattgacagctacttactcttgaacttgaacagattctcttcgtggcttggcactcctcatataacttgccatagacgatactaactgaccatctcgctgtggcactagcatttactattataatgattgatgggacacatacctga

SEQ ID NO: 42848 - DNA, 339 bp, Glycine max
aatctgcaattagaaaatgatacttgccataattacaaatgaaaagggagtacccaatacagaaacatcatgcgggcttcaaaacataagtgcaagtgtgcaatatgaagtaacattcattggaagtctttcaagccacttcatcacaatgcagatactacttaataatgtatgccaacaaaattggtccgcataacagatactatttatatagccttacatagagtacatcgaggctgaactgtgtattaactgataccaatacaaatgaagagagattctgttgcagagatattggcatattgtatacaatatataaaccactttataaatatgaag

SEQ ID NO: 42849 - DNA, 504 bp, Glycine max
  unsure (1)..(504): unsure at all n locations
tcttaagtcaccgcggctgcagctagataatgtacggatcgatattctattatcatggctaagttctcatatacacagatatacatagacaaatcacaagcgcataggatcaaatatatatagatatatcttattaaagatattgccatcatgtacaatccaacaaaacataggcatcaattgtccacaagtttggatcatcaagaaccaacaataagtgcccagttgtggagataatgccaattcttgagaattaactacaattattctacgattgggcgagcttgactaagagaaagtctacatatatctactttgtaaaagtgagttgagtgtctaaactctaaaggggctgaactatgagtggaagttcatgacttggccttaaggagagcataatagaatctcacatattctatnggatgtctgtgtgacaaaaaatattctatcggatgctntttgataaaaacaaatatgctgatggagtatataaactacactcta

SEQ ID NO: 42850 - DNA, 317 bp, Glycine max
  unsure (1)..(317): unsure at all n locations
cacttggagtcccacaagggagaagtgctagtcctatgtgttgattaaaacaaatatatcaataataatgtgcttgcaaccagttntgagcccttaacctcaaactaaactatgcctcactntaaccaataagacatattagctatgcttgtaatgttgggagtttgcatttctcttattttttttatgagaactaatttgtataaatcattggaactgaatgaaaatagacaacattgttgttttgtcaaaaagtgtgagcattgtctctgctagagttcttccttgaaccaactgatcttatcaggaattcacac

SEQ ID NO: 42851 - DNA, 292 bp, Glycine max
ttagacgcgacttcagattgattcatactagatcggatccattgctcatacaccactaatccacaacttgtagagacttgtagtatggggtaatcgacattagagatgactcttctatcgataaggcatggagaagacgcgggacacaacacctcccttgaatggagctcttgtggtcacctggactatcatgattactttgatgatgcctgagaatcacgagttaagcgtgttccggctgattctgagagaaccatcttctcgaatctaccatgtaaggcaccagatccaa

SEQ ID NO: 42852 - DNA, 409 bp, Glycine max
  unsure (1)..(409): unsure at all n locations
ttcaccccaattctggtgtcctatgctaacttgctccattatctacttgatactgcaatggtagccataacccctgctaggtttcctcaaccttcattnttccgaggatacgacttgaacgcaatgtgtgcttatcatggaggagccccggngcattccattgagcattgtatgaccctgaagcgtaaggtgcaaagtctaattgatgccgggctggatgaaattgaggagtatcgcgtatgagtcctgacattgacaagcgacaccacacatggnngcaatttgaaagctggtgttaggtgtctctaatgactcatcaggatttcgaagtttatgccattattgtaaaagttacattgctaaataaaatggataaattcgatatctttgtcccttaatctctcacaaa

SEQ ID NO: 42853 - DNA, 278 bp, Glycine max
tgaaaaacaaccagaaacccacttctattgattcatactatcacggatcaattggtcatatactacgaaaccctatcttgaggagactacgagaaaagggaaaaagagaaaacagatgactcatataccaagaaggattgcacaagaccagggacagaacactcacctagaatgaggcacatgtggaagcaatgacttccaagattattttgatgatgccaaagaatcaagagttaagcgacgtccaaagaatcaggagtcaattagctgcaagaatc

SEQ ID NO: 42854 - DNA, 346 bp, Glycine max
  unsure (1)..(346): unsure at all n locations
cttgatgttctatgcctcttgtatgtggttgtccatgaggaatctccataggaaagacacttttagattcctgcaataagggttgaacactaggagaaatagaaatagtaaactcattagaattatgagtagaagatttactgtctttgcaatactgtaaattgagtggttcatgagcaggtaacactttcctcacttcactcgcctctgcnaaataattaaattttctctcatgtgtatcactctttttcctcggtgtatcactctttttcatattcctttgtggtgcctcactattttctttctcttgtctctctttctctcattctgatttggcatcacacac

SEQ ID NO: 42855 - DNA, 493 bp, Glycine max
atcttgagtcacctgcggcatgcaagcttctctcttttcactcagaagactcggattttctctgcatgtcaagtgctataccatcaaccgcacttgacaaagcacgttcttgatctaacctttgagaagaaccatcgtccaattcttgtgaaagtaatctcaagaactgtaacattaacatgcattgttctcattaagagatatattagaattataagctttaattactcatttggtctctatactaatctgcactttactattgtgaccctatatttaaaaattgtaagttttagtccttagacgagctaatttaaggtatctggaattttgattcctggtgtcagttatcttctaactccttaaacttcagtcgctgaaacaccactactaaattttttctagtagtggaaaacctccagatatgttctatcgtggaagagacttcagacagttctacaccacccaaaaaaatttgtgtggcttaacacat

SEQ ID NO: 42856 - DNA, 208 bp, Glycine max
tcagctgaaagttcgcacttcacacgttcctttctttctcttggatcttggcgagtgaccggagcggcgaaaagagtcatatcggaagcggaagaagcgtcacctcggggcggagatgagaaccggaatagaataagaagtgaagatgtcgtcgtcgtcgtcaagctggtggggtgggaggttgggcttccacatattgtaaagcacg

SEQ ID NO: 42857 - DNA, 481 bp, Glycine max
  unsure (1)..(481): unsure at all n locations
agcttatcaacagtcacagtagaacgatatggttagtctgcaactatatagaaacaaaaagaatactactagatgaaggtgtttctttcccatggcatagttataagtatttgaaaatacaaggcctactaattctaaaatagtggattntattagacagagctacactagtttcatgttttctaacaataattagaaaaacaaaataacgaaatatatagtcccctatctatcacacaaactaacgtttacagtcgtttgttaaacaaagatcacaaacaatcaaaggttgcaatggaaaaataccagacattcctgcctcaagacattgngaaatcacgtcaaccgatcgtgactntgggccaagtgtgccaacaatctttgtcatcgctggaaagaaactctgcaagagcatntcaacaaccacttcagtcataatccaaatggcaagtagtacatattctcaagaatagactaaaat

SEQ ID NO: 42858 - DNA, 300 bp, Glycine max
  unsure (1)..(300): unsure at all n locations
tgcgagangtatagcaaaacttatgtgtatgaaaccaatttgtgaaggagagaaaagcacttgagtgcacctaaaaatgagtgaaatacctaactcatgtggattgtatttttcttgcatcaataatggattgtcatgcttcttgctctccttgaattgcaaacctatgtatccttgctatggttccaaatgtagaacatcattatggataatcaaaacattgtttcattccttgtcgatgagtgttattggaacaaacatgtcttagatatattagaatgggatggatcttcactcatg

SEQ ID NO: 42859 - DNA, 463 bp, Glycine max
  unsure (1)..(463): unsure at all n locations
atcctcagagtcacctgcggctgcagctnacatgtctatgacacctaacaattatggaaatttgacttgacttggattattgctgaaccatagctacattactaatataatagtgaaatttggctctaaattggctcacaattcaattcaatcaagtgaaattgaatttttccctctaattttgagtgacacttacgcaataaatagaggccatgtgtgtgaattttttttaactttgatcatttgagaattacacttcaaagttcagacctcacttgaggcacaaaatttcgtgctccttctctccttctgcctccattcatcttctcctttcttcaagctcttatccatggtttgctatgagggngagcttctttctgactcatcttttccttgatgtggcatctacaatcatctttcttccttctccattccacatggagctacatcatgttctcccaat

SEQ ID NO: 42860 - DNA, 364 bp, Glycine max
  unsure (1)..(364): unsure at all n locations
ttcttcagaaaactaaaattaacttatgcattagttaaaatcaactnnttttcaaaaagttcattntaacttatgttaagttaattgtaggttatgggagacaatttatttcatcttctttctttgtattttcttttctcataagtgcttatggagaaacttatccaaacatggtcttaatgaatgacatttcgtttgattggaagacaatattagatgtacatgatctgattaaaaatgggtagttaataggatggtttgcaatcaatatcctctctctcttatatatgtatgtgtgtgtgtgtgtgtgtgtgtgtgtgtgttttgttggtttggatcttgaagaggtgtctacccactactc

SEQ ID NO: 42861 - DNA, 444 bp, Glycine max
  unsure (1)..(444): unsure at all n locations
agcttgacatgagtcatcaaaagattataaatatgtgactctggaatgaattttaagatgatatcaatcatctatctttcaatcttctctcanacatcattcaatatctttcaactctttctacaaaattttctgattctttttctttccatctttctaaaangttttgttcaaaactttctcttccaataaattntgttcaaaaacttgtgctattcatctttttcattctcttctccctttgccaaaagaacaaaggactaatcgcctgagaanttttttggttcttccctttcccttaagcaaaagatttcanaggactagccatctgagatatctnttgtttccccttacaaagattcaaaggactaaccgcctgagaattctttgtcccaacacattggagggtatatcctttgtggacaagtagagggtacatctact

SEQ ID NO: 42862 - DNA, 120 bp, Glycine max
  unsure (1)..(120): unsure at all n locations
actaagccttgaagagatagaagccagttatggttntcaaagtggatttcataaatgctctattattctgnatcttggtctnntntggactacatgttgataagggtatgtttctatcct

SEQ ID NO: 42863 - DNA, 524 bp, Glycine max
  unsure (1)..(524): unsure at all n locations
atctctgagtcacctgcggcatgcaagctttgtgaaattgccatgtgtggatgagttatacatacccattctgttttagggttcttgtgatgatgnttgtgatgtttatatgctgaaatcgccgatggaaaactgttagagatgaagggtagaactaacctatggttagaaagtgagaatgtgatgttatgagtggaaaaaaaagagtgaggctttgagggttggaaggttaagtctgaattctgtggtaaatggaggttaaagtgagttaatactagcttgaaatgtcatttaggacttgagagaaagcttggactgtgctatagagaataacaaatgatcaaagtgaataaagagccatctctagggcaaaatcgggtgttgaagagtcatattctgattcggtggaatttcacggtgtaattcagtttgagcatagttagtttgatggtatggacttgtagaggggatagtttgcttaagctacctcatctcaattcacttttagacctagaaacccattg

SEQ ID NO: 42864 - DNA, 474 bp, Glycine max
  unsure (1)..(474): unsure at all n locations
atctncaatctcactcaaactctaaagtgagcttgattattacacagtacatgtacaacttccaggtaattacttgtgagcaatatgtctaattatatattgattatacattcactagggatataaaatatgtgtgtttaatataataacagagcatnttttgtctattggaataattgtttctcctattaagacaaaacattatctaccaattttagatagtctaatagtgtaatgctgagtacaatttcattttttcagatataatatattctattgatgagatgaagaagctgcacttcactccttggtttgctcctgttcaatagaatgattttatgtcttcctcgtcccttaaatgntgacatctggacgtgctggataatagatgtgtagacgtagatagcacttgcatcttaataanacaaattgtatattattaatatgatacaagatgaatctcattaacatgtt

SEQ ID NO: 42865 - DNA, 422 bp, Glycine max
  unsure (1)..(422): unsure at all n locations
cttgtacctatgacctgggttgaaaaaagcactacctctatgttagagtggtgagagccaaggatnttccagggaaagatgttactggtggtgtggatccctatgttgaagagaagctnggaaactacatgggccttaccaagcancttgagaaaaagtccaatcctcactggaatcaggtttttgccttctctaaagaaaggattcaagcttttgttctggaggtagtgatcaaagacaaggatattgttgtggaagactntgcaaggagagtgatgtttgatattaatgaaatcccaaaactatatttcccttttcttatctagttntcattaacaaattcttctatatcttactaatcttagagaagaaaatatgtaggaagagcaaaattaacccctacatatgtagcagtatcacat

SEQ ID NO: 42866 - DNA, 268 bp, Glycine max
  unsure (1)..(268): unsure at all n locations
aatgtcaagaatgggcgtttaaatgcatatcaaaactntctgtgattggtttaaagatacaatctttgcagatgagaatgcttcagaaacattaagaagactagcagatgggcctaaaagaaatgttataacctggcaaggatacgacatatacaagtattcattttacacaaacgcacaagatgacaaaagtacaatgcagaacagcggtgtcaccctaagggctgaatctcaacactatgcaagtgtcaatgacgccaatccatgt

SEQ ID NO: 42867 - DNA, 394 bp, Glycine max
  unsure (1)..(394): unsure at all n locations
ctgcagctgcccactcgcaggcagctggtttttctccgaagcacccctttagaggacatcctaaaggcccagtaggcctgtgtgctatttgcacccctctgtgtactaaatacataccnctgcctctttatgcttattctttgttcgtaacgttacggaactttacgaattcctgaacgatacttgttttccttccgtaatggtacggaaccttacggattacgaaatcacccctttcttgcttacggaatgttacggaacctcacgaactgtgtaacaatgcgtccttgtgatttccggcatgttacggaacttcacggatcgtgcatcaatgctctcttttacttccggctataatggaacttccggattgtgcacaatgggtgcaagtatc

SEQ ID NO: 42868 - DNA, 322 bp, Glycine max
  unsure (1)..(322): unsure at all n locations
ctaagctgccttacatctagcgatcacaaagagatcatatntctcgaatgttgtgttatcctcatcacgatctcatcatgttccacatgatctcaccattaccaaaacgggaaagggctctaccctctcccttcgtactcacaaaccaacgtgatcttaccaacatcaaactcaattcatgaaaacatgtgcatcatgcatcacaacaacacattactatccaaacaatgccttaaataattctcatccattccatgaattggattcatgccctacccactggttatcttatatttttatctttccctctctcaatattatg

SEQ ID NO: 42869 - DNA, 73 bp, Glycine max
  unsure (1)..(73): unsure at all n locations
gctgtgngatatggngtacccatcacatgcggtactatgtggctgtctggcgatggtgaacaacnaagttttt

SEQ ID NO: 42870 - DNA, 377 bp, Glycine max
tcaagatatcataaattctcatttcatatggaatgagtgaacgttctatcttgtatatattctatcttgtatcttgatttcagaaattaaattgtcatcatcaaaaagggggagattgtagaagcaaagactttgatgttttgatgatgtcaaaggatcatgtgcttctcaagtttaattcaagaggatcatgcgcttctcaagtttaattcaagacaagaattcaagaaatttgtgatatatgatcaagataatctctagagatttatgaagggaattccaagttgaaacagcaagagggttggccaatgaatttcagctaaaatgtttctacaagagaattactctctggtaatctattaccagaggatgtaatc

SEQ ID NO: 42871 - DNA, 347 bp, Glycine max
  unsure (1)..(347): unsure at all n locations
gctgtcccaaaagtcgctaanaaggagttgaaaagttcaatatctcatgttttattaccaagtaaatggatcattnttaaggtccaacgctntaaaatgatcaccttccaagtaaaaagaatcgcttgattcacccttaagaaagaactacgtacgtctgatttcctcttcgatggagggtacgaaggagcaagagcctcgctnttgtcgacctcaaaaataaaaaaggaaacaaaagttaagataacacaatttcacaattctaaaaaataggctgttgtcctttgagacaaacgtgaggggtgctaataccttcctcaaacgtaaatacaactcccgaacttaga

SEQ ID NO: 42872 - DNA, 404 bp, Glycine max
agcttccctacttcagatgggatgtctctcttattatgaattctactcagatctagatggagaatgcttgttagcacccctacttcagaagggatttctccactaagagaatataggcttacatctagatgctgtaatcttggtagcttccctagtggagatagtattgctccatcaatagaatcccatctaagatcaagatactccaactttgagagaatctccaattcataatgaattctcccaccaaactctcgaccatgatagatcaagatatattaagttggagaacgatcccataatatttggcatgtaactcccttcaatacattattgctaagagtcaatatacattgtgtgcagtcgatcatgaaaaatattgttagcatgacaacgttgtggta

SEQ ID NO: 42873 - DNA, 347 bp, Glycine max
aacatgatatagctattgctgttaatttacaagacaaatgttttgttatcacgttctttaattgatgtgctgggctaattttaacccatcaaagagttaaagcatgaagacacattattttttcatattgaagtctatattttcatcatggagaaattaaaaacatatgatatgttattcatgaaattaatttattacatcaaatacatttcatactctatatggctaattataaaatatattataatatatattatatatattaatttaatatttttatttttattaattatattttattatataattttacacactcagtcgctctttcttaagaaataaatgtt

SEQ ID NO: 42874 - DNA, 206 bp, Glycine max
cgaaccagacggttttgcatataaaccgtagtcagtacctctagagcaatgtgtgacaatcctaaacccgactcgccagcccgaacataaagaatatatcaccctcgaaaatatatgtctctctcggcaatcgatgacctgctaaagctttaaggaccttgaccacctacttcgacatcgcttgctcaacaccatcagatatgatg

SEQ ID NO: 42875 - DNA, 273 bp, Glycine max
  unsure (1)..(273): unsure at all n locations
gcatcttntacattcaaaactggaaacttagattcctagccatgagtcatccttctggcactgtagtttagcttctacaaactacccacacactcacaatgtgcacaatttgtttcgcaagctaaattccacaaaatcatccgcaaatgccattgaggcatttcaccgaacacttggtgggcatatgtttaagcatgaaaatcaacggaatgagggcaatgtggcttgccccattatctcaaaatgcaccctacgcctaatgccataccctac

SEQ ID NO: 42876 - DNA, 392 bp, Glycine max
gagcttcagctgtatccttatgccgtaaccatggtgctcccactatctgtaacacccttcacccatggcagcatataatgacaaaaccacctatacataacaaccccaacacccccacatgaaggctaacagcccggtacatcaacgagcactctctgcaatacagtggtagatctcgacagataacattggacgggccgcataattagacctaaaatatataaattagagtttggctgtcatacactaatgacatacaatagtctcactctatcattcaatatcagatgatatgacttttaagtttagtatagtctaagttcacataagtatcgtctagtgattaatggacaacgtaatactattctacatagtacacaatcaattttaat

SEQ ID NO: 42877 - DNA, 533 bp, Glycine max
  unsure (1)..(533): unsure at all n locations
aggaaggaaanattgttctctgagtccatgcattacctgcactatgaatactcaagcttggctgtggggcttctatggaggctggatctttgagcttcaatgtgtcctttaatggngattntccaccatggagatgcagcggaagacaaaggagaagaggtgagaggaggcaccatccactagggaataagccatggaagaaggagcttcaccaccaagatgagccttggataagaagcttggagaggatgcttcattgaaggaaaagaatgaggtaaagaaaagagagaggggagacgaaattgaaggattaaaaaggtagagaggggaacttgaagtgtgttcacaaactctatccttaaagtccaacaggtgcacacatgctttatttggactggagctactgagagcttcttagacactcctgagagctttttagacactcttgagacctgctctggcccacctctctactctatctctctctgcatatactgaaatacaaaaagtcctctcaatctctanatgcctga

SEQ ID NO: 42878 - DNA, 399 bp, Glycine max
  unsure (1)..(399): unsure at all n locations
agctngagatgaggaagtgttgaagggtgagacttcctgtctttattcgttgaccacagagtggtacctgcagatatgtcgcgggggtcaggagaccttggggacgtcaggtggggtgctattgcccaaaaccaagcttgaccaatcccgacccaacccgggcatagtcagtcagtgagaacctgtgatgtacctaaacaggcgagctcctggcagtcaacagatgaaaggaacaaagaccacaaagcaaggaggcttgtggtggctggccagctgtgaactntgattgacatgtgggttatggcctctggtaatcgattaccaagggtgggtaatcaattacaaggcttaaaaaagaagacaggaggctaaaatggtctctgngtaatcgataccacg

SEQ ID NO: 42879 - DNA, 381 bp, Glycine max
  unsure (1)..(381): unsure at all n locations
taagctgcctaataacctgaaatngagagaaaatgattatgaaacactcaaaatggaagtactaagtatttattacctatacttaacaaaaaatacttataacactacaaaataaccataaattggaagagtttgatacaatttacataagctntatacacaaaagttagtcgtattcaccaactaacagatcccgagggcacacacctcatactcgcccatgtggttggtgcagtcaaaacccagtcaaaacgcaaggtgcttccctttatcgctttctgggtgacatagaaaatgtcaaattcngatagcaacacctgccatcgagcgatccatcccgtgagggcaggcttctcgaagatatacttaatcggatccatc

SEQ ID NO: 42880 - DNA, 439 bp, Glycine max
  unsure (1)..(439): unsure at all n locations
agctnngatgcctcttgtataacctttttagttttgtgatctttccaatatcttctagcatcaagtcaagacaatgtgcaacacatggagtccaaaatattnttggtctcgtgacttgtaaaattttacctataaagaccaaaatcaataaacttgtatgagtagtgtaacaatctataactataaaataaaaaacttcattaagcatgattgaattctcactcactaacacataattacttccattgtccgtcaccacttgaataacattcttttctccaatctcctcaacaaagctatcttagagctcaaagatctcttgaccagtcttcatgtattcagaagcatccacactcctcacaaactgtgttcccaatgaacaatttaccaaaaanataatctaaattctattcttcctattcatccaaccatctgacat

SEQ ID NO: 42881 - DNA, 250 bp, Glycine max
cccaggagaacgagttctagattgagtcaaccactctagaatcaagagacgtttgatttcgagattcaacaacagatgaattctagttccaagagaggaaatcaagaggacttcacctggagctatcgaacagagtcttcaaagaaacacacatagcacagtcttgttgttcagaagagtcttctcaaaactttctaagttacccgagttttgactctctggtaatcgattaccagtggcggagtctgat

SEQ ID NO: 42882 - DNA, 477 bp, Glycine max
  unsure (1)..(477): unsure at all n locations
agcttcagaccaaagcaactcagaagttaagtatctaatacccctcaatttagtggaatttcaaggtttgagaagtganaatgagaatggnngtaatttggagcaaactctcatctcacacaagtctataacattaatctaaactcgctcaaactggttgtacgacgaaactctactgaatcaaaatttgactcctcaacacccaatttaccctagaaatggctcttgccctcactttggtcattcattttcctcctttgtacagcccaaactttcccacagtcctaaatgaaatctcaaactaggattaactcactntaacctccaattaccactaaatccagatgtggctnttcaatccttaaagcatcacatttttccactcatatcactacattctcactgtttaaccctanggtaattctacccttcatccctatcagttgtccatcagccatttcagcatacaagcatcac

SEQ ID NO: 42883 - DNA, 364 bp, Glycine max
  unsure (1)..(364): unsure at all n locations
gaggatctataacaatgcctataggttggacctcctagaagagtatggagtcagcaccacttttaacatttctgatttaattccttttgtangtagagttgatattgagaggaggaactaacaaanttgaggtcaaatcctcttcaaggngaaggggatgatgcaatcctccctaggaagggaccagtcactagagccatgagcaagaggattgggctagagttgctgaagaaggccctanggttctcgtgaacctcanggtagatttctgagcccatgggccaaggttgggtccaattatctttgtatatattagactangatgtcattatattttgtccttgtctttanggctccataatgt

SEQ ID NO: 42884 - DNA, 477 bp, Glycine max
  unsure (1)..(477): unsure at all n locations
agctntntggagtagatacatgggaccaactcattttatttcanaaaggaagtcgtatctagtcaaggtctgagagaccatacaagtttcctaacgatttctaattatgtgggccattaagtctatcatatgctgacaatagccgagaagcccatgaatctcttcgggggcggagtaagtgtctgccatcgccttggccttggctaacaatcggtgaagttcttgactcccgttcaaggtaagagcaaaccgatccatccacatggttgcctcttggtgtaaagagtcgatcacccttcctctagcctctttntccgcgtatccttgagcatattcgtccgcaatcctatgctcgtgggccgcggctagacctaactcttcttggtactnggcgatgatagctagcatgttggtctccgtctcgcataaacgctgagacaagcttcttttggacctngaacaagcaactaactcctc

SEQ ID NO: 42885 - DNA, 387 bp, Glycine max
  unsure (1)..(387): unsure at all n locations
gtgcgggtctgggagacgaaggtcaagtggtcgcgatatgtgtatatgatgttccaagaactctggatttggtccgaccatgccctcctgatttccagctgggaaattggcgggtggaggaacgccccggcatttacacaacaagcataatgtaaacctttacggttttaaaagctctatagttgggcctaggctttagagttttcattntgttaaggctntgtgtcttttgtctttgaatntataatacaaagatctttcttcatctgttcctggtttctacccattctcattcatttgcatgtntacttctttttctgaaacggcagatccgatgacgagtccnccgaaggtactaatacctgngacccgtctatcaatttcgag

SEQ ID NO: 42886 - DNA, 341 bp, Glycine max
  unsure (1)..(341): unsure at all n locations
tcgggtatttctgcctgtcagcgtgactcanaagtcaggatgacagatcctctgagcgcggaagattatgataatctccgcgtgtgaacgggcttgtctggcgcgaatgacgaagggcgcatgagacgacgtttatctctgcgtgctatcaagcttttcgtttacagatagcataaagtgttatacggataaccactcgggtatttccgcccgtcagcgggactcaaaagtcagtatgacagatcttgtgagcactgaagatgacgtagatctcctcgtgtcatcggagctcgtctgccgcgattgacgaatggcgcaagagactacgttattctctgcgt

SEQ ID NO: 42887 - DNA, 405 bp, Glycine max
  unsure (1)..(405): unsure at all n locations
atagtaaaacactgttaatgtgtctactatcactgttatcatctccctttccgtcatttggggcaccgcttgngctaccatatccttccatctttgggcatattctttgaaggattcatgcccctttntatccatgttctgtagttgcatcctatccggagccacatcaaaattgtattaataatgcctaacaaaggcaaccattangtccttccaataatggactcgggaaggttccaagttagtataccgggtggcagctgccccagtaagactntcttggaggaaatgtatcaacagtttctcatcttttgatgcccncatcttccgaanatatatctttagatggttcttggggaaagtagtttccttgtacttgtcaaagtccgacatcttgaacttggg

SEQ ID NO: 42888 - DNA, 311 bp, Glycine max
  unsure (1)..(311): unsure at all n locations
tcactaatcactaatgtcacgttacattctaagttgagtagtgattaacactttgatttattggattgattatagaactannattttttaatctcagattcaatcattaaattcagcaactcttaaaagatacttaaatggatcttacatatttgcataacttatttttactttttnttttcttttcaatttaagcacctcataagcacttatattttctaactaacacctctccttggacaaaaactcagatccttatattntattaataaattatttaaaagatgaacatccaatcactaaaacatata

SEQ ID NO: 42889 - DNA, 374 bp, Glycine max
tctacatactatattacaactagagttactgtactcggtgcactacatgtaactctaaagactaagagcatcgtgactagatttgaattgcgtgtgtatatgtacgccaataaacacgcctgaaatgtgatgcagattatagctatgagaggatgcgcctgtccggcctactctatgtctcagtatctaacagataattacttcatagttcgccacatatagattaacattctggcctacgatccgctgcagtggcgattactcgatccttatgctgtatagaacaatgcctcgaagacttcctcacttataacagagtcttataacattgacccgaagttgatcatctcattttcaattagacacatccacat

SEQ ID NO: 42890 - DNA, 321 bp, Glycine max
  unsure (1)..(321): unsure at all n locations
attataatgttcctcttataataatattntgacaaaactaactttaaagggagctcgaaacttgaaaccataactgaagctattaaattataaatatntatttattaaaaatacgttntaaaaatataacttcaaataacacctcaaaaatactacacactattaaaaaaaactaatttattaaacaataaaataagtttttatctaatacgggagttaattaaaagtatataatagaattaattaaatttttagtttttcaactgcttcaaatgccaacttttaattcctccanatttgataatgtttagttctctatta

SEQ ID NO: 42891 - DNA, 492 bp, Glycine max
  unsure (1)..(492): unsure at all n locations
cgtactgcacagttgtgaaattccctgtggttatattggtgtctcttaatttgatcacctttgtactagatntcataattgttgtaaggtgtttggcttggttgggcaccacttgtgctaaattaagtgttattaataaatcatttgccttttaaaaaaaaattaaacttcaccaggaattgaaatcatgcaagtcggtgacaattaaagcatctaaaatatcaatggcgaaaatatttgtactcccttgttttcaaatataaggaaaaaatatattnttttaatctcaaatataaaaaataactaatttcacattatntaatattactatatctctcgaaatatcttgatntaattgatgttctagtttcaataactatnttttatcattatactaaatttcaatgaaagataaattaaanaaatattntaatttaaataatacaataattaactttnttaatactatatcattttttctatatttgaaat

SEQ ID NO: 42892 - DNA, 352 bp, Glycine max
cacattcatttgccgccactgaaggtctatacgaacaactaatgccgagagtatacgaagagaatctgtcttatatactggagaacaaggctctgtgaatctattccatactttggagtgaatgcacttacaacaaggtcttgacttgcatctctcaatggtgcctaatgaatccgttgtgggcataaagacccatatacatccaatggtcttcgtcacatatgcaactctacagagcccaaactatgtactctggatgaactcatctcatccttctggatcataccataaattgactcttacgaccacggttgataaagttcagatcatttcagtccatgataagcagatc

SEQ ID NO: 42893 - DNA, 385 bp, Glycine max
  unsure (1)..(385): unsure at all n locations
aagagctacggtgaaaaataggagatttaccgaacttatcaggaggtgcaacaactgtccctttaagcaacaatgacagctgcataatagaaaatatgcaagtgagggaggaaaatataggagtacatcttcaaggttcaagcactgtgtacgcattcaaacagctganagaaattaattaaaagcatgcatatgcaagtccatacagaataagacagacaaacagttccactccacaagctaaacatccncagattaaatgccccttcccttgtgtggaacttctaatatccaccaacacagtaaattacccaataaagaagggtcagataccgagaataaaaatgaatgtatgacaaagaaaccttggtcaagaacatatcat

SEQ ID NO: 42894 - DNA, 215 bp, Glycine max
  unsure (1)..(215): unsure at all n locations
tgttttgaagctcactacaagccttaagtgcaagaccatgatattaccatatgctttatgaaatctggagctttgggatgtcttggagatagtgtggagggtttatgtttcattggacaacttgatntgttggctatgctccatgatgtagtttgggccacacttgatgtacatcgtatattggtcaaatggtggacatgctgaataatatgttg

SEQ ID NO: 42895 - DNA, 390 bp, Glycine max
  unsure (1)..(390): unsure at all n locations
ctattcaaaccttttccagactatccatacaaacatcaaaagaggatccatatacagtgaaatcatccataaacacctctatgcaattttctaaaaaatcactgaaaatactgatcattcaccgctggaaggtaccangggcattgcacaggccgaaaggcatcctcctataggcaaaagtgccgaaggggtgtggttttttcctgatcctgaggagcaatagtgatttgcatataaccagaanaaccatcaaggaaacaatagtgagatttacctgccaggcgtttaagcatctgttaaatgaatggcaggggaaaatgtgtccttttggtaacctggttcagcctcctatagtcgatgcagactctccaactgttctgcacccgagta

SEQ ID NO: 42896 - DNA, 394 bp, Glycine max
  unsure (1)..(394): unsure at all n locations
gcgtaacccaccatctcttcttttagagtatcgataatgcgtctaccatcacgattatcgtctccctttccatcattggggagaccacttgtgccgccagatccctccatcttgtgggcgtgttctgtgaaagatccgtccccctgtttgcgaatgttctggtagtgcattctttgcccaaccatatcaaaattgtactaatactgcctaacaaaggcaaccattatgtccttcccagaatggactcggaaaggttccattgtatgtgctccaagtaacagctaccccagtaagactgtcatggaaggaatgtatctacacttccttatctttcgcgtatttccgcatcttctgacaatacatctntagatggttcttgagacaagttgttccc

SEQ ID NO: 42897 - DNA, 335 bp, Glycine max
  unsure (1)..(335): unsure at all n locations
ctgacatctcaaacaaacaaatcaaacgtaacaagacaattatagttgctgtttgaatacctcacccactcaagtgtatcacacaattatggattatcttcaatgaaaacactcttgccttataccactctaattccccttgagttcttaggcaatgcaagagattatggccacaacaaagaacaattcaccaatatgtgtaaggtaaggctagagagacaaggaanaggttaaccaagaaataggctaacaatatatttaggcacaattgaaggaaataaaattcagaatctaggaattcaagtaacaatccttcatacaaccaatatattacc

SEQ ID NO: 42898 - DNA, 320 bp, Glycine max
  unsure (1)..(320): unsure at all n locations
atgtcttattgagtcccgtcatatatcgagacgctcgaaattgaatgttgaagctctgagccaattcaaacgacaataactatttactcggatgtctgattgagtcccataatatatcgagacgctctaaattgaatgttgaagctctcagctaattcaaacgacaatagacttttactcggatgtctgattgagtcccgtaatatatcgagacactcgaaattgaatgttgaagctctgagccaattcaaacgacaataacgttttactcggatgtctgatngagtcccgtaatatatcgagacgctcgaaattgaatg

SEQ ID NO: 42899 - DNA, 448 bp, Glycine max
  unsure (1)..(448): unsure at all n locations
tcttaagtcacctgcggcatgcaagctagtaaggttaaagtctcacgatagtcacgtgctcatgcaacaattgttagccgtggctatacgagacatcttgccaaacaaagtctggttaatgataactcgcctagtgcttttcttccatgctatatgtagcacattcattgatccagtcatgtttgatgagatggaaaatgaggtcgcaattatactgcgccagttggagatgtatttttcccctgctttttntgacatcatgattcacttgattgtgcatctggtcagagaaatcaaatgttgtggtcctgtttatctacggtggatgtacccggtngaacgatacatgaagatcttagaaaggtatacaaagaatctatatcgtccagaagcatctattggtgagaggtacattgcagaagaagccaatgtaatttgttcataatac

SEQ ID NO: 42900 - DNA, 306 bp, Glycine max
  unsure (1)..(306): unsure at all n locations
tttgaactacatcatggcctataccaccattttgaatggtttgcctcanagaactggttgttcttgttcatttgctaatcctacttgaggatttccaagatcatttcaattattctggacttattgttcatttattgaaatttcatgaattattggcctattggtaggttgatttctaggaatagccaaaatatctccaattcgagttaaaatcccattcatttgttgataactntcattagtagatctcaacatgggattcaaaattgatgtcatataatcggtcaaattattgactatttcatg

SEQ ID NO: 42901 - DNA, 539 bp, Glycine max
  unsure (1)..(539): unsure at all n locations
agctntgacaacactntcaagccttggatcacagtctcacttactatacgtatgctgaatcgctntaggtatttcaaattcgcaagatctgatatttctgcagggagtcttgctcgaactgcccaagacaaaacccttcagaacccgaagccgaatcaggttctcaatacccnttggcattctgtccaataaatagcattgagacaaatccaaatgtatgagatatctcaatggtgaaatatcactaggtagtgtttctagattgtgacaggccttgagatctagagcttctaggttctcnaacttgaaaatgaagggtggtagctcaaatattcttcatatcccaccaaggctaagatgcctcanattcttntgatccctatactccttcacgaattcttcacactcctcttcaatatgatgttttggtgaatcttgcagccaacgaccacgatgaagcatctnctaatgcttcattttgtcatccatccggtccaaattaagatactccaccacatttagatgaaacctactcatac

SEQ ID NO: 42902 - DNA, 452 bp, Glycine max
  unsure (1)..(452): unsure at all n locations
aatggaagagaggttcaataaagcttccttaacacgaagaataatagattacctaacagtatcccattgngataaaaaaaataggggattcaaatcgtctggccctagagctttaagggctctgatgctgaagacaaccgatttactctcctcattaagggggtcattttgaatgagagcaagatcttcttttgagaagttggggaaagctccaccatacaaccagacatagattggatcctcatccttaaacaaacctgaaaagaaatccttaatgtttctcttaatagttggtaagtcatgcaactcagacccatcttccaaaactgagaaatngaatcttgtttctcttcttcctctaagtggttgctacgtggtaaaacttggaaaactcatgccctntaatactagaaagatcttcatggntagggatattctagtactcttgtcat

SEQ ID NO: 42903 - DNA, 438 bp, Glycine max
  unsure (1)..(438): unsure at all n locations
ggacttcactccctgtgccactctggaagatntaagccaagcccctactttcgaggggcaactccccccttatgacgactatcccgggcaagacgatgaggaaggagatacccatcttggccgcctgctccacctcanagatccgtccccacatgaactaccccaaccgaacatagtccgccatatcccggcctcaccctcacccgtaaaagaatttgttcccttcgcggaagataagggaaagattgaggcgctngaagagaggttaagagcagtcgagggccttggcaattacccattctcggacttagcagatntatgtctcgtgcccaatatcgtcattcctcccaagttcaaagtaccggactntgataagtacaaagggacgacatgtccgaagggcatcttcggatgattgcgaagatggggcgattctac

SEQ ID NO: 42904 - DNA, 488 bp, Glycine max
atctctaagtcacctgcggcatgcaagcttataagaacataattgctctaatcatttctatatatgcatgtgaatcaggacgcatcaacaagaatcaagccaaggctattgagcaagcaatcaatggggcaaaacacaccaaatgattataatgatggatggctcatattctcacaaaggtaaaatcatcactgtcaaattgagctgtcataactatcatgacatgtagagaagaatcaaggatttcaagtcacaaaatgtcaagaacttttattctcaaaacaattacccatttcttgaacatatcctataattcaaagaataacatgcaaagtcgtacgtgcacacaaaattgacccagaatattaaactgagaatccgacgacactaacaacattaacaaattatcacaactaacaaattaacaaaacctactaaactagcagaaccaaagaacactcctctccctccctatacttaaacaacac

SEQ ID NO: 42905 - DNA, 452 bp, Glycine max
  unsure (1)..(452): unsure at all n locations
tgcctcaatcatntccaaatatgcatgtgatattatgaagcatcaacaagaatcaagccaaggctattgtgcaagcaatcaatggggcaaaacacaccaaatgattatgatgatggatggctcanattctcacaaaggtaaactcatcactttcaaattgagctttcaaaactatcatgacatgtagaggagaatcaaggatttcaagtcacaaaatgtcaagaacttttattttcaaaacaattacccatttcttgagcatatcctataattcaaagaagaacatgcaaagtcgtacatgcacacaaaatngacccaaaatattaaactaaaaatccgacgaaactaacaacattaacaaattaacacaactaacaaattaacaaaaccaacaaaactagcataaccaaataacactcccccacatacttaaacaacacattgtcctcaat

SEQ ID NO: 42906 - DNA, 268 bp, Glycine max
  unsure (1)..(268): unsure at all n locations
ccttctggaggaatcttctggagggcccaagtgggcctggttgctatttgcacccncatttttactaaatacaccctctcccttcatttggtgattcttttttcgtaaagttacggcaacttacgaatttcgtaacgatacttgttttctttccgtaatgttgcggaaccttgtggattacataatcatcccctttttgacttacggaatgttacgaaacctcactaattgtgcaacgatgcttgcatttgatttctggtgtgtcacg

SEQ ID NO: 42907 - DNA, 324 bp, Glycine max
tgagatactgggcatgctgacttttgtgctcctagatgtattgatatcctgagtgatacctccagcttgagccttgcgtgaagttacttacttggttgaatcctcgagggccttgattaattccagatgatccttgattgaatccagacagtcctccttggatagaaccttagagatcataggtgatatggatgcccatgtactatagcttcgcctgtagaggtgttacttgaccttgtacatctgtacacatctcgtgtattcctccagatgtatggcgtccgcctacctgcataactaatagtgagacagagttactgcttg

SEQ ID NO: 42908 - DNA, 386 bp, Glycine max
  unsure (1)..(386): unsure at all n locations
tgtcttgaagtctaaagccgatgaaggacatctgttaatcacataggctattgtgtttgcagcttctccccaaaaggtctttggcagtccagcacttagcggcatgcacctcactctttccaaaatggtcatattcattctttctactaatccattctgctatggtgtgtgagggactattatgtgccttttgatacctgattntctgcaaaactcattgaattgctctgaaacaaactccatgccattttcagtccttaaaactnttagttntgtaccaagttgatttccaataagagtatgtcactctctgaatttttaaaagcttctaatttgtgtttcaaacatacagccatactcttcatgagaatcatctatgatgatga

SEQ ID NO: 42909 - DNA, 346 bp, Glycine max
  unsure (1)..(346): unsure at all n locations
gattatacaaaggtgttacaaagaacctaatgattcctaattatatgggccatcaaatctatcatgtgctgacaataattgattagcccatgaatctcctcggnggcagtacacacttcggccatagcttttgctatggctaacagatgcgggaggtcttgacttccattcaaggtcaaggcgaacctatccatccacatagtcgcttcttgatgcaacgcatcaatcaccctccctcttgcttctttttcgacatacacttgtgcaaaatcctccactagctnttgttcatgggccatggactggttcaattcttccttgtattgccctatgatagctaacatgc

SEQ ID NO: 42910 - DNA, 409 bp, Glycine max
caagcatgcaagcgttgcatgatatggtgtacccagcagatagttgttctacgtggcggtcgggcgattgagcacaagcattatatgcacattcacgacgctctcataagctcacgatcctctgttgcccacctccaggtgagctcacgtactcccgcgtggcccatatcctcgtatgtgtaagcaccgaggtcccatcaagccttcgaagcttccacagcatgcaagcaaaacaacattcacacaggacaagctatcacagccaagcagtacagagctaaggctgaatactctgccaaaacaccaaccataaatcacagctgattccactcagagaccccagaaacaatttgcttcgatccatgacgataacctggggatcgacttcataattaactggaagactata

SEQ ID NO: 42911 - DNA, 447 bp, Glycine max
  unsure (1)..(447): unsure at all n locations
cttctccattccattctgcgtggaaatagtctccttcggcgtaggaatgggtgcagttctatcccagaagaaccacacaatcgccttcttcagcaaacccttctgttctaagctccttcgtgcttccacttatgtcagggagcttgtcgccattaccaccgcctttaaaaagtggagacaatacttattaggcaatcctttcactattctcacagaccaccgtagcctcaaagaattaataggtcaggccattcaaacacctgaacagcaatgctacctggcacgattactatgctatgactatacaattcactatcgtgtcggaagatccaatgcagcagtcgatgccctctcacggtagccaaaagaagccccacttggcaatatttcttctaccattcatacttncttttttttgaagaactaaacaacaactctcacaatccc

SEQ ID NO: 42912 - DNA, 338 bp, Glycine max
  unsure (1)..(338): unsure at all n locations
ttaagcaattcanatggtcataactntcactcggaggtcgtatttatgcgcataatatatcgagacgctcgaaattgaacaatggaagctcttgagcaattcaaatggtcataacttttcacatggaggttggtttatgcgcataatatatctagacgctcgaaattgaacaatggaagctcttgagcaattcaaatggtcataacttgtcactcggaggtgggattcaggcgcataatatatcgagacgctcgaaattgaacagtggaagctcttgagcaattcaaatggtcattacttttcactcggaggtccgattcaggcacataatatattga

SEQ ID NO: 42913 - DNA, 442 bp, Glycine max
  unsure (1)..(442): unsure at all n locations
agcttgagccaatatcctgactcaccatattctcttgacccaggtgagaatgccaatccttaccctcggaagcanaaaaaaagatgagaaggaaaatttccaatcaaaggagaaaggagaaggaatatttccaatcaaaggaaaggaaattcccaatcaaagagtgggagaaagcaaaaagaagagaaagaacattcccaatcaaagaatgggagaaagaaaaaaagagaagtaaaaaagaagaaagctcctggtcaaagaaaccagataagatgtgccgagaggtccttggactatacgatatctgaacaatacagaattgtcaccatatgaacaaaagaaagaagaggagaccatgacctanaagtggtcttctccctttagtaccaaccaaaatcctgtgcgctagcgacttttttcgcccccactanacanaaacaga

SEQ ID NO: 42914 - DNA, 511 bp, Glycine max
  unsure (1)..(511): unsure at all n locations
tttgagcgtctggatatattacgggactcattcatacatccgagtaaaaggttattgtcgtttgaattggctcatangttgaacattcaatttcgagcgtctagatatattacgggactcaattagacatccgagtaaaaagtcattgtcctttgaattggatcagaggttcaacattcaatttcgagcgtctcgatatattacgggactcaaccagacatccgagtaaaacgttattgtcgtttgaatntgctcagaggttcaaaattcaatttcgagcgtcccgatatattacgtcacggaatcggacatccgagtagaaagttattgtcgtttgaattggctcagaggttcaacattcaatttcgagcgtctcgatatattaagggactcaatcagacatccgagtaaaaagttattgtcattcgaatatgctcaaagcttaaaccattcaattcgagcgtctcgatatattatgggactcaatcagacatccgagtanaaaagtatt

SEQ ID NO: 42915 - DNA, 389 bp, Glycine max
gctggccgcccagctcgcccaggcgagcattgttgcttcctccagaagcaacagccttctggaggaatcttctggacggcccaagtgggcctgtgtgctatttacaccctccttattactaaatgcaccccccttttctatttatttgtaattcgttttccgtaacgatacgaaactttacgaatttcgtaacaatacttattttccttccgcaaggttacgaatacttacggattatgtatttactctctgttagctttcgaagagagtacggaaacttacggattgcgcaaaaacacctcttttcgacttccgccacattactgaatttcacggatcgcgcaagcctgcttcctatagatgtctgagacgtcttcggacttcattta

SEQ ID NO: 42916 - DNA, 437 bp, Glycine max
  unsure (1)..(437): unsure at all n locations
cttgatatgcatgttggtagcaatgggaacaaacaagaatcaatgagggatggtgaagagatgtaacaggttgaactaccagtggttgcaacattacccaggcaaaataacaaggatgtggactatgtgtgtgtccaaggtaaacgatattattattggacgtatntgaataataggaaaaaaaataaagaacgtggaattgtgttttattttttgatgtggaaagaatgacaacttggatcgtatgtctgatgattaggattttaaaaaaatcatttaagtaaaaaaattgcattttaaataagatttttatataagaaatagatagattacttcttaacaacagagactacttatttagtagaataattagagaacatccaaataaacatactatntattaaaatgtttaaataattaacaatggtcttatcatg

SEQ ID NO: 42917 - DNA, 459 bp, Glycine max
  unsure (1)..(459): unsure at all n locations
agcttcttttggaccttgaacaggcaactaacttctctttcaanaccatgctatgtgctcgcgactggtccctttcttcctttcgcaacttgagttcactattgctaccccatagagctccgcgaaatttgttccggccatactcttccttgcgagccctcttggtctcttgttcaagggctcttgcggtaattgcattctcttcccgtaacccggcacactccttccgaacgtgtgtagcggccaacttgaacttctccttggcaagttttgcctttcctaactcgcttttgagagcttggacttcttcgtcctcttccggtgcttcaaaactctctttgctgacgactnttaacttggcgagccaatctaaacctcgtatatgaactttcagccattcgtggtacccaccaatgatgccattacgaatgcctctaagctcttgatcattctttaacg

SEQ ID NO: 42918 - DNA, 337 bp, Glycine max
  unsure (1)..(337): unsure at all n locations
agatgaggaagtgttgaagggtgaaactttctgctnttattgttgaccacagagtggtacctggagatatgtcgcgggggtcaggagaccttgnggacgtcaggtggggtgctattgcccaaaaccaagcttgaccaatcccgacccaacccgggcatagtcggtcagtgagaacatgtgacgtacctaagcaggcgagctcctggcagtcaacagataaaaggaaaacaagaccacagagcaaggaggcttgtggtggctggccagctgtgaattatgtgtaatatgtggattgtggcctctggtaatcgattaccaagggtgggtaatcgattac

SEQ ID NO: 42919 - DNA, 455 bp, Glycine max
  unsure (1)..(455): unsure at all n locations
ctgcaagctttccaaagtggtcttcggcatcacattttaactctatccattgtcaataagcaccttcgcgaccacatggtccatacaccttaccgacacatgaagagccttgttgtgtcctctcccttctacgggaatctcttcttccgcaaatgcgatatagttgttggtggttatatgattaacgatgcccttaaaaccctccactgagatatcgtgggctacatgggcatcattgaggaactttatcaatagcgtacgatgaggctcggagtttatgagcagttcaagcaacgagatccttgctggagttntattcagttgctcgactaccttaaactcgctttgttggatgaggcgaaggaactcatgggcctcttccaaagtcactgtctttcctagaaggccatctntcatttcagccgctctcaccactggaggatctacttctttcg

SEQ ID NO: 42920 - DNA, 561 bp, Glycine max
  unsure (1)..(561): unsure at all n locations
atcctctgagtcacctgcggcattgcaagcttggctagctgtttcaatggtctcanacttggttacttanttaatattntttgtattctatttatttagttgtttctgttctgataatcaaattagttgttttagatattataaagtttgtatgtaatgaaatagttttaggtattgtaagttattagttctgtatgctaagttagttctagttcttagttgtatatggtacattagttttagttntagttttatatggtacgttagttttagttattgtaagttattagttttgtatgttagttttagttntagttttctatgctacgttagttttaattttagttttatatggtacattagttgtagttattgtaagttattagttttgtatgttagttttagtattctatgctacgttagttctagatttaggtatgttaacgtattagttctgtatgctatcatagtattaggtttaggtatagcgcgttattattcaaatatatttaaatgttgctatgtaattaaagtttgatgctacggtagtatatggacggt

SEQ ID NO: 42921 - DNA, 127 bp, Glycine max
  unsure (1)..(127): unsure at all n locations
gctctagtgactgtgtgcaaccatanatttacattgagtgtcctcattgatatgttctacagntgatttggatgaatttctaatggtcataacatgattcatggatatgatctaagcattctttctt

SEQ ID NO: 42922 - DNA, 472 bp, Glycine max
ggatccttaagcacctgagctgcagctcaaatcctagatctatccaagtattgtttctttgtaggattcccttacttgtgctattcaattccggagcaacccattcttttatatcttgttcgtgtgtagagaaacttaagctttctgtgtcttcttcaaataaagatctggtggtagagaccccaactagtggttctatgttaacttctaatgtgtgtttgaattgtcttgtggaaatttctggtagaacattcttgattgatatgattttcttgcctttgagccaaattgatgttattttgggtatagaccaattatctttcaaccatgtcttgttaaactattttgataaaactgtggtgtttgatgatcttggagtgagtaaagataggatgtttatctctgccaaccaagttgagacatctgtaacagaagatgctcatgtgtacatgatcttgtcgtaacctgaagt

SEQ ID NO: 42923 - DNA, 409 bp, Glycine max
  unsure (1)..(409): unsure at all n locations
tgacccactaacctagaataatatatcttaatgccattaacctagggaattaanaaaaacttaatggctgagtgtaactganattctggcaaccaaaagtcacccccaacagccaacatgtcagccaccatttggtctcccaaaaggctgatgcctaggttgccaattgngcccttattacaacttgaactaaacctaactaaagcccttttaattgattaacccataacatatttttggtcagccaactntacaaggattgngccattatttagacaaactaaacactctaaaaattgagacaaagtggtgtcatttagtcctcctccatctgggccatgatacaactcacaaccttggactnttctccttgaaactngngcttgtattcaaacagtatggacagcac

SEQ ID NO: 42924 - DNA, 498 bp, Glycine max
  unsure (1)..(498): unsure at all n locations
agctagtagtagaagtaactaactagcttccactattatccagaggagattgcagttgaataactgcagcctcttacaatactctaataatactcaagttcagaaatgttgttatcagtttcttcattatgagctttcaaaatctgaagttgagttagaatctcttccatgtcaggtggcgcatcattggaattcggtaggcaattctgggaaaatgacagagcttgacgcacaagggcaaaagactnttgctcctcagcctaatcctcagtaactactttaaagtacaataatttaggtaaatcatccaatacctataatacaactacataacttacaatgtgcaactcagaagagtagtttttttttcaattaanatgttcacctacgcgacttantattcaactaacaaaccatgcataacacaagcctaattataatagagaatgggctctagatcaactaacaagataanaggcacactattgagagtggata

SEQ ID NO: 42925 - DNA, 438 bp, Glycine max
  unsure (1)..(438): unsure at all n locations
atgcgcatatntccttacgaacgttcactngcacaagacatcttatctactaagaaaaatgcacccatatacaatcaaggtagcttcattacctagattatntacatgtacttccaaggtgtatntgttatttacatcacacacgcctccttggctgaatttacatacatgcatactcaaagcatnttggggtaccaaaaactgcacatgcgctcatcttggtatttctaatacccatacatatacaaacttcacgatgaatcttgactacctacacaataaggtgctacatntcatgctntttttcaagtttttgctacctaaagccacatgcaaattcaagcatattttcctttgctgactaaaaatgattcaaattagaagggatatatnntttttgtaatatngtttctcacataacatgcaacatatttatat

SEQ ID NO: 42926 - DNA, 440 bp, Glycine max
agcttataatatattgatacgctcgatattttcttctgaagctctccagagattcaaatggtcataactattcacacggatgttcgattatggcgaatcacatatcgagacgctataaattgaacagcggaagctctcgagatattcaaatggtcataacttttaacactgaggtccgattcaagattataatatatacagacgctctaaattatacattggaaggtctcgagaaattcatttggttatcacttttcacacagatgtgcgattcgggcgtataatatgtcgacacgctctacattgaacaacggaagctctcgagatattcaaataggcataacatttcacacaggatctccgattcatgcgcatctgatatcgatactctcaaattgaaatccgaagctgtgagtaattaaatggcgttactttaactc

SEQ ID NO: 42927 - DNA, 411 bp, Glycine max
  unsure (1)..(411): unsure at all n locations
gcgatggtgcacaacaagtntttcacatacacaatgcgcgcataaacccaccatcccctgttgcccacctccaactgagctcacgtactcccacgtagcccatatactcgtttctctcaacaccgggtccccatcaatcctcccaagcttccacaacatccaagcaaaacaacattcacacagcacaagctatcacagccaagcaaaacaaagcaaaggcagaaaactctgccaaacaccaaccaaaaatcacagcttttnccactcaaagaccccagtaacaattccttcgatccacatatgtaaccgttggatcgactacaaaaattttcttgaagtctatagtgcataaacctacattttgacccgtgtgatctactagcaaacagtcagaactcattttacattact

SEQ ID NO: 42928 - DNA, 378 bp, Glycine max
tgcgtatgctcatatttctgacgaacgtaactttgtcaagacattctattaactaataaaattgcactcatatacaatcaaggcagcttcattacctagattatatacatagtacttccaaggcgtattggacacttacatcacacacatttcttttagctaattcacatacatgcatactctaagcactttggctatcgaaaattgcatacgtgcacattctgatatttctaatacctatacatacacagactttatgatataccgtgactatctacacaataaagtgttacatgtcatgcttactttattcatagtttttatttgttcactacctatagccgaatgcaaacatctagttattttcttttgctcact

SEQ ID NO: 42929 - DNA, 368 bp, Glycine max
  unsure (1)..(368): unsure at all n locations
gttcctatggtatgacatgttgtatatatatgtatgacttggtgaagagggaaacttgcagttacaacaaatgagttcaattgttgttgcatatggctacaatgagttcaattgttgtcatctgcataaaattcacgtaggtctcataattgttctgtgcttgttgtctgtatttattgaataaaattggagagagcggtaggcaagcttccattcaatgcattgttagaaaatctggtgtacttgccaactagtggtgtagctgtctaggaaaatgtctttgttgggagaattggacatcaagtcactgtccctggggctgcaacctccttaccacccanatcactcaattgattaagtttagtaaa

SEQ ID NO: 42930 - DNA, 427 bp, Glycine max
  unsure (1)..(427): unsure at all n locations
tgctngcctcagagaggtccaggaaggatatggttttcaatgaactatttccgctcctgagtatgacagtcaccgctgtaagagcgctgtacatcagcagcgcttcgaggccatcaaaggatgtgtcgttctccgggagcgacgcgtccagctcatggacgacgagtatactgatttccaggaggaaatatggcgccggcggaggacatcactagttactcccatggccaagctcgatccggaaatagtccttgagttctatgccaatgctnggccaatagaggagggcgtgcgtgacatgagatcctgngtaaagggtcagaggatctcgtttgatgccgacgctatcggccagctcctgtgatatccggtggtgttggaagagggccaggaatgcgagtatggccagatgaggaactcgtctgat

SEQ ID NO: 42931 - DNA, 349 bp, Glycine max
gacactatgaaactaagcttttatccaggctcatcatggtggtgaagctccttcttccatggcttattccttagtggatggcgcctcctctcacctcttctcctatgtcttccgctgcatctccatggtggaaaaccaccattaaaagacctcattgaagctcaaagatccagcctccatagaagccccacaagcaagcttccatcaataaccccctctgaaggtaggtgggttgatcctctgaaagagatctaaaccatggtacatagttgctcctccatcgactacctgagtggccataactagcgccaagatgttcaaagcctcgataaggagtcgctctcgctta

SEQ ID NO: 42932 - DNA, 358 bp, Glycine max
ctgatgacgccaaacttgaatactctgaatgcattaggagagtattgagatcgtgaacatgagctctacgcatattgataaagatgcttaacacttcattaaggattaattcatcatcatcatacatgtcagtatactgctgatatagacatatctatacacaaccatctctatataaaacaatgctcaacatgctatgcaatgcgtgtaatatgcactatgcaatatgagatgtctcctctcctcttttggcctaacacgcccaaagtcagtgacacaaactattctccttaaaaagaatctccctgttttaacctaaaaccatactcactttgagacaagacaacaattaacctat

SEQ ID NO: 42933 - DNA, 158 bp, Glycine max
taagcctgcctgtccgatgcagcagtaatggtggcccggtcatgactttaactgttaccaatccggaatgggattatgctaatacagcggcggcataacatgcctaattaatgccaaatgaaatcgtgggaagtatggtttacgctataatcccactc

SEQ ID NO: 42934 - DNA, 317 bp, Glycine max
catgcagctttaccttagctggtcatgttgttgctttcttatctccgacaatctcccctgtattggctgtgatgatgcccatctcgaatacatcgaatgcatttggagagtctcgagattggcaacatgattcttagtcatattctaagagattcttatcacttaacaaaggatgagctcatcatcatcatagaggtcggtatatctctgatatatatatagatagatataaccatctctatatacaacaatgctcaacatgctatgcagtgcggattatatgcactatgcaatatgatatgtcttcttctccctct

SEQ ID NO: 42935 - DNA, 332 bp, Glycine max
  unsure (1)..(332): unsure at all n locations
tagtgttctctcattccatccttattgttttttgatttgcagcatttccatcaaatcaagatatgcgctgacatcatgatcatggtctttaaggttnaatcatngaaatttggcttggggcttggttttttgtatgttgtttgttgttgttgttgttggcatatagagcagcataagattggctgtagcttatatgggcatacttctatctttatgctttgaccaatgtgtattttttcattcctctttcacaactccacatgtcaatgtgttattcaaaactgtcttcttaatttgctttgactttcatttgatgaccttttcttctgttc

SEQ ID NO: 42936 - DNA, 346 bp, Glycine max
  unsure (1)..(346): unsure at all n locations
tccattaatatgttttccttaccattctcttacatcagttggttcttcattattctccatgtatctcctcacatgtcttgttcataatgtaggtaacatgattctttatagtgtccaccgattaaacttgctatagaaagtagatttgattttctatggttcagatatcttgttcttggtcatgaaccatgaattgagatgagtataggtacctttgagatttgtcttgatattcttttgtggcagagacctaaaccataatactcttactaaaatattaaagtagaagacaacctcaangatctagagtgacttgtcacctattgatagtttgcatagaagtcat

SEQ ID NO: 42937 - DNA, 407 bp, Glycine max
  unsure (1)..(407): unsure at all n locations
aacctgttgtctccgttcgagccctagctatgttgctccgtattggtcctcagctcanatgtaggggttgggtaaaatcctctctatgggcagctntcgaaacattattgacattgtaggtaatgtccagaggcgagccctggcacagcagtaaagttgtgtcttggtgacttattggtcatgggttcaaatccngaaacagcctctttgcatatgcaagggtaaggctgcgtacaattaccctcccccatatctcgcttagcgaggagcctacgggcacagaggtacgctagtttatgtcaagtatagtttatttctatgtgactggtcactcttgtgtaatacacggttaatcgactggctacatcatggatgccgatgcacaatatttgaactagataagcctc

SEQ ID NO: 42938 - DNA, 530 bp, Glycine max
  unsure (1)..(530): unsure at all n locations
atcctctgagtcacctgcngctgcagcttagcactcttcttttagttattcattatttctaatgctcttaatctctcctcgtctaaatcaactaactcatctgacatcattttccaataatggtcgatcggaatgtccatttgtttttgtactctagctgattgcaaatgtgcttcgaccggaagtatagcatcgtgcccataagtcagtcgaaatggggtagtattagctgattccttacgagaaattctacatgcccatagaactngatctaacgttttattccaattccttggcttttgagcaatgtgtgtattaatcaagttaattactatcttattggctgcttcgacctgaccatctgcttgcgcgtaatatggtgttgagttaataatcgaaagccaggtttttgggcaattctctcattttcgccagtaaaactgaccttgacagcgtaatgttcggaaaccaacctataaaaatatttgaatgaatattactgtctgatacattggcaagactgctcatca

SEQ ID NO: 42939 - DNA, 552 bp, Glycine max
  unsure (1)..(552): unsure at all n locations
aaatggtncctgatgccatggataaccgacncatatagactatgctatngataactcacagccagatattaataaaaatatgttccacgttngacacatatgataataacatggaactaggttgcgaaacttgtcatataggcatatatggattccgatacatccatacgtctgattcaacaaatgaaagagcacatgacctctcttgccaaattgaccaatgcattgacagagatgtgttcctaccgacagaatatcatagaataatcgactacactgtatgcactgactcatgcaagatccctatcaatcgcataatccaagctaaggccgcagctaaggtatgctacctcaactccagaacatacatgttggaacgtgaatacgctgagccttaaagactatgaacgcatccaatgcttgatcctatggtgagcagaggaacttcatctttgtgaatcacatctagaagatgataaacatttctgacatgtgatacatatctcgcacaagatcagactactgtactagttgttacactcaggctgaccg

SEQ ID NO: 42940 - DNA, 432 bp, Glycine max
  unsure (1)..(432): unsure at all n locations
atgcgcatatntccctacgaacgttcacttgcacaagacattctattaactaagaaaaatgcacccatatacaatcaaggtagcttccttacctagattatttacatgtacttccaaagtgtatttgttatttacatcatacacgccatcttgtcaaaatttacacacatgcatactcaaagcatttcggggtaccaaaaattgcacatgcgctcatcttggtatttctaatatctatacatatacaaacttcatgatgaatcttgactatctacacaataaagtgctacatttcatgccttttttcaagtttttgctacctaaagccgcatgcaaattcaagcatattttcctttgctgactaanatngtattcaaaatatatatatatttntnggaatatgttttctttcattcaacatatntatatata

SEQ ID NO: 42941 - DNA, 398 bp, Glycine max
agcttgttaagcattttcttaagcttttgctacaacctttctctccccctttggcaacatcaaaaagccaaagaactcggaaatcaacacagttataacaatggagtagcaagatataagtatcagagtattaaatccaataagccaaacttataatctaggaaataatcataccagaattcatataacataaaatgtcaacaaccacaaaatatccaagactgaaacacaagaaatataagcaaagtacttagcataataatgtaaattctaagaaactaacagccaaaatacacggcttataaaagataaataagcagaatcttaaatctaagaagacgaatgaggtggtggaagatcaaaactctgacgaatgtatccgacattctcttcacgct

SEQ ID NO: 42942 - DNA, 450 bp, Glycine max
gccgcgccttgatcggtctctgacccgggatccttaagcacctgcggctgccgctttcgatatgtatgcatgtaacctttattctacataaaccttcgaccctgcttaatctgaggagcgtgtgcctcgacaatttactctgtatctggcggaggagagacctttattgattcatcatgtatgctcatcccacacatatagttggcgatcggaaggatatgtaccggttgttaattggtgatactctagcttagatagaaagtagtggtgagatggctactttgtttatacatggaataatcattgggatatctctaggacgtgtgctacctatgaatctaaacctttgaatactcgaaaaactagtgaattattttgttgccacgaccttactcaagcctgagacaatcatctgatctgctaatcatttctgactcgtggatgagacgg

SEQ ID NO: 42943 - DNA, 435 bp, Glycine max
ttgagatgagcacacgtaccgagcacaacggagtctgtgtcaggtatataacgcacctccctcttcggaggtgccattctgcagaccatgagatagaacacccaagactatcctatgacaactccaacacaaccagagcaagtcacactaaattctgagtgggcgcttattgcccctgatagagccttacccaggagcgaggaaggagcataccaatgcttaccccgcggaaatagaagatatttttctggagatctagacttagcacagcaggctgagcatagcctatgtctacaatagtcaatgtagataagagtcatagctaagcaagactggcgcactagctcacctcgtacaacgaacgacgcttgccacagacgcctagccaactcaaatcctcacaaacgaagagggactcatcacactccctactag

SEQ ID NO: 42944 - DNA, 388 bp, Glycine max
agcttgccgtccagctcgtccaggcgagtattgttgctttctctagaagcaacagccttctggaggaagggtctggaaggcccaagtgggccagattgctatttgcacccctctttttactaaatgcacccctctatttttttggtcattctttttccgtaacgttactaaactttacgaatttcgtaacgatacttatttcccttccgcaaggctacgaatccttacggattatgtctttactcttctttagctttccaagaagatacggagactcacggattgcgcagaaacatcttttttcgacttccggcacattacggaatttcaccgaacgcgcaaccctgtctacttttgatatccgagacgaattgtgacttctttattg

SEQ ID NO: 42945 - DNA, 447 bp, Glycine max
tgcttctacataccctgcagaaatagatggtatttcacattagccttacccctcttgcgtgcgagaggttcgttcttttcttgctcatgcaggtttttataggcactttatcaaggaattgtgcaaaatggcccttccactatccaatctgctgcaaaaggaggcggagtttgattttgatgaccgatgcaaagaggcttttgattgactcaagtgtgtggtgactaccacccctatcattcaagaacctgattggatagccccatttgagctaatgtgcgatgcatccaattacacattgggagttgcccttgctcataagattgataagctgccttgggtgatctactatgcttccagaactttggatgctgctcaagaaaattacactagcacagagaatgagctattagcgatagtttttgctcttgagaaatttcgtcatat

SEQ ID NO: 42946 - DNA, 365 bp, Glycine max
tgtctaataaattaccaagaaggcatcatattaatgacgttatattcaaatataacgaccatgactattttgtaatacttatacaaacatatagactatcttttacatttcaataagatgcagactaatttataaaacgactgcaaagatgggatcaaaacacctatccactcattaaataaatgaacacttataaaaggtgtcaacatcgatccaaccgatcacgtaataccaagtgtaaatagaaggtcctagcacaattaattttaaagcatactccttgttgaggtctagtaacacgcccccttcaatagcgggagaattaatcatgcaggctagagaggaagtgttcacactgtggcaaa

SEQ ID NO: 42947 - DNA, 421 bp, Glycine max
  unsure (1)..(421): unsure at all n locations
tgtaatgtcagataaggcataacagaaatatgaagcgttttagattacaagaagcatttcagaaaatattagagaataatgctgcaatttagtttcttgtaatttttttattttattntccctttaacaatttctatgagcagatgatttttatgtgaaattgtgaatagctaatactctgaagttggtcttcattaatatgagatcacaatccttgaaatccatttgaaggtcctattatggtcttcatatacttcaatgttgtcctgattcacgcgtaaaggaaaaaattgaaatattcatttgagcgagagtacatgtatattaagatctttaaataagaataaagtcaatttaagaatttctttctagctaggccaaatataatttgattcaagagtgaattagaaacttagaaaat

SEQ ID NO: 42948 - DNA, 430 bp, Glycine max
  unsure (1)..(430): unsure at all n locations
agctngtttcaaattaagatcagtataaattagtatatctcttgcgtcatgtccatacatnttacaaacttaaagtcatgaatcatatcttcgaatgcgtctgtatatatattgaaatattaagtgccattgacaaattttttataaaattctaaattgaaggtctgaattaacccatcaaaattcattccatacaagaatccatctaaatctatttactttcgaataccaaaagacattttaagagtggtcagaaatctcatttgaataccaacagatattgttgcctgaaaaaaaaatctttattgtcgtaatcgaataccacacgatttgtttatattctatataactcttgattgaataccacaagactttttaatcataaaaaagtttttaaaattccttgaaatttaatccatcccaccccctg

SEQ ID NO: 42949 - DNA, 430 bp, Glycine max
tcatatttctccatagtgaaatgatcaaagagagaaatctctcgttatcttctttttatcagatcaaagacaagaatggcaataacctgaagaacctcattgaagagcgagtcagctccaaatttatcatcgagacgcttatacatagcagaaatatgatccatctcccacaaatcaacttcaaaggagaaaatctagtaatcaactttgcactcattatctttagactcatcatcatcttctttgtactcatccaacaatccaataagaattagtaggtaatttgaggatatgtcatacccaaaaccatatagatacacaagggttagaccatagtcgacatgagatcactacttctatcgtagtataaaagtatgagccttctgcatgaaacccaaatctcaggttatcacgataatatcatcgtatt

SEQ ID NO: 42950 - DNA, 403 bp, Glycine max
ctatagatactcagcttcactgaatgacaagttccaagtgatacttaatgttgtaatcaattacaacgtgtttaggtaatcgattaccaatgtgcttgaacaagaaatcaaatcaaattgaagagcacatcctttacaaaagattttgtgtaatcgattacactgatttggaatcgataccactgattgctctgaataaatcaaagatgaactcttctcatggtttgacttttcaaattggtataaagttttctaaaagtcataactcttctaatggtttcttgacctacatgattagctataaacaagacttgtttgcattaattattaaacaactttacatcaatccttaaatctttaatctttaaatctatttcttttttgcaaagcttcatgttctgtt

SEQ ID NO: 42951 - DNA, 532 bp, Glycine max
  unsure (1)..(532): unsure at all n locations
gtgtctcaatgcaagtgtggaaacatgttgtcagttgatatgagagatatcgaaaccacaagggtgaatgatctttcgcaacccggacccatcgaaacatccgcttgaccaanacaccgccatatcaggagaccgagacttacttgctccatgatcgactcgacacaggaatggtagccattaccatagctaagtaacatcaaccctattcttccgaagatacgacttgaccgcataggagcttatcaaggaggagccacgcggcagttcatagagcactgtatgacccctggaacgaaggcgccacgtctaagtgatgcgggctggatgaaaatcgaacgatagagcgtatgagtcctgacatagacgagcgacaccacacatggagccaatatgaaacatgtgctacgcgtattaatgactcataagatgctaaattatgccattactgagaagttcattgctaacagacggatgaatcagatctaggcctatccctccaacacactatgctatcaattaaccgtaatcg

SEQ ID NO: 42952 - DNA, 521 bp, Glycine max
  unsure (1)..(521): unsure at all n locations
tgacgccctccctgtccttcaatttcctactttactccccacanctcaacaagagaatttgattcgatcctgctcgncgccggattcattaaagtcgacctgcggcatgcaagctaacatgaatcgtacccgtgtttattttaatctaacattcacaaccaagacacgtggtttgtgcgtgaacagtactccncgagttggccttccactactagaactacagtagagtggatccacggcactaaacactacgtgcatgtattagttcttgcacctgtgctctatttccgagaacaagcgcattcgctagataccttcgcacctaaaatcgaaacctgatagaaagtcctcctgcaccccccttctcacccacaagatatcaatagcgccagttatgacgcaggattcaatggcacaagcgaaactcaataatgtaaggtgtggaaatgttcccttgggtctacagacacactggaccaagaaacaaatgcgcgatcaactcacatgttgacaatacaccc

SEQ ID NO: 42953 - DNA, 439 bp, Glycine max
  unsure (1)..(439): unsure at all n locations
tgaggttgagcctagaacactatacattancattctaacctaaagatgctaactaatcaacatagatacaatcatctacacataatttacgcataataataacataaaatatggcttttatcctagggttttatataaacaaaaatctaaaataggggaaaagacaacttacttgaaatgcacacagggagtgaaatgcgcaagtattagtaaaaagctgatgaagagtggcagaggagaataaagtccataattatagcgaagagtaaaagctactgctataaggcagacatgttctctttagcaaagaaccaatggctcgctaagcgcgagtgttacactaagccaacactccgtgacatttgaattgttaaattataacaacatccgcttagcgaggcattcttgcttagcccaattatcaatacttacaaccaga

SEQ ID NO: 42954 - DNA, 256 bp, Glycine max
tttggttcagcgaagaaaggagctgaataaattgaatctaatagtttcagatggtcactaccagagcactgccatcataaggcttctctaaacgataaccattcattcattgggctgtggatccttctccagaaacttgtctttttttaacaaaaatattttttaaaaatataataagaacgttcatgccattttactttttaaagcaccaaccatgggtttattgatgtcccccggccgaggattatataaaaat

SEQ ID NO: 42955 - DNA, 376 bp, Glycine max
agctttgagggtgcgcaacccaccatcttttcatagtggagtaccgataatgtgtctaccatcacgattatcgcctccctttccattattgggggtaccacctgcgccgacagatccctccaccttttgggcgtgttctttgaaagatccgtccccctttttgcacactttttgtagttgcatcctatccggagtcatatcagaattgtactgacactgcttaatgaaggcaaccattatgtccttccaagaatggactcaagaacgttcctaagttagtatacccggcgacagatgtgctagtaagacttttcaggaaaaatgtatcagcagtttctcattttctgcgtatgcccccatcttccgacaagacatc

SEQ ID NO: 42956 - DNA, 451 bp, Glycine max
  unsure (1)..(451): unsure at all n locations
agaatactaagctntaatagactctggaattgtgacggtgcgcttagcgctttcctcacgcttagcgcgcgtaagtggatttgagcttagcgctagtcgtgcgctaagcctggctgaagacaattgttgcgcttagcgcactgatctcgcgcttagcgcacaaccttgatattgatgctctgccagattcttctgttgcgctaagtgcgctaaagctacgcttagcggtggatgcgcgcttagcccactgatgagctaagctcaactgtcacttttagcacttcatgacttagcctctttttcacctgaaattgtacagatttcatcattaaatccaatggacatattctagagacaactttaataatataacaagatttatttacaagaatcactacaaaataaccataaattggggaactatacaagttttggaaaatattttctatac

SEQ ID NO: 42957 - DNA, 385 bp, Glycine max
agcttgcctgtccgatgcagcagtaatgatggtcttagttatgttggggaacggttacgaacccggaatatgtttaggcaaagacaacggcggcataactagcttgataaatgccaaaggaaatcgtgggaagtatggtttatgctataaacccactcaggcggatataaagagaagcatcgcgggaagaaagagcggtggtcaaagctcgcggttgaggcaagaaagtgaaggaagcccgccctgccacataagtagaagctatataagcgcgggcctgtgagactaatgtcaagtggtcgcgatatacgaagatgatgttccgagaacattggatttggtacgaccatgccctcctgatttccagctacgaaattggcgagtg

SEQ ID NO: 42958 - DNA, 372 bp, Glycine max
tgcctgtccgatgcagcagtaatgatggcccgagttatgttggggaacggctacgaacccggaatgggtttaagcaaagataacagcggcataactagcctgataaatgccaaaggaaatcgtgggaagtatggtttaggctataagcccactcaagcggatatgaagagaagcatcgcgggaaggaagagcggtggtcaaagctcgagttggagacaagaaagtgaaggaagcccgccctgtcacataagtagaagctctataaacacgggtctgggagacaaaggtcaagtggtcgcgatatgcgaagataatgctccgagtacattggatttggcacaaccatgccctcctgatatccagctgggaaat

SEQ ID NO: 42959 - DNA, 411 bp, Glycine max
agcttctagctcccaacaaaaggggtttattcttttataaccatgagaggctttacacgtcatggatgactaacaacaagaaaaaaggagaatgtcgaaagcgagagggtttctcctaagggatagaccccgtgtgtgggttgtgagacggtgtgtattttccttctgttttctctctcctccttatataggtagcttacttacttcgcacttagtgcaggcattcacgctaaacgcgcctttgggctttttcgtgggccttatgcgtgcttagcatgtaacgcgctaagcctggagtgtaagttaagcctagagtgagtgctaagcctccaacgtgcacttagccaaaattgacacttgaaataaagatgtcaatttttccttcaagaattttttctttcagaatttaca

SEQ ID NO: 42960 - DNA, 399 bp, Glycine max
  unsure (1)..(399): unsure at all n locations
ntaaatttctagatgatagaacttgtatattgatgagtatccgcatgtagcttgtcatgttcacaccattatttctaacaaataattttctcattaatttgatctaattaaccataaatagtttctgaagggggtgtttgaagtttgctgctaatttagccaactttggttctgctttagttttataataccaactgcagctctaagtataataaaagctttctttcttattctacatattcttagtttgattgattctcaataattattctacatgccttttgttatgaatggggataacgtagcataggcatatacaccaatgaagtcgaacagagcagaatcaaggagaagagaagaatggcattgggattgngtaacgcttgtgctcttcctatc

SEQ ID NO: 42961 - DNA, 377 bp, Glycine max
agcttattgtcgattgaatttgctcaaagcttctgttctgaatttcgagcatctccatatactacgggaaacaatcggacatccgagtaaaaaggttttgttgtttgaattttctaagaggttatgatttcaattttgagcgtctcgatatattacgagactcaatcaggcatccgagtaaaaagttattgtcgttagatttttcttagagcttctatttccgattatgagcgtctcgatatattacgagattcattctgacatccgagtaaaaagttattgtcgtttgattttgctcaaagcttctgttatgaatttcgagtgtctcgatatactacgggacacaatcggacatccgaataaaaagttattgacat

SEQ ID NO: 42962 - DNA, 431 bp, Glycine max
  unsure (1)..(431): unsure at all n locations
ntntagcaattcaaatggtcataacgtttcactcggatgtcggattcaagcgcataatatatcgagacgctcgaaattgaacaatggaagctcttgagcaattccaatggtcataacttttaactcggaggtccgattcaggcgcataatatctcgagacgctcgaaattgaacaatggaagctcttgagcaattcaaattgtcataacttttcactcggaggtcggattcacgcacataatatttcgagacgctcgaaattgaacaatggaagctctcgagcaattcaaatggtcataacttttcactcggaggtccgattcaggcgcataatatatcgagacgctcgaaattgaacaatggaagctctctagcaattcatatggtcataacttttcactcggatgtccgattcacgcacataatatatc

SEQ ID NO: 42963 - DNA, 429 bp, Glycine max
  unsure (1)..(429): unsure at all n locations
agcttatatatatatatagatatattttttacttattaaaactaaatacaattntgatatgtgttggtttatgtaattttgaaataaaaatatatagaaagataaaacttgaaaggttatatatagaaagttcataaagtcgtaaaagatgaatatataaaaatgcgtcaaaagtacatgatgaagatagggtgaacagaagttgggttaagtgaatttttgacaacggaaaccaaaataataaaataaaaaaaaaaagaaaaaagctatggaaaacttgcgtgtccccacagctatggtttgtagtctgatgcagagctgctgagataaggatcatcaaatcgaatatctttctccatactgccttcttctctgactatatggattccaattgctttaatgactgagctctctaactctaacacacct

SEQ ID NO: 42964 - DNA, 430 bp, Glycine max
  unsure (1)..(430): unsure at all n locations
tctagagaaaactacatggagctgcctcggtaaaaatgcttcccatcctccgttcaccgttggattttctcgaaatttggtttgcaacttcaaaagacacttgtccatgatctgaccgttgggatcgttgataagatgtctggagtgtgctagaagcttccgttcccgagagcatctcttatttaagcatttcagcctttgctttcttgtagcttaggaaaaatgtcatttttttcttctttctttcctccaaatccatttctaaagttccaagtactttctccatcacccacatccaccattagccaccacaaaccatcattgttctccattgaaaacccacactgagaagaacccttcaactgaagcagaatttccaacttggcttgcggnttcggtagagaacgaaaaccctaatctgatctttcat

SEQ ID NO: 42965 - DNA, 257 bp, Glycine max
  unsure (1)..(257): unsure at all n locations
ggatatttttctatatctaattatagttttattgcttannnatatgctcgngaaaccatatctaaccgcaagtggttagttgctgttaaccctaactaactaacaaacctttaactacccttcccgcctaaggatcttatgatcagcttttaccaagaccaacttatcctaattggtaaacatcccaggtcagcgccttcaacacatgcaacaacactgttaccaggggacattggagtgtgcgttgaaaatgtttt

SEQ ID NO: 42966 - DNA, 440 bp, Glycine max
actcagcttagaaaacgttgtctatacaaaagttagtcgtataatattactatcagtaattctgtgatatttatttcatatgcgaggattcgatattcgataaatattcttacgatttattgatattagatccagaaatttccaagactgaatggaagaatgggaagaaaaagaaacaagcaaccactaagccatcaggtatatcttcttctattgattctccttcaccagagattgatactatggcgggaataggaggagaaggaaatacaccaccaaggaggactcttggtgactacgcttatcaactaagaccagagcattacaacaacatgtttgttccttcttttcagcaacaggttgtggagttgaaccagcactgcttagtttgttggttacagtcttttgtggaatgatcatgaggaccatacacacatttt

SEQ ID NO: 42967 - DNA, 420 bp, Glycine max
  unsure (1)..(420): unsure at all n locations
agcttagctacacacacctctctatagttatctcacctcctttagatgagaagctagagcttagctacacaccccctataatagctaagctcacccccatgccaaaaatacatgaaaatataaaaaaatccctactacaaagactactcaaaatgtcctgaaatacaaggctaaaaccctagactactagaatggccaaaatacaaggcctaaaagaaggaaaaaacctattctaatatttacaaagaagagcggacccaaccttagccaatggcctcataaatgtaccctgaggtttatgagaaccttagggccttctttagcagctctagcccaatcctcttggagtcttctatccaatacccttggggggtaggattgcatcactaaatctccaccgaanagtgacatcccataccg

SEQ ID NO: 42968 - DNA, 433 bp, Glycine max
tgaatacaaataaatcttcttagcgaagaatattctttattatcttaagtgtatcatccaatgatttagtagagtttcgcttcaaagattttgctaatctcttctatattgttccctgttatgcttttgagtagagactgtcttttatagacttaagagaaggatccattataggattagcactgaatcttgatatggttgttgtctcgcatgtgggggcgagacaacgtgacacgctttgatttgagaggaaaggaacaaaagtacagacaacaacatatgctcctctttcgcgtcaaaaacgactcctatcggaattttctgtgaataccctctattctcttctataatgtcatttccttaaattcacatgttagagattcaatattcagatatgtaaaattgaatctcgtatagagagatcatgcacttc

SEQ ID NO: 42969 - DNA, 410 bp, Glycine max
  unsure (1)..(410): unsure at all n locations
agctatatacatagntgcaagctttcactatatctgcagagatatcttaattataataataagagaaaaatcatcatttgctcgatcaagtatatatatttaatttcttgatacttattagccatatagttattaattattaattttttgttagcagtaacaagagataggttgagcataacctcattcagcattttatcaattacattacattgtagttgttacttatccttgtaactattagaatttgaaacatggttctttcatttttagatggactcaaacagtgaaagaaagtgggatgaaagcactgtattgaaggaagaggtatatacctcttgctcatgcctgagagaaagaacacaaggattcttatttaaccacagagttagcttctacctcttcatatg

SEQ ID NO: 42970 - DNA, 446 bp, Glycine max
  unsure (1)..(446): unsure at all n locations
agtgtgtgagttattatgaatacgatggttcatgcaaaattgacaaagtcatggcctcctattgcataataattgagaaatgacaaccaatccagtgagtgattcatcccgcgatgataaactgaacggagccaaaccacaaatcacacccttatcactctcacaatcacatccttatgctatcacggntatcgctctcacaatcacacccttatcgctatcacggtcactgaacataagatgctctctcccaacgcgtgtcactcaaaatcccatgagtattcttcaaactcaatcaatggcggatcgattccatgccccaatttgaccactctctcactcactcggagcaaacgctttgtttcttgggtactcttagatttaaggggaggggtatgacgcccagtacaaagctttcggactaaaaaaaacgcttatatagatat

SEQ ID NO: 42971 - DNA, 256 bp, Glycine max
  unsure (1)..(256): unsure at all n locations
agcttgatatgaggaagagngtttggtttaacttcctgctttnattgcggaccacagagtggtacccggagatatgtcgcgggggttaggagaccttggagacatcaggtggggtgctatttcccaaaaccaagcttgaccaatcccgacccaacccgggcatattctgtcagtgagaacctgtgaatgacctaaacaggcgagctcctggcagtcaacagataaaaggaacatataccacatagcacggaggctt

SEQ ID NO: 42972 - DNA, 409 bp, Glycine max
  unsure (1)..(409): unsure at all n locations
tcttagtctcacctgatgaagatgaattcgtgtgttactttatgcactcctctaatgacaatggcatcatttctggcactaaattgttgggagttggaagtcattttctcaattaaatttttggcttcagcaggggtcatttctccaagggctccaccactagcaacatctatcatacttctctccatgttgctgagtccttcataaaaatattggagaagaagctgctctgaaatctggtggtgagggcaactggcacataattttttaaatctctcccagtattcatataagccctctccactgagttgtctaatacctganatatcctttctgatggtcgtggtcctggaagcanggaaattttnttccaagaatactctcttgaggtcatcctagctcatgatgg

SEQ ID NO: 42973 - DNA, 390 bp, Glycine max
  unsure (1)..(390): unsure at all n locations
agcttgcaataccctgagatgtattcttttttaacaactgactcagcttagtcttcatttgtatacatttccttgggtagcttgcattctcttctaaataacagtctgctttatctgttgtcctacaagtgttgttcttggggatcatgcatgaattggcttaccacactcacagcataagcagtgtctggtctactatgggacaagtagatgaactttcccactggtgtctggtactgtgacttctctactgttggccttaatccccacttccaatcttgtggttctgctcaatgggaacattgaatgttttacacccttatttgcttgtttctntgagaagatcaaagtaaaactttctttgggtgataaaggtaccttgtttggaat

SEQ ID NO: 42974 - DNA, 450 bp, Glycine max
cggcagcaatatagctcaatacattacatgttatttaaacccttatacctaaaacaccaccagcaacttactacaccaaatccttgcaatttttttccctatctgcctaatagcaagggtctcttacatcccacataaacctccaaaacaaacgaaacctaacaataaaaattaaaaaaaagaaaaaaaaacaaactagcctccaaatccggagagggttcttccttgtctcttgagagcataaaccacatccattgccgtaacggtctttctcctagcgtgctcagtgtaggtaacggcgtcacgaatcacgttctccagaaagatcttgagcacgccacgtgtctcctcgtagatgagaccactgatacgcttcacaccacccctgcgagccaaacgccgaatcgcaggcttggtgattccctgaatgttatcgcgcaacaccttacg

SEQ ID NO: 42975 - DNA, 425 bp, Glycine max
  unsure (1)..(425): unsure at all n locations
agctatatgatgatgaatttgtttattttagtagttttgataatgacaaagatgatgacaaaaagcctaaagaatgatttcaatattgagtcaacaagttcaagatcaagtttaatttcaagtttcatgagaagaaatcaagaagattcaagaatcaagagaagtttgattccaagattcaagagaagatgaattaagtttcaagagaagaaatcaagaagacttcacaagggaagtattgaaaagatttttcaaaaacaaacatagcacagttttgtttttcaaaagagtttntctctaaattttctaagttaccagagtttttactctctggtaatcgattaccagtttcctataatcgattactagtggcaaagtttgatttcaaaaagctttcaactgaatttgcaacgtttcaattgatt

SEQ ID NO: 42976 - DNA, 435 bp, Glycine max
  unsure (1)..(435): unsure at all n locations
cggttagaggtacttacccgttgaagactgaagattacgaagaacgaacgatgaatcttgaagaacggtcgagaatcttcgcgtaattactcacgaaaatgttacggaagcgcctcggcttggattttcttcacggaactaattttcctcaactatttcgagagagagagaagtgcctaaggagctgaacccttttcttcttcacttctccccctatttatagcaaaataggggagaagcttgccgcccagctcgcccaggcgagcaaggttgcttcctccagaagcaacagccttctggaggaatcttctggagggcccaagtgggcctgggtgctatatgcacccccctgtttactatatgcaccccccnctttctatttttatgaattatttttccgtaacggtacgaaactttacgaatttcggaacgata

SEQ ID NO: 42977 - DNA, 379 bp, Glycine max
agcttcattcacaacatcggtttctatattatctatgtttttggacatacaacatcaatttttacctataaccaatgtcggttatcataaaacaacatcggtttataacaaaaattgatgttgttggctgactactaacatcagttttgttaaaaaccgatgttaatatacagatacaacatcggttgttctgaaaaccgatgttgatatatgaagatatataacatttctataataattattgctatacacattggttctgtgaaaaaccgatgttaacggtattactttcaacatcggttaataaatgatgttgaaagtccttaataaccgatgttaaaaccctattttttagtagtgatgtcaacgatagtcctag

SEQ ID NO: 42978 - DNA, 362 bp, Glycine max
ccttgacaggcgacgaacgcctctacaataccgtgctctgggcccgcgactaggacgtatctttcgttctcaacaagaggtccctctctgtaccccataaagcatcgagaagggcgctccggtcctactggcctttgcgagccatcttggtctttgctcaagggctcttgcggtactagcatggtgtgctaggaaccccgcacactccttacgaacgagtgtagcggccgacttgatcttctccatggcaaggcttgccggtcctaactcgcttgtgagagctaggactgcgtcgtcctcttgcggcgcttcaaagatctcttcgctgacgacttttaactcggcgagccaatataaacctc

SEQ ID NO: 42979 - DNA, 400 bp, Glycine max
  unsure (1)..(400): unsure at all n locations
agcttcatgatgatgaatcaaatatgattcaagttgttttgatgatgacaaaaagcccaaaagaatgatgtcaagattgaatcaacaagttcaagatcaagattaaagaaaagacatcaagaagaatcaagattcaagagaagaaaccaagaagcaacaagtcaaaacttcacaaagggaagtattgaaaaaaagattttcaaaaaccaaaacatagcacagttttgttttacaagaaaagttttctcaaatttttctaagttaccagagtatttactctctggtaattgattaccaatttcttgtaatcgattgctagtgatagaatttgatttcaaaagcttttaactggaattgcaacgttccaaatgattntaaatggtgtaatcgatggaatata

SEQ ID NO: 42980 - DNA, 450 bp, Glycine max
  unsure (1)..(450): unsure at all n locations
ntacaggggagtttctcctgccaccattcaaaaattntatatttatccttttccacggagcacaatagaatgatgattttgctgaattaaagtgtgtgaaaaacattttacaatgaaattaagactttattgtaaaatatataattaaatcaatttcgttgttttgtttttttcatcttcactaatatgctggaattgtgattatatattacatcttggtttgtgaaaaaagtaaagaatagaattactattacattatataaggggactaaatataacatgtacaatagaaatacaattttgttgtacaatgtacaacaaaattatatttttattgtgcatgtttttttagcaaaaaaatatataaattnttcactaaataaaattgagattatctgttatacaatagaatcttgatttattgattactgaaaccaaaaaaaaaaaaaa

SEQ ID NO: 42981 - DNA, 427 bp, Glycine max
gctgacaaaaaatctatactcatatgctctgctataccagaaatttggacgaaaaagttgattcttgtaattcctggcgcaaaacagcatttgcttggattatgttctttagcctctctgttatgtcattttcgttgctgcaaaaaatgaagacaaaaaccctaagcatcagttattaccatttactgtaaaagaattattggagttgggcaaaaaagaacaggggatcaggaatcctcctaaaacaaaagaaaagcctctaatccctcaaaatatgcaccatagaaatgacttttggaacaccatgtgcataatcccacatggaagcacaaaaaaataatcctatcccaaataatattcacatgaaaagactagtggcagaaaattctcggcatttatactacgtaaatacactacacacatgctg

SEQ ID NO: 42982 - DNA, 454 bp, Glycine max
  unsure (1)..(454): unsure at all n locations
tgttcttatcatgttaatgaaattcattcttaataacatttatgtgattattttcattcttattttttggctgtttccatttaagaacatttgcattatttcgatagtggcattaataagagacatgagcatggccttggtgggctttttttttttcttatgcaacagaaggcacacatcaaaatgatgattggttcagacttaagaagagccccccatggtgggttgcagctgtagcatgatgaatcgatgataatgacatagctacttgtttagtgatatttctttctctaggttatcatgggatttattgggactaataaacgtgatggttcaaagataaaagctagtttattgttaataaaactttaaatcagtcatttttaatgcctatatttaaaacttgatttntatctttcagaatgaagtagacaacatgacttctaggatgcct

SEQ ID NO: 42983 - DNA, 430 bp, Glycine max
agctacagttacggtggctctacgtccattttgtgagtcccatatctcaggtatcacttgtttctcaattgaattatgggtgttctcagcatcattagaattatcatactcatgcaattcctttagatctgtcaccacagcaacgtatgccttctctcccaaatcattttttaaagataataatttaggatcattttcatcaattacttcctgacaaaataaaaagagagagacatcaaattttgctcattcaattgtccatgctagtgtacatttgtgacacataattgaatcccctaccctgcagataacatgccatgttttacagattatgccagtttggttgtaacacactttatattggagatatacatagaattttcttacatgaacatgtgtttatgggatctataataaacggacattatta

SEQ ID NO: 42984 - DNA, 390 bp, Glycine max
agcttgaaggaaaactggatgcattggtttatttggtaacccagctggccttgaatcagaaatatgtacctgtcgcaagggtttgtggtttgtgctcctctgctgaccaccatacagacctttgcccttccatgcagcaacctggagcaattgagcagcctgaagcttatgctgcaaatatttacaatagacctcctcaacctcagcagcaaaatcaaccacagcagagcaattatgacctctccagcaacagatacaaccctggatggaggaatcaccctaacctcagatggtccagcccttagcaacaacaacagcagcctgctccttcctttcaaaatgctgctggcccaaacagaccatacattcctccaccaatccaacaacagc

SEQ ID NO: 42985 - DNA, 291 bp, Glycine max
tctagccaaatggacttaccttgaattaattcctttgatatcccttttgttccttgtttccctttccttggtgtgaagctcactacaagccttacgtgaaaaaccatgatattaccatatccttaaggaatgttggagctctggaattgctttgggaataagtgcggggggcttctgtttcattggacaacatgttcttttggctatgctttatgatgtattgtggtccatacttgatgaacattgcatattgcgtaaatgttggacatgctgaatgacatgttgtttctc

SEQ ID NO: 42986 - DNA, 411 bp, Glycine max
agcttacccattcagttttagggttttattatgatgcttatgatgttggtgtgctgaaattgcttatggaaaactgctagggatgaagggtagagttaacctagggttagaaagtgagaatatcgtgttctgagtagaaaaagagtgagtttttgagagttggaaggccaaatctggatttagtggtatttggaggttaaagtgagttaatcctagcttgaaatgtcatttacgacttatgagaaagtttgggctgtgctagagagaaagacatatgaccaaagtgaacaaagagccatttctagggtaaaattgggtgttgagggagtcaaatttgattcggtggaatttatgtgtaaatcagtttgagcaagtttaattgatgttatagactcgtgtgaatgagagttt

SEQ ID NO: 42987 - DNA, 440 bp, Glycine max
taagtgcgggttcgggagacaaaggtcaattgttcttgatatgcgaagatgatattccgagtactgtggatttggtacaaccatgctctcctgatttccagctgggaaattggcgagtggaggaacgccccggcatttacgccacaagcataatgtaaacctttacagttctaaaagctctataggttggcctaggctttagagttttcattttgtgaaggctgtgagtcttttgttttcgaatttataatacaaggatctttcttcatctgttcctggtctatacccattctcattcatttgcatgtttacttctttttctgatacggcagatccgatgacgagtcccccgaaggtactaatacctgagacccgtctatcaacttcgagcaagaaatgaatcatacggaagatgaatgaaatgaggatgtgggacttcc

SEQ ID NO: 42988 - DNA, 364 bp, Glycine max
agcttgacagacctgcaattcttacacctaccgaggttaccactcttgacactagatgacacttgtccatgcttgggggctcgaccgactcgtcccccttctatttgtcatgctacatgacactacgagacacacatcaaccctccatgtcagccttgatgcaagagcatgaacgcctagcccatagcagcccgactccccaactaacaggttatctctaacctcttattatttgaacataatggcatccctttatctctttatgggtattcaattgtctataaggctgttagtcgatgaatatgactaacttttgtgtataaaacctgtgtaaattgtatcaaactcctccaacttatggtta

SEQ ID NO: 42989 - DNA, 451 bp, Glycine max
atgccccattgtctcactgaccgaccctgattcatgttattttgaggacacatctagtattcagagtttgcctcgatttggtaccgctctcgtggcctgcaccgaaatagtgctatatccctaaatgtccagtcaactactgcacctcaacgcatttcggggagaaccagctagctctaggttcgagtggcatttcacccatgaccataactcatccttgattcttcaacatcagtcggttcgaacctccacttaggtggaccttatatattcacatgggattccacgtgccccatgctactcgggtcaaagcataagctagtgatgcttttggttactagactcttgccatctagggtgcagcattctctgctgcttcgcctagtagcacaacacttgtatagctctcccacaacctcattttcacggtttatgctgctcccatttcgtg

SEQ ID NO: 42990 - DNA, 417 bp, Glycine max
agcttccatcagcagactcacattttactatccgaaagtctcaacctgctctgataccactaatgtaacgacctgcctcatcgctacaatatcaccattctaaatcgcgatcatttcaaattttaaatgaaaaatccattaattttcttatataaaaaaatgaaagtaatttttgtcttgacatacattcaccaaacaacacacattacttttcttatataaaaaaatgaaagtaatttttgtcttgacatacattcaccaaacaacacacattacttaagtggatacgtatatattagtatagtaacttagtacacatcattcacataatggaaataaacttgttatacatataattaaatatgtgattacatctttattcaacaaagaatatgaaccactatggggagtgataac

SEQ ID NO: 42991 - DNA, 239 bp, Glycine max
  unsure (1)..(239): unsure at all n locations
tgtatatacattgaccattacacatacagtagattttcttagaactgtttaggcttataaatntagttctaattattagacttgcagcaatatgacatcatctcaacgactatcatgttataatgaaatattctcaaggtaatgaccaattcgctatcaaggtttcaatatattaagatttgtattggcacgacaattttttattagctgattagatattcgaacctcatacatatata

SEQ ID NO: 42992 - DNA, 396 bp, Glycine max
tgctctctctatctctaacaatctccccctttttggctttgatgatgccaaacttgaatacaacattgagtgcatttggagatgagtcttgagattggattgtagacatgatccttagttttatcctgaaaatttcttaacacttaagaagagattaattcatcatcaatatgtcaattcattatatatatatatatatatatatatatatatatatatatatatatatatatataacaatgcagtggtcgatgctatgcaatgcacacgtatgagtcaccaatgtattcaatatgcaacagtgtatagtcttctccccttttggcattaacaacgccagaaattttattatacaaaaatcaaaatacctagttaacagatgaataaaccattttt

SEQ ID NO: 42993 - DNA, 246 bp, Glycine max
ttattttcattctatatcttttttataaaaatacaaaagaatcattctattcatttaatattaaccacataataaaataccaatgttaaagattaaacaccgtcacgtgttcactgttcaaagacagacaactgctttcaactggctctcactcacttcgctctttgaatgtgaaaacaacacaacacatatagcaataggacataagacggttagtttcacaattcacgaatcattgattatccc

SEQ ID NO: 42994 - DNA, 319 bp, Glycine max
tccctcttccatggcttattccctagtggatgacgcctcctctcacctcttctcctttgtcttccgctgcatctcaatggtggaaaatcaccattaaaggacctcattgaagctcaaagatccacccttcatagaagctccacaagcaagcttccatcaaagaccttatctcttctagggatttacccacccatatattctataagtccaacgttagccaccacgacaaccttcaatttaggttgagggcctactaagtacccacaacttatgtgcttactcacatgcaatgtcaacaatttatgcatgcttgttatga

SEQ ID NO: 42995 - DNA, 404 bp, Glycine max
  unsure (1)..(404): unsure at all n locations
tgaaagaaatctcaagaaccggtggttgcttatgtactgtatgtatgcacgggttgttgccgaaccagtataaaattcttgtgtttttcttcttcttccatacactttttaatttccgttgtgtactttacttttatgctttacttttgtttaagttacataacttagtagtaaagcctaattgaatctagtaacattaagaaggatcagttttaattagtcaaggttacttaataattaattcaacccccctattctcaattactccaaggccacttgatccaacacattgtaccctgagcaactgccagntaggtcttcttccttttcttttcttttcttaagagttgaatgaatccatgtaccctttatgggcctctctgatattatgtatggattcatct

SEQ ID NO: 42996 - DNA, 549 bp, Glycine max
  unsure (1)..(549): unsure at all n locations
gctttacaactcactacatatcgaacctgctagtcctngatctaatcctctcacactccactaccacaagcacggcactgatgcttcgagaccatgcgcgcccccggatccaccagatcgaccagcacgcatgcacccagagcagcatacagtgttccttcatatgctgcgcaaacacggcaagcagccccagcgagaaatggatccgctacaataacgcacacatacgatccggaagacaaaagtgtcaaacctcgggtgcctcatgagggaactcacgaacagtaatcgcgaagcgctcaccgccacgcatccaaaccggaaaccagcagggcacacttcacaaatgaatccgtcaacgcgaacccgctgctgcacccccggacggaacccaatgccataaaagcagatgacccacgaaatgatgccacgtccgcggaaaaacccatctataccgtatacacaccaccgattaaaggcacaaatgacatgtgtaaataaacatcggaccaacacagcgcaacacaaagcaatgctacatactaaccg

SEQ ID NO: 42997 - DNA, 414 bp, Glycine max
  unsure (1)..(414): unsure at all n locations
agcttcgtactctggntattgttccactgtttcccaagggacctgctcgcaggatagttgaagatagcatgagaggaagtgatagcagagaagatgaaagtggtgaataggaagaagaatggttagaagatgttgataatttaatgaatgatgatgggtttgatgacattgatgatggtgatgactggagtgatgaagaagatgatgatttgccgccagattttgatgaggatgctgaacttttggagatggggcaaggaaagactattaaacaagactcgagacagaatgatgaaatggtccttcttcctgtactccctgatggtcgtccaagagaacaatggtgatcttcacaaaagaaagcatctggcttcatatttgatattgtactggctgatttgtggatgtgcttta

SEQ ID NO: 42998 - DNA, 437 bp, Glycine max
  unsure (1)..(437): unsure at all n locations
ntnttttattacgagagctcctggacactctctccanagttattacttatcatatcaaataacttatttaatcttttatattatttcttttaaggtttagttaacaaaattattttaattttatatcttttttaaaaaattcaaaataatcattctattcatttaatattaacacattaataaaataaaaatattaaagattaaacacggtcacgtgttcactgttcaaagacagacaactgcttccaactggctctcactcactcgcctctttgaatgtgaaaacaacaaaacacatatagcaaaaggacaaaagacggttagtttcacaattcacgaatcattgattatccccacaaggcacgtgtggaaaccacaactcatgggtcaataaccataccttntctttggtttttctatcgattattagtttatta

SEQ ID NO: 42999 - DNA, 385 bp, Glycine max
agcttgtggtacctgagaaaatgcttggttcgtctgattgactaactcgcaatgttttgttctaataattccttgtttcatcatatcggctacatttgaggtagtatttttttagctacacccgttgattggtttgagaaatggcaacccaatgaacaataatttggcttcctcagttgatattcgcgagggaagagttcttccaaatttgtaacgagacaatgtattgcagaaatttactgagccaaataaagggaaattttttattcattgtccttgcattatattttcaatgatttctggattgtaaatttgtcatcataaaggtattaggttttacatagtgttctgtcttgcttacgcgatgaatttgtgtctgtgaaaa

SEQ ID NO: 43000 - DNA, 456 bp, Glycine max
  unsure (1)..(456): unsure at all n locations
cgctttgttctgctcctttntgtgtgagagtattagaatcatttttgatttgtttcttgattatcatcttggtagatttgaaatttagggagtatatgtcaataagtaataatttttgctactactttttatgtttttaatcctctgtctttctactttgacagacactgtcattttatagataaaatttcatttatttggtaggctacatatagaatactgatacgtatattttgaagaatttgcttctcccccttgtaagtcgtaattccctcaaatttctgaacaaatgttaatagaccaagcaattaatttctcattattttccttgtattattacctcttggaaaactttctgactccaactctgattactctatattgtgttcctgcttgacctatagaatttcatgatgggttagttgccaacagcctttaaagataacatacatgctt

SEQ ID NO: 43001 - DNA, 314 bp, Glycine max
agctataagaataatggcctcatcaaactatatattttctgaggggaattcaataaataggcctgctattttcaatggagtgggttaccattactgtaaaacccgtatgctaatatttatagaggcaatatatttaaatgttcggtatgcaatataagtagggccctatattcccactatggtggcaggaagtaaaaccatataatagcctatggaagaatggagtgaataagaaaagagattagtgcaatacaacctagaagccaaaagtattatacttctgccttatgaatggatgagtactttagggtatt

SEQ ID NO: 43002 - DNA, 380 bp, Glycine max
tcttatgctcacctgacgaatgcgtggctacttcatgctttcctctaatgacagtaacgtcacttctggcactacattgctgggagtttgaagccatcttctcaattaaatttctggctccagcaggggtcatgtgtcctaaggctccaccactggcagcatctatcatacttctatccatgctgctgagtccttcataaaaatattggagaaaaagctgctctgacatctggtggtgagggcaactggcacataattgattaaatctctcccaacattcatataggcgctatccactgagttgactaataccggaaatatccttatagatggtcgaggtcctggaagcagggaaaatgttgtctaagaatactgtcttg

SEQ ID NO: 43003 - DNA, 387 bp, Glycine max
  unsure (1)..(387): unsure at all n locations
agctaggacttggttcatttaaaantttttattttttattctcaatatcaagcttgagtttgtttatttagttaaacaattatacttgatcgaacatttgacaagtcaagtttaaataaatagttcatggatagctcggctcatttacaattctactaattagtaattactatatggtttgttccaccccgacctatatagtcatgtggggatttgatcatcctttatggatatccgtctttgtgttgcggtgatttcagttttttcaaatgataatttcttggtagatcatgttctaagttactaagtgagtttacggagagagatatgataaattatgtggcaatgtctctcgtaattgagatggtgtaatgggagggagtgatc

SEQ ID NO: 43004 - DNA, 424 bp, Glycine max
  unsure (1)..(424): unsure at all n locations
ntatgatccatcacatgtcatctattacaaattcaaaattaaatcatttcttattttcaaaacacatcaaacttaatgacaaccacaacaattcaagtctaacatttgaatttacccagaaaactacaataacaactgcacatatataccctttagcaaatccacaaagaattgatagttcaaaatcaaaagttaaagaacaaaaaaaacccaaaatcaaatctacacattcaaagcccctagaacccaaaatcaaattattaaacgccaacaaataaacctcatagaatgaaacaaaaacatattagagaaattgaggttggggaagaaaggattagtggcgatcacaacgttatatgttgagactcgttgtccctgacaatgccgacagatgaaggaacgatcccatcacggacaataactc

SEQ ID NO: 43005 - DNA, 404 bp, Glycine max
agcttgtctcagcgtttatgcgagacggatacctatatgctagctatcatcgccaagtaccaagaagatttaggtcgagccacggcccacgagcgtagggtcgcagacgagtatgcccaagtatacgcagaaaaagaggctagaggaagggtgatcgactctttacaccaagaggcaaccatgtggatggatcggtttgctcttaccttgaacgggagtcaagaacttccccgtttgttagccaaggccaaggcgatggcagacacctactccgcccccgaagagattcatgggcttctcggctattgtcagcatatgatagacttaatggcccacataattagaaatcgttaggaaacttgtatggtctctcagaccttgactagatacgactttctttttga

SEQ ID NO: 43006 - DNA, 413 bp, Glycine max
  unsure (1)..(413): unsure at all n locations
cttgatgatatggtcttcaccaaagaaaggatcaaagtgtttctaaagagaggcaaatctgatcatcatgctttgataaatgcaaaaaaaaaaaaaaaaaactagggaaaatgaagagggtgagaatgagggagaagcccatgctgtgactgccattcctatatagccaagtttcccaccaacccaacaatgtcattactcagccaataaacaaaccttctccttacccaccgcccagttatcgacaaaggccatccctaaatcaaccacaaagtatgtctaccgcacttccaatgacgaacatcacctttagcacaatccanaaacacccgccaagaaatgagttttgacgcgaaaaaaaaaactcgtagaattcacccaaattccggtgtcctatgttgacttgctcccat

SEQ ID NO: 43007 - DNA, 221 bp, Glycine max
agcttccattcccgagagcatttctcatttgagcgtttcagcctttgctttcgtgtagcttaggaaaaatgccatttcttctcctttcttccttccaaaaccatttctagcgtcccaatcactttctccatcacccacaaccaccattagccaccacaaatcgtctttggtctcccgtgaaaccccacaccaagaggaacccttcaaccgaagcggaaact

SEQ ID NO: 43008 - DNA, 328 bp, Glycine max
  unsure (1)..(328): unsure at all n locations
tanatccacttactcgcgctaagcgcgagggtggcgctaatcgcaacgttgttggttcagagcctatttaaagctattttatgcagaattagggtaagaatccagagaatcaccatcacacatagaagtcagagcccaccacagtgcctatttctggaaaagagctctggaggcagcaagaggagcaacttttgcagagatacctaggttgtgtaattacagagagattagtgagttgtagagtgattgtgaaatgctgagaagaggaggagggatcccccttcttgtgtatggagcaatattatctactcttaatctcattattggt

SEQ ID NO: 43009 - DNA, 390 bp, Glycine max
agcttatacttacttctgaagtatttggttcgcccaagtgagctggtttcttcacactgaagtaactagcttgtagagagattttagtttaagtttaatctattaccagttaaccgtaatccattacataattcagttgagaccatgtctggtttttcatgaatttccactttaatcgattaccaagtgatcataatcaattacttcattcttaaaggtgttcctagaagtgatcaagaatagtttaatcgattacatcaagaatctaatcgattacattgttcttgaatgttttccagaagttaggaagaacactttaatcgattgagatgataatataatcaattacttcttcgaaataatcgattacattggatatttaatcgatta

SEQ ID NO: 43010 - DNA, 430 bp, Glycine max
  unsure (1)..(430): unsure at all n locations
tgttggattatggagcacccatcatatgaggttttatgttgcgatcgggagatggcgcaaatcaactctcccacttccacaagtcaaacataaacacaccatcctcagttgcccacctttcaactgagctcacgcattcccatgtagcccttatcctcgctcctctcagcaccgggtccccatcaacccctccaagcttccacaatatccaagcaattcaattctgaatatcatgaaactaccctaaaccaagaaaacagggtagaggcagaaaactctgtccaaaacacattcaaataccacaactttccctactcanataccccagtaacattctcttcgttctgattcgttaaccggtagatcgccttgaaaattttactggaggttactagtacatacatatacgatttgacgcgtgggatctact

SEQ ID NO: 43011 - DNA, 431 bp, Glycine max
agctaggagctgttattggcaaattactttctgatattagctcctatagaagattgataggaagactcctttatcttaccactacaaggctagatataacttttgcactgaatcaacttagtcaattcctatctgctcagattgtcatcaagcagctgctcacagagtacttcgctatatcaaaggctcacttgcatgtggccttttctacccagcatcaaacgctcacaagctcacagcctacaatgactctaacttggccagttgcattgattttagaaaatccattactggatattgtttatacattggtcttttatcttaccactacaaggctagatataacttgtgcactgaatcaacttagtcaattcctatctgctcagattgtcatcaagcagtttctcacagagtacttcgctatatcaaag

SEQ ID NO: 43012 - DNA, 453 bp, Glycine max
  unsure (1)..(453): unsure at all n locations
cgcttgatggtgtcgagaagaaatcacatgtttgtcttcatcttaaagggggagaatgttaatgtatgtatacatgattttgatgatgtcaaagaagaatctaacaaggctgcttcaaatgataagtatttgcttcaagaataattcaagattgcttcaacaaacaaagccttgtttcaagattcactaaagaccaagccttgccttaaaacaaagtgctttcaagacatgcaaggctctggtaatcgattaccaggaagtgtaatcgattaccagaagacagggttgagaaatagctgttgaaaaatgttttgaatttgaattttcaacatgtaatcgattaccatatgtctgtaatcgattaccagcaatggaactttggaaattcaaattcaaaagtcataacctttcanattataactgtgaaattgattacacaaacattgtaatcga

SEQ ID NO: 43013 - DNA, 407 bp, Glycine max
aagcttgcggaatgatgagcacacaattttcaatgcgtttcccttctccttttctggaaaattgtacgatgaatcaacaataacaatcacaaactaaactttagtttcaggctttgaggtgcagtttctatgcaagaaaagataaatacaattaataataaccatacagataataaactttataattttataaatttaagaagttccaaaattgtttttaacacaatcctaccctaaaagtttgcagaataaattacattttccaccaattgcagttttgtagttaaaaaaaagtttcttatataagagttgattaggcattggataactaaccacatagtatattgcgaggttgaccttatcatctatataactagaattcaatttgaaacgtgtcacttggacta

SEQ ID NO: 43014 - DNA, 420 bp, Glycine max
ttcataagtgaaatcaggtgcagccatctccctatgagtcctctcacgaggtggaggttgagccatgttctcagtataaaaattagtagtggaatgctcaaaatcagaatattcagaatcaccctcaagagaatgctcacaatgcatagaataaccaggatgcacactatgcctaactaatctatgaaagtttctatctatttcaggatcaaagggttgtaaatcacctggattgcccctagtcatgcactatatgcaacaaataatgtgtttctcaataagcacctaacaagggggtaaaactacaactatactcaaacaatatcaaaatgatttgaaattttgtgaggaacaccctaaaatcatgacaagatagcacaaaaaatttcaaacaaaattcaaagtctaactatggaaact

SEQ ID NO: 43015 - DNA, 118 bp, Glycine max
agccttgcaggatacagcgatgcctctgctgatgcggatgatcactacagatccacctgggtgatcttcatcagagcgacactacaaaccgttgtagcattaacacattcgtgtctca

SEQ ID NO: 43016 - DNA, 427 bp, Glycine max
  unsure (1)..(427): unsure at all n locations
agcttcagaccaaagcaactcaaaatctttgtattcaaaacccctcaatttaatggattttcaaggtttgagaatagggtaaatttgaagcaaactttcacctcacacaagtctataacatcaatttaaacttgttcaaactggatttacacctaaaatttcaccgaatcaaaatttgactcctcaacacccacacttggcaacgtatattgagatttgaaatactatcaagcttgccggtgtacctgaagatgctattaggcttgcctgttttcattttctttatctggggaggccaagagatggttgcattcattcaagggcaacagtttaaagacctatgatgaggttgttgagaagttntctaaaaactatttcctagagtctacaactgtagagggaaaaagctgtatttcttcattccatc

SEQ ID NO: 43017 - DNA, 438 bp, Glycine max
  unsure (1)..(438): unsure at all n locations
tcagctcgctttcaatctccccttttgatgatgcaacttctttttcaagaaacacacacacacactttttcctagtcgatcactcacataaatttccattctcccccttagtttttgaatttatgcttctcttaaaattaagttgattactcatgtgagttcttgatttaatccctatttctctccccctttggcatcaacaaaaagccaaagtgtgtaacaagtttaaagcatacaaatacaaataagcatccatacaacattcatggaaaatataaaccaaaccatgaatagatcaaatatataaaaatcacatagtcaaataacataattaatatttgttcaaacataccaagcaaataaagaaatagtanattggtcaaatatcataataatataaattatttggataagtcactaacatctagtagtcctaat

SEQ ID NO: 43018 - DNA, 400 bp, Glycine max
agcttataaagaaaaatgatggcttggttttaacccaatcacattatgttgataagctattgaagaagtttaattattttgatgtaaaacctatttctacttcttatgactcatccattaagttaaagaaaaaattgaataaaggaatttcttcacataaatattctcaaattattggttctttgttgcatttgacaaacttctctacgcctaacattgcatatgaaattggtagattaggaaggtatactaataatcatgatcattctcattggattgcattagaaagagtttttagatacttaaaacgaaccattaattatgacattcattatacatgttttcgtgcagtaattgacggggttagtgatgcaaatcgaatttcttgatctaatgaaac

SEQ ID NO: 43019 - DNA, 438 bp, Glycine max
tatagaatatataataagagaactatgattattgttgaatctattcatgtttcctttgatgagtctaatgctattcctccaagaaaggatattctagataatattgcataatctttagaacaaatgcatatttatggacaagattctaaaggaaaagggaaaggaagcaataaagatcctccaaaagaagccaaatcaaattatgaacttccaagagaatggaaagcttcaagagatcatccccttgacaacattattggtgatatctccaaaggggtaacaactagacattatcttaaagatttatgcaataatatggcttttgtgtctatgattgaaccttaaaatttaaataaagccataatagacgatcattgcatagttgctatgcaagaagaactaaatcagtttgagagaaacaatgtgtgggaactagta

SEQ ID NO: 43020 - DNA, 423 bp, Glycine max
  unsure (1)..(423): unsure at all n locations
agctantaagtaatggtgattggctattgtgtttcatttctaatgaaaaatcatccttctattattctagtgtcttacacgcctccttttattatcttaatgtagggccccaaagattgatatgttagaccttgagagtctcttcttagcagaagtcttttcaagtcctgccaaaaagtcaaatgtgcaaagctcaactggtcctaaatatgataaagtgcaacaactggtaatttagattcagtttgcagtagcactgacactgcttacggatatttacataatctgcttgtttataactaaatgtgacagggaaatgcaagagaactaattactaagaaaatgcaagaaatgcgatagttcctagtaattataacccggcgcatcaatgtctgtggtagttttagtatgatactattatat

SEQ ID NO: 43021 - DNA, 358 bp, Glycine max
  unsure (1)..(358): unsure at all n locations
tcaacatcagaccacttccgggtgctggaactacttcttatggattngatggagcctatgctaggtgaaagccttggaggaaagaggtatgcctatgttgttgtggatgatttctccagatttacctgtgtcaacttcatcagagagaaatcagaaacctttgaagcattcaaagaattgagtctaagacttcaaagagaaaaggactgtgtcatcaagagaatcaggagtgaccatggcagagaatttgaaaacagcaggttcactgaattctgcacatctgaaggcatcactcatgagttctctgcagccattacaccacaacagaatggcatagttgaaaggaaaaacaggactt

SEQ ID NO: 43022 - DNA, 389 bp, Glycine max
agcttgccacccagctcgcccaggcgagtctagtttgcccaggcgagcagggttgcttcctccagaagcaacagccttctggaggaatcttctggagggcccaagtgggcctggttgctatttgcacccctatttttactaagtacaccccctgcctttttttggtgattcttttttcataaagttacggaaacttacgaatttcgtaacgatacttgttttctttccgtaatgttacggaacctggtggattacataatcatcccttttttgacttacggaatgttacagaacctcactaattgtgtaacgatgcttccatttgatttccggtgtgtcacggaaccttacggattgtgcatcaatattttcttttgttttccggcatg

SEQ ID NO: 43023 - DNA, 464 bp, Glycine max
  unsure (1)..(464): unsure at all n locations
tataaaactcagctttcaacaaagaaacatgttatccatctatccttaaatatacatgttatcaaccaaattctacaagtcaccagaggtaattgccaactcaattcctcgtacaatcaaaatttataaactcaaatttacaatccatctccaaagctctgagaatcaatacagaaagttctctttgatgttcaagaaagatcatcaaaaggaagcaatcagaaacattttaccatccttattatcaataactataaaggggcataaaatagaataaaacttagggcctaaaaaataaaaagaaaagaaaggcatacataattatatatacatacatatatagcttagtgaggttttaggcatgataaacaaggtgagcaatggagtcatcatccatcttctagtcagcaaagctgggattgtgtctncgagcaagagactccttcaccccttgtttccatttc

SEQ ID NO: 43024 - DNA, 387 bp, Glycine max
agctatgatggtgttgagaagaaatcactatgtttgtcatcatcaaaaagggggagaatgtgaatgtatgtatacatgattttgatgatgtcaaaagaagaatcaaacaaggctcattttgcttcaagattaatacaagattttttcaacaaacaaagccttgattcaatatttcttcaagatcaagccttgcctcaaaatgtagagatttcaagtcatccaaggcacatgtaatcgattaccaatacatgtaatcgattaccaaggcacatgagagtgtgtaatcgattacacatcatatgtaatcgattaccagagactctgaacgttgggaattcaaattataactgtgtaatcgattacacaaacattgtaatcgattaccag

SEQ ID NO: 43025 - DNA, 457 bp, Glycine max
  unsure (1)..(457): unsure at all n locations
ntntcggagccttttcctgcgaagacaaacgtttggaattgtaattttcaaggaagtctcaatttaaaggttgaccaagaaaaaatggcatacaactacttccaacacaaacatcaatttagggcaaactcacatacatacttttatgatcatacatgcacgcgagatgctcggttacctaaaaaccatgcatattcaaagcattttgctacccaaaatacatacatgcatttctttgctaaacttatacacatgcatacttgaagtattcctgctacccaagatcatatacacacatgtctttgctaaatttgtacacatgcatattcaaagaatttttgctacaaaagaaattacatttcatgcgtattcaagtatcttgctactcaaattacatttcaattcaacaaggtttttggtgtggtatctttttgctatccacatgctacatacatat

SEQ ID NO: 43026 - DNA, 348 bp, Glycine max
  unsure (1)..(348): unsure at all n locations
agcttcttatccaacgctcatcttggtggtgaagctccttcttccatggcttattccctagtggatggcgcctactctcacctcttctacttcgtattccactacatctacatggnggaaaatcaccattaaaggacctcattgaagctcataaatccaacctccatataagccccacaagcaagcttccataatgtggtaatcaaaccacaatagcttcaagtaagtgctccttaaacctacattaatttattgctttaccttctctaccattggtgcttctttattcattatccatgtatctcctcacatgtctggtgataaatgttttaacatgattatttatag

SEQ ID NO: 43027 - DNA, 433 bp, Glycine max
ctcaagcttgccattctccattagaaatggaacatatagcatagctgtgctacttttgctcttaaattttgatgagactctatcaggggaaaagagaaagttgcaactgttggagctgatagagatgaggatgaatacttatgagtcttcgagattgtacaaagaaaaagtgaaggcttgtcatgaccagaagctgatatagaaagattatatgccaaaccaacaggctgtgctattcaactcatgattgaagctatttgcaggcaagttaaagtctaaatggtctggaccattcaccatcaaggatgtcacgccttatggagcagtggaattatttgacccttactcagaggctctgaatataagatggatagtgaatggccagatattgaagctataccactgtgtgaacattgagaaattgatcaccatt

SEQ ID NO: 43028 - DNA, 429 bp, Glycine max
agcttatgacattaaagaagcacttcctgtgatgtaacccaattccaatttgtgttatttttggttattcatgcatttgatcattgggaacttgctgtattatctgtacattggagcatatcatcctccctttgaatggtaaaattaagggtttcaatttcttgggaaaggactaagtttaaaacttataaaatccttttgaaaaatcattcttttcgctaagcgtctgcttctcggtaagtgcataatcgttcatgcgctaagccatgagtttcagcacttagcgcacaaccctatcatttgaggctgattattgttgctaagctagccaaggttagctaaaccaaaataaattcacgttgaattcagctaagcttcagcctgaatggtaagagacagcttatctatggctaagcgggatctattatc

SEQ ID NO: 43029 - DNA, 423 bp, Glycine max
tctccttccttttcctataataggggaaggagggaagttcatatatgttcaaccctcttggtgtctaggattcacttaaaaatagtgagaaaaattgtttccgtgaagaaaatccaagccgaggtacttccgtaatgcttccgtgacctttctgtgggtgattttgcgaagattttcaaccgttcttcgtcattcttcagtcttcaaccggtaagttcctgaaatcgaacttttcaattcattctatgtacccttagtggtcctcatttgtttcgcgtgcttttattttcatttcatttactttccgtacccccttttgtcgtgctttagtcatttatttaagtcattttctcgcctaataaaaaataaaatatatttccaccgatcattcgtattgaacatcctttaatttctgtaaaatga

SEQ ID NO: 43030 - DNA, 215 bp, Glycine max
  unsure (1)..(215): unsure at all n locations
cacgctatgagcaaattcacgcgacaatatttttnttgttgtatgtccgaccgagacccgtcgtatatcgagacgctcgaaattgatagttgaaactctgagtctattcacacgacaataactcaatactctcaagtctgattgaatcctgtgttatatctagacgctccatcaagaaagttgaacctttgagcgaactcactcgacaataacta

SEQ ID NO: 43031 - DNA, 346 bp, Glycine max
tcaacattcagatttgagcgtctcgtcttattacgggactcaatctgatctattcgagtaaaacactatcgccgtttggattggctcagagattcaacattcaatatcgagcgtctcaatatatgacgggactcattcatacatccgagtaagaagatattgtcgagtgaattagctaagagctattacaatcaatctcgagcgtctcgatatatcacgggactcaatcagacatccgagtaaaaagttattgtcgcttgaattggctcatagcttcaacattcaatttcgagcgtgtcgatatatgacaggactcaatccaacatccgagaacacagttattgtc

SEQ ID NO: 43032 - DNA, 222 bp, Glycine max
agcttcttatccaaggctcatcttgttgtttaatctccttcctacatggcttattccctagtggatggccccacctctcaccttttatcctttgtctaccgctgcattttcatggtggaaaatcaccattaaaggaccttatcgaagctcaaagcatcatgctacataaaagcgccccacacacgctctcatcagcacggttccttcccttatgcatgccct

SEQ ID NO: 43033 - DNA, 441 bp, Glycine max
cttacgattcattctatgtacccgtagaggtccatattgttgtttcttgcattattattctcgaggtgattactttttataccccctgctgacgtgcttaagccattttacttaagtcagttctcgctcaacttataaattaaataaattcccaccgaacgtatgaattggattatccattaacttcagttaaaataaattccgaccgctctgtcgtgccgaaaccacgatggaaatcaaaaagaggtataatatcctataatattcaaaatagacactcttttattaaaataaaagcggataatcaatcggacggcttttctttgggatttctcattcttaatcgaatcgattaataactctcgtgaaactaaaggctaaaatcaattcgcctagtcaagctcgaccataaaataggctcttgaaagttcgcatctacat

SEQ ID NO: 43034 - DNA, 191 bp, Glycine max
  unsure (1)..(191): unsure at all n locations
agctagtgcatataggcgtaaaattactgttaatttgtgcctggcctatnggaaaccagaacacgtgcgagaggacaaatatattttcctatctctataaaactggctaccatgttagatatatatacaggtccttcattctcactacaataatgctcatttgttcctgcccctacactattctttaataa

SEQ ID NO: 43035 - DNA, 355 bp, Glycine max
ctagagctcgcaaaagagacgccagacgaaccttattctctgatctggagctcattgctcacctcttgaaggaattatggggactcggaaaccgcagacgaagtctccaaaaagttattatagttggaacctcataaagcagacaatcatgtattgctgtcaaacttgtatgctggattaggaaaacgggatgaggtgagaaaggtacggcccagaatgaaagagaatggccttcataaagatgcacgctgctggaggattgaaataggacgaatggcttataaatatcttgctagagacggatcactttcagaatcaaaaaagattcaccagacctggacttaattggagaaaa

SEQ ID NO: 43036 - DNA, 403 bp, Glycine max
  unsure (1)..(403): unsure at all n locations
agctantcaccatgttgaaaatgtgttctattatttctctctgagacaccattgtgatgtggtgcatatgcagtagtaagctctcttctaatgccatgttctgcacaaaaaatttcaaattctttggagcaatattcatcacctcgatctgtgcgaagagtctttatagacttttctgcttcattttcaacacttgctttgaagctcttaaatgtacaaaacgcttctgatttttcctgtataaaataacccccacttgttcttgaaaaatcatcaatgaagcaaattaactatcttctacctccattagaatatgggtttattgcaccacaaatattagaatgcaccaaatccaagacatcgtttgcctctcatgacttctctttgggaaattgagatcgat

SEQ ID NO: 43037 - DNA, 138 bp, Glycine max
tctcttacaatcatgtttgatgccgacatttagagcaggccgacacacccaaccccgttgcgcgaacgcttgagtatttcaaaatatacatagcaactatacatcttagtgtaataattataaaataacttatgtata

SEQ ID NO: 43038 - DNA, 362 bp, Glycine max
agcttctactagaagagattatcatgagaatcaaggatggtatactcatcaatggctatgaatgaggaatccacaatgagctaaattagagcactttgggaatttgttgaacggctcacttagcgacactagcttgctaagcgcaatttcatccagaggaaataatttgcttagcgacactagcttgttaagcgcaattccagctagaggagaaattgcgcttattatgaatgtcgtacttagaagcaaccttttgcgagtttgagttgggccagcttgcccaagcgagcaaaatttcgcccaggcgagtttaacggggttacaaatatgttcagcaacgagaaaaacatgattcttctacc

SEQ ID NO: 43039 - DNA, 426 bp, Glycine max
  unsure (1)..(426): unsure at all n locations
tgtagaacggctggacatgatatatgttatggtgttggtttanccagcggttcaaggataaaggaatatcccacattatttccatgacacgcgtgcaacaatgatgattcagaaattttatgcaaaacttgtcatgcatgcacctatgtggacactcaagcatcaagttttgtggtcatgtgacactagggctcaagattcatttttcctatttaagtcaatccagtgtttccaaaacatgctcttttatcaattcatgcattcatccgagtccattttgggtgttcgggaaaattttcacagcattcacccttcaggtgtatacatattttatcaacaaaacactgttgtgttntgatcagtgaatctttttcatagaaagagttggagattatttctttttgaaagcatcttggctttttagtc

SEQ ID NO: 43040 - DNA, 347 bp, Glycine max
agctagagatgaggaagtgtataatggtttacttcctgcttttattcgctgaccacagagtggtacctgtagatatgtcgcgggggtcaggagaccttggggacgtcaggtggggtgctattgtccaaaaccaagcttgaccaatcccgacccaacctgggcatagtcggtcagtgagaacctgtgatgtacctaaacaggcgagctcctggcagtcaacagataaaaggaacaaataccacaaagcaaggaggcttgtggtggctggccagctgtgaattttgtgtgatatgtgattatggcctctggtaatcgattaccaagggtgggtaatcgattacaacgct

SEQ ID NO: 43041 - DNA, 428 bp, Glycine max
  unsure (1)..(428): unsure at all n locations
tctagccaaatggacttaccttgaatctattcctttgatagccctcttgagccttgtttccctttccttgttttgaagctcactacaagccttacgtgaaaaaccatgatatcaccatatccttaaggaattttggagctttggaattgttttgggaataagtgtggggggtttttgtttcattggataacatgttttgttggctatgcttcatgatgtattttgggccatacttgatgtacattgtatattggttaaatgttggacatgctgaatgagatgctatttctcanaggctacagagtaaaaaaaaaaaattcgaaaaagagaaagaaaagcaataaagttgagtgaatatgatcttnaatggcacaagaatgatgagactctcggttctactctttnnntgataaatttatctttacttc

SEQ ID NO: 43042 - DNA, 431 bp, Glycine max
  unsure (1)..(431): unsure at all n locations
agcttcaatacagtgacactagtgttgcatcaaaggagctgacaaagtcttttggatgggatacatatgattctttcatgcagcatgatgttcaagaactaaatcgggttctctgtgaaaaacttgaagacaaaatgaaggtatggcaagagatttggaatgtttgttcatgattcttcttgatgagtgatcataccaaatggttgttgtatgttatttttcttcaggaaactgttgttgagggaactatacaaaagttatttgaaggacaccatatgaattacattgaatgcatcaatgtagactacaaatcaactagaaaggagtcnatttatggtacttccttatngcatttgaattcaattatatgtttagttcttctttgttatgtaattctaatttagttnttgcatatgcatgttagatcttca

SEQ ID NO: 43043 - DNA, 442 bp, Glycine max
  unsure (1)..(442): unsure at all n locations
tgactcgcaccaaacatgacaagtttaacatgctttcattatatctcttcacaaataactatcataaagcataaaccttgtaaaactacccatcatatctcccaaaacccaatacccacgaaaatttatgtgagaagaagtctacccaaacctgaaatttcgaagtcccacacgtagagatgcgcttcacgactccgaaaatggcttcctttcgcgatttggagcagaaatggtgaccaaaggttggagctttgttggagcttcaatggtggaggaagaagaaaggaatagcaacgtgagagagagggagaaaagcttctgcacttttggctgagtgagtgaggagagagggaacgttgctttntagtttaaaaggcttcctctttttntttntaaaaaaaaaagggtatgccacatgtctccttttgagtggagcanaaag

SEQ ID NO: 43044 - DNA, 402 bp, Glycine max
agcttcgtgtggcctcaataagttgtctatatgtatattcaagagtacatgagctcctttgtttccttatcttcatcctcaaaatcccttttgctaacaattccctattgcattctttccttttgacctttttattgtggggaaccccaccatgcacaaacatgacaatgggctgtcaaatagtaacacagcaaggggctcctggtatgcccacaagtgacttatttttaaccacattgactaatatttgttagcatgcaaatcgaatttcactgcagaacaataataaatcggtcactaactacacaaattcatcatctcatcactcatttggtgcattatattgagactttttccttttctacaatagcatgaaataagttaaatgcgccatcatatatt

SEQ ID NO: 43045 - DNA, 439 bp, Glycine max
tgtcaaactgcagtaaaacatgtggcagtgaaaaagaattaccattctcatcgtccagttggtgctgtaggttgcattgagcaatctttgattcaagctggctagttgttcttcctcccaagaaaacaatgctctcctccaatcctagttccaattccaaactctattttgatttcatctagaccataaagtatctttatctgttgagatactgaataatctagcaaacatatccttcaatatcgctttatctatccatttctgttcccagaattttgttgacaaaactacctagtcttgggcaccacaaccttaaatccacagctcctaaccttaatcaaaatccactccctcaagtttctcctatttctgattacatgatggccatgctcattccatgacctcaatcgagacctatgctggccaactgtgcacttgc

SEQ ID NO: 43046 - DNA, 280 bp, Glycine max
agctagaaaacaagatgttgagagtgttttacagttatcacaagctcattttgaagtcccctctttcaaaaaatagaacatttaaaattgagattgatgtgatagaacagaagtgttttactactacagtaaacagtgaagagcggttatggcattacagatttggccatttaaattttagagatctgattaagctaaactcaagagaaatggtgttgggtttgcctcagatcaagcctcctagtgaagtatgtgatggtttgttacaatgtacgcaatc

SEQ ID NO: 43047 - DNA, 455 bp, Glycine max
  unsure (1)..(455): unsure at all n locations
ntaagctctgcagtttatcttattaacagagttccctcatttgtgttaaactttaagagacctcttaatgccctttgccatcatttcacccttaatttttttaatcatttaccaccttatatttctttattgtgtcatatatgtgcatttgcatcctcaccagcgaacaaaattagaatctatagcaatgaaatatgtttttgtaggatacaacaccactcaaaaggatataatgagtatcatccatatacaaaaagattttttgtatcagtggatgttacatttcatgagcatgaactgtttttccttgaaaacacttcattcttcacctaaaagggggtgatttggaggtgtataatcatgatagacttgatcaagatctcaggttatgtgatgatatgccgacaacaatctatgatggaattctagataatggagatgagaacatggatgat

SEQ ID NO: 43048 - DNA, 400 bp, Glycine max
agcttgaaggagcatctcacagtccactttcattattttctttagtagagaacaaaccaagtttgtgtgcgcgagtatcaacagagagactggcgaagctttcaattaccgacttggagtctggtaatggcaggcctccactccccgaggagagagattccaaattggagccattgttgtgtaaagatcattgaagtctacttcgtatcataagggaaaaagtggatttagccattctgttagaacaaatagaacgaatatgataaaggctaaccgggtgtaatcaatgacagtcaaatcatttactactcatgtcttatatacaaactaatattgatgggccatgttttacagaccttacctggaatcaccttactgggcatatttcatcagaacttgc

SEQ ID NO: 43049 - DNA, 369 bp, Glycine max
tctcgcatatatatcggcgtcatctttaagagttcattgtctcatttcgagtagaagtctcgacttgttcttagtctaatgaatgaggtcattggagtattcattggttgcattaaatgcacgttctttcttcatgcaaagaatccactctctgtcattaaggcgttgaacactacaacagaataacacttcctttattgttagaatatgtatgtgcagcaaagctcttcttctgatgactattgaagaatttcaaatcttgatttcatttattcttcatatgatgtgacaaatcttataagaatgcatatgcacaacatatattagacatagaaaactaaatgaatttttaaatatcatctttaatat

SEQ ID NO: 43050 - DNA, 393 bp, Glycine max
  unsure (1)..(393): unsure at all n locations
attagtgtgctaacttctattgggatatgagtactcagagtgaaccttgtacattgcgactcaatgcacagtgcaattcttgcacatatggaaatctagctcaaataatttctgtatctctgtcaagctntactaaaccaatcacatacacacacacacacacacacacacacacacacacacacacacataacatgaaaatcaataattaaaagcatataattgctgcagctaaatacgcacaagcacaatagacactacacaaagttttttctgtcagtctgaaggtgaattctttggagattacaattctaacttattataattattctacatcatataattaggcactttgataatcaccaactaattaatctagaattctattttaag

SEQ ID NO: 43051 - DNA, 370 bp, Glycine max
  unsure (1)..(370): unsure at all n locations
nggaggggttgatggngacccggtgctgagaggaacgatttttagttctacataggagtgcgtgagctcaattgaaaggtgggcaactggggatggtgtgtttatgtttgacttgtggaagtgggagagttgatttgcgccatcgcccgatcgccacctagtatcacatatgacgggtaccccataatccactaagcttgatgtgagaaagcgtggaagagtcagtcttcctacttttgtttgttgaccacagagtggtacctggagatatgtcccgggggtcaggagaccttgtggacgtcaggtggtgggccattgtccanaaccaagcttgaccaatcccgacccaacccggcatagtcagtcagtg

SEQ ID NO: 43052 - DNA, 317 bp, Glycine max
agcttgacagattttgttccacatatttttattaatatattaagattgtatatcataatcatataatatcataatttcaggttcaagttgcatattaaggtcatatataacacaggaagtacggcattcatattgtttgatcgggtagataatatctttattgtaaaatcggcaaggatgtacttgaagagaatgaaagggtacatctaaaataattcccaacccatatatattgtttatacagattatattataagttttctgatttattatataaatcatataatgcacttcccaagggaattaaacgtcatcaa

SEQ ID NO: 43053 - DNA, 448 bp, Glycine max
  unsure (1)..(448): unsure at all n locations
atgcacacattcacacacacacacacactctcactctcacacacacacacacacacacacataaacccttactctattttctttcgtaaaataattaattccaacgacattcataatacttcataggaataaaagaagtgaagtaaatttttgtgaaaataaaaactttttatataaacttctcaaactcgttctcctttttgaagcatacataattttctagtttgtaaacacatgttgtactaaaaaacaaataagttctagaataaataaaccatacattctcaggtgataaatatggataaacaagtctatctccatggtcaccaaatatagataaataagtttcataagtaataataaatagcaagatgtaagtgtctcaatggaaagattaagtagcatatacaatcccataatatcaattatagagatatatagtacgtcn

SEQ ID NO: 43054 - DNA, 380 bp, Glycine max
  unsure (1)..(380): unsure at all n locations
gctatacatagattttagtaatgatcttctattctagaantaaaaaaaacttaatgccactaacctagggaattaaaagaacttaatggctgagtgtaactgaaattgtggcaaccaaaagtcacccccaatagccatcaagccaaccaccatttggtctcccaaaaggctgatgcctacgttgccaattgggcccttattacaactttaactaaaccaaactaaagcccttttagttgattaacccaaaacatatttttggtcagccaactntacaaggattgggccattatttagacaaactaaacactctaaaattgagacaaagtggtgccatttaatcctccttcatttgggccatgatacaactcacaaccttt

SEQ ID NO: 43055 - DNA, 393 bp, Glycine max
  unsure (1)..(393): unsure at all n locations
tcagtatttggattccgataacagacatggtagatatctctatgaccgtagtaagcttaattaaggaaaatatcttttggtgtctaatttaagtaattatctttagggatctaatcagaatatttatctatagtgtgcctaattaaagtaattatctttagagatcatattagaatatctatctatagtgtgtctaattaaagtaattatctttaggagtctataaatgagaagctggagtctatctactagtgttggaacttcttaaggtattactttcaagtaaattgttatttgtttcacctttttttcatatttttttcagccatgtttataatattaattgatcatcatttgctcattcgttntaacaaatctgattgcaacaaatct

SEQ ID NO: 43056 - DNA, 394 bp, Glycine max
agctattcggctcatgctgggaactcctttatctcaatacccgtgcagcctaaggcacccacccagagggaagctccccaagttccaactccgaacgcgactcgaccggccggtaattccaacacgacaaggaacttccctccgagaccgttgccggaattcaccccgctcccaatgacgtacgaagatcttctaccatccctcatcgccaatcatttggccgtggtaactcccggaagggtcttcgaaccccctttcccgaagtggtatgaccctaatgcaacttgcaagtaccatgggggtgccccggcgcattccatcgaaaaatgcttggcccttaaatacaaggtccaacatctaatggatgcctgatggctgactttacaagaggatc

SEQ ID NO: 43057 - DNA, 448 bp, Glycine max
  unsure (1)..(448): unsure at all n locations
tanaaccccttgttcattactaaacaagctgaaattaatcacaatcacaagcaaggtatccaaactacatgcaagagataagaatgaaaaatagaaaagggaaagaaaagatgggttgccttccagtaagcgctcttttaacgtcactagcttgacgcatcatcctattatctaggatcaaagcgtagaacagtgttcaatctttccatagctccaccatgatattccttcaacctttgtctgttcactacccatgtcctgtcaggatctttagattgaggatcacaaagctccactactccatatggtcggactttcttgatggtaaatggtctagaccactttgattttatctttccagggaacaatttaagtcttgagttgaaaagaaacacctgttgtcctggctggatgtccttcttgagncaaattttgtcatgatactttt

SEQ ID NO: 43058 - DNA, 367 bp, Glycine max
  unsure (1)..(367): unsure at all n locations
agcttggcatgttgctggtagggttccttatcttttctgctgagnattctcttgcctttgagtttccatggctagtttccgcatcaagtgatggcaagctggctctaattgatgtgagaaagctgttgaagattaacaagcgagctctggggaagagagtctcaaaggtaaagcatttgggtggagacatagtatagcctccacagaggatgttgcacggatttaagagcaatcttttctctgtggatataggagctgaacgaattgtctgtggaggtgaagaaggtgttgtcacgatctggaatttcacagaagctttggaaattgaacggagagcccgtgcattaagaggaatacgattatacaa

SEQ ID NO: 43059 - DNA, 353 bp, Glycine max
  unsure (1)..(353): unsure at all n locations
tcttacggaagagagtggcatttcttttttatattctacagaattacagaaatcaaaacatagtggttggatgacagagcatcctggagaattctctcctttttgaagtccaaaaaggaacagttggagggctctggtaacacccatctattgaaatttgaaagtactaaagttcattcttttaccagtggaagttatactacaagttttaagacgaggttcacaatggcacccctaattcatgaggatcagccaaggcttttcatcataggttcacaacatctaaattngacaactctggtacggatggattggggaagatataactggtgcgagctttctcgattatacta

SEQ ID NO: 43060 - DNA, 364 bp, Glycine max
  unsure (1)..(364): unsure at all n locations
agcttagcctaagtctacatatnttcaaaatattaaganagtcgaagcttagcgcagtatggtgtgcttagctcagtctcatcagaatgacactcatgcttagcgcacagggctgttagacaaatgacctcagttatcttaagaagggggggttgaattaagatacaaagactattccctaattaaaatttcactctctctttttgggttaacaatgcacccttaacatgaattactcaaaagataattcaaaataaacttcttcaaagcaaaagataaatagcaataaataaaagaagtttaagggaagagagaaatgcaaacttgatttatactggttcagccactttccgtgactacgtcc

SEQ ID NO: 43061 - DNA, 441 bp, Glycine max
  unsure (1)..(441): unsure at all n locations
ngtaagattatggggtacccatcacatgttgtactaggtggcggtcgggcgatggtgcacaacaagttttccacatccacaaatcacgcataaacccaccatcccctgttgcccacctccaactgagctcacgtactcccacgtagcccatatcctcgtttttctcaacccgggtccccatcaatcctcccaagcttccccaacatccaggtaattcatcatccaaatcatcacaaactaacaaaccaagcaaaacagggcaaaggcagaaaactctgccccaaactcaaaccaaaatcacagctttntctcacttaaagaccccagcaacatttcctttgttccaattcgttaaccgttggatcgactcgaaaatcttactggaagtctctagtacataagtctacattttgaccgttgggatccactagcaaacatata

SEQ ID NO: 43062 - DNA, 403 bp, Glycine max
  unsure (1)..(403): unsure at all n locations
agcttgagctgactgttaagtaaggaatttcactgagtttgtcttgtgcataaagcaaactgtctcaatcctcaacttttttttcaagactttctcttcaagttttttacatcaattttttctccaaaacacgtgtaatttccttttttttttaatcctacgggttaaaaattaaaatgatattaaaatcctcattattatatttaaaacaacagtaaaataaataaattgtaatcattcttagtcaaaattgactatcaattaatctcaaatttcataattatcatattacctactttggtgatatatctagcaatgttaaaaaaattttggtattgtgcgtgacctgagaaggtcgtacacataagaagccaccacanattcatgcataaaatatctattc

SEQ ID NO: 43063 - DNA, 407 bp, Glycine max
  unsure (1)..(407): unsure at all n locations
tcagggtgtagcattgaagacgaccaatatgcttactgctttaaccaaacatagccgctttattcagggagttgcttaactattggcatcacttttgtttcttacttttctcactcacaaatcttttttctagactatcccatggtatcgcaatcctttaccctcctcccctctttaatacccatcgtacccgatggtttccttaagggcacgtctggtaaaacataagatttttcatgtccaaaaattatgatttcggaaaattatgaattctaagattaaacaaattctatttgattagtcatgtgaacttttaggtaaattctttaataatacaaaaattacgtaatatttttatccgataatttactatctatcatattanatcattaatatgaggaatatga

SEQ ID NO: 43064 - DNA, 309 bp, Glycine max
agctgtcactctaatatatgttcagcctttcaattagaatttatatgcttgacaatttgcgtcatttttgttaaaagttttcactgttcttcaaatttattaattacatatttggtattgttgttactattatttataaactcaattcttctattactaataggaaaatatatattcaaatcaaattaggtccttcaaccaaatttgtcaattttgttaagttttacgaaaccttaactttaactttgtctttttttttttacattttagcgggtcaacttgtctccagggtcggtcttgaaatttttg

SEQ ID NO: 43065 - DNA, 449 bp, Glycine max
tgccgcaacatctgaattcgatgtatggaaaatccccgttcggtgtgagttggaacatggacgctagagtggcaagggcatcaaccacctgattctcctctctaggaatgtgatgaaaggatatgtcatcgaagaattctatcaactttctgatgtaggcctgataaggtatcaacttatgatccctagtctcccattctcctctcaactagtggattacacgggctgagtccccatataccttgagcaacttgatcttgaagtcaattgccgcttggttcccaagggcgcacacctcgtagttagctatgtttttggtgcagtcaaaacccaacctagctatgaaagatatatattgctcgtcgggggaaaccaaaatcgccccaagtccatggcctagtgcattagatgcgtcgtcaaaccatataatccatttgtccctatcttca

SEQ ID NO: 43066 - DNA, 381 bp, Glycine max
agcttgagctatcagaagacttgcttatttatttattgttgatttctctaccttcacagtttagtcagtttaagatctcttataactgttagaaggagaaatggtctcttaatgagctcatttcataccgtgtgcaagaaaaggaaaggctgaagcaagaaaggactgaaagtgctcatgttgtgagtacctctaaagacaaaggcaaaagaaaaaggactgaggagcccaagaatgaagttgttaagggtccaggacaaaagaaacaaaatcagggtgacaactttttctcttacagtaagcgtggacatgtagagaagaaatgtaacaaatatcatgcttggcgtgcaaagaagggtatgtttcttactttagtctatt

SEQ ID NO: 43067 - DNA, 443 bp, Glycine max
  unsure (1)..(443): unsure at all n locations
ntacacacggccaaagtgatcttttttgtggggaacgatgctcttttctcccaccatgacttgtccataatcattccggcaacggaggaaatcagaacttgtgagaggttattaatgactttataccagaaccatctgaaacaaattaagaagatcgaacaaaataaaagtgaattaatattgcacatctatactaaatcaaatgatttgaacaaaggcttaactaactaattatgagtataccttgtagctgcatcttcttgaagattttagaatcgatcacagatatgattggtggttacagcgtgaatggaagaagactgataatgcctatgatggagtagctatccaatacttgatcattctattgtttgtatcaacttctcgttgttattatacaggatnggtcttggatcaaatcacatgaataccactcacgaaca

SEQ ID NO: 43068 - DNA, 369 bp, Glycine max
agcttatgctgcaaatattaacaatagatttcctcaaccttatcagcaaaatcaaccacagcagagcaattatgacctttccagcaacagatacaaccctggatggaggaatcaccctaatcttagatggtccaaccctcagcaacaacaacaacagcttgctccttcctttctaaatgctgctggcccaagcagaccatacattcctccaccaatccaacaacagcaacaaccccagaaacagccaacagttgaggcccctccacaaccttccctcgaagaacttgtgaggcaaatgactatgcagaacatgcagtttcagcaagagaccagagcctccattcagagcttaaaccaatcagatgggac

SEQ ID NO: 43069 - DNA, 432 bp, Glycine max
  unsure (1)..(432): unsure at all n locations
agcttgaccaatcccgacccaacccgggcatagtcggacagtgttatcttgtgatgtacctaaacaggcgagctcctggcagtcaacagataaaagaaacaaagaccactgagcatggaggcttgtggtggctggccagctgtgaatantgtgtgatatgtggattatggcctctggtaatcgattaccaaaggtgggttatcgattacaaggctcaaaaatgaagacaggaggctaagatggtctttggtaatcgattaccaaggggtgtaatcgattaccaggcttgaaaaacgaagtcaggaaactaatggagcccctggtaatcgattaccagcctgtgtaatcgattacacacagggatgggtcactggtaatcgattaccaggcacgtgtaatcgattacacaatgcagttttgcatatttcatgt

SEQ ID NO: 43070 - DNA, 410 bp, Glycine max
agcttgccacccagctcgcccaggcgagttatgttgcttcctccagaaggcaccaccttctagaggaacattctaaaaggcccaagtaggcctggttgctatttgcacccctctgtttactaaatacatccccctgcctttttttgcttattctttttccgtaacgttacggaactttacgaattccgtaacgatacttgttttccttccgtaatgttacggaaccttacggattacgtaatcaccccttttttggcttacggaatgttacggaacctcacgaactgtgtaacaatgcttccttttgatttccggcatgttacggaacttcacggatcgtgcaacaatgctctcttttaacttctggcatattatggaacttcaggtattgtgcaacaatgggtgccaag

SEQ ID NO: 43071 - DNA, 398 bp, Glycine max
  unsure (1)..(398): unsure at all n locations
tgccttcacatctagcgatcacaaagagatcatatttctctaatgttgtgttatcctcatcacgatctcatcatgttccacatgatctcaccattaccaaaacgggaaagggctctcccctctccctccgtactcacaaacaaacgtgatcttacaaacatcaaactcaattcatgaaaacatgtgcatcatgcatcacaacaacacattacaatccaaacaatgccttaaataattctcatccattccatgaattggattcatgccctacccatgttttatcttatttttttatctttccttctctcaatattatgcggngtttatcatgactcgtgttctccaagcaagggacttaaagctcattctaagtccaattcataataatgtactccaat

SEQ ID NO: 43072 - DNA, 328 bp, Glycine max
  unsure (1)..(328): unsure at all n locations
agcttatattattttgttgcaaaattattatcttcctccttcaaatgaaaattcgctcatcctttntcattatttcctttcttgacactaccacctccatcaatgagcgaaaattctcaaattcctccttatttcatttcctactcttcactttcaccaccacagctagtaacttataatcgatcaccttctcccaaaaattctcaaagttctcaaacttttccttcaatgtcacaaaacacctcctttatgttccgtaagcctcccaatagttctattcgttcacaaaccccttcaaatgaagaaagtgatacataattttcacaat

SEQ ID NO: 43073 - DNA, 407 bp, Glycine max
  unsure (1)..(407): unsure at all n locations
tgtgaaatcaatggaatctaagattccgtttgacccatgtcgttcatttctgttcttagaaatgtgacctaaacgcttatgccataatgctcatgagtttgtattatcaattctacgcttagtaccacgtaattgcgcattaaaggattcaacataggaaactacagtattaagtaaatatagattatcataagccaagagtgaaccagttccaacaatacctgaattgaaagacaacctanacacattgtttccaaatgaacacaaataacccaatttgtctgaataagaaactgaaaccaaattccgtctaaatgacagcacaacaaaagtgtctttcanatccacataaaaatagtacataataataatctaaagttcgctatagctttcacttgcaccgatta

SEQ ID NO: 43074 - DNA, 334 bp, Glycine max
  unsure (1)..(334): unsure at all n locations
agcttgtggtacatttacaacttactttgtgcttngaacaccatgaggaaattcacaaaaaaactgaattggtgagacaccgagttacaagatttgctaccactttcttaactttgcaaagattgcataagaaaaaggccaatctttgaaggatgtttacttctgatgaatggttgaagtctaaggcntctaatcatcccaacgggacgaaagtcgtagaggttgccttatgccatcattttggaatgatgtatgtatacactataaaggctgtggagcctattgtaagtgtgttgaggttggtggataatgaaaaaaacctgcatgggtttat

SEQ ID NO: 43075 - DNA, 413 bp, Glycine max
tggttatccttccttgatacttgtcatgcttgtttattttttttcctttagcttctcaatacacatgctcatatatctaaatgtaatgcactctaattcagagggtttgttggttgatgcatgttcagtcatctctgttaatgtgatcgatactgatcagacaaacactgatttgattgaccactgttatttccttttgcttgaggacaagcaaaactataaatttgggggagtttgttaattgatattcatgagtactaaatgcataaaaaataagataaaaagtagcaatgtacctctaacttattgtttcttttgtgagatttgtgaataattcattcttgtgtgaaattacacagtggaaactccatttggatgactaatatcgaatctattcggattttaggctaatg

SEQ ID NO: 43076 - DNA, 323 bp, Glycine max
agctatttgaggaagctacatgattttgtttggtaaaaacgttgcccatccttcgttaaccgttggatcttctcaaaatttggtctgtagcttcacaagaaacttgtccatgatctgaccattgggatctttgagaagatgtctggagtgtgcgtgaagcttccgttcccgagagcatttctcatttaagcattttagcctttgctttcgtgtagcttaggaaaaacaccatttcttcttctttctttctttcacagccatttctaacatcccaagcactttctccatcacccacagtcaccattagccaccacaaaccaccc

SEQ ID NO: 43077 - DNA, 452 bp, Glycine max
  unsure (1)..(452): unsure at all n locations
tcggaagaaagtgatgaggtacaagccctaaaggcagactttgaaagagcccgggtagtcgaagagaagttcaagtccatagccatcaaagtctgaanagagtatgatgaactaagggacgtcaatatggccacagttgaagccttggaacgagaaaccaagaaggcccgaaaggaagaacacgaccaaagcaaagttttgaggggatttatagggcagcaatagtgagctcaagctccgaagaggtgaaaggaatcatcacgggtcaaaggcatgatcttgaaagatgagctaaaggcttgccttatgtcgaaaagaaatttgtcccaacagttaagcgagactgaagggaatatgtgggccatcatcgataagtgcanagagaagctaaatctagcggcgactcacgagcaaaggctagaggatgagtacgccaagatatcagcagaaag

SEQ ID NO: 43078 - DNA, 334 bp, Glycine max
  unsure (1)..(334): unsure at all n locations
agctagatgggtatatttgatttcttgtgttgtgtggcgnangtatcgagaccgaatagaggaaccagaaagggtgcaaggcttccgagccagagttcttcttgcagtgggggaacaagaagaggctgagatgtgtgagggtgaaagaccctctgattcacccagactcaacggtggaatcagaacgaaacttggttctgcactggatcatcatcgctctgagttcactgtgcccgaaaaaaaattctctcatcaccaccaccaccatcaacaacctaatcgccttacaaggtgctgaaaataaacaacatcaactaacgggttttcttcatga

SEQ ID NO: 43079 - DNA, 420 bp, Glycine max
ctatcctatctcattctccaagatctattttattcaaaatactttcaataagctccacgtggctctagtgacgaggttacgaagagggagaattctttctttcaagggggagcttggcaatgtaacaaacatgagtgtactcgtataaattaatcaataaaaaaatgttagaaaagtatcaagaaatagtaataagactcatgttattataattaattggagtttatgtatgtctttgacactcccatatttggaaataacaataacatattagtcagattgaagtgatcaataagatgcaaggacaacattgatagccttagaggccaatatttgatgaatttggacaagatttgtaaatttatggcattaaaacatgataaattaaaaaagttttgaatatttaaattaatcacaaac

SEQ ID NO: 43080 - DNA, 356 bp, Glycine max
agcttctccctcttttccctatatatagggggaggagggaagaacaaaaacgttcaaccctcatggtatctaaggatcacttgaaattagtgaaaaaaatcgtttccgtgaagaaaatacaagccgaggcgcttccgtaactcgtctgagacgttttcgtaagcaaatccgtgaagattttccaccggccttcgttcgttcgtcggtcttcaaccggtaagttgccgaaatctaacatttcaatttattctatgtacccttggtgggcccgacttgtttcgcgtacgttgatttacattatatttactttcccgacccgctttcgaagagctatagtctttaattaagttattttt

SEQ ID NO: 43081 - DNA, 426 bp, Glycine max
  unsure (1)..(426): unsure at all n locations
cggcttagcgcgtgaagactggatgcttagcattaggtctgcgcttagcggatagacaatttccaaaaaatttctaagactttgtatgtctatctcttcacacaagcttaaaaccccttgttcattaccaaacaagctgaaattaatcataatcacaagcaagatatcctaactatatacaagagataagaatgaaaaataggaaaaggaaagaaaagctgggttccctcctagtaagcgctcttttaacgtcactagcttgacacatcgtcctgttatccaggatccaagcgaagaacaatgttcaatctttccatagctccaccatggtattggttcaaccattgtgcgttcactacccatgtcctgtcaagatctttagatggaagatcacannagctcagcaactcatattgtcaaacttta

SEQ ID NO: 43082 - DNA, 168 bp, Glycine max
ggctatatggactgcctcactttattttctttataaggcgatgccaccaaatgttcgctttcatccacgccaaccgttattcacctaagataagctttgacacgttctcaacactacttacacaccttacaccgactagccaaaacgttatctcttacttctcctccc

SEQ ID NO: 43083 - DNA, 279 bp, Glycine max
  unsure (1)..(279): unsure at all n locations
agctatganggttaangtttcacttattgttacgtgctcatgcaacaattgttagccgtggctatacgagacatcttgccaaacaaagtcacgttcaccataactcgcgtgtgctttttcttccatgctataagtagcaaagcgattgatccagtaatgtctgatgagatggaaaatgaggccgtaattatactgcgccagttggagatgtattttcccctgctttctatgacatcatgattcacttgaatgcgcatctggtcagagaaatcaaatgct

SEQ ID NO: 43084 - DNA, 410 bp, Glycine max
taatacaaaaattgctcactttcaacatacagggttttttaagatactgtagctcacacagagattaggttccagtttcttccataggaatgcttcagcttaagtggactccacccaactgacaaaactatggatcaagtagacatgcttgcccaatgtctgaaaatgacggcttacacaaccattatgagtaacctttgtgatgaacaatatgaagcatcataacaatagtcattatgatgtttgctgagaaaaaatctatactcggagtagattcttttgatgaagctcaactgatatgcctttctcaagtaacatagcttcatcaatcttaatgtatcttcactacacaaagcattctaaagaagattaattcaaagctactgagtgaagttacagctggtgtgtta

SEQ ID NO: 43085 - DNA, 222 bp, Glycine max
gctcgacccgggatccttaagtcacctgcggcatgcaagcttatgatgatagttatattatttggtaatattgatgctgaccacaagcccggtatactgacttcatgcatgagataacaatgtcaaaatcaagatggaaggaaaaacttcgatgccaatcaatattcgctataataatgtcactagcttgacgtctaatcttcttatccgggatcgttgaaa

SEQ ID NO: 43086 - DNA, 415 bp, Glycine max
agcttcaagaataatggcctcatcaaactatttattttctgaagggaattcaataaataggcctcctattttcaatggagtgggttaccattactggaaaacccgtatgcaaatttttatagaggcaatatatttaaatgtttgggatgcaatagaagtagggccctatattcccactatggtggcaggaagtaaaaccatagaaaagcctatggaagaatggagtgaagaagaaaagagattagtgcaatacaacctaaaagccaaaagtataattacatctgccttaggaatggatgagtactttagggtatcaaattgtaaaagtgcaaaagaaatgtgggataccctacaagtaacacgtgagggcacataagatgtgaaaaggtccaggatacatacattaactcatgag

SEQ ID NO: 43087 - DNA, 454 bp, Glycine max
  unsure (1)..(454): unsure at all n locations
tcttagtctcacctgatgaattcgtggctacttcatgcactcctctattgacaataacatcacttctggcactaaattgctgggagtttgaagccatcttctcaattaaatatctggcttcagcaggggtcatgtctcctagggctccaccactggcagcatctatcatacttctctccatgttgctgagcccttcataaaaatattggagaaaaagctgctctgaaatctggtggtgagggcaactggcacataattttttaaatctctcccagtattcatataggctctctccactgagttgtctaatacctgaaatatcctttttgatggtcgtggtcctggaagcatggaaaatgttntttaagaatactctcttgtggtcatcccaactcgtgatggaccttatagcaaggtaatatagccagtcctttgccactccttgtaaagaatg

SEQ ID NO: 43088 - DNA, 384 bp, Glycine max
  unsure (1)..(384): unsure at all n locations
agctttcttggaagaaatgcatcagcagtttctcgtccctaaagtactcccccattttccagcaatacatattcaagtgatttttggggcaagtggtccccttgtatttatcaaaatctggtaccttgaactttggagggatgacaacatcagctaccaaacacaattctatcatgtcggtgaaagggtaaccaccaaaccctttgacaactattaatctctctccaatgaaatcaagtttctctcttccttccattgccggaggcggcccccctactgagaaatgcagcagttgcagagggcggtgttaaggagctcccaaggtattgggttgaggcatagcattaaatgccagtcccttancagtgaacgtgggatatgggt

SEQ ID NO: 43089 - DNA, 411 bp, Glycine max
  unsure (1)..(411): unsure at all n locations
tcctcggtgccatttcctgcgaaggcaaacatttggaaagttagttttaccagtgggatactattcttaaaacaaaaatgacatacaacctcctcccataaatacaaacatcaatgtaaatttagaggaagcttatgcgcatatttccttacaaacgttctcttgcacaagacattctattaaccaaaaaaaaaaatgcacccatatacaatcaaggcagcttcgttacctagattatttacacgtacttccaaggtgtatttgttacttacatcacacacctccttggctaaattcacatacatgcatactcaaagcattntggggtaccaaaaattgcacatgtgcacatcttggtatttctaatacctatacatacacaaacttcatgatgaatcttgactatctaca

SEQ ID NO: 43090 - DNA, 363 bp, Glycine max
  unsure (1)..(363): unsure at all n locations
agcttcttatccaaggctcatcttggtggtgaagctccttcttccatggcttattccttaatggatggcgcctcctctcacctcctttcctttgtcttccgctgcatctccatggtggaaaatcaccattaaaggaccccattgaagctcaaagatccagcctccatagaagccccacaagcaagcttccatcaagcgggttgcaccactcaaaacattcatcataccacctattttagggacttggttcctaataatacctatgttgggcaccaacaaagcacaaggatttaagctcttgcgaaccanaccctcatccaacaacttctttacttgaggaataaactcaagcccaagaggtgt

SEQ ID NO: 43091 - DNA, 360 bp, Glycine max
tgagccaaaatcctgactcaccataatccttaccctctgaagcaaaaaggatgagaaggaaaatttccaatcaaagagaaagcaaaaaaagaaaagaaaggaaaattccccaatcaaagagtgggagaaagcaaaaagaaaagaaagaaaattcccaaccaaagaatgggagaaagtaaaaaagaaggaaagaaagttcttgatcgaagaagctaaaagaaatatgcagagaggtctttggactggacaatatctgagcaatacagaattgtcaccaaatgaacgaaaaagaaggaaagagaaccacaacctaaaatagtcttctccctttgattaccaaccagaatcccgtgcgctagc

SEQ ID NO: 43092 - DNA, 337 bp, Glycine max
agctaaacaaaaggcatgcgaagtgagtgtaatttctagagaaattcccttatgttatcaaacatacaaagggaaaaggtaatattgtagccgatgctctttctcggcgtcatgcattactttctatgcttgaaacaaaattgattggtcttgaaagtttgaaaagcatgtatgaaaatgatcaaacttttggagaaatttttaaaaattgtgaaattttttcagaaaatggtttctttagacatgaaggctttcttttcaaagaaaacaaattgtgtgtgcctaaatgttctacaagaaatttgcttgtttgtgaagcacatgaaggaggtttaat

SEQ ID NO: 43093 - DNA, 457 bp, Glycine max
  unsure (1)..(457): unsure at all n locations
gacctataaatactcagcttctcaggaagttntctcaagcttctcaaggaagctacctagtctataaatagaagcatgtgtaacacttgttgtaactttgatgaacgagagtcttgtgagacacaactcaaagttcaacttctctccctttttcttccttcaatttcgtgctcccccctctctctttctctccctctttcttttcctccattgaagcatcctctccaagcttcttatccaaggctcatcttggtggtgaagctccttcttccatggcttattccctagtggatggcaccgcctcttaccttttctcctttgtcttctgctgcatctccatggtggaaaatcaccattagaggacctcattgaagctcatagttccagcctccatagaagctccacaagcaagctntcatcactctatagaagcttctcaagcaagcttccatcacat

SEQ ID NO: 43094 - DNA, 392 bp, Glycine max
  unsure (1)..(392): unsure at all n locations
tagttnttactgggatgtctggttgagttccgtcatatatttggacgctccaaaaatgatggtggaaccctaagcttatgtcaacgaacattatattttacttcaaaggtttgatggagccccgtacaatatctggacgctcgaaattgattggtgaacctctgacctaattcaaccaaccaattctcttacctcgggtattggatgagagccctgaatatatcgagagcgctaaaataaagtgtaaaatttttaacccaatttcaccgataataatttttaactcgtatgtgtgattgaggcccgtatatagcgagacgcctaaaagtgagtgaggcacctttatccatgcctcccaaaatactttttactggaggttgatggagcccggn

SEQ ID NO: 43095 - DNA, 394 bp, Glycine max
tcaacattcaatttcgagcgtctcgatatatgacgggactcattcagacatccgagtaaaaagttattgtcgtttgaatttgctcagagcatcaacattcaatttcgagcgtctcgatatattacgggactcaatcaaacatccgagtaaaaagttattgtcgtttgaatttgcatagagggtcaacattcaatttcgagcgtctcgttatattacgggactcaatcagacatccgagtaaaaagatattgtcgtttgaattggctgagagctccaacattcaatttcgagcgtctcgatatatgacgggactcaatcagacatccgagtaaaaagatattgtcgtttgaataggctgagagcttcaacattcaatttcgagcgtctcgatata

SEQ ID NO: 43096 - DNA, 424 bp, Glycine max
agcttagcttatggatttgaacatttgctgtttctactttccagactccagattatatgcttttgacataatgcactgtttatgtattatgatgtgttagcattgatgtaaaacttgttagcatgtgatgatagataaggctacttttgtaggctttgctttcaggatgctctgctggagggttggcaactcttatacactgtgatagtttccgacaagtacttccaaaggaagcaactgtcaagtgtcttgctgatgcacgcttcttcctagatgagtaggtttctctcaacatatctattgaaaaaaagaataaatatcctgcatttattgtatagcgattttatacggatatattatctgatctgatttacaggaaagtgaatatcctctcattatgtgtaattaatataattagcctata

SEQ ID NO: 43097 - DNA, 423 bp, Glycine max
  unsure (1)..(423): unsure at all n locations
ntgagagcctcgtnagagattatgcatganacccactaattttttggtagntctgaattgttagtacttgtttaggatcattgaaatgaggttaggatgggtgggtacaccattgatggccttctaatttgtgaaaaccttgttcaaattcctttctggatgtgtcattcccatgacatctaccacgagcaggccatggtagaatctgactttaaatttgagtctttctggggtgtgccatgtctatggtgtttaccacagactggttgtggtacatcttgattgtgtagttntgtcagtttctcacttttctttgcattttcaaggttcttaacttcttattacttccatgattaacaagggagggattgaatatgtgtcttgatgaattatatagtgtccttcatcgagtttcatgcatgt

SEQ ID NO: 43098 - DNA, 210 bp, Glycine max
gctagagaaggggaatcctttaggttctttcttagcaacatgggacacagttcaaactaaaaatggagacacataatgacaacgcacttattcatgggctccgaaaatggtataatggggatttcttggggcctctcttacgcgattatgaacacgacttctaatcatagtggagacccacgaacaggcctaacaaaaacattcatgggc

SEQ ID NO: 43099 - DNA, 445 bp, Glycine max
tcttttggaccttgaacaagccatcaattcctctttcagtaccatgctatgtgctcgcgactggtccctttcttcccttcgcaacttgagttcactattgctaccccatagagctccgcgaaatttgttccggccatactcttccttgcgagccctcttggtctctcgttcaagggctcttgcggtaattgcattctcttcccgtaacccggcacactccttccgaacgtgtgtagcagccaacttgaacttctccttggcgagttttgcctttcctaactcgcttttgagagcttggacttcctcgtcctcttccggtgcttcaaaattctcttcgctgacgacttttaacttggcgagccaatctaaacctcgtatgcgaactttcagccattcgtggtacccaccaatgatgccattacgaacgcctctaagctcttgatct

SEQ ID NO: 43100 - DNA, 414 bp, Glycine max
  unsure (1)..(414): unsure at all n locations
agctagtcatcgtgagacatcagatgctattattttaataaatgtgggtaggaaaaattcattatattgatagagaaaaatctaaaatcatacatcttaggcaaataaggcatgctaacccccaacattattgcattttgattccatctttggacattgagattttgaaaattagaaaacccaaagtttattagggcatttcatcaaacatacaactcccaactgatctggcaaaagaaatagtgagtagaaaatggaacttgcagacaaaaaacaaataaaagaaagatgattttctctttatcattcgcagaaaagaaaaattgaggatacacactgcaaacaaatgtttagatttccttatgtgacattatactaactagtgaaaatttagcagttaatntaaagttaata

SEQ ID NO: 43101 - DNA, 379 bp, Glycine max
  unsure (1)..(379): unsure at all n locations
ctttatgatctgtgtgcacaataaattctctgcccaatatataatgtctccagtgctgaatacaaagcacaagggccatcaattccttctcatagacagattttgccagattcccattagataaagctttactgaagaaagcaataggttgtctctgctgcattagaacaacacctatacctctaccagccgcatcacactcaacttcaaaaggtaaatcaaaatttggaagaattagcacagggggagaagtcatgatcctcttcatctcctcaaaggccttgacagcttctattccccaagaaanattgtctttcttagtcaattcggtgagagggtttgctattttaccataatccctgataaactttctataata

SEQ ID NO: 43102 - DNA, 192 bp, Glycine max
agctattagccaaatggacttaccttgaattaattcctttgatagtccctttgagcctatgttcccctttctttgttttgaagctcattacaagccttaagtgcaaaaccatgatatcaccttacccttaaggaattttggagctttggaattgttttgggaataagtgttgggggggggggggtcatgttc

SEQ ID NO: 43103 - DNA, 379 bp, Glycine max
  unsure (1)..(379): unsure at all n locations
tgatcaaggggtaacttgatgcatccattaaggaagggagaggttcaagctttggagttatcttcaaaaacaacaatggagaagtccttgcagcagctgcaaagatcctgccttattttccagcctcatattatggaggctatggcttttcgctaggccattgaaactgctcattcactacttctccccttaaccatctttgaaactgattgccggagattattccttgcttggaaagatagatcctcagctgattatagctacttcgatggaatcattcatgctatgcccatgtgctacactangattcttcagaccttttaatagagctgtgaatcctctagctagatagctttttttataatgattttgttggatt

SEQ ID NO: 43104 - DNA, 336 bp, Glycine max
agctatatttggcttccaagatttaatctacattgtgagaatggggtataagtactaagagacaatgctcctgatgcacaaaaggctagattcaaagaattaaagaagcaggattgcaaagcattggtgattcttcatcagtgtgttgatgatacccactttgagaagatcgcaggtgcaaatattgcgaaagaagcctgtgacacgttgaacaaagcttatgctggtgcagataaagtcaagaaagtgcgcttacaaaccctgaagagacagtttgaactgttgcagatggaagagagtgaacgtattagagatttcttcggtagattacaagtt

SEQ ID NO: 43105 - DNA, 436 bp, Glycine max
  unsure (1)..(436): unsure at all n locations
tcgacgaggtactgaggaatgcttggatgtttcttgcctacggttacttcatagggagtgagccctattgctaagtgaacggatgtgttatacgaccactctgcccacacgaggaacttgccccatgatgaaggtcgttgatgaatgaaggacctgaggtattgttagatgaccctgttcagtacttcggtctgtccgtccgattgggggtgatacgctgagctcatgcggagcttcgtgcctgaaagtctaaataactcttgccaaaaacaacttacgaataagggatcatggtccaataccaaactgtgtggcatgccatggattttccccacgatatccataaagaggtgtgctacggtggaagctatgtatttggattgaagcatgtcgaagtggacccctctngaaaaatggtcaacaaccaccaagatga

SEQ ID NO: 43106 - DNA, 415 bp, Glycine max
  unsure (1)..(415): unsure at all n locations
agctccatattccgatacaagagtgaggtgtacttgctcttcttacatactgagggcctntataagtgatttcaagcattttccatatntccttgcacttgtgccnctcgcagtacgataaaattcatcagaagataaccaaagtaaatattttagcttttgacatctggcctttctttcttatcatcttcatccatccatcttagaccaatacaattctcttatggataatttcttacatagcatcctgcccggatcaatgacaaaaagattcaatctttttgcaaacaaaaatgtcatctcaacaatgtggcaattgaagaggaccctcttgaattatttgttaagccctttaaaaaatagacttgacacttcagagtactctatacaatgaaagacatgactccaaccagag

SEQ ID NO: 43107 - DNA, 386 bp, Glycine max
tactcagctcgttgatatggggacccatcacatgtggtactggtggctgtcggcgatggtgcacaacaagtatatccacatccacaatgcgcgcataaacccaccatcccctgtagcccatctccaactgagctcgcgtactcccacgtagcccatatcctcgtatctctcaacaccgggtccccatcaatcctctcaagctgtcacaacatccaagcagacaacattcaaacatgcacaagctatcacagccaagcaaaacagagcaaaggcagataactctgctcaacacatcaaccaaaatcacacgtattctcacgtaaagaccacagtaacaattctttcgatccatatcgttaaccgctggatcgactccacaatttact

SEQ ID NO: 43108 - DNA, 259 bp, Glycine max
agtcgctttatggcttttcacggcataacggcaacaaacacaatttctttttaaagcgacatcactcacagagctcaacacagatgcacacatttcagcaatagaccatattcaacaatattcgtaatactacaaatctgatcttggcgacgactactcatcgttgcgctgctatattcctctaatataaaagaacatataccgcgctgcggaagtgcacgattcacaccacatccgaacatttaccattggcattgct

SEQ ID NO: 43109 - DNA, 155 bp, Glycine max
catgcagcttgtgggtggggacgcatgaactataacactattcatggtgtctcgaaagagggttgaggatggagaattgcactaaacaatctctacgcacggttccaagctccagggtggaggacgcatgaacaacaaagcaattcatggggcct

SEQ ID NO: 43110 - DNA, 397 bp, Glycine max
cctgatgagggatcgagggtttagtaatttatgctacaacataaaacacaagagcacgattgattagagatatatatctctttgcatcagctcgtttgttagaaaaacccaacatttctacctactgttgtcattttatttacctttcattttatagttttagcataaaagtttagtttaaattctgtttgaaattatcactcatacatgttctctcaacaatgcttcgattctgaacttatattatgctaacattagttccctgtgttcgatactcggattcatctcgtttaaattttaaatacttgatgatccggtgcactttccggtaaacccccattgataattccctgagacataaatgaacacaaagtaatgtattgtggagtcaacacat

SEQ ID NO: 43111 - DNA, 132 bp, Glycine max
agcttaacatcggtctttctacatactcgaagtcattacaagtgcggcggtattctcgtaaataacgtgacttaattaacaccggttttcacacaactgatgttaactagttgcatttcctcgtccacctcc

SEQ ID NO: 43112 - DNA, 445 bp, Glycine max
agctttagcaagatacctctctgtatctagcgtttcttgtatacctcggcaatccaccagacggattgactatggttctgaaaacccacttcacatcaatgggttctctattacttggtaaacgcaccatctcccaagtgatgatattctgaattgaactcagttcctattccatgcgtctaactcaatgaggaataactaacgtctctccaagtgaaaatggctctgctcgtgcgacagcactatatcatcatctcaccataacattgatagcagataatggaagacatatacgtttacaccccactggtggagtatatgcttaatgccttctgaagtacatccaactcatctttacttttgcgcatgacatgtgacacattccgtatcctgcacctcagatacttctatgttaatggtagactccataccaagtcgtccaact

SEQ ID NO: 43113 - DNA, 577 bp, Glycine max
  unsure (1)..(577): unsure at all n locations
ctctcttcactantcatattataattgatcantattatatataatatcatcaattataataantatcacatggaggcatganatgattcatncatcaacgaactaanaatatcaactaatatagctatgcccaagagatgtatggaatgacactttatacccccaatgtaatattgatattccaggagcaagtgtattatcaatatctatgaatatcacccgcattgtagacatgcctctcctttgataggaccatatatacaattctcaccatcatatatccatttacatacaattaccaagtaccttgacatgctacctcatactaattctgctctatagagcatacctgcgacttagtaccttctggagtaacaagaattacatcatctttctcattacttgctgactcaacaagaagtcattcatcatagttaatgtataccagactcatattctgtcaagcatgaaacatacagactattttaaagaataatgaatcatatgtcacacatagatgaaatgtaaatgatcatgggctataaccatgccatttattcataaaaattatcacact

SEQ ID NO: 43114 - DNA, 369 bp, Glycine max
  unsure (1)..(369): unsure at all n locations
agcttgaccaatcccgacccaaccctggcatagttngtcagtgagaacctgtgatgtacctaagcaggcgagctcctggcagtcaacagataaaatgtttacaagaccacaaagcaaggatgcttgtggtggctggccatctgtgaatcttgtgtaatatgtggattgtggcctcttggaatccattactaagggtgggtaatctattactaggcttaaaattgaagacaggaggctaagatggtctctggtaatcgattaccaaggtgtgtaatcgattaccaagcttgaaaacgaagacaggaaacttagggagtctctggaatccattacagcctgtgtaatcattacacagaagaattggtcact

SEQ ID NO: 43115 - DNA, 261 bp, Glycine max
cgtgtattgctgcattctactaatatatggaattgtccactgctttgcctgaaataaacaattgcttgaccacatcagcgctggaggcggcaagggacaatggtctctcaaataaacctatcgtacacgaacaaacattatatgatgcgttgaccgtgccaaacgaactatcgatgtcattgcataatcgttatactaactatattcaactgtcctgaacaaaatgattttcaaacatgtgagcgacacatattatgcggt

SEQ ID NO: 43116 - DNA, 267 bp, Glycine max
  unsure (1)..(267): unsure at all n locations
agcttctccnnctatttgctatgaatagggggagaagtgaagataataagggttcagccccttaggcacttctctctctttcgagattgctgaggaaaattatttccgtgaagaaaatacaagccgaggcgctttcgtaacggttgcgtgagtaattacgcgaagattctcgaccgttcttcaagattcatcgttcgttctccgttgtcttcagtcttcaacgggtaagcacctcataccaagcttttcaattcattctatgtaccc

SEQ ID NO: 43117 - DNA, 371 bp, Glycine max
  unsure (1)..(371): unsure at all n locations
cgctaacccatggaagctcctaatatatcccacactntnntgggtgggccattcttggatagccttgattttctcagggtccacttggnaccccattttaccaactacaaaccctaagaaaactatattatctacacaaaaggtacacttctctatatttgcgtagagggtgtttttcctaaggactaaaagaactagcctgagatgtcctaagtgatcatctaggctcctactgtacactaaaatatcatcaaaataaacaactacaaatctacctatgaaatcccttaagacatgatgcataagcctcataaaggtgcttggtgtattagtgagcccaanagcatcactaaccatcatagaaactaaac

SEQ ID NO: 43118 - DNA, 456 bp, Glycine max
  unsure (1)..(456): unsure at all n locations
gcttctcccattcaggtctcttgtcatttggaactaaatcagaagctttctccaagtggtcatgatgaccttgatcgagaaaccaaagtaccacggaagcagaccatgagggataattcttccaattcagcttatcagtagtgatggtcggagtcccagagaaggagaaaacgggtccagaagtagcctatttggcccacaagatgaaaccctaatagggttaaaaagagagaagaatggggtgatacgttccaggcaacanaactcaaaactgagggctggaacgaactcanaagaggccgacgagcagataggtggcggcacggcgcaattccggtgacggcatggaggcgcgtgggcttcacgcgccgaagaacgcgcgtgagaaaggtggtgtgtggagacttctttggcggcacaaattccagaggtaggttgcacttttcgaggcgatcc

SEQ ID NO: 43119 - DNA, 290 bp, Glycine max
taggcaattgtgatgacataaaattgttaagacctaagttctgaaaggcttgaatgcaatcaaatgtttcagcagaaaagaattccatatcaataaacttagggtcgataatggaacaagatgagaaaagattggagtaccatttctgctgttcgtcggaagaaaacactggggaagatgacaatgaaggtggaattggtgctgtggatgcgctagtggctccagaacgatgatctctttgaagccaatcggaggcggaagaaccctttcgtttctctgacgattctacc

SEQ ID NO: 43120 - DNA, 485 bp, Glycine max
  unsure (1)..(485): unsure at all n locations
agctngcccagagaaggagtccacggaggaaatgcttaccacctcaaaagacctgatagcagtttctaatgactcctctgcgacttccacataaggcatagaggatgggcagctcaccaagatgtcttcctcgcctgatatgatgaccagatgcccttccactacgaatttcaacttttggtggagtgttgaaggaacaacttctactgagtggatccacgggcgccccaacagacagctgtagggggggttaatatccattatttggaaggtaacttgagaggtgtgagggcctatctgtactgcgagatcgatctctcccctaacctctcggcgggtgccgtcgaaggcacgaaccaccattgaacttggctttaagtgggaggcattgaatggtaatntctccaaagtgctcttacgcatcacgtctaaactggaaccattatcgatgacagcttggctacaatatggtccatacacttgac

SEQ ID NO: 43121 - DNA, 490 bp, Glycine max
  unsure (1)..(490): unsure at all n locations
agctnttatgtgaaaggatgtgactcttcacatttgaatttgaatttcaacgttcaaaggcactggtaatctattaccaaaacattggaatcgattacagcgtttctgaaatcaactggaacgttgtaaattcatttgaaaactctttcaaacccattatgctactagtaatcgattacaacaatctggtaatcgactaccagagagtaaaaactctttggtaaacatgtttagagaaatatccacgtgctactcagtttttgaaaaaaccttttatactttgattcttgaatcttgattcttgattcttgaaatcaactttcctcttgaatcttgaagtgattcttgaaatacactatcctcttgaatcttgaagtggtcttgattctatcttgaacatcttgaactcattctttgattgacctctgagctttttgcatcacctttgtatcatcaaacatctttgaatcaatctgatcatcatgaagct

SEQ ID NO: 43122 - DNA, 390 bp, Glycine max
tagcgacactatagaaactaagcttcctaacaattgcatgtagtgcaacctgcccattcttcaaccatacaaaatgcaacatttatggtgagacccatgagttatgcatgtgcatggctcaagataatgcatctaaagatgtcaaggccatggttggagatccaggatgcaacatttatggtaagactaatccacaccatcaagggttacattaagaagggtctccaggatactagcaaggtggaaatttctctcaatatcaatgccaaggttggagatcccatcttgtgaataacttcaacaaagatcaaggtggttcatctttttcgccttccaattaacggcttaatctatatgagaggaccaccaagttggaggatactttgactc

SEQ ID NO: 43123 - DNA, 511 bp, Glycine max
  unsure (1)..(511): unsure at all n locations
gatcctccgagtcacctgcggcatgcaagctntacatgcctcatgacacctaagcacacttagtggagaatcttagacttgatcttggattagtgggctgaaccataactaaaattcactaatcataattagtgaaattttggctccaaaatttggctccacaaattcaatttcaaattcaagtgtccctccaattttgtgtgacacttaggctataaatagaggccatgtgtgtgctttttttttcaaattgtatcatttgagaattatacttcaaagttcagacctcatttgaggcacaatttcgtgctccttctctccttctccctccactcatcttcccctaccttcaagctcttatccatggcttcctatggtggtgagcttcttcttgactcatctttcttccatcttcattctgctgtcattgatctttaagaagcanatgtagatgcacatggctttgatgtnttgatgatgatcatgatgatgtgntgcaattgatgcaaat

SEQ ID NO: 43124 - DNA, 486 bp, Glycine max
  unsure (1)..(486): unsure at all n locations
tgagttcgatggccncaatgacatctattccccacatggaataaggccaaggggcggacataacattcataggatgtggtggaacattgacattgtccgcgtatgcctgacatttatgacatttccttacatgggcacaactatcgctttccatagtaagccagtaataaccgactctaaggatcttcctggccatagcatgcccattggcatgtgtcccacatgaacccacgtggatttcctcaatcatgaagttcgcctctttggcatctacgcatcgtaggagggtcatgtcgtggtttcgtttgtacaggatggtaccactcacaaagaaaccagtagccaatctccttaacgttcttttgtcattgtcagaaatccccggtggatattctttgttctcaacatattgtttgatgtcgaagtaccatggtttcccatcccactcctcctctatcacacaataatgtgctggctggccttgag

SEQ ID NO: 43125 - DNA, 265 bp, Glycine max
  unsure (1)..(265): unsure at all n locations
tgtctcgcaacatgctgagggctgtcccctatcgaatatatgatagatatacagcgcagaatatattacttatttgacatcaagggctatatccctatgactgctgactcaatcattaccccagtactttggatagacacccctctatcgatgggatcacncgcggcccactgagagccataggtggggcttattaccatcatcttttgagtcaccaagaagatgtgcaggaacatctgtgctagcataacgatgcatgcgatca

SEQ ID NO: 43126 - DNA, 454 bp, Glycine max
  unsure (1)..(454): unsure at all n locations
tggcttgcagatctagtgtggaagaaatgtaacccggggagtttttgatggcttcaagttcattatgtgacaaatttgcactataaccattcatgacgttggtgtatgtataaatcagcttagaggaagcagtgttgagaatattatcattggttgtaacatgagtattttctagtgcagaagaaagggttgacagataccaattgtgtttggtggagaatagtttgggcatggatgatgagtccatgtggatgatataattctcagattgagccattctggagacaaggtgatggactatgatggagaagcaaagacatagacgaatcatggtagccatgatttgatgaatgttatatccaatgtggactgctaattggctntatcagacaccaatatataactggtgtttaaatagtggataactactgaatgggaaatgataatcggaaca

SEQ ID NO: 43127 - DNA, 465 bp, Glycine max
  unsure (1)..(465): unsure at all n locations
agcttaactcgctaggatttatgacagaagcttgaaagtgaaagcacaaaaggcttggagaatgaaagtgaatgcatgaattataacgaaacgaactcttgcaattgcccactattaataagccatgattgcaagacattaactaccataatgtaaggaaactcaataactcaaaagacaaccttataaacccaaagcagctcattaaagtgatgaaataaaaagcatcctaattactaaattcagcacctcagaagccatatcaataactcatattcgagcatccttcattcaattcacaatcacaatttcacttctcacaggataatnttcattctaatgtggtattatcctataagagtaatccttttaattccttgtttggccaagcaacttgcatcatgcctctaataatcaactcccacataagccaattaatataaaggttntgacaacagtctgtaa

SEQ ID NO: 43128 - DNA, 452 bp, Glycine max
  unsure (1)..(452): unsure at all n locations
tgtagggtattgngaagtatgttgtatgactcttcccaattaccatatacctgctcgagggcccattgttntgccagccatgtnttacgatatgtgatggtgtattcgaactcttgtcttacgaatgcgatgaatgtaggaatgattagttgctcgttttcttcaaccatcacaaggatattttttcctacaagtcttgaatccatcttattgtgatcttgtgacatagttggcatgacgcatgtgtgagactttctatcattgtaatttccaaattttagatttttctttcnacgctctaagttccattgcatccttcagctggcaacataagacccatgatccttgcacacctcttggcttgaaagtgactggtcttaatggtccattttaccactgttcagtcctcattaaggaatccgacatctacactctatctgcgatcaatgtgt

SEQ ID NO: 43129 - DNA, 474 bp, Glycine max
  unsure (1)..(474): unsure at all n locations
agcttggactcaaggagagacttataatggctntatagtacagtaaaaaaaaactataagaaagaagactcaacanacctctagctatggcccttgtttatcacactaattttcaatttaaatttacgaactaagattggtataaaataggaaccaattatagaataaattctgagccaaaacaacaagcacactgtcctgtcactttttttttcatggatactgatttttctgctaaattgtgtgattattagtattttttccttttattcaaatcacttggttcttttattatgactttttttcggatgtctagaaaattcagtaaaactttcagctccaaattcagagtaaccaattctcagtaatctttacaagtttgtatgtcccagttgccagcacgagtgatnttgtttttaagcatggtatattgattgcctgggctactatcaaccttctatgatgtcaactact

SEQ ID NO: 43130 - DNA, 493 bp, Glycine max
  unsure (1)..(493): unsure at all n locations
cgtaggagtatggggtatccatcacatgtggtactaggtggcggtcgggcgatggtgcacaacaagttttccacatccacaatgcgcgcataaacccaccatcccctattgcccacctccaactgagctcacgtactcccacgtagcccatatcctcgtttctctcaacaccgggtgcccatcaatgctcccaagcttccacaacatccaagcaaaacaatattcaaacagtacaagctatcacaaccaagcaaaacatagcaaatgcagaaaactctgccaaaacaccaaccaaatcacagcttttctcacttaaagaccccagtaacaattccttcgatccaattcgttaaccgttggatcgactccaaaatattactggaagtctgtagtacataatcctacattgtgaccgtngggatctactagcaaacattcagaacccattctacattactcttttcacaaccagcaaatacatagcattattctg

SEQ ID NO: 43131 - DNA, 358 bp, Glycine max
tgcaagcttgtacagtggtaatctgtgaatcattttctaactcataacaacttggaaattcagaagagagcctgtggtttatgtgacacatggcaaaaacgtgttgaagctgaaatgattataaatgatgctacgtcttgttcagttcaaactgtcccctggccagccagacaacgactttctgaagtagctcaaggtgggaataaacattcaagtgggtcagctgatgttgccatgaagagctcagttacacagctttctgcatccacaactgcctctccgaagattgtcccatgagagaatactacaagatctacatctgcatctccagtgctactaaatcagtgccttcacctgc

SEQ ID NO: 43132 - DNA, 253 bp, Glycine max
  unsure (1)..(253): unsure at all n locations
ctntattgaatgggaaataaaacctctgtggtcgcttaattacaagttctctcgtaacaaactttcataactcaaaagaacctttgcactcttttgttctctaacacattaatgacactttttaggcctttgatacttatcagctaacaatatgcaaaataaaaaaaattagttctcgcccaagccaatatagtttctgcatggacaaaactagtttttgcaccaataaaacaactagtattatttttcaact

SEQ ID NO: 43133 - DNA, 386 bp, Glycine max
  unsure (1)..(386): unsure at all n locations
agcttctttgagaaaacttccttgagaagctagttcttagctacacacacccctctcataactaagctcacctccttgagaagcttccttaagaagattcctaaagatgcttaagcttagctacacatacctctctaatagataagctcacctccttgagatgagaagctagagcttagctacacactccctataatagctaagctcacccctatgancgaaaatatgaaaatacaaaaaaaaagtccttactacaaagactactcaaaatgccccgaaatacaaggctaaaaccctatactactagaatggccaaaatacaaggcctacgaaggaaatacctattctaatatttacaaagataagcgggctcatacttagcccat

SEQ ID NO: 43134 - DNA, 434 bp, Glycine max
  unsure (1)..(434): unsure at all n locations
actcagctccataagtggatcagagccaagagcttaagtatgtgcttcttatacctccattaatatntgtgcttcaccttctcttccattgttgattcttcatctttgttctcatgtatctcctcacatgtcttgcgattaatgatttaaacatgactctttatagtttccaccgattaaacttgctatataagctagaattgattttctatgctgcaaatgtcttgttcttgttcttgaaccatgaattgtgttgagtttgggttcctttgagttttgtcttgctattctttgtggctgaaacctaaaccataaaattcttacaaaatattaaagtagatgattacctcaaaatctagagtgactcgtcacctattgtagttctgtatacaagtcatgcctattcatgaaactcgcacataagaattcttatg

SEQ ID NO: 43135 - DNA, 390 bp, Glycine max
  unsure (1)..(390): unsure at all n locations
agcttgtgaggattgatggtgacccggtgttgatataaacgangatatgggctacgtgggagtacgtgagctcatatggaggggggcaacatgggatggtgggtttatgcgcgcattgtggatgtggaaaacttgttgtgcaccatcgcccgaccgacacctatttccacatgtgatgggtacaccataatcctacaagcttgagatgaggaagcgttgaacggtgaaactntctgctttattgttaccacagagtgtacctgaagatatgtctcggtggtcacgagaccttggtgacgtcaggtggtgtgctatttgcccaaaccaagcttgatcaatcncgacccatacccggcatattctgtcattgagaacctgtgatgtacctaa

SEQ ID NO: 43136 - DNA, 392 bp, Glycine max
  unsure (1)..(392): unsure at all n locations
cgatgcacctttcttctgttcttctgtaatgtagntgaatttcttccggaaaggacttaaatcactagaggctgttgagccacatgttatgatgattgctgtgcgacaacatattgattaccaattcatcggcctagaggatgatggtggtgaaagtgataataatgatgatggaaatgattttgacatcattgaaggtggtgagttgagttttgactacagagcaaataatcaagggccatatattgtctcacatcaccgaacacagcagaggttggcaatttgtattactcacaacttgaatggtttttaaagcctgcgtgcatattgaactttattcttaatgcttgtttgcttttttatttaaaatattgcacaagcctgtcacagtt

SEQ ID NO: 43137 - DNA, 346 bp, Glycine max
ccataagtgcacgttcggcagactaaagtcaagcgttcgcgatatgcgaagatgatattccgagtacattggattaggtactaccatgctctcctgatgtccatctgggaaattggcgagaggaggaacgccccggcatttacgcagcaagcataatgcaaacctttacagagttaaaagctctataactgggcctaggctctagagttatcatattgtgaaggctatgtgtcgtttgtgttcgagtatataatacagggatctttcttcatctcgtccaggtctctatccatactcattcatgtgcatgtctacttcttattctaaaactcgagatgttatgact

SEQ ID NO: 43138 - DNA, 290 bp, Glycine max
agcttcttatccaacgctcatctgggaggagaaattccttcttcttggcttatcccctactggatggcgccttctcacatctcttctcctttgactaccgctgcatctttctggtggaaaatcaccatcaaaggacctcattgatactcaaagatccatccttcatagaagttacacaagcaagacttcatcacttgccatactatgctttatttaagagagatgtttaatatgtgacttattgcgccctctataataatcgctaagttcttcacattacacttgcaaga

SEQ ID NO: 43139 - DNA, 478 bp, Glycine max
ctaagctctaaagtgcgggtctgggagacgaaagtcaagtgttcgcgatatgtgacgatgatgttccacgtacttcggatttggtccgaccatgccctcctgatttccagctgggaaattggcgagtggaggaacgccccggcatttacgcaacaagcataatgtaaacctttacggctttaaaagctctatagttgggcctgtgctttagagatttcattatgttaaggctttgtgcctttcgttatcgatatataatacaaggatctttcttcatctgtgcctggtctctacccatcctcattcatttgcatgtatacttctttatctaaaacggcagattcgatgacgagtcccccgatagtactaatacctgtgacccgtctatcaactttgagcaagactcgaattacacggaagatgatcgatataatgatgtgggactttcttctgaactagaaagaatggtcgcccatga

SEQ ID NO: 43140 - DNA, 591 bp, Glycine max
  unsure (1)..(591): unsure at all n locations
ctcttgcatttcgaccgtcattatctagtatctcntgtcgttcacanacacttannantcacnnnnaagannaggggaanantttgaanccatcttgacagcgaacganaancacncaagctaggatccagtactcacgcagtgaagatcgatgaacgatgaatatcgaatgaagaacgtcgaagaacggctgaaatctatgctagactcctcacggaaaacgttacggaaacgttacggaagcgcctcggcttagatattcttcacggaaacgatattttcaagcaaatgcgaaagagagagatgggcctaacgtgctggacctcttccattttaagttctgcgcatattatagcataataagggaggggctgcctcccaactcgcccaggtgagctcagcttgtccaggcgagcagggttgcttccttcagaagctaccgcttctggaggaatcttctgagggcccatagggctgggtgcttatgcgcaccatttacaatactcccccttgctgtttctgagatctttgtcgaagttacgaaactaacgatttcttcgatctgtatccttcctaagctacgtacttgcg

SEQ ID NO: 43141 - DNA, 471 bp, Glycine max
  unsure (1)..(471): unsure at all n locations
tgcaagctttaacanattctttacaaataactaccatattgcattaacctagtagaactacccatcatagctcccaaaaacccaatacccacgaatttcatgtaaaaagaagtccacccatacctgaaattcgaagccccacaacgtagaggtgtgcttcacgactccggaaatggcttccctttgcaatttggagtagaaatgatgagcaattttggacgcttaaagggcaacaatggtggaggagaaaggaagaagaaaagcaaagtaagaatagggaggaaaagcttttctgaaatctaaatgaagagagagaatctggctnttattttaaaaagctattctctttccttnttctaaaagccatgccacatgtctcattttgagtggagcacaagggcccacctctttcccttgatgtgacttcatactcagccacaaggagagagaaattgaccttttaatgcaaaa

SEQ ID NO: 43142 - DNA, 468 bp, Glycine max
  unsure (1)..(468): unsure at all n locations
tccacaacatccaagtaattccacatccaatcatcatggactatcataatcaagcaaaacagggcaaaggcagaaaactcttcccaaaacacaactcaaaatcacagctcttcacatacaaataccccaataacatttccttcgttccaatttgttaaccgtcggattgactcgaaaattctactggaagtctctagtacataagtctacattttgaccgttgggatctgctagcaaatgtccacaaccccatatgtactacccttttcacaaccagccatgcacaagtatatttctgcacttatacaaaattctgctgcacattgcaacagcaaaattctgcataaagtgcagatttcgaaaaccactctttccctcattcaatttngcccacattgaatcctacaagtcccaaatcatgtaccaatcatgtctaaaccaaaggcaagctccataccaatgcaacac

SEQ ID NO: 43143 - DNA, 348 bp, Glycine max
cccattgatactgtcgggttagaaatctctgcgttcgaaaataaataatttggtgctttctgatactagtagaacttgcgtcattactctactgcagaatttctccctttaactaaaatgtataaatatgcccttattggccaatgaggcatcaactttgtgtttcaagtataagcacttatattaatagccatcatttgtgtacttggagttgaccacaatagacaactctcgagccagcagaaattcactgttatgtaccaaaccatcatttattttatacgctctttgctgaaaaaatagaactatcctccacctcataatcaccccgggtcatagataattaat

SEQ ID NO: 43144 - DNA, 635 bp, Glycine max
  unsure (1)..(635): unsure at all n locations
cttctgttcatctntccacactttnttacnnttctcattctnnngcntcannctgcaaatctntntaactncntnnnnaattcnaaggagntgnntttggaagccgtatatcatccgactcaacnaacanannaaatctanatctgcatgttcagcagaacctgcgcagtgtggacacttatcgactatgcatgatcgattccatcgtgaacataactgccttgctgcttatgatcaacaagcaagctttctgacagtaatgaacagttcatacgtgaaacttgtaagacgtataggtgattaaaacatattaacaactaactaacacgttttgggcatgtataatttaataacaatattgactttgaactagcctccaaccaattcgaagcgacgcatgtgcacatatattttgtttgattgttatcaacacttaacgacccaacgcgatggtgtgtcatttctgtatgagcatcttacttagttacctccaacagagagcaaactggtgtccatatgatcttacccttatgcattcatgaatatggtaataatcgtagatattgaaatctacacttatctcatcctcaatgatatattgtaagcggtcatataatggtatacaaggatcaacg

SEQ ID NO: 43145 - DNA, 432 bp, Glycine max
  unsure (1)..(432): unsure at all n locations
catcttatctaaaagngttgaataaactctaactcgaccttcataataaataagtcacattttacctaccttaaatagacccgagccacaggcacttaacaaacgactcgactcatttctatccctaacaacaacttccatatataaatatctttactataaaattaattttaatggaataaaaagtacaaccataataaatggaacgtcactgacagctgtagcatatcatgtataattacttgaagaacgttaacaatactcttttcaactaactctattgaatacatactctattgtggataaacattaatctcacaataccaatccaataggaaaactttcttattacgacaggtaaatccacaacaattgtatttttaacacactcaatccgcacaagagatatcctaacattgctatagcaacaat

SEQ ID NO: 43146 - DNA, 469 bp, Glycine max
  unsure (1)..(469): unsure at all n locations
agcttgtcagttgagtggatccctcttntaacgatcttctttgggctntatgaggttatcaaggagcatgatgaagattagttgaagccttcctagcgagagaaacttgagccaagttttgtgtgagaaatttggcattgttgcttcaaccttctcattagagagtgatatacttctataaaaagctcgtaatatgtaatagatctaagatagaagtgagacattgtaatttcataagtggaaacctccttgtgaggtgagatctatatctatgcaatcaaaaacacaaaaactcttgtgttgttgaaagtccggtagtgatgcaatcctaccccgcaagggcattgggtagaagactccaagtcgattgggctagagatccaagggaaggccctagggttgtcatgagccttatggtagaattcgagcccatgggctaagtatgagcctgcttatctctgtaaatatt

SEQ ID NO: 43147 - DNA, 482 bp, Glycine max
  unsure (1)..(482): unsure at all n locations
agctntgatctaccaccaccaccaccaccatcatcttagttttctattatgtttaatattattagtactttgatttctagccgtgtatttggctatattattatgacatttgaacaatatagtatttctttcatttgcatagtatgattgaacaattatgaattatgctatantgactatgtggtgttatatatttgatctatacatgtttcttgcttcacgattgagttatattctttaatgaatgtcttgtgaatgattagtagcgtatgtatgtttctatacttgatatgcactctggctatcttgtgatgccaaagggggagagaaatatggattaaatcaagaactcacataagttattaacttaatttcaattgaagcatacactcataacaaagggggagaatatggagaattaagtgagagatcgactacgaaaaagtggggtatgtgtttcttgatttcacggatgccatcat

SEQ ID NO: 43148 - DNA, 414 bp, Glycine max
ggagaagtgaagtatattacggctcagccccttatgcacttctctctctttcgaatttgcttacgataattgtttttgtgaagaaaatccaagccgaggcgcttccgtaacgtttccgtgagtgatttcgcgaaggttttcgaccgttcttcgacgttcttcatcgttcttcagtcttcaacgggtaagtacctcaaaccaagcttttcaattcattctatgtacccgcggtggtccaaatttggtttcatgtatttatagtctcgttttcatttactttatatacccccttttgacgtgcttaagccatttatttaagtcatttctcgcttaacctataaataaaataaatttccaccgatcatttgaattgtatcatccgttaacttttggtgaaataaattccgaccgatc

SEQ ID NO: 43149 - DNA, 361 bp, Glycine max
cagcttccgctgtaccactggttcaaggcgagaacactctgctataccttactcattctatacttcgcaccccattgcccaaaggctcttcactaagctaaagtatggaggaaggatattgcacacaaccttaccctagcatatacaaagatgctgcttccatattctaacccagagatcaacaagccaccaatgcacaactttaccgttgcaccatggctcgccctcaatgcaaatcatttgcatccgataaaaactgatttactccatgtgctgagaagatttatataactgaacacgataatatgactatgtaactgctgagtaaactatatgcctgtattccagaaatgaaaaatct

SEQ ID NO: 43150 - DNA, 479 bp, Glycine max
  unsure (1)..(479): unsure at all n locations
agcttcccaattcatttaattatgatagtgttgttgttgatctttactgtgaattacctatatgcaggatgaaccaagtatagagaagggtaaagatgttgttgctgaaacatcatcattggatttccatcctacgctcngtgttttcattactaattttcatgctgaatcgtcatagtggcttttattntaggatatgtttcactatgtacatttaaattatatattcatacttgctaatattcttcttaatgatcacatacaaccttcattgtcacaatcagctgattatgatcttggactttctgctttgccactcctgccaaaagaatgtctaacgagtacacaccataccagctatctagtaataagcatatcaaatctgagtaatcacctgctgatgataaatatcgtaattcgttttaaattgttgtggtgattacantgtggctacctcttagatactacaactaatatat

SEQ ID NO: 43151 - DNA, 428 bp, Glycine max
  unsure (1)..(428): unsure at all n locations
ctaagctagcagaaaggtagcatctgttattggttgtactgttatatctttggagaattatcgtgttggagtagatgaagggaatgatttggattctatagaatttgatgccctgatcaagaatcttgaggtttgcatttgcttctcttttacattaccattcctaaactgccagtctggccatcctttaaatggtcctgatgtatttgcaaggctgatccttacaaagccgttaaattntatgctttgctttttggccttttctagctttatatgttatatttgtaaagacttgcattcctgaaatctgattctgaccaaaactaacaacacgagataaaaaaaagaatagactgttggtgaagtacttatctgcttgttntcttttggactgaaacagattangttatgtgtcaatttaacatgta

SEQ ID NO: 43152 - DNA, 423 bp, Glycine max
agctgtaacctcatcgtccctcacagtctttagatatgggagccaatccaatccttgtgttcggactctcagccacttatgatagccgccgatgatcccattactgctttccctaagctctctgtcctttcttcacgccgcatcccatgccttgcgaactccttggagtaccctcgcgttgtggtcactaaaaccccgtgcgatgaaaggcgtgatgctttcgtctaatggcgctcctctcatggagtagccaagctgtcttatggtgagaacgggattataattaatacaaccccttgttcccatcaagggaacatttggacatccttcgcatggagatagaatcttgattcttccttccttctagcgagggaaccaattaacagacgctcccccatgctagccaagagttggtcccaattc

SEQ ID NO: 43153 - DNA, 460 bp, Glycine max
  unsure (1)..(460): unsure at all n locations
gctgtcttgtcactcagcatccnagagtgttttttagtctgtacagagagggtgaagagatgaaaatctggtgtgatggctcttnttggttctgaaaattctgattatgtcagtgtgtttggatgaagaactaaaagtgtgtttggatgaagaactaaaattaattttgaagtgatgtgatttatgtataaacgtctttattctaaaagcaagtcaccgttaaaattgtgtaaaatttatatccacggccaaagctgcttataattgctttaactcanaatatggatccaaacacgcacataaagattgtatttttatgtattgatttatggttttggctattgcttggttggtgatataatgtgttgctaattatggtgcaagatgttgatgtgggaagatgggttctgccgaggaagagtttcatattgtttggaagagattgatggagaggatccta

SEQ ID NO: 43154 - DNA, 518 bp, Glycine max
  unsure (1)..(518): unsure at all n locations
agcaccgcagctgcagctttangagaaaatggcattgatttattaataaagcctctataatggagtggtaactggtaaccccactttttataatttataatgaaattaaatttcaaaacatggtatagtggaccagtgcaatgtccatacttcaagccttanaaggcttacttgtttaaacaaatatttctgtatgcatattttaagacgtacagaactatgggatgtctatctcacctaaacacagggctgtaaatgttagctgacatttggtttgagaaaatattntctattttcatttcctgaaaacagttttcatcttcattttcaagatttagaanatgtgtntggtttgacatcttattttctattctctgaaaatgaaaatattgaaaatgtgtttggtttaatcaattttcataaaacattgttggttntaatcagcacaaggaaatatattgatatggtgtataaggggatacccgtcattacataaaaactgacagagttatatacag

SEQ ID NO: 43155 - DNA, 451 bp, Glycine max
  unsure (1)..(451): unsure at all n locations
ctaagctgagcaactaaatatctnttattcaattgagatctatatgtggtgggaacactttcactatacctgtctacaatttttcacccctcgctgttaaaaaattaaccccccctcccaaataaataaataaaagttaatctagttccaaaataagcataaaaaatagtttggaagagaattccatggtacaatagaaacgtagtcatttaaacagcaacggtagagatagcacttacgtcccagagaaagccaagataccagttgttagaaggcctccaaactgcaaaaaagaaaatgataacttgatgagtcaaaaaacaaatagatgttttcatttcacaaacactctacactaaaatgaccatataataganaaatagcatattttttcaaaggggcaaaagggaagagaaagtatgataattgggaaatgggaactcacaacatt

SEQ ID NO: 43156 - DNA, 458 bp, Glycine max
  unsure (1)..(458): unsure at all n locations
agcaccgcagctgcagctagataattanttgatagattaagtcaagtataaccgcttggaagaagacattcttattcagaaaattccaaattagggaggcaaagtgaaaatgtcgtctctcagagattctccatatgctctccaatttcatatggagaaagttcagcttataatccactattattgttcggtatattggtattatagcgaatttttataacatacacattctttcattggattatatataagctctatttgtattgataacacaaaaccaataggacattgatagtacatgaagtattaacttatgatttaaatttcttgacctttgaaaggtatataaaactatttttggaatcacattatatctaatgacattgcttctggttttgttataaattttatccttcaccatagcaaaagtctaaatgctgtatagtgcaagctaattt

SEQ ID NO: 43157 - DNA, 473 bp, Glycine max
tgacagactcagcctaatgtaaatgagaatgactgttgctaactttattaagacaactctccctaaaatcgaaagtgctaataaagtttatgggattatgggagagcactctcaaacagctgataagtctgttgctgggacaataatgagtacactgatcaccatgaagtttgatggttcacgtactacgcatgaacatgtcattgagatgtcaaacattacagcaagacttaagaccttgtgaatgactgtgaatgagaactttcttgttcagtttattctaaactcattactgtctgagtatgacctattccaaatgagttataatatcatgaaagataaatggaatgtgcatgaattgcacagtatgttagttcaagaagaaacacagcttaagaatcaaggaagtcacttagtccattatgtaagccactaagggaatcaaggagttggaaagacattatgaagaacat

SEQ ID NO: 43158 - DNA, 516 bp, Glycine max
  unsure (1)..(516): unsure at all n locations
agcacctgcggcatgcacgctngaagtaaagcttaagttaaggaactagatgtgatagtgtaacttgttgaagttaatggaacttgatggtttgtcaaagactgaatgcagtctcggtggttgagacaaaccaatataaatttcttgtgtcttatttttaatatttttctcttgtgctatttgaactaatatgtggtttgaatttgatctttatgttntgaaaagttctatttgtcttacaaagatctgaaactatttgtaaaagtttaatatctattttcttaaattttacttcatgagacgataactttattgtttaaaaaagattttaaatttagtaaaaattataattcaatccctcttttgtgatatttatctttacaaaatataagttttattataccgaatacctatctaaccttttataaggcggaaacaactctaattaaagacaacagaggttaaatcccataatcacgcttagaaacaaattacctacaactacatgataatcta

SEQ ID NO: 43159 - DNA, 390 bp, Glycine max
  unsure (1)..(390): unsure at all n locations
ngagatgaggaagtgtagaagggtgaaacttcctgcntttactcgttgaccacagagtggtacctggagatatgtcgcgggggtcaggagaccttgtggacgtcaggtggggtgctattgcccaaaaccaagcttgaccaatcccgacccaacccgggcatagtcggtcagtgagaacctgtgatgtacctaaacaggcgagctcctggcagtcaacagataagaggaacaaagaccacaaagcaaggaggcttgtggtggctggccagctgtgaattttgtgtgatagatgagttgtggcctctggtaattgattaccaagagtgggtaatcgattacaaggcttanaaatgaagacaggaggctaagatggtctctggtaatcgatta

SEQ ID NO: 43160 - DNA, 446 bp, Glycine max
  unsure (1)..(446): unsure at all n locations
agctntgcacanaagaatgatttagggggatccttgaagtataatcagggtgatgatgcacatatatcaaatcttgatgataattgtaaatcttcagttgaggttnttatagcgtaaaggggcattcaatcttgttctcctcgtgctgacttgcattaggctttctctaatgttgaggtagagattgtaccatatacacatgatattggttcacctcttggaggggggcatagacttaaatatntcatctatacggtgccagtaacttaagaatagggaggtactcaatcttatgatgagtctttgcatctagacttgcctttagttgatagatttggagcagaaactccagagttgaaggataatcccattgtgcatcaatattttgggatcataacaagtaagtggngatatatagctgatgatgctttcttatgtgttgatgt

SEQ ID NO: 43161 - DNA, 443 bp, Glycine max
  unsure (1)..(443): unsure at all n locations
tgttcagatagtccanatatgaanagcaaacaatgtctgctaacggtaggtagttcaattacaacataacactttagcaaggtccacataataatttgtcaaaaaaagagatctaaacataagctaatgtagtgccaccttcaatcagagtcactctcatcccaagccacctgttttttgattaccagctcccatacttttttattaggcctgaagtagaaacatatctcatctccagcatagaattcactgtctctcanatattggtaccacgggtcagcaacacattgtagccctttttaagcatcatgcatggtcaacttccataacagaggatgatcatcatttatcagaacaaacatatgttttcttgtgacgtcaacataccttagagcattcattggtagtacctagattagagatggaagtcagtaaagatctta

SEQ ID NO: 43162 - DNA, 403 bp, Glycine max
  unsure (1)..(403): unsure at all n locations
agctntgaataatgaatggcataacagaatacccttcacgaatcccaaggctactatataaaaagagtcactcaaagtcactgggccctattacaataatangtccgagaatgaaataaacactgaaccacataaaataaaattgtgaaatttcctaattaaaaattaattaaggtaagcgctgctttatttgccctcttcaagtccacaaccaaaatccggattaagcccaatggtgcattaattcctgaaattagattaacaacatcaaattagctaaatgagcccaaataataaaactgcctaattaattgacaattaagaccaatcagtaattaaaatggtgcataaagggtttagaaaatagaagaaaatgatggcacatcacgaacgcataagcatt

SEQ ID NO: 43163 - DNA, 511 bp, Glycine max
  unsure (1)..(511): unsure at all n locations
acactatgaaactaagcttgctgattacattctccacctttctcaagagaattcttaattcttcttgacatcatcaaaatcttcatgatttacaaatacaacccagaaataaaataaaataatactggacgacaaataaaattgtttgctcttttcaagtccaagccggatcagcccaattctggatccaagcccaattgcttataattctcttgaatataaactaaaacacaaaattagtctagtaagttcaaatgataaaactgcataattaatttgacgattaacgttaatcactgattaaaatggtgacagacaggggtaagatatatgagaagataatgacacatcaataggcaacttcccccactatggtgattagctagagtctcaacgaagtgtcaaaccgagtggcatgcccccaagtacaaatattnttcctcatgatagactactaacgaagttatactatttcatgcaatatatagatgagacatggacaccattaatg

SEQ ID NO: 43164 - DNA, 331 bp, Glycine max
  unsure (1)..(331): unsure at all n locations
tcgattacactgatttggcaatcgatgaccagtgatcggttctgacaaaatcaaaagatgtaactctgcaaatgggccccgactaaataaaattgggnccaaggcnncgaaaagctataacccttcaaaatggtcctctggaccacacatgaaaaggctataaaagaaaggctctgtcttgcactttagaaaaaatccaatcaatcttatacaagcctttacaagccttgaatctctgtaaacagcttcttcttctatgtgccaaaagctgaccacagttttctggttatctaaaccatgaaaacttgtgctattcattctcatcatctct

SEQ ID NO: 43165 - DNA, 466 bp, Glycine max
  unsure (1)..(466): unsure at all n locations
ntgtatcttgtgcttaagattcatattcnccttgtgtaagttatctcttacaaaaaaaanaaaaaattatgaaagctcggaaaggtttagtgtatagaggatattacaatctaaattttattgattgtgaatagaggtacagaatattcttatatagactagtttgttacaaacgaatacaattgataagctgtaatttaagctgagaagataaatgttgaacagtaatgagtgatttgaataataagaacccataacaaagaatctgattcgtacttatctaatatgccccctcaagataaagtcaccatttgtgacttttaacttggttgttacattctaaaagtgcgcaatggccagtgtggtttggttagaagatttaccagctgatccttagtggacacatgggatacttgaagcttgcctgcctgaacttgttacaaacaaatgatagtctagtgagatg

SEQ ID NO: 43166 - DNA, 430 bp, Glycine max
gcagctgcagctttacttatgtggcatggcgttcttccttcactttgttgacacaaccgcgagcttggaccaccgctctatcttgcctgcatgcttctctgtatatacgactgagtgggtatatagccgaaaccatacttcccatgattctctttggcatttatcaagcaagttatgccgccgttgtctctgcctaaacccattccgggttcgtagccgtaccccgacataactcgggccatcattactgctgcatcagataggcaagcttgcccacagaaggagttcactgaggagatgcttaccaactcataagactggagagcggattctaatgactcctcttgcggttccacatatggcatagaggatgggcagctcacccagatgtcttccttgcccgatactatgagcagatgcactttcacta

SEQ ID NO: 43167 - DNA, 211 bp, Glycine max
atggacctttcaggtctagtataggatctataattatgcccataggtaggacctcccaagatagtattgagtcagcacacactttttatatgtctgattgaattccttctgcatgtggagctgatatagaggacgaggaacctactgatttgtgacacattctcttcacgggggaggggatgatgtaatcctccctatgtaaggaccattt

SEQ ID NO: 43168 - DNA, 415 bp, Glycine max
ctgcagctatgcttttaagcagccaacttatcgattgtatagaacttcggctttgcttcgtgttgttggcaagtagactgcttacgatactcaagtgtgatatgaacaaagataaaaagatgtgccgaaatgctatattattagatgaatgagtttttttttttctctagacacacgaactcatgaagcacaagcacagctcagcatcttgggtttgaatgtgtgtatagcgacattattttgttacggaggaagggttaacagatgaactttgcgatatttttttcttcttattgaggttgtccgataaaatggtaattataaaaccatcccttctactttaagaacatgaagtaatgatctcttaagaaattattgaatctcttattatcttacatttaatgtagagacaata

SEQ ID NO: 43169 - DNA, 437 bp, Glycine max
  unsure (1)..(437): unsure at all n locations
tggtgattaattaatgttactcattcttacgtctgctgagggatctccatatgttttattattgtgttaatagggttgcacgttttaaattacagctaatgtggctagtgccttaattagactggactgcttcgagaagcattgatagttgtttagatcgttagattcaaaatttaatctccctgttctccaatacgattaacccaatactacttaacatattctgtttggaagcacgagagtggaagaatagaagggagagaacgaatacaatcaattctatttactttgtttcatagtttaatttggtatatcacttagaagaagaaaagagggaagaattgtaataggcatctttaatcattttcaaattgacacgaaaaacaacttatataattaaaagactgaanttatccntatatattatactttttaat

SEQ ID NO: 43170 - DNA, 441 bp, Glycine max
  unsure (1)..(441): unsure at all n locations
atccttaagtcacctgcggcatgcaanngcttgagccaaatcctgactcaccataaaccttgacccagggtgaaaatgccaatccttaccctcgggagcaaaaaagaagagaaggaaaatttccaatcaaagaagaagagaaggaaaatttccaatcaaagaataaaaggaagcaaagaaattcccaatcaaagagtgggagaaagaaaaagataaaaagaacagaaagataattcccaatcaaagagtgggagaaagaaaaagaaaaaaagaaaagaaagataattcccaatcaaagaatgggagaaagtaaaaaggaagaagaagaaggaaagaaagctcctgatcaaggatcaaaagaaaccanaagaaatgtgcagagaggtctttggaccggacaatatctgaacaatacagaattttcaccaaatgaacaaaaag

SEQ ID NO: 43171 - DNA, 422 bp, Glycine max
  unsure (1)..(422): unsure at all n locations
ctaagcttggactctagcaatgtctttaaactagtcacttaanaagttgtgtcttttgaaagaatcttcacaaacaagtcacttgaagaattatgacttttggaaatgtatttttcgaaatcaggcactggtgatcgattaccattaaagtttaatcaattacacatcaacagatgtgactcttcattatgaattntgaaaattagaacgtttagaaacactggtaatcgattacaagtactgtgtaatcgattacaccaagtaaaaatgtgtaaacacaagttgtaactcttgaaattgaaatcttaacgtttaacacactggtatcgattagtaccttttggtatcgataccaagagtaaactctctggtaaaattnttgaaaacttcttgtgctactcatgtttggaaacttttttgac

SEQ ID NO: 43172 - DNA, 387 bp, Glycine max
agcttcatattctgagacaagagtgtgttttcttgctcttctgacatcggtagtgcctttataagtgacttcaagcatggtccatatctacatagcactgttgcaccgtgcagcacgaagaaattcatcagaagatagaccagaaggtaaaatacttgtagcgttatgatcatcttgcacttgtcttttctcatcatctttcatctcatcccattctttaggaaccaactaacaatgctcttctttagttggggataaatttccgtgaacaatagcattccatgcaccgggatcaattgacaaaagaaagattgccattctcttttgccaaaacaaaaaatgctcatcctcaaacaatggtgggcagttgagagaggcaccctcttt

SEQ ID NO: 43173 - DNA, 308 bp, Glycine max
  unsure (1)..(308): unsure at all n locations
cgtangattatggagtacccatcacatgtggtactaggtggctgtcgggcgatggtgcacaacaagattttccacatccacaatgcgcgcataaacccaccatcccctgttgcccacctccaactgagctcgcgtactcccacgtagcccatatcctcgtttctctcaacaccgggtccccatcaatcctctcaagcttccacaacatccaagcaaaacaacattcaaacagcacaagctatcacagccaagcaaaacagagcaaatgcagataactctgctcaacacatcaaccaaaatcacagttt

SEQ ID NO: 43174 - DNA, 473 bp, Glycine max
  unsure (1)..(473): unsure at all n locations
agctnntaactcttggatgaattcttatacaattgatattctaaatgtctnttcttcactttgtggcctttatttgctcattgagtttctttttgatgtgcaagttttctaatgacttatcacttcttcacttttggactgatacatgaccttgtatgcacaattagtcttgttgggtaaacatagtttgctaggggagacatcatgaatgacagtttcaattcggactcccacaccttgaaaaaaaatagtcgacactatgagaaaatgattaaaattctatttactacctacaattctataaaactatattctctaactaaattgaagctaaactacagcaataattcaagaagagtagataatgaatgtgtttcttgcaatacaaatgaatgtatggacaacaatctgtaacaacacaacatgatattctgacaccatgaatccatcttcctagccaaggccttgtctct

SEQ ID NO: 43175 - DNA, 409 bp, Glycine max
  unsure (1)..(409): unsure at all n locations
tanatagttgtttctcatgtttacatcatatacacatgtctttggntgttcgatgcgaaaccaaatatcttaataatagagaagttgacgataaaggaaacgagaaagaaaaagataaaacaaatgagaaatgagttataagaaataaaattaaataaatgttcaaattattcaatactctttcttaatatgcacaatttcatcatatttttaataatgataatattgtttctatcttttacgtacttaaaaaaaaataattaaaccacgccatgtgataggtggaaaacttttctttaaatctacatagcaaactaatcaatcgtctttagaagcacagtcaatttattatggcgttttggatagaaatatctgttactnatatatagctcatttntatgacaataat

SEQ ID NO: 43176 - DNA, 454 bp, Glycine max
  unsure (1)..(454): unsure at all n locations
agtcctctcactaggtggaggacgagccatgttctcagtatgaaaatttgtcgccgaccgcacaatttcnaatatttccgaancaccagcaancagaaactcangncagcgctcagcactactgagtttaaaaaggttggctcagattctgctacaacattagcacttagacaatgaacgacagctggagttgctgcacatgatgtccatcgtcatgtcaaggaataagatcgggctgcataatgcacaacgcaagataaagcgtcaagcgatgaatagaagatgaaggatccacgatgtcggatacaatgtcctgacatcctgctcgagaatactggaagagctgtaccatgcacgatacaagtcacgtgaacgctcgaatctgcaggatccaataagtccgattccatgtcctgacatctggcccgaaatactggcatataatctgtatatc

SEQ ID NO: 43177 - DNA, 183 bp, Glycine max
cactacagaacacacaagctcgtaactcactatacctcatacaactgtttatctagtgactaatattaagtatatttatatattattcctacttactgactttgcattatcgcactttctacttaatgtgccttcttctctaaaccattttcatctaatgtcgcactctgaccgccaatgatg

SEQ ID NO: 43178 - DNA, 471 bp, Glycine max
  unsure (1)..(471): unsure at all n locations
agctntgatgttaacaatgcaatagagaagagagcgcgagagggtacacgaagaagaagagagcgtgaggtggtaaacggagaagaagagagcgcgagcaacatattgtattgtcaaatataatttagaatgtaagttcaacatcggttttcaataaaaaaaactgatgttaacaaattgatgtaaacgataacatcggttttattcaacaaactgatgttaactgatcatatgttaacatcggctttctcaaaaccgatgttaacgaagcgacgttaaccttgtgtttcttcaaaaatgatgttagcgttgctttcttaatatcggttttttgaaaaccgatgttattgtcgctacgttaaccttggctctcttcaaaactgatgttagcgtcactgtgttaacatcggtttcttaaaaaccgatgtaacggatcacattattacaatatgccccgcattacgtaacatc

SEQ ID NO: 43179 - DNA, 375 bp, Glycine max
cgcaagcactaacaagactgagtatctcaagaccatcatcttgttgatactccaagctccaaccatagacgccaggaaggtcatggtgggagaaatggaagaaccagactatatgaccccctataagaatttcttaatttgaggggtgtttccaccaaacaagaatgaaacctgacgccttaaaatgaaggctagcttctatgtcatcattgactgtgaactattgtaaagaggattaacaacacccttgctcaaatgccagatagccaacaagttgactacatcatgcgagagctacacgaaggaatttacagcctcctctttggggaggctcttggcaaccaaatgtccaaggctgaagtgtagatgtgtatc

SEQ ID NO: 43180 - DNA, 97 bp, Glycine max
tgcaccagcaaagggatagcaggagggtaactttccggagaaaccaaacgactggactaaaagtcaagctacacacataaaaaagcctatcaaggag

SEQ ID NO: 43181 - DNA, 499 bp, Glycine max
  unsure (1)..(499): unsure at all n locations
agctntcaacagatgtcttcacagataatcatcacacagcagaaaactaacataactacccctcatatctcccaaaaccccatacccacgaaatttaagagagaaagaagtccacccaaacctggattttcgaagtcccactcgtagccacgcacttcacgaccccgaatatgccctcctttcgcgatttggagcagaaatgagcaccanaggttggagctttgttggggtttcaatggagaatggaggagaaggataaagcaacgtgaggaagagggagagcttctgaattttctgttttggctgagtgaggagagagataagctttttggtcttaaataaaaggttttcctctctttctattaatttattcaagctctaccacatgttcctatttgattggagcataaagggcccactttctctttttgactgtgacccatactcagtcacaaaagtgagaaatatctgacctttgaaacgctataatcttgcctcg

SEQ ID NO: 43182 - DNA, 148 bp, Glycine max
  unsure (1)..(148): unsure at all n locations
tgagaatggagaatngcactaagcaatcactacgcatagctcctaactcgaaaggggaggacacatgaacgataacacaattcatggggctcctaataatgtgttgagaatggagaattacacttagcattcactacgcatattcttc

SEQ ID NO: 43183 - DNA, 462 bp, Glycine max
agctacaggctgattaatagctccatgttgctgtatacaatggcataggtctgtatgtgtggcagtacaagagcacaaacctcacacccttgtgacatgtacaaattattggttcacggtcaacttgggatactcaacgtaaccactgcgtccagtatgccttcaaacttattagcttcagatgatgcagatgagatttgagctaccatatgcactcctctaatgactatcgtatcatctctggcgctaaactgctgggagttggaagccatcttactaattaaatttctggcttcagcaggagtcatgtactcaacggctccaccattcggatcatctatcatacttctctccatataactgagctcttcataaaaatactgtacaataagctgcttctatatttgatggtgagggcatctggcacatagtttttaaatctttccagattcatacagctct

SEQ ID NO: 43184 - DNA, 618 bp, Glycine max
  unsure (1)..(618): unsure at all n locations
ctccccctccnctccccttttncgctgcttnntcctctcgccgcattngacaaaaatatntaaataanagnaaaggatgggatttttgaaacctganttgcatgcgactgaactgacactatagacaactacagctcgtgtcacaattcatggggacagtcaaagagccatgttctcagctattcaccaaaagtaccacgagaggacacagcacatcatngtgaaactacactctaacacagatgcgattgactctaagaagtgacagtggccaatgtttaatataacaaaacacatctgttaatttcatatacgccatctctaatgccatgttcaagcactgcttgaacaacattaatattgacgacgcctaaacgatatcgttcgaagcgtatccttgtattactacggagacacttgctaatgtagacctcagggggatatcttaggtgagcgactcacaatcccactcggcactctgacaatactcttacaactcgtgcataactgatctgactttcatacataatcattattagcccaagtatatccacacgacctacctattttcgacttgaacccagagtcggtcgatgcgtaccttcctctgactccacc

SEQ ID NO: 43185 - DNA, 433 bp, Glycine max
  unsure (1)..(433): unsure at all n locations
agctttacggcgcncttaccgaacctgtgctatatctagagtagtgggtgaagtaaaggaggcgcatgagcagatgaaggctgacatggaggccatgaaagagaaaatggccacaatggtggaggccatgatgagcatgaagaagataatggaagccaatacggttgcagttgccgctaccagcgtcgttgctaaggtgaacccgatgcccccatccgatttcaaccacatgaatcatccaacctcaaatatggtggacaaagatttgggaagtacggatggccccatgatgtgcatattcaaaatgagcgcgcctctccgccatatggcttgcctcccaactgtacaccacccaatgtggcgtacactcccaatgagaatgtcaataactccattcccatactcattgagagccgacaaccccaaactgatc

SEQ ID NO: 43186 - DNA, 401 bp, Glycine max
cggatgactgggtgatgggtaatgagaagagttgatattggctgagtaatgacattgttgggctggtgggaagcttggccacgtacgaatgacagtcgcagcatgggtttcttcttcaatctcatcctcttcatttgccccagttttctcattcatcacaacaggatgatcaaatttgcctctattcatacctgcttcgacccttttgtcggtgaagaccataatcacaaagcttgaatgtgcgtaccccaccacttttccattgtaaaatattggaactgtgtccactatcatttgtatcatttctttctccgtcattgatggaaccacttgactcgctagatacctctctccttgtgcgtattcattgaaagatccgcgccccctcttgctatgctctg

SEQ ID NO: 43187 - DNA, 471 bp, Glycine max
  unsure (1)..(471): unsure at all n locations
agcttatgataaaataattaagatgcgtaagacaatccanaacaggttgagatcttgcgttaatcaaggattcatgagttggattattaatacattgctctgctgtaagttagtcaacttatgccatntgccttgcttgcaagttcaatttttaactctctatgacttatctttttgttgtattgcaaatgtgatattccttcaaaaatttatacagcacttcgactctacgtgtttgtttggatgccaacaaaatcaatttgtgatgtaacgttatatgcttgtatacctcttattttaagaaattcatttaaagtggtttttcttcttctaatattccgctaaataaagctaattttaagtaggacttatataatttattntgtaaacacatacttatatcnttaaataaatttactctattacgaaacattcaatntatttaaatagattttcgtaacatatactact

SEQ ID NO: 43188 - DNA, 434 bp, Glycine max
tactatgaaattaacctcatgcctgaagtcctgactgtattataaagtaatcagcataaagaaaaggataagcgactgacaaatagctaagatagaaaacatagttctgatattacacaagcttaatcacaagatgtctgtctattgccttccctctcatttagtttttattattcatcgagtacacaagcttaaccacaagttgtctggttattgtcttccctgtcatttagctataattattcattgataaacagatataagtagatgggctttacagtaaaccattatgccctaaagaggtataggtggttcaaccagaacataatatgatcagaaacaggtcagttatgaaatgggtacccacagacagcgcagagctgttgtgattagagccacaatgagacaatattagttggggagggacaagctaa

SEQ ID NO: 43189 - DNA, 466 bp, Glycine max
agcttctaccatgccaaaacgaaggagactgagtatggatttaagaaaacaaagctagtaacagtgctctgggtcaaacacccacatcactacatgaaagagctgagagtatttcgggttttacaaaggaacgtaatttggaaattccgaccacgccaatgtgaccggtgttcagtgtatgttacgaaaataacatgcatttcatgaaaggataatgtttacaaagtctctttctctaaggtttttcataggaagcataagacaagcaatggcagctccaaagtcagaaaagatgcatagacaagatgaaactaacaagaaacaatcatagaaccatgattacctcgaaagaaaacgaaagatcagattatggttttcgttctctaccgaaaccgcaagccaagttggaaattctgcttcggatgaagggctcctctcggtgtgagttataatggagaacaatgat

SEQ ID NO: 43190 - DNA, 411 bp, Glycine max
  unsure (1)..(411): unsure at all n locations
tcaccggatgatgccgatcgagcatttcctaatcgacatcatccaattgttattcagggattgaatagaataaacaatggccggtgtcggtccttatatggccccgactgatatctntcagccgacattgcgcaatttcttttacaaacgctggccgataataattttttttttacggaagaggaagttttttgttttggtgttgcctaaaaaatttacaacgtacgtcggcaaggtttatccgtgcgacctcaaccgagggttcgttccgaccgacactggcatgttgttcatctcatttaggaggccaacataacgttggctcaccccggctaaaacacataaaaaatattcacgacaattgatcgaaaaacatgatagctgacgccagcatggagagatgaccgatcg

SEQ ID NO: 43191 - DNA, 259 bp, Glycine max
  unsure (1)..(259): unsure at all n locations
agcttatccttatggcctgcctccggacttcaccctccgtgccaccccggaagatntaagccaagcccctactttcgaggggcaactcccaccttatgaagactatcccgggcaagacgatggggaaggagatacccatcttggccccctgctgcacctcgaagatccatcctcgcatgaactaccccagccgaacatagtccgccatatcccggcctcacccacacccgtaaaagaatctgttccctttgcggaagat

SEQ ID NO: 43192 - DNA, 451 bp, Glycine max
  unsure (1)..(451): unsure at all n locations
ctcatcttggtggtgaagctccttcttccatggcttattccttaatggatggcgcctcctctcacctcctttcctttgtcttcctgatgtgccatcattttcttctattntctaaaccttttttgcaccattttaattattgattggtcttaattgtcaattaattaggcagttttattatttgggcccattcagctaatttgatgtttttaatctaatttcacgaattaatgaagcattgggcttgaatctagcattgggcttgaatctagaattgggcttggacttgaagagggcagactaatttattctataaaattagatcttatcttatctagatattatttagatttgatctcatctagatattatttcatctagatcttatcttatcttatcttatcttatctagaattgattngatattacttatgggattggatttaaaaca

SEQ ID NO: 43193 - DNA, 488 bp, Glycine max
  unsure (1)..(488): unsure at all n locations
agctngactnggcgggttgatcttagccttagtttcactttagttattagtaaattcaatttagaatgagaaatcccaaagagaaaacgtccgattgatttttttcgcttcatttttactaaaaggtattttttgactattatattattattttacctcttttttgatttccaacgtggttacggcacgaccgaacggttgtaattcattntaacagaaattaatagatattacaaatcaaatgatcggtggaaatttattntattttttgattatgcgagaaatgacttacataaatgactgaagcacgtcaaaagggggtacggatagtaaatgaatacgagaataaaagtacatgaaacaaatgaggaccaccacgggtacatagaatgaattgaaaagctcggtttggggtacttaccagttgaagaccgaagaatacgaataacgaacgatgaatgtcgaagaacggntcgaaatcttctcgt

SEQ ID NO: 43194 - DNA, 401 bp, Glycine max
  unsure (1)..(401): unsure at all n locations
cagtaatgatggcccgagttatgttggtgaacggttacgaacccggaatgggtttaggcaaagacaacggcggcataactagcctgataaatgccaaaggaaatcatgggaagtatggtttaggctataagcccactcatgcagatgtaaagagaagcatcgcgggaaggaagggcggtggtcaaagctcgcggttgagacaagaaagtgaatgaagcccgccctgccacataagtagaagcattataagcgcgggtctgggagacgaaggtcaagtggtcgcaatatacgaagatgatgttccgagtacattggatctggtatgaccttgccctcctgatttccagctggngaattggcgagtggaggaacgccccggcatttacgcagcgagcataatg

SEQ ID NO: 43195 - DNA, 499 bp, Glycine max
  unsure (1)..(499): unsure at all n locations
agctnggacaatcctaggaaaactgctagagatgccgctatcactgtcggactacacacatgagcccgcttagacgtaagagatgagtttatcgcaattgaggttaaaatgaacatgtatagggatcctaagaggatcaaattggaacttattttgggatgtttattgtattgtaattcttcctttgattttgatatgattatgtgaaattcgttaaggggttctacccnctccccatgttgtgagaagcatttttgtataacttgtttgtattttggacaagattttactggattagcatgataaattattatattcggatcatgaaattgtgattgataatgtgagtaagtaataaattgaatatgtgataaattgtgagatacacatgtattgagatattgtatgtattgagtngtgagctatgaatcgtgcaatcacacaattgtaagatcctttaatgcaactgagttttgcgcgactagtatngtgatgtgat

SEQ ID NO: 43196 - DNA, 382 bp, Glycine max
  unsure (1)..(382): unsure at all n locations
cttgtgcccatacccaatgatttctntaaggtcagcgaggaagttacatttcgttcagatagctcaccaagctngattttgtataaattacctattcttttatcagcaaattataatgtcttattagcgtcttgcacgacacacccttctttattgaaggagacattatatccattatcacataattgacttatgtgaagtagattatgcttcaatcttaaaacanactaaacatttcttataggtggataagtatgagtacttatcctacctactctgcgtattttatcttcttcatcccgccaaagtgattgttccaccatgcatggggtcgagcattggaacgtatacttcttcttgtcatgtgacataagcaatcact

SEQ ID NO: 43197 - DNA, 385 bp, Glycine max
catgcatgcttctatagaacggtcgttcctatttctctctattgcatcacctctcactgagctagagaagaataatgctgcatttacctcgggcgaagaactctagcaagcctcttggttatctcaaagaaaagctctactaaggcacctattctaactcttaccgactcttctaaaactttagagctataaagtattcctctgtattgcgattggcattgtctcgtacaacgcgggcccttattgcttattttgtgaaagacttatattgcacactcacttccccacttatatacaagcttatgccttttagaccctctaactggaacatacctgttccagaactgcattcatggacacatccctaatactacaggaaaccatt

SEQ ID NO: 43198 - DNA, 262 bp, Glycine max
  unsure (1)..(262): unsure at all n locations
acccccatgacataatacatgaacatactaaaaatatccctactacaatgagttctcaaaatntcttgaaatacatggctaaaaccctatactactataatggccaaattacaaggcctatactaaggaaaatcctattctaatatttacaaagataagttggctcatacatagcccatgggctcaaaatctaccctaatgcgcatgagaaccctatggctttcccttggatctcaggcccaatctacttggagtcttatat

SEQ ID NO: 43199 - DNA, 480 bp, Glycine max
  unsure (1)..(480): unsure at all n locations
agctntanagcacaacaacacagaatctaggtgtccaacacccctccattcaatggcttttctagggttgaaaggtgaaatttagaatgaggtgaatttgaggcaaactctcacctcacaccagtccataacgtcaatctaaacttgcccaaactggaattacacctaaaattccaccaaatcaaaatttgactcttcaacacccaattttgccctagaaatggctcttggttcactttggtcatttatttttctctctagctcagcctaacctttctcacatgttctaaatgacatttcaagctagtattgactcactctaacctccatttaccacagaattncgacttagccttccaactctcaaagtctcactctttttccactcataacatcacattctcactttctaaccttgggttagttctacccttcgtctctaacagaaattcattaggcatttcagcatataaacatcac

SEQ ID NO: 43200 - DNA, 333 bp, Glycine max
  unsure (1)..(333): unsure at all n locations
cgagaatggagaatngcactaagcaatcactacgcatagctccaaactcgaaggtggaagacacatgaacgataacgcaattcatggggctccgaaatgattgagaatggagaatggcactaagcaatcactacgcatagctccaaaatggaaggtggaggacacatgaacgaaaacgcaattcatggtgctccgaataaggttgagaatggagaattgcactaagcaatcactacgcatagctccaaactcgaaggtggaggacacatgaatgaaaatgcaattcatggggctccgaaaagattcagaatggagaatgctatcactacacat

SEQ ID NO: 43201 - DNA, 474 bp, Glycine max
  unsure (1)..(474): unsure at all n locations
agcttagtacattcaacctatatgctccaatctgagtctaggaatctatttctaaggaattaatgtatagatagctgaatagacagattcatgcatggcaacttattattttcctaggaaatcacatttatattttcattcctcttaaatataattcattcagaaatgattataaattctaatttgccgaatgcttctatactcgagcatatcaccanaatccaatcttaactctcgtaaataaaaaactaaaaaaaaataagaaaatacaaataacgaagcagcagcaaggcaagagctacataaaaattacgatatatttttactcatgctacatcaagcgagaaacatactagcaatactcagttcctcaattgtgtaattagttgggcgactagataagtgatacatcaggcggcaaataacatgtnttcaatgtaatgtataattactaataatccaagcagtcatgct

SEQ ID NO: 43202 - DNA, 338 bp, Glycine max
accctcagctttaatggaagtcaagagcatgatattgcgccgattccgttgactggtgagcaggtatatcagcgggttcaacacctgaatactgtatttgggaagacccacaataatgttatttgtcagacttgcatatggaagaagaggtccattttctctgatcttccgtactggtgtgatcttgatgttagacattgtattgatgttatgcatgtggagaaaaatgtttgtgacagtgtgattgtgacattccttaaaattcaatgcacgaccaatgatggctcgaatacccatcaagatctatctgatatgggtatacgatcacagttgcttcc

SEQ ID NO: 43203 - DNA, 511 bp, Glycine max
atcctctgagtcacctgcggcgtgcaagctttcaagagcaagttatagatgtgaaatttatgtcgctttattctcgtgtacaacaaaggaatggaatgtttcagcaatgatctataactgacatattaaccataccaaagtgcaattgatatgttgaagtttctatgtttctcctgataaagcactgtattggagaatcacgcggacccggctattcatacatatacagaaaacaaagcgctgatacatttaaacgtaaaaccacaatggataaggagaacattagaccagaaaaagagttgagagtatattacctgcttcaatgaaatgggaaatgtgatccttccacattgtacaggagtcgtgacaatctctcttgtaatggacctccatgatttacatactgaagcacaaaagacaacaacatcacgggcatgccaagatgcatactttttctaccctctggatatgtcataatcaatctgatggtagacttgtcattgtcctgttg

SEQ ID NO: 43204 - DNA, 361 bp, Glycine max
  unsure (1)..(361): unsure at all n locations
agcttcatgatgatgtctncaagtgattcaagtagttntgataatgacaaagatgatgacaaaatgcccaaagaatgatttcaagattaagtcaacaagaagaaatcaagaagattcaagagaagaaatcaagaagacttcataaggaaagtattaaaaagttttttcaaaaaacaaacatagcaccagtttttttttcaaaagagtttttctcaaaattttcaaaggtaccagagttattactttctggtaatcgattaccagtggcaaagtctgattncaaaagtttttaactggaattgcaacattcaaattgatttcaaatggtgtaatcgattacaagatattggaaatcgattac

SEQ ID NO: 43205 - DNA, 484 bp, Glycine max
  unsure (1)..(484): unsure at all n locations
tctccattaatctagtgcttgcaacattggacaacttccgccatcaatgattagagaacaaacctttccatgcaccaaacatctagaatgaaaaatgttttccctttgtgcatcatctctatctttgcgcaagcttcccatgagtctccttaccattaaatgatctccttcttccggtggaagaaaaccatcatcctccacttcactagaggaactatgagaacttttagatggctcactgtccacctcttcattctccaacacaatcatggtccttgttgaaaaaagattacgaaactcaataaaccaagaggggggtgaattggttntcaaacaaaaccgtacttaataaaacaaagttacggaaaaanaaacttttctaaatggatcgtatcacanaaagaatatgaatcgaatgtattcaatacttaatcaatccttccttacacatgagccttcattaacttcctttctttcaaatcat

SEQ ID NO: 43206 - DNA, 486 bp, Glycine max
  unsure (1)..(486): unsure at all n locations
agcttcagaccaaagcaactcanaatctaggcatctaaaacccctcaatttagtggattttcaaggtttgagaagtgaaaatgagaatggtgtaaatntagagtaaactctcacctcacacaagtctataacatcaatctaaactttctcaaactgattttacgcctcaaattcccccgaatcaaaatttgactcctcaacacccaattttaccctaggaatggctcttgccttcactttggtcatttgtttttctctcttgcacagtccaagctttctcataagtcctaaatgacatttcaaactaggatttactcactttaacctccatttaccactgaatcccgttttagccttccaactctcaaagcctcactctntntctactcataacactacattctcactttctaaccctaggttaactctacccttcatccctagcaattntccatcagcaatttcagcacataaacatcacaagca

SEQ ID NO: 43207 - DNA, 424 bp, Glycine max
  unsure (1)..(424): unsure at all n locations
ggcctcanagagatctaggaaggataaagcggctgaaggaaccagttccgctcccgaatatgacagccaccattttaggagcgctgagcaccagcaacgcttctttgtcatcaagggatggtcatttctccgggagcgacgcgtccagctcagggacgacgagtataccgacttccaggaggagatagttcgccggtgtcataccctaatttcgtccggggacctttgcttgatgacaggcgaaccttgtttggtccttgtaaggtgcttggcacccatcattatgcaatttgtgaaattccgggacatgccgganaacaaaagaaaatattgatgcacaatccgtaagggtccgtaacaccccgganatcaaatggaagcatcattgcataaatagtggggttccgtaacattccgtgagtca

SEQ ID NO: 43208 - DNA, 441 bp, Glycine max
  unsure (1)..(441): unsure at all n locations
agcttcgttcgcagatcccacatgtaagactaggcccgatttatacagccctcttaggtttagactaacttaaactaagtntcgtccgtagatccctcatgtaagactagactcagctcaagtagcttatgaaagtttagcctaagctntgtccttagatccctcatgtaatactaggcctaaactaaacaacattattgtaacaacataattaaaaccataacttaacccacagatccctcatgtaagattagagtttgatcctacttcaatcaagttctaaggcaacagtacatttcccaatgctaaagttacctaactgtgcacacaaatgggagatcagaccaaaagcatacgaacatctagcattgaatgaagcattgaacacagaaaacacaatcaattagatattatgtatntacatcaactgttcattagaaa

SEQ ID NO: 43209 - DNA, 427 bp, Glycine max
agcttctcaataagcgaagcgccagaatcggacttccgtgtgacatgttatgaccatatgaatttctcgagagctttcgttgctcaattacgagcgtcatgatatattatgcgcatgaatcggacttccgtgcgacaagctctgaccattcgaatttctcgagaacattcgctgttcatattcgagcgcctcgatatatgatgcgcctgaatcggacgtcagtgtgacaggtcatgaccattcgaatttctcgagagcttccggttttcaattcctagctgtttgataagtgatgcgccagaatccgacatacgattgaaagtcatgacctttgaattctcgatgcttcagaggtactttcagcgctggtatatatggcctgatcggcatcatggaccgattgaccttgatttacgaacatcgtgtc

SEQ ID NO: 43210 - DNA, 437 bp, Glycine max
acagaagctcacgagaaactacaatggtcataacatgtcacacgaaagtccgattcaggtgcataatatatcgagacgctcgaaatagaacatcggaagctctctagaaattccaatggtcataacttttcacacggaagtcctattcaggcgcataatatatcgagaagctggatattgaacaacgaaagctctcgagaaactcaaatggtcataacttgtcacacggacattcgattcatgcgcataatatatcgagacgctcgaaattgaacaacgtatggtgtcgagaaattcaaatggtcataacttgttacacggaagtccgattcttgcgcataatatattcagaagcttgaaatagaacaacggaagctcttgagaaactccaatgtgtataacttgtcacacggaagtccattcaagcgcattatata

SEQ ID NO: 43211 - DNA, 483 bp, Glycine max
  unsure (1)..(483): unsure at all n locations
agcttctccccatnttcttataatagggggatatgtgaagaggaatctcgttcaacccttctggtaatttagaatcacttacaattagtgaaaaaaattggtttctgtgaaaaaatccaagccgaggcgcttccgtaacatttccgtaacgtttccgtgggtgatttcgcgaaaggtttcggccgttcttcgacgttcttcattcgttcttcgtcgttcttcggtctttaacccggaagttccctaaatcgaactcttcaattcattctatgtacccttagnggtcctcattcgcgtttacgtgctttcatttacatttcctttactttccgtaccccttnttgacgtgctttagtcattcgcttaagttattttctcgcctaatctaaaaataaaataaatttccatcgatcatttgaattgtaatatccattaatttctggtataatgaatcctgaccgttcagtcatgccgtaactgcgt

SEQ ID NO: 43212 - DNA, 461 bp, Glycine max
  unsure (1)..(461): unsure at all n locations
ggatagtataaagaagaaagataatatagaacgtcatccaagaaacaaggttgtggcgagagtagctcctgttgacttggaatggatgactaagattcgggacttcttggagatatgctcactcccaaaaaatccaacaacgacaagaaatatcaagagatatgccatctattatgtgatagagggaggagatctgtacgaaaaaggcttcacggccaccctgttgaagtgtttgacttacgaatatcctaaatacgtaatgaatgaaatgcataaagggatatgtggaatacaattaggatctcgatcaatgacaactcaagttcttagaattgggtactattggccaacaatgagaaaaaactatgtagagtatgtgaaagaaagcagagaatgccaaanatttggcaacacttatcatctgcctattaaagaatngcacaacatagtggcgcatgacc

SEQ ID NO: 43213 - DNA, 359 bp, Glycine max
gtcctatgcctcaaacgggcctctgtgcttttatcggctaacatggaccgttcaaaagcatataatcttcatgtaactctaccgcttttgtaagaactacgtaggttcgatttcctcatcgcatatgaggatacgtaggagcaaaagccccgcttctgttgaccaacttaagagatcgtcaatggtccaatgccttacctgttctctcctttcaataacaagagatcattaatggtccagtgccgtatcgtttctctcttctttcacaaataacagatcatttaatggtccaacaccttaaatgaccttttgttactcaaaatatatcttgcacaaacagatataaacaacttaaccat

SEQ ID NO: 43214 - DNA, 206 bp, Glycine max
  unsure (1)..(206): unsure at all n locations
ctatggctntagacaagcctcccacgcaatggtatctatatgttcatgacgtcatcacttcattcggcttcgaagagaacatcatggatcaacgtatataccattatgttagtgggagtaacacttgctatcttgcgttatacgtggatgacattttgcttgcaaccaatgataacggcttgctatatgaagtgaaacacatttct

SEQ ID NO: 43215 - DNA, 314 bp, Glycine max
agatcctctagaggcatgcagtcgcatgcgaactcgtaatgaatgtttcgaatcactacacatttatctgattcataacaaacaatgtgttgttacacatacaatttatttcgacaaaagatacttgagcgaatcgagtgaaccttagctctgctaagctatcaagttcctatggtatacaaactagttttgaaacacttttcgagtgagtagaatacatattctatcatacatctatcgttggtgaaggccagaagtgtgtctctgacaaaaaaatacttgaatcttaatactcgggggggggggggagattt

SEQ ID NO: 43216 - DNA, 280 bp, Glycine max
ttattatggtacagtccaccacgcagggtagtctgatactgttcttgataggggaaggagcgtctctgtgtattagcacaacgacccttctctctactagtgcagatcaaatcatactcacaagagaataacaagtgtcgcaagttcttatgccacaatttactatgcatcaacatcatctctgacaatctaaagccaccgttgaattgcgtaggcactacactcttttcgtattgggagaggtcatgatgcatatgatcaccttgatgatgatgaggat

SEQ ID NO: 43217 - DNA, 479 bp, Glycine max
  unsure (1)..(479): unsure at all n locations
agctntgaagatcttggaagcaagatgtgaaaaattaaataatgaaggatgcggctntcaaaagccaatgaaccggtaagaagccttgtcatatccgcttggttggtgcaaaccaaccggcgggcatcatgcacagaaaaatcaaatttccaatcgtcaatcagtgcaccttcaagtggtacaccttcgcttggcaatttggttaaatcatagaatagggactggtcaatgaccatcttaatcccataaacctcagacattagggtgccttcttggatttctaagtttgaatagaaggctntcacaagatcataataaataggtaattntagagacatgaatggaataagaatggagttntcaaatgcttaaaagcattcaaaactctcattngaaaagaaatccatatcaatgaattttgggtctataatggaacgagaggaaaaagaggttgtgaccatatatgctgttcctctgat

SEQ ID NO: 43218 - DNA, 400 bp, Glycine max
  unsure (1)..(400): unsure at all n locations
agcttaaagtatgcccgagtcattcatccctgtgagatgttgttgaagtattggcgatcagaattgccattccttggattatagggttgaaccaagctcatgcttttacaaaaaaggttcatcaagtcaagttgaaatatggaagtaaccgtcttgcaaaattggggcaaaagatgaatcgagtcacatcactgcttcgtctactgccaaacatatntaggattattgatgtccttgttacttccagtttcaccttgacaaagatgtcatggaccatgttgaaaatctaaattgattcaaccccatatcctgcgtaaaaattcgcaatacttcgactgtacatcattcgcatgcattccatgctttcattggttgcatagctcattgcattcttttcttg

SEQ ID NO: 43219 - DNA, 431 bp, Glycine max
  unsure (1)..(431): unsure at all n locations
agcttcttatccaaggctcatcttggtggtgaagctccttcttccatggcttatttcctagtggatggcgcctcctctcacctcttctcctttgtcttccgctgcatctccatggtggaaaatcaccattaaaggacctcattgaagctcaaagatccagcctccatagaagctacacaagcaagattccatcaagtggtaatcagagcacaagaacttcaagtaggtgctccttaaacctccattaattnttttgcttttccttctcttccattgttggttcttcatntttttctccatgtatctcctcacatgtcttgtgataaatgtnnttaacatgattctttagagttccaccaattaaactgctatagaagctagatttgattttctatggttcaaaattcttgttcttggtcttgaaccatgaa

SEQ ID NO: 43220 - DNA, 285 bp, Glycine max
  unsure (1)..(285): unsure at all n locations
tctagattagtgtaccagatgactgctaccccagccaagctatcttataagaagtgcatcaacaacttctcatccctagaatgtgcccccatcttgcgacaatatantttgagatggttcttaagacaagtcgtccctttgtacctatcgaaatcangtaccttgaatttcggngggatgacgacgtccggtactaagcanagattagtcatgtccgtgaacggatagttgccanagccttcaacagccctcaatctctcttcgatgagatcgagttttctcttt

SEQ ID NO: 43221 - DNA, 447 bp, Glycine max
  unsure (1)..(447): unsure at all n locations
agcttgtaatcgattacacacatactgtaatcgattaccagaggagattttcagagnatattctcaacagtcacatctttgttgtgtggttcttgaatggctatcacaggcctatatatatgtgacttcagacacgaatttgacaagagtttttcagaacaaaaaggtcttatcctcttaaaaagcaaaataatgttatcctcttacaaattccttggccaaaactcttgtgattcaataaggaattattttagtgctcacattgttcaatctatctctttatagagagatttcttcttttcttcttcttcattctgaaaagggattaagagaccgagggtctcttgttgtgaaaggattctaaacacanaggaaggattgtccttgtgtgttagaaactgaaaaggaattacaagatagggactctcagcggttgttgggactgac

SEQ ID NO: 43222 - DNA, 428 bp, Glycine max
  unsure (1)..(428): unsure at all n locations
tgtccaccccagacaacttgatagaagaagcctaaacaacactggtccaagctgggggagcttgacatgcctcacaaacctgcaactcttacactagtcgaggttaccaccctcgacaccgaacaatctcccttgacacaagacaatttcccttgacactagatgatggaagcttgcttgtggagcttctatgggggctggatctttgagcttcaatgaggtccttcaatggagattttccaccatggagatgcagtggaaggcanagtaaaagaggagaggggaggcaccatccactaaggaataagccatggaagaaggagcttcgccaccaagaatgtgccttggataagaagcttggagaggatgctttaatggagganaagaaagaaagagaggaagagagagttgggagcacaaaattgatg

SEQ ID NO: 43223 - DNA, 431 bp, Glycine max
  unsure (1)..(431): unsure at all n locations
agcttganatgatgaagtgtagaagggcgagacttcctacttttattcgttgaccacagagtggtacctggagatatgtcgcgggggtcaggagaccttgtggacgtcaggtggggtgctattgcccaaaaccaagcttgaccaatcccgacccaacccgggcatagtcagtcagtgggaacctgtgatgtacctaagcaggcgagctcctggcagtcaacagataaaaggaacaaagaccacaaagcaaggaggcttgtgtggtggctggccagctgtgaaacttgattgatatatgggatatggcctctggtaatcgattaccaagggtgggtaatcgattacaaggcttaaaagtaaagataggagactaagatggtctcttggtaatcgataccaaggggtgtaatcgattaccaggcttataaatg

SEQ ID NO: 43224 - DNA, 484 bp, Glycine max
  unsure (1)..(484): unsure at all n locations
cgcttctacaatctcccnncttttgatgatgacaactctgaaatcaagaaacacatacacacactttntcctagtcgatcactcacttaattttccattctccccctttgttttttaatttatgcttcacttgaaattaagttaattacttatgtgagttcttgatttaattcctatttctctccccctttggcatcaacaaaaagcccaagtgcgtaacaagtatatgacaatcatatactattaatcattcacaagacatacattgaagaatataaaccaatcatgaagcaagaaacatgaatagatcaaatataanaaccacatagtcatataacataattcataattgttcaatcaaaccatgcaaataaagaaatactaaattatccaaaatgtcataatatagccaaatacacgactagaaaacaaagtactagtaatattaaaaataatagaaaacttagatgatggtggcagcgat

SEQ ID NO: 43225 - DNA, 394 bp, Glycine max
  unsure (1)..(394): unsure at all n locations
agcttcctctatcacctcattgaggattaaggttccatgtagaatgtgtctttctttgatgaagggtgtctgtctctcatcaataagagcagatataactagcttcagtctatttgctagtaacttggctatgaccttgtacatacagccaatcaaggagattggtctatagtcatcaaaagtcggagggtgattaattntgggaattagagccacgaatgaagcattgctgcctttaaggaagcaaccatggacatgaaactcatctacaaatcttctgaagtcagattttaccacctcccaaaattatttaatgaaattgaagttaaaaccatccggtccagggcatttctccctaccacagctccacactgcatctttgatttcctggtct

SEQ ID NO: 43226 - DNA, 388 bp, Glycine max
  unsure (1)..(388): unsure at all n locations
tctgtccctgaganactggttcccagaagacaacagggagtgaagattgctgaataccctagccttgcaacaagtcctatggaagtagacacggagatggacaagaaaatccgcagtatggtgagtagcattttgaaagaagcctctgtgcctgaagctgatgaagatgttccaacatcttccaccccgaatgtttctatgcctgatgttgagaaagatgttccaacatcttccggcccanatgatgaagtactctcttcccccagcaaagagagatcaacagaggaagatgatcaagccgcagaggagacccctgcaccaagggcaccagaacctgctccaggtgacctcattgacttagaagaagtcgaatctgatgaagaaccca

SEQ ID NO: 43227 - DNA, 489 bp, Glycine max
  unsure (1)..(489): unsure at all n locations
agcttgtgcctcttcacgttaggaatatgaatgtagcatatatatccaaagacccttacgtgctgtgctgatggcttcttcccgttccaagcttcaattggagtcttgtcttttacagacttagttggacatctgttgagtatgtaaacagcagtgtagactgcttcagcccagaatgtgttaagtaatcccttctccttgagcattgatctagccatttccataactgtgcgattctttctctcgaacactccattttgntgaggagaatatgcgactgtaagttgtcgctcaatgccttcatcctcacaaaatctttcaaactcgcgagaggtgtactctttgccgtgatcacttcttagtacttttatccattttccacttctgatttcagcacgggccttgaactttntgaatactccaaagacttctaaattttcttttagaaatatatccatgtcattctatagaagtcatcaatgaagagta

SEQ ID NO: 43228 - DNA, 454 bp, Glycine max
agttcttattcgatacaactaatctaatcgtaaattatcaaattattttttattttcacatgctcccgttacgaagctccagattgtcattccagtagtaccttaactgagggtaatgaaatttatgattttggattatttatcatggagattgtatcacgaaggattccttcatatcaaagtcaaccacaggtaacactagcaatgttggattcatcagtctttggttttcattcctgcttgtctttcagataatgaatttagcatgactccaaattgcacgctcattatatagttgactggttcatatcaatgatttctgatggaaaatttgagaatgtggtgaatccaaaattgcttgaaatgcatatcaggatattccacaattgtttgatatgtgatacctatcactgattattgattacaggatattccaatcctacaatcattttga

SEQ ID NO: 43229 - DNA, 452 bp, Glycine max
  unsure (1)..(452): unsure at all n locations
gcaagcttattcctgaagctgtaattcttctcatactcattaacccttatccattataaaanaagaatcatacaaatacaaggagatacaacagttgtgattctctttgttaagactatttatatgattaaatggatgtgtaaatcaaccgatcgatataagattattttaattcaatcaataatttcaaatttaactcttaaatatgtaatcatattaaagattgaaagaaaaatataaggcacatattaatgttataagattggctggtgtataaaatacatatagttagactaaaaatttgtgctgttaatggcaaatcaaggtcccgctctgatagaaatgtgattagtgaagtggcgcctacgccaatggtgtggagagtttatactacgaataagacaatatgaatgcaagatgatgacgtggctatcaacgtatgagagtgacta

SEQ ID NO: 43230 - DNA, 379 bp, Glycine max
ctgccaatatgctgcctagactggatcacaccgcatactttcgctagttgggactatcaagactatacaacgaccatgaaattagtcaaatcgagacgatgcgaaatagtattaatcaataaagattatatatattaaatcgtggaatctgctcccatggcatacttctagggtcaagtgcactaacagtttttatatatatatactcaccatcagacgcaagacatacatccaccagtataagacgctgatctgttctttgaccataattgtgatcaatttctggtccataggctaattacggtggagtattgctgctcaattgactcgggtttcactattacattgaatatatacttattttggctatagacaaatt

SEQ ID NO: 43231 - DNA, 447 bp, Glycine max
  unsure (1)..(447): unsure at all n locations
agctnnttccccaattntctataaatagggggagaagtgaagtagaaaagggttcaaccccttaggcacttctctctctctcgaaatagctgaggaaaattagtttcatgaagaaaatccaagccgaggcgcttccgtaatgtttccgtgagtaattacgcgaagattctcgaccgttcttcaagattcatcgttcgttctttgttttcttcagtcttaaaagtaggaaacaacattgcatggtaaaccgtggccgcgttaccgttttaccttgatgggtttcggcctccaacttcatcctggcatctgaccatgaccagttgattctgcccctattatgacaaaatatgcatgtgtatgcgtatgcatgaatgcaaaaaatttttagtgaaagctggtttaggttcagtattaattaagcgctttgcggcattccgtggactgagc

SEQ ID NO: 43232 - DNA, 486 bp, Glycine max
  unsure (1)..(486): unsure at all n locations
tctctctacctataaatacaacatcaaagatntaagaacaacaacaaacatgtgcaaaanaacaagagttgtgaatcaagaatcaagaaaagcattagttgagaaattcaccgagcttaagacagcccattctttgtaacacacgaagtacttgtgagagattagaacttcattgtaaattcactctttgagtgctgtatagaatctctgattctgtatcaagcttttgtttgtaaaagccaagaatgacatagtgacaaaacaatacttgggtgttcttagattcggcaggagcctaagggttgtgccagtagtggccttgagaatacttgtaagccaaatgtggtagaaaagaatacttgttgtaatcaagttttattagtggaaccctcttactgctggtaaaggagaactggacgtagctcanggtgagtaaactagtaataaacaacttatttntattgctcttctttagcttattaaagt

SEQ ID NO: 43233 - DNA, 493 bp, Glycine max
  unsure (1)..(493): unsure at all n locations
agcttgtctcagcatttatgcgagacagagaccacatgttagcaatcatcagcaagtaccaagaagaattaaatctagccacgacccacgagcacaaagtggcggacgagtatgcagaanaggaagctaggggaagggtgatcgactcgttgcaccaagaggcgacaatgtggatggaccgatttgctcttactttgaacgggagtcaagaacttccccgattactagccaaggccaaagcaatggtggacacctactccacccccgaggagatccacagactcctcagctattntcagcacatgatagacttaatggcccatataattaggaaccgctaggaagtttgtattgtcactcagatcttgactagttataactttctgaataanatgagtttattccatgtntttacaccanaattagtgcgagtcanatcactcncgcattttatctctagcatgcatttcatttcttacgtacccctacattt

SEQ ID NO: 43234 - DNA, 471 bp, Glycine max
tctacttatgtggcagggcgggcttccttcactttcttgtctccaacgcgagctctgaccactgttcttccttcccgcgatgcttcttttcatgtccgcctgagtgggcttatagcctaaaccatacttcccacgatttccttgggtttttatcaggctagttatgccgccattgtctttgcctaaacccatcccgggttcataaccgttccccaacataactcgggccatcattaccgccgcatcggacagacaaggttgcccaaagagggagtccacggaggaaatgctgaccacctcaaaagactggaaagcggtttctaatgattcttctgcggcttccacataaggcatggaggatgggcagcttaccaagatatcttcctcgcctgacacgatgaccaagtgcccctccactacgaatttcagcttttggtggagtgtagaaggcacaactcccactgagtggat

SEQ ID NO: 43235 - DNA, 477 bp, Glycine max
agcttgaccaatcccgacccaacccgggcatagtcagtcagtgagaacctgtgatgtacctaaacaggcgagctcctggccgtcaatagataaaagaataaagaccacatagcaaggaggcttgtgtggtggctggccagctgtgaactttgagtgttatatgggatatggcctctggtaatcgattaccaaggatgggtaatcgattacaaggcttataagtgaagacaggaagctaagatggcctctggtaatcgattaccaaggggtgtaatcgattaccaggcttaaaaacgagatcaggaagctaagagggcttctggtaatcgattaccaaggggtgtaatcgattaccaagcttataaatgaatgcagcatgttttggaggcctctggtaatccattaccaggctgtgtaatcgattacacagaggaacatgccactgtaaatcgattacagttatgtgtaatcgataca

SEQ ID NO: 43236 - DNA, 410 bp, Glycine max
tgagatgaggaagtgtagaagggtgaaacttcctgctcttattcgttgaccacagagtggtacctggagatatgtcgcgggggtcaggagaccttgcggatgtcaggtggggtgctattgcccaaaaccaagcttgaccaatcccgacccaacccgggcatagtcagtcagtgagaacctgtgatgtacctaaacaggcgagctcctggcagtcaacagataaaatgaacaaagaccacaaagcacggaggcttgtggtggctggccagctgtgaatcttgtgtgatatatgggttgtggcctctggtaatcgattaccaacggtgggtaatcgattacaatgcttataaatgaagacaggaggctaagatggtctctggtaatcgattaccatggggtgtaatcgatta

SEQ ID NO: 43237 - DNA, 442 bp, Glycine max
  unsure (1)..(442): unsure at all n locations
agctntcactcagatgtccgattaaggcgcataatatatcgagacgctcgacattgaacaacgaaagctctcgagaaattgaaatggacataactcttcactcagatgtccgattcaggagcataatatatcgagacgctcgaaattgaactacggaagctctcgagaaatntaaatgattataaattttcactcggatgtccaattaaggcacatcagatatcgagacgctcgaaattgaacaacgaaatctctcgagaaattcaaatggacataaattttcacacggaggtccgattcacgcgcatcatatatcgagacgctcgaaattgaacaatggaagctctcgacaaattaaagaggtcataacgtttcactcggatgtccgatgtacgcacatcacatatcgagacgctcgaaatttaaaacggaaactctcgag

SEQ ID NO: 43238 - DNA, 418 bp, Glycine max
  unsure (1)..(418): unsure at all n locations
tcngttgttcaatntcgagcatctcgatatgtgatgttcctgtatcggacctccgtgtgataacttatgaccattntaatttctcgagagcttccgttgttgaatttcgagcgtctcgatatattatgcgcctgaatcggacatccgtgtgaagggttatgaccatttcaatttcacgagagcttccgttgttcaatttcgagcgtctcgatatgtgatgttcctgaatcggacctccgtgtgataacttatgaccattngaatttctcgagagcttccgttgtntcaattcgagcatctcaatatatgatgtgcctgaatcggacatccgagtgaaaagttatgacaatttcaatttctcgagagcttccgtggttcaattcgggcgtctccatatgtgatgtgcttgaatctgaca

SEQ ID NO: 43239 - DNA, 433 bp, Glycine max
catgcaagcttctggataccggagtggtcattacattgactatggaactaatcctcagtatagtggtataaccatggtcatatcaacttcttaactcaatatctttagtgatcatatagatatgtagaaattccacaagggtatcataatcaattgacatctgttcatattataaatacatagaattactaacaactagaacttgctaataacttattcaatgtggtcatcaatgaaaatacaccctattaacaaagaaatctcactctctcactatagtgatatcaaatatcaatatatgtaaacattgcatattttatgtcaacaaaaataatggtattttcctactctgttattgaaattgccttggtgaactactctagcatgtaggacgtgtaggtactaatatacatgacatccacttaatcactac

SEQ ID NO: 43240 - DNA, 630 bp, Glycine max
  unsure (1)..(630): unsure at all n locations
ccactcctcgtatctctcnanctacgtcnanantnnntgtttttncacactnncnacctctnnnttnttctannnaaagtnnaaggagannantttgaaccctgtgaccatgcgatacaccgaactatagaactctcaagctccaatcctttcgtcaactaagattagtgtacggtatcatcctacttgaacatactcacccttgttaataaataagttttacaaacatcacaccaaaagagcaccaagtctaatacaacgtatcaccagagacacactacttgcatgtgaaagaataatagctggagtcntaaaacactcttcgagtgcgatataaaatggacgatacatcttcactcttcttgttagttacgccacaactgtcatagtgtcatatgtatcctagactgtttgacagtgataacgagccatatggcagtgccactaatttgtgctggaatacctttaaaacacgaggtccaattaaaattacttgtataataaggctctattatatgctcactttatctgangttactgtagaagacgttctctcatccgaagatacatctcttatctccactctctgtccgtggtttattattatatccacactcaagtcatgatgan

SEQ ID NO: 43241 - DNA, 456 bp, Glycine max
  unsure (1)..(456): unsure at all n locations
agcttagttntgtctaactcaatataatggattcacaagctcgaattggaatgagcgcccaactgcttttgcgtttgggaggttggtggttcgatttcacctggatccgccttcacattaaaaatgaagttttggtcacgggaaaggtaaatgaggtgttaatggcgtacgatggaagatgaaaattcagttggtttcagtttagaaggaaaaatggatggctattgtagcattagtagaaaatttgaatggttaattgtgtgtggtctgttcaatacttataatcttttgatccatatctgtgtgtggtctgataaatattcttattntgatatgatacgattacagtttaagaaaccgcgaaccctatggccatctcgtgagaagatactcagcaattctgagcactggatttaaagtcttacaatctatctctgcttcattggttgagaattg

SEQ ID NO: 43242 - DNA, 441 bp, Glycine max
  unsure (1)..(441): unsure at all n locations
gcaccttcatgactccactacctgaggccaaatngagtttgtgggatgagggtgcaatatgaacctgagatggagagtctgcatgagatgaaggttgaagtggcggctgcggagaaagtggttttggctgaggttgaaccttcactggagactcactgctgaatgaagatgttagtggttgtgttggatgaggtagtgactctttttgaggttcagctcttgtgggcttcttcagtttggtgggactaggaagagataactctgaaggaactaccaaagaaggcttatatggtctatgaattggcacacttgtgtctgagtggggtggagatcttggtctttctttcgtccgacgagcgaatgattcagatggtactgatagccatgggatcctaanacgaaatgacttacttctatgtgccatggatgggtaatgatgtt

SEQ ID NO: 43243 - DNA, 375 bp, Glycine max
  unsure (1)..(375): unsure at all n locations
agctngagttcttctttgaaccaatccttacttttcaaataccatcttgacataaacatatcatatgattgatgaggacgaacctatattggagaaagccattgggtatgctgttcattatacctgatgctattatgatatctgtttccatttgttcacaatcatgtcacaaggttctggctcgatgttgattaacgcttgattgctgccttttttttgttcaatacgacggatattgaatggcacccgggacaatgtttgactcagaaggttttgaatacaaagcctaataagggttcaaagaatgctaatccaattaccaaaaccgagagctgtgatagtnttctcaattgtttcaacccacagaagtccctg

SEQ ID NO: 43244 - DNA, 341 bp, Glycine max
  unsure (1)..(341): unsure at all n locations
tanaggatgatctcactgttattcagcattgccaactgctccatcacatgaatatgtgaatgtgtccatgtggtacaagcacattgatgccttgttgagaatatcgtaagttcgctcgcttcccatgacttacatgccaatctaatgaataatcaaacataatgtgatggttcatgcatgttggtgtgctatgcaattgttatctgcttctgtattgctgagatacgatgatgatttggtaatctgagtgactcagctatatatatcatcatgaatactttacaatatgatatcttttatactaattttgagtctgcactctatagtggtgtttctggtga

SEQ ID NO: 43245 - DNA, 353 bp, Glycine max
  unsure (1)..(353): unsure at all n locations
agctntaacctcatcgtccctcacagtctntagatatgggagccaatccaatccttgtgttcggactctcagccacttatgatagccgccgatgatcccattactgcttcccctaagctctctgtcctttcttcacgccgcatcccatgccttgcgaactccttggagtaccctcgcgttgtggtcactaaaaccccgtgcgatgaaaggcgtgatgctttcgtctaatggcgctcctctcatggggtagccaagctgtcttatggtgagaacgggattataattaatacaaccncttgttcccatcaagggaacatttggacatccttcgcatggagatagaatcttgattc

SEQ ID NO: 43246 - DNA, 405 bp, Glycine max
  unsure (1)..(405): unsure at all n locations
tgttctctgtcaactcagcatccaaagagtggttttttagtctgaacagagagggtgaagagatgaanatctggtgtgatggctctttttggttctgaaaattntgattatgtcagtgtgtttggatgaagaactaanagtgtgtttggatgaagaactaaaattaattntgaagtgatgtgatttatgtataaacgtttttattctaaaagcaagtcagtgttaaaattgtgtaaaatttatatccacggccaaagctgcttaaaattgctttaactcaaaatatggatccaaacacgcacaaaaagattgtatttttatttattgatttatggttttggttattgcttggttggtgatttaatgtncgtgtaattttggtgcaggatgttgatgtgggaagat

SEQ ID NO: 43247 - DNA, 422 bp, Glycine max
  unsure (1)..(422): unsure at all n locations
agctntctttggaccttgaacaagcaattaactcctctttcagtacacgagcgatggctcaggagcggacatggatgtcttgtgtcttgttggaacaagtgtgaaaccaaccaaacacagagtgcgggtaagcaacagatgatccgtgcgctactcttctcgcaccttcggtcaaatgtgtcaaatagatctgccaagacagctaccaccggactttccttgctatggtggtaggcaaggaaagcgtcgattgctgctagggtctatcaaaccatccacgttggaaagaggacgaccccaaaaattagcanagctaacacatncataaacgggacccagtctccttgatgggccatacccctcgccttgtcttctaggtacttctgtggtanggcccgctatgccgtccgagtctgtttatg

SEQ ID NO: 43248 - DNA, 433 bp, Glycine max
  unsure (1)..(433): unsure at all n locations
ngctaacccatggaagctcctaatacctcccaaccttggcccatgggctcagaaatctaccctgaggtttgtgagaaccctatggccttcttcagcagctctagcccaatcctcttggagcctcttgctcatgcctctagtgactggtcccttcctagggaggattgcatcacttgaattgagttttaatcatcttctaaagtgtgagagtgaatctccttcgttaattgagtgattcaagaaattggtttatcaaggaacaccaccttgtgtgtgacaccaatttcggaggagtgattcttccaaccaccttcttcattctccttcttcatcattctaaaccttcattcgacctanacaaacccaaaaattggttttccccaaccagcccaccataatttaccttaaactcaaattatangtctttattttt

SEQ ID NO: 43249 - DNA, 395 bp, Glycine max
  unsure (1)..(395): unsure at all n locations
agcnttctttcanattattgcgcanaaatcagtctgtccaatgggacgatgattgtcaaatggcatttgaaaggattaaacggtgtttgatgaatcctcctgtgttcatgccaccggtgcccagaagacctcttattcgatacatgacagtattagatgagtcgatggggtatgtgttgggacaacacgacaaatccggaaaaagggaacgagccatctattacttgagcaagaagttcacagcgtgcgagatgaactactctttgctagagaggacgtgtngtgccatggtgtgggcaactcaccgtntgaggcagtatatgctgagttacattacttggttggtgtccanaatgaatcatgtcaagtgcatctttgaaaagcccgctctcact

SEQ ID NO: 43250 - DNA, 434 bp, Glycine max
  unsure (1)..(434): unsure at all n locations
gtcacctgcggcatgccaagctgcttgtggagcttctatggaggttggatctttgagcttcaatgaggtcctttaatggtgaattttcaccatggagattcagcggaagacaaaggagaagaggtaagaggcgacgccatccactatggaataagccatggaagaaggagcttcaccaccaagatgagccttggataagaagcttggagaggatgcttcaatggaggaaaagaaagagggagagaaagagagaggggggagcacgatattgaacgaagaaaaagggtgagaagttgaactttgagttgtgtctcacaagactctcattcatcanagttacaacaagtgttacacatgcttctatntatagactangtagcttccttgagaagctttcttaagaaaacttccttgagaagcttctttgagaaaca

SEQ ID NO: 43251 - DNA, 408 bp, Glycine max
  unsure (1)..(408): unsure at all n locations
gctggaatcatttatcctatctctgacaaccaatgggtgagtcccgtccaggtagtcccgaaaaagactggcctcacagtgatcagaaatgagaaggagcagctgattcctactcgggtgcagaacagttggagagtctgcattgactataggaggctgaaccaggttaccaaaaaggaccattttcccctgccattcattgaccagatgcttgaacgcctggcaggtaaatcccactactgtttccttgatggtttttctggttatatgcaaattactattgctcctgaggatcagganaagaccacattcacctgccccttcagcacttttgcctataggaggatgcctttcggcctgtgcaatgcccctggtaccttccaacggtgcatgattagtattttcagt

SEQ ID NO: 43252 - DNA, 628 bp, Glycine max
  unsure (1)..(628): unsure at all n locations
atactcgtagtattcctgtgcgtattttcaaagacacttaatannctgantnantnnnnannaaaagaagagtgttgtatccatgagtacgctangatnctntanagtcgacctgcatgcatgctagctntctttacaataaagagaggagaataatgtttgttncgattatattcacagagcgtggatgactcctctacctctataacctgtgtatcactcactaactcatgcaatgctctaacgatgatgagatctttaggctaagttgtatgacaatcttcgcacagacaatgctgttagaacgctctggagcttgtacctctctctgtaattgtaaaaatctctaaaaatgcagatgctcaaggaaatgccaaactacctctgcatttctatttaaagctaaaaaagtggactatggaggctctccgctatccagactatagcttcatagcgcactaaatgatattgtgttatctatcatctctggctaaagaaagagtctaacgtgcttcatctgataaattgatattacaaacgagtgaatatttctaatgcaaatactcctgcttgagagtatagtaggaacgccatgacgctcttaagcgaataatgctacctcagataa

SEQ ID NO: 43253 - DNA, 347 bp, Glycine max
  unsure (1)..(347): unsure at all n locations
tcgacatgacattcagagacagttagtaacaaataatcgtctttganagctctcttggacataacttttaaagacgggtatttcctattgacggtctatgaatgtttcaacctttatagacgcttattataagaatcgtcattaaaagtcatgctaaccgacacgaactacccctcttcttgtgtgacttgtgcgaaaatatcattacatcaagctgggcgtgaatttattccaacanagttgttctttctgtcgattgcacaatacatatgaaacctttttttatatatataagcgctggagaatatcatatcatttatgatacttttaaaaggtatctgatatac

SEQ ID NO: 43254 - DNA, 487 bp, Glycine max
cggcagcggattgatgcctcgatgacgtgcactataaatactaagcttgatgcctgcaggggactctagatgatgagacggtatcgatttctaaatctccaccttctgaggacggttatctttcactggctcgtcattgaaccacatcatgactgggataaccctggcgggaccctctctgtcactttgagaacgtcactcttgtcacacccggcgcaatagcgaataggcccactctggtcgccctaacaacaggcgcgcgtctgtatgggcactggctcttgatgcagatgcttattgacgcttttggggcggattatacaacgctgatggtggccggaaacaccaatactctctgagtatttgcgatagatggccccttctctcacctcttctcctgtgtctatgtggagctccatgaggaaaagtatcatacaagacctcatttgtgcgaaaagagccgccttcatataatgcccacttgccg

SEQ ID NO: 43255 - DNA, 403 bp, Glycine max
  unsure (1)..(403): unsure at all n locations
agctnntgaaagaatgtctgatgatgggagatttactttnatgctntatntctttgactctaactcgaacaatttctgtaagtaactntaatgaacatgtcgcatattctgattcagatttcatgatgaagggaagaactcttgcgactccattgctgtagttacgtaccttgtaacatcagcactatcttccactgtatatgcacacacataacttccccagcatagtacttctattatattgcanatttgcaatgataatgcatagaacaagaatgacagagaataacctttctttcaacttcaagagaatcctcatagcttccccttcttgatatcctcttctaatataaagggaagtatattagaacatcattccatatcagctcataatatttatatc

SEQ ID NO: 43256 - DNA, 412 bp, Glycine max
cttgttacaaatataatatgggctccacaaagctattttcatctgagttacgtataatcttgagctgcaatctactgtgctggaaactggttgaaaaaagttccaatgtgtcttaaaattaacttattttgtcctcaaaaagctaatgatcaaaagcttactaatatgattagttctccatgtgcggtttctctttaactagtaactccacagaagtttatttgtggagatgtgctaccatattaacatcaatttataaacttaaacttgttgctcgaactcccatctataaaacattatccctcatatctctgctcagcactctccatgtctgaggaatatcatacgaggctaggagcacatgaatgtataatctaatactaaatacagtcaaatttgagatataggtctc

SEQ ID NO: 43257 - DNA, 319 bp, Glycine max
tccttgggtccggactctcagccacttatgatagccgccgatgatcccattactgcttcccctaagctctctgtcctttcttcacgccgcatcccatgccttgcgaactccttggagtacctttgcattggggtcactgaaaccccgtgtaatgaaaggcgtgatgctctcgtctaatggcgctcctctcatggggtagccactctgtcttatggctagaacgagattatcattcatacaaccccttgttcccatcaatggaacatttggacatccttcgcatgaagatagaatcttgattcttccttccttctagcga

SEQ ID NO: 43258 - DNA, 304 bp, Glycine max
gctaagtcaagctgcctgactcgaccaagaagatccatcaagagaggtacaatgttctaccataggagctatttcaacatccttatgcatagtttgaagtacttcagtccatcttctaccaatctggaatggctgcacgccagcaacacacttgtgtaatctgaatgaacaaaactgctttcaacacacgtgttccccatattgctccacactgaataaagaagtgttacttgctgctaatcaaaaacctaactttcatcactcggatctaagcctacatcttttgttgaaacaagaggagtat

SEQ ID NO: 43259 - DNA, 415 bp, Glycine max
ttcaaatgtgggaggatctatttctgaaggccaaacacggaggacttgatgtcatacacacttatgtcttctgggatgtccatgaaccttctcctggcaatgtactactccggatcctcctttctttccatctatctacctcattttaaaagaaaaataataatatttttttggctctttgtgatttttctgatgctgggtcgcagtacaattttgaacgaaggtatgatctagcacggttcattaagacggtgcagaaggtggggctttatgctgatcttcggattggaccttatgtatgcgcttattggaactttgcgtacattttgcttccataatccatatctctctctctgtgtttgtttgagcgcgcgtgtaatatgtgagaatgttggattacaatccattcttaacg

SEQ ID NO: 43260 - DNA, 414 bp, Glycine max
tctcaggaggtgagcttagttatgagaggggtgtgtgtatctaagctctagcttctcaagaaagttttctcaagaaatcttctcaaggaagctacctagtctataaatagaagcatgtgtaacacttgttgtaactttgatgaatgagagtcttgtgagacacaactcaaagttcaacttctctccctttttcttccttcaatttcgtgctcccctctctctctttcactccctctttcttttcctccattgaagcatcctctccaagcttcttatccaaggctcatcttggtggtgaagctccttcttccatggcttatttcctagtggatggcgcctcctctcacctcttctcctttgtcttctggtgcatctccatggtggaaaattaccattaaaggacctcattgatgc

SEQ ID NO: 43261 - DNA, 404 bp, Glycine max
tgttgcaacatccaaatccacaagcatggtatctatgcttttcctcgaggacatatgctactagttagaggtttcactccagtttcagatccacccaaaactgtccaataaatgaatgagggaggaagttgaaatttgtcattaaattgcatgaggatacatcatacaagtgtccatcagacgaaaaattaattggaaaacgacaagttgtagagctaagtagctaacgctatatcctttataattaatcctaagacaactcgagagagagcactatcattgtttgtgctatccacaacccaacaaaagcataattggatttgactcatcaacagaaatactacaaaatcttcgtctaacggctcagattgttgtgaaagtgtgagttggtgattgcaccaatt

SEQ ID NO: 43262 - DNA, 312 bp, Glycine max
caatgaccccatagacctttgccaccaactatcacttccacatatcgtccagtcaaactcactggtgccaaatatgctacctatctacctgactcatacaatgctcaactgaaaccatcaagattaatgaatgtatatgtacttaaccgtgcacacaacatttgtgtcaggatcaactatcagatctcactcccttgaactcttgcgacgtcaatgtacaagcaaatatagtacatgagtgtgtgtgtggagggtgagtcttgatgcaacagaaaggttgttgtcttgtgacctgaagtcacatgatcaaat

SEQ ID NO: 43263 - DNA, 256 bp, Glycine max
agcttgtgtctctgtctatcagcttcatagccttgtctggttattttcttacgtgctactcattcttcccacagcatcatttagcaaccaaccattaccattccctctgatctctctcacctagctagctactcatcttcactccttgctcctttcattattttctcttagattctgcatcaccgtgttcacaaaaaaagtttacactagttactgagtactacttctgaaaccacttttcttcctggtttgcttc

SEQ ID NO: 43264 - DNA, 355 bp, Glycine max
tactcagcttctgcatcttcgccgttagtttgatgcgactgagtacattgtagagacaactccactgctttctctaaccctactggatcaaaacatcccctaagatccctgtcaactagcacttccagccgcttctcctcaaacaaggttctaacctgcaggaattcagctagttgttcaatacaaagtctggaataaaaagccatgaatttcatgaaactagattttgagcaagacacacagaatgcttcagtatttcacagcaagtgtaaaacaggtaaagcaacattattagcaagctaggctcaatgcaatcttatggcaatggtcttgagtcaagattatcatcatctga

SEQ ID NO: 43265 - DNA, 211 bp, Glycine max
cctagtagcaacagtgtatgtgaggttttcttcgagcgaagacaatgtgtgttctgtggggttcgagcgactgcaatgtgggttctctggcagtgtaaggggttctgcgggttccaacgatgactatgtgagttttctggcagtgtatggggttctgtgggttccagcgacgacaatgtgggtgttgagggagcggtttccggcatatttc

SEQ ID NO: 43266 - DNA, 414 bp, Glycine max
  unsure (1)..(414): unsure at all n locations
gagtttcctaatctcttattagcactcgctatgatgatgtcatcctcatacaagagaaggtaaagaacacacactttcctttttttcaggatgtatacatagttgtcatatatgtttctaatgaagccatatctgatcaagaactcatcaaatttcatataccacattcgagggctttactttagtccatacaagaattttcagcaagcacaccttgttctccccttcttcaaaaccttcaggctggttcatgtaaatggtttccttaagatttccatggtgaaaagctgttttaacatccagttgttcaagttccaaattgtactgatttaccacaccaagtatgattctaattgaacaatgcttcataaatgtgaanaaatctcattgtaatcaattccttccacctatgta

SEQ ID NO: 43267 - DNA, 494 bp, Glycine max
  unsure (1)..(494): unsure at all n locations
agcttacttgctgagattccattatgggaaagatctcgatccagctgagttgatccattgtgatagtaccgcggctattgcaaaatttgagaaccattattacaatggtaaaaaacgacagatacgttgtaagcacagcactgttagagaattactctcaacaggagctgttagagtggatcacgtacgcactgatgatagtttagcagattctttgacgaaaggattagctagagagaaagtccataacacttctagaagaatgggactattgcccttactgcgatgatcattcatgatggtaacccaacctanatgactggagatcccaagaactaggttcaatgggtaataacaagttatgaagtgatatgagatgaacatgtnngtataagtgaaagcagcatgattcctgaagtaacaagaggatgagttatgaaaaaaaaaatcataattcttaatgagatctatactctatgttgagtggagtacct

SEQ ID NO: 43268 - DNA, 453 bp, Glycine max
  unsure (1)..(453): unsure at all n locations
cttaaagaacctttgatcctcatgtgcttgtgtttatgggttgattgtcaattttagaatcttgccaagtttatgtggtgtttgttttcatgggtgctttgagggtaaatagtagcctagacacttgagagatagagtgtatatcttgtgaggctttatcacttttcattcttcagctgattaactattttgccatgattgggttgcttggatgattttcatgaatgtcttgacttttcggatctccttatgttagatgttacccattcctttcattccttgatgttcattgagaaatatgtgaatgtttttgtttgcctctctttgatatccttggaatttgttctttgtttcattntgcccaagagtgcaaaaggctaagtatggngggttctgatgtgccatcattntcttctattttctaaacccttntntgcaccatttaattactga

SEQ ID NO: 43269 - DNA, 602 bp, Glycine max
  unsure (1)..(602): unsure at all n locations
aggagcgattgtaccatgagacccgcgatcctctagagtcacctgcggcatgcaagctntgctcacatttctcattccagacaaacttctcattcttacaagttagtttagttaggggtagtgctaatttagatgatccctcaatgaattctctataatagccggccaaccccaagaaacttcgaacttctgttggagttgtcggttgtcgccaatccataaccgattccactttaaccgggtccaccgcaaccccatctttagaaatcacgtgcccgaggaactgcactttctctaaccaaaattcacatttcgacagtttgacgaacaatttcctatccctcagaatatgcaacacaattctcaagtgctnttcatgctccttcttattcttcgaatacactangatatcatcaataaacacaaccacgaactgatctaagtaatcatggaatatacgggtcatatagtccatgaagatagccagagcattagtcactccaaatggcatgactaaatactcatactgtccataccgagtccgaaacatagtctttggaactatcttcttctttactcngatgtgattgtaccacgatccg

SEQ ID NO: 43270 - DNA, 147 bp, Glycine max
gttataaaaagctaggctgtttttttttttatattaagatagtcttggcagctactaccgaaaaatacacctccatggttgatgaggcatgacatgacacaccttcatggcaaagagaaacctaactgtgctgtttgttgtccaaac

SEQ ID NO: 43271 - DNA, 384 bp, Glycine max
  unsure (1)..(384): unsure at all n locations
agcttggagatgccttttgaaagaataattgtgttaatcctgcanagatttagaanatattgaggtaaaacctagaggggattttcgaaagaatatttgggtgaagcctaaagaggttctagaaaataatactttgactagaacctaaggagacttttcgaaagtatacttgagaaagcctacaaagttgtagagaataccgtgaaagcttgtggaggcttgaagaanaagaatacctggtgtggtgcttgtgttaatgaaaatcgtataattgtatgatctagacataatccaaggttgtgggtgaaccaatatgaactntgtgtgtcccttcttccttttttcttatgctccccatgcatttgtttgttgtattttcatcat

SEQ ID NO: 43272 - DNA, 451 bp, Glycine max
gcttctagccaaatggacttaccttgaattaattcctctgatatcctctttgagccttgtttccctttccttgttttgaagctcactacaagccttaagtgaaaaaccatgatattaccatatccttaaggaattttggagctttggaattgttttgggaataagtgtggggggtttttgtttcattggacaacttgttttgttggctatgcttcatgatgtattttgggccatacttgatgtacattgtatattggttaaatgttggacatgctgaatgaaatgttgtttctcaaaggccaagcacaaaagaaaaaaagactcaaagaagaaaaaatttcgaaagaaagataaagaacagcaatatagttgagtgaataagatcttaaatggcacaagaatgatgaaactctcgcgtctactcttcatagttaaattttatctttacttc

SEQ ID NO: 43273 - DNA, 416 bp, Glycine max
  unsure (1)..(416): unsure at all n locations
agcttcaacgcagttgggcatgaagtggaactattcttatcattgatctccatgaaggcttcaatcgggtggtgtntagtaatacggaggattataatttcgtgttttttgaaggaccgtggatgtttgtgaaccactacctcattattcanagatggagatcattcttcccaatgcatgcagaagagacgaagaagatagcggtatgggtcaagattcagtgtctccttattgaattatataatgatgtgttctcgtcaagaattaggatgagtttaggcaagtttctcaagtaggataaattaacatcaatccactccaagggaaaatttgcaagaatgtgtgtggacctagattggataaacccttganatcttatatntacgtgagagggtttaagttgaacctggagtatg

SEQ ID NO: 43274 - DNA, 454 bp, Glycine max
  unsure (1)..(454): unsure at all n locations
tcttgaacaaatcagccgctaatacaaaaccaggaacatctttgatgtttcttcagccacttttgcctctttctagccccaaaagcgcttctgggtctccaggagatcacagagacaagagaaattgattattggcatgtttcaaaaatgaatcctctcacatatataggagggtccagttttttcttttctctttttcagtatgggaggtcatatgtttaaagctagattcaacaaggtcatgtttaaatcgtgtgttaatttatttaattttgtagaatggaagatagacacgtgattntaatatgaccttatcatgttaaaagtttgactagctaggtagcaagttggattgcaattggtgtattaagatggataaataatntagaggatgtaaacataaataaagattggctggacgtaaaattctcattggatttgtgaatatgtatat

SEQ ID NO: 43275 - DNA, 440 bp, Glycine max
  unsure (1)..(440): unsure at all n locations
tgtgttgagaatcattatatgatcatatttcatatttgtctttattatcataattataggaacaatatctcctataattaattgtaatttatctatataaaggagcatccacagtggacacatggtttcagtcacttatccctctatattntttctcattntactacctttattgaaaatctaccacacctagatggagtcttttgtcatgtatattggccttagatatcaattttatttcttgactanatcaaatgtgattcatgaacatagttattgattgtgtgctgtaccagcacgatagccccaccacgggctccagctgtgcaacaaatttcagtttgtggagcactntataatcatgtgtgtcacattgcaatctgcagcccatatggctgccattcgcacactgctattacacctggagggtaaagccccat

SEQ ID NO: 43276 - DNA, 268 bp, Glycine max
  unsure (1)..(268): unsure at all n locations
aaaaagtagtttagaaatccaattcataattgtcaagtatcttattattattccaataactgtgtgtgcggaacaataaaaataatactcataaacatattataaagcatttaacaatgaggaaaaaaatggtctataccaaaaaagaataaaagccncaagaaaataaaaataacatagtattattttcttaaatcaacctcttaatacctaaataactcaatctttgcaaatttgaaaatgcacaatggaccaaaaaatacctgga

SEQ ID NO: 43277 - DNA, 608 bp, Glycine max
aggacgcgattgtaccatcgagagccgcgatcctcagagtcgacctgcgagcgtgccaagctatgctcacagttattccattatgaggaaactttcttattcttacagagctagttccattggggagggagcgcgtcggctattagcaaaatcctgagagaacatttactatcaatggtcgagccaacgaccaataacatctgctaacctcctgtcgtgagatatcaggtagtcctcaactcgatcacgcgaatactaggtttacgcagggtccacgcgcatccccatcatatagacattcacctgcgcgaggaactgcacttactctacacaaattctctatatgacaggatgactagcaatttccgcttcatcacaaatggcacacaactaccaagagcgctgcatgctcctagtaatcgtccatacgctaggatctatcattaagcacaccaccgaactgtctaggcaatctggaagatccggacacctagaccatgatacggcgcgatcatagacacagcgcatgcatgactaatacttatatgctctcgcgagagtaccatgacctcgagaattgcctgctaccctaatgaaggtcaccgccc

SEQ ID NO: 43278 - DNA, 229 bp, Glycine max
tactaagcttaaagaccttggatcctatgtgcttgagggatggtttgattgtcaattctagaatcttgccacgtggatgccctcgtgggaaaccatgtcccgctggtgatggtaaatacctggactagacacttccctagataaagtgtatatcctgtgaggctggagcacttttcattcttcaactgaggaactaccccgccatgattggtccgcttggatgattttg

SEQ ID NO: 43279 - DNA, 403 bp, Glycine max
  unsure (1)..(403): unsure at all n locations
caggagctacgcctctgttntactaaaggtatactttgatttaattaatttttccattgtttctagtctaggaattaggatataaacatggttttaaaaaaagtttgtggtcatcaatgtgtgtagttacactctaagtgtgtaaggagaggatatatatttgattntaaaagaatatattanggtgaagataattggagatccaactganaaaccaaaaaantttaattactgtgttaaggatggtgcanaacatatatggtgattacaatttanaaccatttgaattanaagataattaaccatgtataaaagttaanataaattaagagaaatatntaattaattntttgtgtgaatatgttagctagagttggaatnntcaattgtgttgaagtgggtt

SEQ ID NO: 43280 - DNA, 410 bp, Glycine max
  unsure (1)..(410): unsure at all n locations
gcttaatggcttctcgacatanactattatatcttacagtgagattntcaatgtcaattggatctgttagtttttcatcagttccaatatcagaatttgcattccttgtccatcgtttcaaaatgtagtgcgatggaagggtaagaacatttgtaacagtgaagacagtcaatatatgtcaacaaagaacgcctgagtattcaaacatctggcagctgcaattcaccttcatttcagagatatttaatgtgaccatgtatgccttgtgatcatgtacatattntgcaaccctgtatntactgatcacaccatcatcctcaacattattngcagtataagcaaaagtttccaccagttcctcctgannatttgcanaaatcttcttagtgtacatatttgctgctttgtgt

SEQ ID NO: 43281 - DNA, 425 bp, Glycine max
  unsure (1)..(425): unsure at all n locations
ntaaccgatcgtttaagccattttctcgcctaatctaatataaaataaatttccaccgatcatttgatttataatatccgctaatttctgttaaaatgaaatccgaccgttcggtcgtgccgtaaccacgttggaaatcagaaaagaggttaaataataatataatagtcaaaaaataccttttagtaaaataaagcggaaaaatcaatcggacatttctctttggatttctctttcttaattgaattgactaataactaaagtgaaactaaggctaaaatcaacccgcaaagtcaagctcgtccacaaaaaaatcactaaaaaaaaagatttgaaaagttcaatatctcaatttttcttaccaagtaaatggatcatttttaaggtccaacgccttaaaatgatcaccttccgagtaaaaaaaa

SEQ ID NO: 43282 - DNA, 421 bp, Glycine max
  unsure (1)..(421): unsure at all n locations
agcttgtgngtagaagtaactactggtctgttttgtgagaatatatgtattagatacaaagcatttcagctgctctaagaatgaacatcagattttcacttcttctcttttgagtggtattttattatttctaantttgtgaatctcttgtgccaacagtatccttctacaaacttaagttgaatctttagccaatgaattntcaaaagctaagtcttatttgtaagtttcatgtattctgcanatggaatggaattgtatatgaagtttcaaattgtatgttntaattatattaataacctcttaaaaanagatgatattggtgttattaggttaggtacattatnntatttggntnttggtagatgactggcttgctattnntatagttctttcttctttgctatgtgactggttgagt

SEQ ID NO: 43283 - DNA, 444 bp, Glycine max
  unsure (1)..(444): unsure at all n locations
tgtagaatttattntattnttttagaagaagttatgcatttattacttactattacggagtagttatatttaacaagttttaaatagtaataataattgttgaacttttttatttttgttgtaataacttctccaaagagtgtgaagggcaagaactttatcattttccaagacatccgcatattaatcttagcatagcctagaaataattgaaacctatattgtaatttttcctttttgttgccttttgttttatccgtttttttccttgcatggacagcatcattaattttttttctttcagcattttatgaaacaaatattttgtgaatattaatcctgattcttaaaaaaatgttnttatttattggatgaatttactcacttagataatcacaaactattaattagtagttctatttaagtgagaagagagagattaca

SEQ ID NO: 43284 - DNA, 374 bp, Glycine max
  unsure (1)..(374): unsure at all n locations
aagtggatctgaanagaggcaaatntaatcatcctgcttagacgaatgaganaactggggcaaataaagagggtgaggatgagggagaaacccatgctgtgactgccattcctatacggccaagtntcccaccaaacccaacaatgtcattactcagtcaataacaaaccacctccttacccaccacccagttatccacaaaggccatccctaaatcaaccacaaagcctgtctaccgcacttccaatgacgaagaccatctttatcacaaaccaataaaaatcaccaccaaaaggaattttgcagcaaaaagcctgtagtttcaccccacattctcgtgcatatgctaaacttgatcccatatccactcaata

SEQ ID NO: 43285 - DNA, 437 bp, Glycine max
  unsure (1)..(437): unsure at all n locations
ntagaaggatcactatttctccgtgagagtgtcctacatgccacaaagcctcctaggcctacaccaattattgttggataggtatcatcatatttatgctaagaaaatcatgcacatcagaaagaataagttaaaatagtataccaattggtacaatagcaccatctgagccaccacaaagcatcaagtcctgcaattacttacatttttaatgttttcaataaaataactatataattacactaaacttgttttaagaaataaaagattggtaaaatatgagaaatctaccatctaataagcaaatgctgaagtgagatacttacagcttcacctctaatgatatggtttgcagcattcaatatacaaaaattactagtagcacacgctgtagagattgaataattagggcccatccacccctaaagtttcatatg

SEQ ID NO: 43286 - DNA, 318 bp, Glycine max
cgatgtccccatttcttgtgttatactgacaatcattctaagggcatgcacttgttatttctgttcagatcggccatctacaattcttttctaatctaaggcaggcctactttcacttatctgattagatctctgaattgtaactgatatgttggtttaatctaatctaatgaagtgtcaagcatgttttaaatggttagaaagtagaaactatgcacataccttgatatttgcttcatgccatatgatgactgtctatgctgttgtgaagatgtgatttgtagatctaatttattattcattgataatgcttttctc

SEQ ID NO: 43287 - DNA, 260 bp, Glycine max
  unsure (1)..(260): unsure at all n locations
tttgtactaagtaatacctctggtacttgttattctataatatagattatctttgccttccaaaaaaanaaattattattaaatattaatgccctctgcttgatatgctgttctcctaaaccaaagcatctcttagagaaattttctaactaaagattggtttcagttgcagatattgaattgtcaatatcgatttttaggcttaacattatcctgatatttgactgttgccatgtgccatttctcttgcccagaatgtg

SEQ ID NO: 43288 - DNA, 190 bp, Glycine max
tgtctacccagtcgtcttgctattcaatcacaagaagataacactgaaccaattatagtgaaggccactaaccttctcatattccaatacttctgaaagttcataatatctgagccaaacacactctgaaaaccttatattcttattaaaattttacctgacctgccacttatgaacattttacatgcat

SEQ ID NO: 43289 - DNA, 429 bp, Glycine max
  unsure (1)..(429): unsure at all n locations
agctttatacttctttcagttggagtctcaacatactntcgtaactacccttccctcctaactgattctagattattcctaacaaaagcagttacacgttccacattcctcttcccatgcatgaatccccacgcgttcgatcttcatacataatcttccatgtacgttgggggtctcgtcttccttctgggcctttctctgttcagctggttgtttacttcctgcaccccatcgtctccacttgtaacaactactaacaaagaagaaattattcacagctatntacttatttatttattntaaatcacaatcatttattagttntatntaanaaaaattaaatgaattgtaacaaattanaagaataaaaagaataagaatgtatggcatttatgaataaataattaactctaacttgatagaaagaac

SEQ ID NO: 43290 - DNA, 357 bp, Glycine max
aacatctatggccacacaagctggaaatacattcctcagtctttcacaataaaacacctttatactctgtagcttttcgaagttaacaatacctcctggatccctgctacacacatgcttcaactttgggagacaacctacaaaaacaacctgcaaatttgtgtctatgccaccagatacgtctacttgctgagaatctttgatttcaaaaatcactttcactgactgacaataataaaccttcaagctgctcaaactcgcaaaccatcctttcatgtgactctgaagaatgatgactagtttattgcatctatcaatgttcacagaagtgacactctaataagaatcagcactctc

SEQ ID NO: 43291 - DNA, 576 bp, Glycine max
  unsure (1)..(576): unsure at all n locations
aggacacgattgatgcatgagagcatncatcctcagagacacctgcggcatgcaagcttgcacgctcatagtctctntacatgatattatatattatttgcncangaaaagagaggaggtgccatacgtgctattgctggaactaacacaccatatatggcatatgtgtcaatgctgaaaaccagatcttgcctaagctaagtatacgttaccctatgatgaatgcttgcttatgactcttgattcgagatcccatacnacccatgatatcttgtctagccaagccccgtgacaagccaacaaaagtccttagtgatccgccgctcgtaagtgagaacatcgttagtagagatgaatacgcatctggggaatcttagttgaggtcatataatgttagacacgtatccatactcttagcgtagagataacactatccttgtgaggatgtgagacaaccaacttgattgatttgcgatctaccacaatcatctctatgcgagtatgccttcatcgagagatacggcaacgcacaccgaccatctgaagaattgaataaattgtactttcgatgcgccg

SEQ ID NO: 43292 - DNA, 302 bp, Glycine max
  unsure (1)..(302): unsure at all n locations
agcttgcctcanagaggtccaggaaggacaatgtagccgaaggaactagttccgctccggagtatgatagtcaccgctttaggagtgctgtacaccagcagcgcttcgaggccatcaagggatggtcgtttctccgggagcgacgcgtccagctcagggacgacgagtatactgatttccaggaggaaatagggcgccggcggtgggcatcactggttactcccatggccaagtttgatccagaaatagtccttgagttttatgccaatgcttggccaacagaggagggcgtgcgtgacatg

SEQ ID NO: 43293 - DNA, 358 bp, Glycine max
  unsure (1)..(358): unsure at all n locations
caattataaattatacatgcaatctccctcacctactctcatccatgacttgtgaacactcagaaacttggaagttatctaacaataactaacaggtgcactatccaacaaccaaaagaaactcattagaaatttcacagatagcttaatatatattgttggacttgtagcaatatattcatcatttgtataagtagttcgaagaaaaacatgatgaacacaatgctaacagcctgtacacattatgcaccagcttcttgcaagagagatgaagaacatcatcaatgacagcacaaagaacatcttatctatngtatacattacgcaatttgacatctggataattattggtcccatt

SEQ ID NO: 43294 - DNA, 600 bp, Glycine max
  unsure (1)..(600): unsure at all n locations
aggacgcgattgatgcanctgttacntngcatctctgagacgactctgcaagcatgccagcttctcgatattgtatgcgtctgaatcggatatgccagtgtattattatgaccattntaattccctttagcttgcggtggtcaatttctagcatctcgatacgctatgtgcctgaatcggacatgcgagtgaaaaggtatgaccatttgaatntctcgagagctttcggtgttatatttctagcggctcgatacgctatgcgcctacattgaacatgcgagtgaaaagttatgaccattttaatttctcgagagcatccgtggtcaatttctagcgtctcgatatgttatgcgcctgaatcggcaatgcgcctaaaaaggtatgaccattttatattctcgggagcatctggtgttcaattctagcgtcttgatactctatgcgcctgaatcngacatgccagtgagaagttattaaccatttgaatttctcgagaagcttcggtgtttaatttctaacgtctcgaaacgctatgcgccttagtcggcatgcgagtgnatactatgatcattttatntctcgagagcttcggtgtngacg

SEQ ID NO: 43295 - DNA, 406 bp, Glycine max
ccttcaaactcagctttggcattgaaaaattgggtgagagtttctctctggtttccttgttgaaccaattatcagacttatcaaggtaatccttgtggcgtctacccagacttatcttccttaaccggaagtggcgtctacccagacttatcttccttcactggaagtggcgtctaccctgacttatcttccttcactggaagtggcgtcatccaaaccttcgtagcctgtatcaagtgatccgttcctagtcaggttcacatcacattctctaatagaaatcatccaaatattattcagggattgaatacaaattacaatagacaacatcgccgttctaaagccacgactgatatttttcagccaccatttagcaatattttttacaaacgtctgccgataatat

SEQ ID NO: 43296 - DNA, 247 bp, Glycine max
  unsure (1)..(247): unsure at all n locations
ttattatgagcactgtgtgccgatttgaactgaagatgggctgtgcaagcgggctgtcacatctgctctcatgaatgactatacctcatggatcatcaacatagcctcacgtttacctgtatgggactatgcaactgaagttataccaatggtagttctgattctgctggcagctnggctctacaacgccaccagtggcagcttgtttgatggccatggaagtatgtgtactgcgcactatcttgag

SEQ ID NO: 43297 - DNA, 154 bp, Glycine max
tcaccaaaatttactttactatttatttttaactctacatataatatttacacctttggaaaaagataagtttcaactttataattaacaaagggactggtttatagtaattaaaattatcttatattttttaaatggaataagcagaaccctt

SEQ ID NO: 43298 - DNA, 281 bp, Glycine max
tgagacatgctattactatattgtccacttcttatctaaccttggacaggctccacaaagagaaagccaatattagaaatatgtttatttctgatgaatggatcctaaacaagttatctaaagagcctaacgtgaaagaagttgcaaggtagtgctcatgccttctttttggaatagtgtggcttacactcttaaagtcatggctccacttgtcaaagtgattcttcttgtggatggtgaaaggaaaccagccatgggctatatttatgaagcaatggaca

SEQ ID NO: 43299 - DNA, 278 bp, Glycine max
ccttcccttatcctgcgggggacactttaaccgaagaagaggaggattcctgttgaaaatatggaggacaggaaccactgctcaaagaatatccagctatacaatccgtatctcctaagcacaacaatatgatttttgagcataagccaattgaaaggaacctatatccactcggtgcctctgtctgaagaagaaaggatgcatatccttttgagatgccctgtttcactccaccggaccttcactactcctcggtcggatccatgccttgaatgtgg

SEQ ID NO: 43300 - DNA, 330 bp, Glycine max
tagctgtgttctctgataccaagagatggtactttgcttaacaagcttctatggagcctgtatctgtgagcgttaatgaggtgcttcaatggtgattctcatccatggagttgtagcataagataaacgacaagaggtgaaaggacgcgccatccactatggaataagccatggaagaagaagcttcaccaccaagagagtcttggataagaagcttagaaaggaacgctttgtggacgaagataatgggagagagatataccaaacgtggcatgggaatgaaggaaagatatggagagaaattgaactttgaagtgtgtctcacaagac

SEQ ID NO: 43301 - DNA, 368 bp, Glycine max
tactcagcttgaccatcccgaccaacccgggcatagtcggtcagtgttaacctgtgatgtacctaagcaggcgagctcctggcagtcaacatataaaaggaaaacacgaccacaaagcatggaggcttgtggtggctggccagctgtgaattttgtgtaatatgtggattgtggcctctggtaatcgattaccaaaggtgagtaatcgattacaaggcttaaaattgaggacaggaggctaaaatggtctctggtaatcgattaccaacgggtgtaatcgattaccacgcttgaaaacgaagtcaagaaacttatggagcctctggtaatcgattaccaacctgcgttatcgattacacagaggaatg

SEQ ID NO: 43302 - DNA, 318 bp, Glycine max
  unsure (1)..(318): unsure at all n locations
tcctgactcaccatatatcttgacccagngtgagaatgtcaattcttaccctctgaagcaaaaaanaaggggagagggaaaatttccaatcaaagaggaagcaaataaggagagaaggaaaatttccaatcaaaggatataaagagaggatagggaattcccaatcaaagagtgggagaaagcaaaaagaaaagatagaaaattcccaatcaaagaatgggagatagaaacaagagaagaagaaagggaagacagttcccgatcaaaataaaataatatgcagaaaggtctttggaccggacaatatctgaacaatac

SEQ ID NO: 43303 - DNA, 308 bp, Glycine max
gcttctgctaaaatagctgagtcttgtaattctacagtttgtctctctcactcaccttttgttggatcttggatagactctggtgcttctgatcacattgctggtaatccctcactagtcttcaatttgtcacaaaccaaatcctcccaccacataaccttagcctatggatctaaaacccctgttattgttattggacagcccacccacaccccctccttatctttaaacattgttgtctccctttaatcttgtttctgttagcctactcacccaaactcttaattgctctattacctttctttctg

SEQ ID NO: 43304 - DNA, 374 bp, Glycine max
  unsure (1)..(374): unsure at all n locations
ctgcagccttcccttttttaaatatatgtttagttgtcctttatatataaaagattcattaatgtagtttactactttgttagatatagaattatattgaattaaaagtgaaattaaagagttaaaatgtgtatattactgaataaagttaaaagagaattcagagaataatgaagaaagaagagcgagagaagacataacatgttacatgtgtacatcgatcatagaccacaaaataccaattatatgaatttaaatnntaaattttcttaggtactctgggtganaaatataaatcttagataataatctaaaaacgacatatattntagatatgannaaattaattaagcctaatattagcatagatgata

SEQ ID NO: 43305 - DNA, 226 bp, Glycine max
gatggaacgtgcgacatctctccttcttgtacggacaaacacatttatggctgttgatatccctgatactatcagatgcaccctgtccgacatgtatggaccatgtagaaaatgtgcattgattcaaccccatatactggtgaaaaattcacaatacttccaaagagcatcatccgcatacatccatgatgttcattggctgcatagctcattgcattctttccct

SEQ ID NO: 43306 - DNA, 396 bp, Glycine max
  unsure (1)..(396): unsure at all n locations
agcttctatagaaggttcgttcctaatttctctacaattgcatcacctttcaatgagctggtgaagaagaatgtggcatttacctgnggtgaaaaacaagagcaagcctttgctttgctcanagaanagcttactaaggcacctgttctagctcttcctgacttttctaaaacttttgagctagaatatgatgcctctggagtgngagttggagctgtattgttacaaggtgggcaccctatngcttattntagtgaanaaattcattgtgccaccctcaactaccccacctatgataaagagctntatgccttaataagagccctccanacttgggagcattatccttgtttccaangggaattgtcattcatagtgatcatcantcacttaagt

SEQ ID NO: 43307 - DNA, 137 bp, Glycine max
accatcttgctaaaattgggcaaaagatggatcgtgtgacatcgctccttcgtctacggccaaacacatttagggctggtgatatccctggtacttccagtttcaccttgacggagatgtcctggaccatgttgaaa

SEQ ID NO: 43308 - DNA, 309 bp, Glycine max
  unsure (1)..(309): unsure at all n locations
agcttgtggntcttgtggaggttagaagagtcttcgatatgagaatgtataaatgagacatattgggaacatggaacattcatttcattttgcanaacttatggtgtaatataataatgatgattaattattatttatattgaaattattgctaatacagactacttaaatcttatttaaatttagttacaaacgtaacaatatagtccacaacctataatatattacagaagtcgcacgatagcaactagagaagtcaatctacaaccaagcttgcggatattcctctataaagatccatatattctt

SEQ ID NO: 43309 - DNA, 336 bp, Glycine max
tggtaatgtgctcaagggacaacattatatagcgtactttgtttaaacttataatacatgcatcacaaacgcatcaaatttataacaaaattaattttaatattgatatttctgaagaaaaaaaatattaaatgcttatgcgttttatgtcatgcatgctttcttttttttacttaaataattataaaaactattaaactcattgattgaaagatctagcatttctatttcaacttttttgcgtagtgatgtggaccttcaggtggccaataagagtcatgaaaagtgacatctgtcttttagactcaaaagtatacaaagctctttgttcctact

SEQ ID NO: 43310 - DNA, 436 bp, Glycine max
  unsure (1)..(436): unsure at all n locations
agctntcctcaganactaacactattagcttattaaatacatatatatgcgcttttcaccattgccaaaaatatggcttgtgatcttatgtagttgtggtgataagttgccgttgtattctgagcgaataatcatgaactctgcccagaagttntcagtaaggtggcttcaaaagtttacaatacaattctttcattttttgaagattactttctttcggagctggagcttgttgcacgtacttctcanataatggttcaagtacaatggttggaaaatggaaagcaattatcattttcggtatctgtctagaagcattgtttctcctcttacagcttgcaatnttcccttctatntattggtcaagtaattagttgcatatcaatagtttggtgtggaagttgaaagtctgtggactttcgacacagcatgacat

SEQ ID NO: 43311 - DNA, 402 bp, Glycine max
atttccaaggggtttaacacggagaaacgtctttatattggaaatgtggaatagtgactgaggaggatatgcacatgcacacacacatcatcatcagcggaagcaagagtccaaactcttcagaaaggagacataatggtttcatttatatctctaacaaactctcacacacaagccatttgggttttgaaacgtaatacaagcgcaacacataactattttgagctgaaatttactttaacgtaaactgggcttataatatgaggattgatcaacggggtgcaagaaattaaatatgactacatacacaatgctaagaagtaagggtcaatctaacatatagtaaacctttgcttgacgaagatcatagatctctaagaacaattgcttcgaatgctcttc

SEQ ID NO: 43312 - DNA, 462 bp, Glycine max
  unsure (1)..(462): unsure at all n locations
accggatccttaagtcaccgcggctgcagcttataaactaaaagcatgaacacttcnttttactcctcttgaagtactntntaagaaagtatatttaaagagatataatttcttatttctgaaaaataaactcaactcaattaaatttaattaaatatcaacttttttaaagaaaataaatattaattaaagaattagattaaattcaatcccattcgaatcacttaagattattggaagatttaaagtattttccattgttatcccaccacgacaaatcaacggtggtcatcacgaatgtgttatcttgttgtggataagtcatcggtacacaaaatctagaacgattcctgatagcatgtattataataatatatacacgacaacaatgttcctaacatgtaaagctttctatataaagatatgattgtcattataataaggaatcttatatcttataat

SEQ ID NO: 43313 - DNA, 328 bp, Glycine max
ctggtctcttagagtgagtcataaacgataccttcgactatattattggcttggaagaggaggaacgatttttcaagtgttactctatcaaaaatgttcgagcgttccaaggtttactcataagcggagaaattgttaggataacgcacctgcagtataataatctgcttatagtgttgttgctgggtgatccaatctaagcactagggatttgcttgtgacttgtgacggataagattggcctcttgaaacaatgagtcgtcctaggtccatagttataaaccatcacacgtcacatgttctgctatatgcgggagaaagctgcata

SEQ ID NO: 43314 - DNA, 381 bp, Glycine max
  unsure (1)..(381): unsure at all n locations
gcagcttctgacaagctctcttgatctttctacactatagtggctatgtccctctanatctgatcaatcttcttcatagaaaaatactttcttaggaagctgtaagcatagtgtaccctatgcagtagtattgaggactaanagtcatatatcaaatccacatgaccaattgtgttcccaaaataatatattntgtagttaagtatttgaagaanaaatttaaaactaatatgtgattgatttgtcaattatatattgagagaaagacaccaaagaagcaagataaacgtaaagataagataataatatctagggattatgatttcacatgtaccgaatcccctaatcccaattctaacaagtttcataagaatggtaatt

SEQ ID NO: 43315 - DNA, 288 bp, Glycine max
cgaaaactcactccctttagtgagaacaaagacgaagttcttcacaatcaaccctatgaggaagatgatgaggaagaaacccagcctgtttcgccaatcacaaccataccacgatgcttcttacctgcccatatgcaaaattttgaagaatcatgttttcaagattttgaatacaggcatacctggtatcgcaaagaagtccaacatctggttggaactcatttcaaaggatgcattttctgacaaaacaagatgtacaaaatgctttgcaacagtatcatgtgagag

SEQ ID NO: 43316 - DNA, 373 bp, Glycine max
tatgaaaaggttcatcgagtcaagttgaagtatggtagtaaccatcttgcacaaaattggggcaaaagatggatcgtgtgacatcgctccttcgtctacggccaaacacatttaaggctgttgatatccctgttacttccagtttcaccttgacggagatgtcatggaccatgttgaaaatctaaattgattcaaccccatatactgtgtaaaaattcacaatacttcaattgtgcatcattcgcatacatccatgttgctcattggttgcattgctcattgcattctttccttgaaaagaacaagagaacctaatcattgttataaataagaatagaaaaggcatgctttacggtgccctcaccgaacctat

SEQ ID NO: 43317 - DNA, 439 bp, Glycine max
  unsure (1)..(439): unsure at all n locations
tagcgaanataaagaaaaggagtgtaattntatccatattttgngaaaacaaaattgaaaaggaagtgcattaatgtatcaaggagtggaaatagtaattgtctcgcatgatgggtctagtaaccaagggaattttaatattgggctgttttggtgttgaacaaaaatcgtcagttgaaatatttaggatgttactattggctgctaccataattacttttggtccctataaaactttatttttttgaaaaagactattttacccctttattcaaaacacttcattcctttntctttctcccttcctattacccgtgctatccttatccttgcccttgttaaatacacaatgaaaatacaattatggtatgatcctcattgagacacacaatgtantttcattgtatattntntttaaaaataaaacacaacagagtca

SEQ ID NO: 43318 - DNA, 407 bp, Glycine max
  unsure (1)..(407): unsure at all n locations
ntaccgctacanaagccggggtttatcaattgactgcnttcctcgaaaatggcgattcgatgcaacaaacagtgacctatgtgccgaacgtcgcgaatgctgaaatcacgctggcagcctcgaaggatccggtgattgccgacaataacgatctcacgacactaacagcaacagtcgctgatacagagggcaatgcgatagccaacactgaggtaacatttactctgccggaagatgtgaaggcgaacttcacgctgagcgatggcggtaaagtgattactgatgctgaaggcaaagcgaaagtcacgctgaaaggtacaaaagcaggcgctcatactgttacagcatcgatgactggcggtaagagtgagcagttggtggtgaactttattgcggatacgctcact

SEQ ID NO: 43319 - DNA, 493 bp, Glycine max
  unsure (1)..(493): unsure at all n locations
agcttgtgctatcaagctatgacttanatcaatgacaactagatgcagaatggttgctntgaagttgattgcaagaccatggttgacacttttaatagttgtgctaaaggaatctctgatttttatgtcattntaaataaatgtagagcacttatttcatctatcccaaactctagaagatgctntgattaggttgcattggatgtgccgcatcacctaacaaagtcactctcccaattccccaagtgttgatcatgcctctgtcacatatatccctctgcagaatcatgtgctctagtgtttctgatatgagtgcaatcacttcattgcaccaattaccaaagagagatccanaagcctcttcttcccttggctaacatctgaagcaacanagtactggttcaagcccaagaaaacctttgtaccttcagttcaatcaccaaaacagaaactntanatagtggaatagttataagtataacattttctaaca

SEQ ID NO: 43320 - DNA, 441 bp, Glycine max
  unsure (1)..(441): unsure at all n locations
cggcttattggtcgttgaccactgtaccttgaaaccgncaatnnaatatccaccgaattatagtctcaatttttataaccccttctaacgcctaacgtatagtgaaaactctttattgttaacaccatcctcggagagaatcctctttgttgggatacctggcctaagttttatttccctgccgaaatgcagaaataactgttactacttattactcactcacatatatgcttcgtgtattacacggccagaggcttctcaactttaccttaggggagggtcccttgcatattataatatttggacagggacattcgtcttcttaaaaaattatcgctcctgtgtaaggttggtactcagatatacaaaatagtccttttttaacgaaagatctgaatggcttattgtctttcggataacaatttcacagacacttccacg

SEQ ID NO: 43321 - DNA, 394 bp, Glycine max
  unsure (1)..(394): unsure at all n locations
agcttgatctaccaccaccgcctctaccatcatcttagttntctattatntaatattactagtactntgctttctagacgtgtatttggctatattatgacatttggatatactanaatctgcaatccctcactccttggtttttctattttcccaccattcttcaattcttcaaatgcagtatgtccctcagaattttctcatgcaccatccaactctttaatacaagtctgcacttcatgttcctcctctttagtttttctaggtgcgacggngactccgaacgactggcagagtcctgtgatcaaggcgggaaatcccagcgccctattggacttatccgggtccagagggtgcctggtacgcgccatacctacaaatagatagatgacat

SEQ ID NO: 43322 - DNA, 440 bp, Glycine max
  unsure (1)..(440): unsure at all n locations
ntcataagtgaaatcaggtgcaaccatctccctaagagtcctctcacgagggggaggttgagcaatgttctcagtatgaaaattaacagccgaatgctcaaaatcagaatattcagaatcaccacctcaaaatgctcaggatgctcaaaatggtcaaaatgcacagaatgaccaggatgcacactatgcctaactaatctatgaaaggttctatctatttcaggatcaaagggttttaaatcacctggattgcccctggtcatgcactatatgcagcaaatcatgtgtttctcanacaagcaccaggggagggttaaaactacaactatagtcaaacaatatctaaatgagttgaaatgttgtgagcaacaccctataatcatgaanagatagtacaaaaaatttcanaaaaaaatcaaagtctaactatgaaaactacc

SEQ ID NO: 43323 - DNA, 271 bp, Glycine max
  unsure (1)..(271): unsure at all n locations
agcttgtgccaattggtccattgttgagaagttatggtgacacaattgcaactgcaaaatcaatcggacaatactgggaagaagatctctcttgtatgagttggctcgaccaacaacctcatggttctgtcttgtatgttgcctttggtagtttcactcattntgatcaaaaccaattcaatgaactagctcttggaattgacctcaccaatagaccttttctttgggttgtgcgtcaagacaataaaagggtataccctaatgaattctt

SEQ ID NO: 43324 - DNA, 437 bp, Glycine max
tggacagttcagcagaccacatgtttgtggttaggattcttccctcaggaacccaatgagcatatacatccttcaatgtttgaatggctttttggccttctggggtctccctgcctccaatgaggacacggtccggattgaaaagatcttggattgcagttccctcagcaaggaattcagggtttgaaaggatttggaacttgattcccttgccattgtgagtcaaaattttctctatggcctcagcagttttcacagggacagtggatttctccaccacaatcttgtcactcttggatacatcagcaatcatgcgtgctgcactctcccagtacgttaaatccgcggccttaccggctccaagaccgcgagtttttgtcggggtgttgacagagacaaacactatgtctgcctcatagacatgtttctcaacatca

SEQ ID NO: 43325 - DNA, 454 bp, Glycine max
  unsure (1)..(454): unsure at all n locations
agcttcaagaaaaagatggcctcagcaaattccttatttccagaagggaattctatcaatagacctccaatctttaatggagagggttaccactactggaaaacccgaatgcaaatttttatcgaggcaatagatctaaatatctgggaagccattgaaatagggccttatatacccaccacagtagaaagagtttcaatagatggtagttcatcaagtgaaagcataaccatagaanaacctagagatagatggtctgaagaggatagaanacgagtacaatacaancctaaagccaaaaacataataacatctgccctaggaatggatgaatattntagagtttcanatngcaagagtgctaaggaaatgtgggacactcttcgattaacacatgaaggaactacagatgttaaaagatctanggataatgcactaactcatgagtatgaat

SEQ ID NO: 43326 - DNA, 397 bp, Glycine max
tgtgctattaactaattagaatcttacctgcaccaattgcatatacatttttcaagccacccatgacctcatgggtgacaaggtcactgttgtcccaaacaataaaatgtggttgtcgtagaaactttgcaagaggttttctccatttctcatctccgcaaattcgggcattggcatactccttgttgtatatttctgaggcaatatttggaccaccaagatacagtatgttctccataggcactccagctgtcaaagtatgcattgtaaagagttgagaatgaggaaagataaaaatagatatactaccaaattaccagcttccattggtcgttatcaaacaaattctagataacaaatagcagtacctagctggtggactatcagtttatatgga

SEQ ID NO: 43327 - DNA, 466 bp, Glycine max
  unsure (1)..(466): unsure at all n locations
agctnntcacacggatttcgattcggngacatatcttatctagacgctcaaaatttaacaacggaagctctcgagaaatttgaatggtcgtaacatttcacacggatgctcgattcgaggacataattcatctagacgctcgaaactgttcaacggaagctctcgagaaattcgaatggccataacatttcactcggatgtttgattcagggacataactcatctagacgctcaaaatttaacaacggaagctgtcgagaaattcgaatggtcataagttttaacacggatgttcgattcgcgacataatatatcaagacgctcgaatatgaacagcggaagctctcgagaaattcgaatggtcataactnttcacacggatgttcgattcggggacataactcatctagacgctcaaaattgaacaacggaagctctcgagaaatctaatgtcataactttcaca

SEQ ID NO: 43328 - DNA, 305 bp, Glycine max
tagatatgatgacccgtagtcgggcgtaccattgtgctgttattgtcgtccacatatcggtacagctagatatgttccgggggtcacgacaccatgatgacgtccgcggggtgctcattgcccgtgaccactcttgaccattcccaactctccacagccttcgtcggtcaatgacaaccgtcgatgtgactaatctcaccaactcctgcctgccggcgaatagttggaaccattaccacttatcaaggacgctcgtggtggctgtccaaccgtgaatattgtgtgatatcccgagtctggcctct

SEQ ID NO: 43329 - DNA, 366 bp, Glycine max
gtctcacgattgtcacgtgctcatgcatcttttgttagtcgtggctatacgagacatcttgccaaacaaagtcaagttagccataactcacctgtgctttttcttccatgctatatgtagcaaagtcattgatccctgtcagtatgatgagttggaaaatgacgccgcaattatatagtgtcagttggagatgtatttcccccctgctttctatgacatcatgattcacttgattgagcatctggtcatacaaatcaaatgctgtggtcctgtttatctatagtggatgtacccggttaagcgatacatgaagattctataaggggttacatagaatctatatcatccagaagcatctattgttga

SEQ ID NO: 43330 - DNA, 407 bp, Glycine max
atactgaattgagtatggcacacacattgcatgtcttatatgccttttagaggcttgaaaagtgcgagaaaatgagctgtgttttctggaaaacgcgatgaactcgctaagcgagaatgttgcgctaagtgagttcatcaatactcattgtatataagctttatctgaagaactcgctaagctcgctgactgtgctaagcgagttcatcctttgaggatgaacattcatcctcttgctgaactacctgtggctaagcgaggctgaatcgctaagcccgggtaacttaaccatttttttttgtgatagccacacgctaagttgagcattctggagccaagcgcaattggttgcggcatccgctgagctaagcgagcttcactcgctaagctcccatgacttagtgaaa

SEQ ID NO: 43331 - DNA, 330 bp, Glycine max
  unsure (1)..(330): unsure at all n locations
cagcgagtggtggaggcagtttatattagatatgaccaggagatgggcactcgcagccgacaaggacgatgtggaagacaatgtctatgaaaaatactgcattagcaaggacaaatgggcccagttttatcagacatgccgagatccctcatgggaggtatgtactatggaatctgaattgctttccactaataattcagttcttataatagatcgtagaaatcattttcattaatgtttgaattttgcaagatgtgcagaananaacacaggccatccagaagcacaacactgcccctcacatgttgtctcgtgagggttatgattatt

SEQ ID NO: 43332 - DNA, 386 bp, Glycine max
  unsure (1)..(386): unsure at all n locations
agcttctcgatatattatgcacatgaatcggactctttagtgacaagttatgggccattgaatgtttcgagagcttccgctgctcaatttcgagcgtctcgatatattatactcctgaatcggacctccgagtgaaaagttaagaccatttgaatttctcgagagcttccgttgttcaattttgagcgtctcgatatattatgcgcctgagtcggaccttcgagtggcgagttatgaacatctgaatttctcgagagcttccgttgctcaatttcgaccgtttcgatatattatactcctgaatcggacctccgagtgaacagttatgaccatttgaatntctcgagatcttccgttgttcaatttcgagcgtctctatatgtgat

SEQ ID NO: 43333 - DNA, 413 bp, Glycine max
agcttatgctagaataaactgtcagctgtacatcactggaatacacaacagaagatattgagagctagtatcacagtttataactcttcttagtctagagtagactccacaaacaaagccaatgctttagaaaaattaagattcatagccacactttcttttgactggtcatagccacacttatcacttcctaagttaatacataacatcaatttagagaattaccattatagtaaatcacaaaacatgaagtacaatgtattcaatgtttcagaataataaacttcacttcgtctctgcaaacttttcaacatattaagcacacctaacagttattacttaacaaatttgggacagataaaggcattggaattgatatattaagtctaatgttagcattgaaagggaaagta

SEQ ID NO: 43334 - DNA, 125 bp, Glycine max
actacatatgaatgatttgacattctacataacttactgaacagagactattattctatggaggtgtgatgcattcgctctggcgaagcattaatgagagaccagaatctgactattagttggcc

SEQ ID NO: 43335 - DNA, 264 bp, Glycine max
taatgatattataactcaatggtactatgatcactatgtcgataatcgacactcagattggagatgatgcatgatgatttctagataaatcatgtaatttctctggctttcaagcacttgtgagaaattgaagactgacgaagaaaatgacaatatggctttttaaccacattgtcatgtcattgtttgctacactccacattgatgactattcaatgaagtcagtaatatatgtgaccttggaaggtgttgcatcaataaatg

SEQ ID NO: 43336 - DNA, 413 bp, Glycine max
tgccacccagctcgcccaggcgagcagggttgcttcctctcataagcaacagccttctggaggaatcttctggagggcccaattgggcctggttgctatttgcaccccatttttgctaagtacaccccctgcctttttttggtgattcttttttcgtaaagttacggaaacttatgaattttgtaacgatacttgttttctttccgtaatgttacggaaccttgcggattacataatcatcccctttttgacttacggaatgttacggaacctcactaattgtgcaacgatgcttccatttgatttccggtgtgtcacggaaccttacggattgtgcatcaatattttcttttgttttccggcatgtcccggaatatcacaaattgcctaatgatgggtgccacgcacctcac

SEQ ID NO: 43337 - DNA, 331 bp, Glycine max
  unsure (1)..(331): unsure at all n locations
agcttctctatatgtgatgcacctaaatctgttttccgagttanaagttatgaaccatttgatttctcaagcggtatcttttctcaatttcgagcgtctcgatatattatgcacctgaatctgacctccgagagaaaagttatgaccattcgaattgctcaagagcttccattgttcaatttcgagcgtgtcgatatattatgcgcctgaatcggacctccgagttacaagttatgaccttctaatatctcgatagctctctcgtttaaatttcgaacgtctcgacatattatgcgcccgaatcggacatccgtgtgaaaagtatgaccat

SEQ ID NO: 43338 - DNA, 377 bp, Glycine max
ataactcggatgtccgattcaggcgcataatatattgtttcacttgatattgaataacagaagctctcgagaaattcgaatggtcataacttttcacacggatgtccgattcgggcgcataatatgtcgagacgctcgaaattgaacaacggaagctctcgagaaattctaatggtcataacttttcactcggaggaccgattcaggcgcataatatatcgagacgctcgaaattgaacaacggaagctctcgagaaattcaaatggtcataacttttaactcagaggtccgattcaggcgcataatatatcgagacgctcgaaatggaacatcgaaagctctctagaaattcaaatggtcataacttttcacttgg

SEQ ID NO: 43339 - DNA, 370 bp, Glycine max
  unsure (1)..(370): unsure at all n locations
agcttganagatcccgggtagtcaaagagaagttcaagtccatagccatcanagtctgaagagagtatgatgaactgagggacgtcaatatggccaccgatgaagccttggaatgagaaaccaagaaggcccgataggaagaacacgaccaaaacaagtttcgaggggctttatagggcagcaatagtaagctcaagctccgaagaggtgaaaggaatcatcacgggtcanaggcatgatcttgaatgacgagctaaaggcttgccttatgttgaaaagaaatttgtcccaacagttaagcgagactgaagggaatgtgtgggccatcatcgatgagtgcaaagagaagctaaatctagcggcgactcac

SEQ ID NO: 43340 - DNA, 368 bp, Glycine max
  unsure (1)..(368): unsure at all n locations
tgcctcatagaggtccaggaaggacaaggcggcctatgttctagttccgccccggagtacgacagtcaccgctttaggagcgttttacaccagcagcgcttcgaagccatcaagagatggtcgtttctccgggagcgacgcgtccagctcagggacgacgagtatactgattttcaggaggaaatagggcgccggcggtgggcaccactggttactcctatggccaagtttgatccagaaatagtccttgaattttatgccaatgcttggccaacagaggagggcgtgcgtgacatgagatcctgngttaggggtcagtggatcccgttcgatgccgacgctatcagccagctcctgggatatccgat

SEQ ID NO: 43341 - DNA, 309 bp, Glycine max
  unsure (1)..(309): unsure at all n locations
gcttctttnggaatcttcttatggaagcttcttaggttgtgagcttanttatgagaggggtgtgtgtagttaagctctaccttctcaaagaaagtttctcanagaagcttctcaagggaagtttctcaagaaagcttctcaaggaagctacctagtctataaatagaagcatgtgtaacacttgtngtaactttgacgaatgagagtcttgtgagacacaactcanagttcaacttctctatctttttcttccttcaatttcgtgctcccacctctctctatctctccctctntcttttcctccattga

SEQ ID NO: 43342 - DNA, 411 bp, Glycine max
  unsure (1)..(411): unsure at all n locations
tgcttgtggagcttctatggaggctggatctttgagcttcaatgaggtccttctatggtgattttccaccatggagatgcagcggaaggcaaaggagaagaggagaggggaggcaccatccactacggaataagccatggaagaaggagcttcaccacaaagcatgtgccttggataagaaccttgaagaggatgctttaatggaggaaaagaaagagagaaggggggagcacgatattgaaggaataaaagagggagagaagtggaacttttaagtgtgtctcataagactttcattcatcaaagttacaacaattgttacacatgcttctatntatagactacgtagcttccttgagaagctttctcgagaaaacttccttgagaagcttctttgagaaaacttccctg

SEQ ID NO: 43343 - DNA, 278 bp, Glycine max
  unsure (1)..(278): unsure at all n locations
atcagtgtcttgttagatcaaagcttcaatcccttagttntaagttttagtatgataatgttgcaatgcctatcatgtttaatagatgaggcatttgtattaagtgtttatactacgcatgtgtgtgatatagtcttagtctttctcatgcttagtgattgatcaaacataaagtgaatgaagtattcttatactttaagtttcttaagaacttacttctacttgaaatntggctagcagcaccgaatatattgactgcctcgattattaattgaatg

SEQ ID NO: 43344 - DNA, 441 bp, Glycine max
  unsure (1)..(441): unsure at all n locations
tctagtatttataggccttcttcaacaagtgtttgttgtctctaaacgaataaatttcttcacttgagttgatgttcgaagattgtggccattggagcatttaatgcttgcattaaatgcacgtactccttcatgctagaaaaccactcttgtgagctttcatgtcgatcacttcaacagaaaactgcttgctttaagtcacaacaagtctatcaccaacaatgcaaatcttttgatggtgtttggaaacttctagatcttacgcttcatttatacttcataagattctacaaatcctatgagaatgtctctngcaaatgaatctcatacatagagcaataaatgaattcttaaatgccatcaattagtattgtattagatcatgtcatgtctcttttatcatctgatagtacagccacaaatgtatgatgatcaatatga

SEQ ID NO: 43345 - DNA, 365 bp, Glycine max
  unsure (1)..(365): unsure at all n locations
attctttgtcttacctttccactgctgactctaatacagattagaagatttgtttggttgtttgcacattgactaactttccatcgtcttacaaacaaatatacaaccttagcacatagtcttttctctcaagatattcaaagtattntgagagctattctatactttacaataatttacaaagagctttttacaaaatgaatttgaatatgagcgcttttttttagttcttcatgtctttaaagnctgtggtattataggctntcttcaacanatgcctatggtctctaaattcatattggagaaccactcttcttatctatcgtgttgaacacttcaacaaaaaaccacttccttttacgtta

SEQ ID NO: 43346 - DNA, 422 bp, Glycine max
  unsure (1)..(422): unsure at all n locations
ntganaatataatatcttgatttctaaaatacccattttctctccccctttggcaacataaaaaaggccaaagtgcataaaataaaacatacataaatgattctaaaacatacataaagcataatttgaatatcaccaaatttaaatacataccacttgtcatatatcatcaaaataactaagtctaagcataaaacataaacatataagtgcaaaataaaaaaaaaacatcaagttcagtcataattaactaagtaccaaatacttaaaacataaccaatgttttagagaataatgtcataaaacatagccaaatacatggcttaaacttaaaatataataataatctaaatctatgaagatggtggtggaagggtgaagcaatcaatcaagtaattcaaacatatcaaacaagaatcaca

SEQ ID NO: 43347 - DNA, 374 bp, Glycine max
  unsure (1)..(374): unsure at all n locations
taagtcacaagtgttgaatttccaatntcaatcatgaacttttggtggtggcatatcagttctttgctcatgaagtcactaaaatttcagaaacattccattggacaaccattggcactctatttatactgtttgtatggaaggactttcctccccagaaatgcaaaatttatgtgagacaaagtttccagatattcccttgagtataagttgaacccttgttctcacataatctctctcttctcaatnttcatctttattgatgatagcacagaagaccaaatctgtcaaccaaactcctttcaagtttggtttgaagaatatgaatttgacaagactagtgtaacttacagaaatcttcaggctatacacta

SEQ ID NO: 43348 - DNA, 445 bp, Glycine max
  unsure (1)..(445): unsure at all n locations
tagtcttacaagagggatctgcggacgaagcttaggttatattagtctaaacttacgagggatcgaggtttagtactttagggtacatcatagaacataagaacatgattaattagagaaatatcctcatatacattagtttgtttgttaggaagacccaacactttttacctattgctgtcaacttttacttacttgcgtttactattttgaccatagaagtagtttatttctattttaaccatccattatcaatgctattccaacaatgccttatttctgaataaaactctgtctaataagcaagttccctgagttcgatactcggatcactcagttttaattntaaatacttgacaacccggtgcgcttttcgccgaatcggaattcccttgaacatatntttataaaggaaaattggaccanaaagtaactgcaggggaaa

SEQ ID NO: 43349 - DNA, 369 bp, Glycine max
  unsure (1)..(369): unsure at all n locations
agctttatgtgagaggatgtgactcttcagatttgaatntgaatttgaatttcaacgttcaaaggcactggtaatcgattaccaaaacattgtaatcgattacaactttttgaaatcaattggaacattgtaaattcatttgaaaactttttcaaaaacattttgctactggtaatcaattacaacaatcaggtaatcaattaccagagagtaaaaactctttggtaaacatgttntgagaaaaatccatgtgctactctgtttttgaaaaaaaccttctcatacttatcttgattaagtcttctcttgattcttgaatcttgagtcttgaatcttgatcttgattcttggaagctntaatcttgaatc

SEQ ID NO: 43350 - DNA, 455 bp, Glycine max
  unsure (1)..(455): unsure at all n locations
ntctggtcaaatggcttgtatatacacaatcatgtcctcatttatacatttcattctaaaattcagagattgatgcaaagattattactcaaagctagtcgttcactcacagtttaagatcccactctcactggttttggttcaagcttttctttctcaatcaatttgtctactgactaaaaattctaattgcaagttcacattcttgttctttctttgtctaacatacacacttgctcaaactcatgaaaagaaacaccaactccatcataatcatgcattcaattcacaatcaaatcatacaccaattttcacaaaaaaatggaagtgtttcactgcataatcatcaaaatcaagtcaaactgttccatatgcttcagaatgagcaaaccaactacccataaacaaaactagtagtgtatataaacataaaagaaatatcgtactgaaaccat

SEQ ID NO: 43351 - DNA, 452 bp, Glycine max
  unsure (1)..(452): unsure at all n locations
nnagcttgttgaaatataatcaatgcaagacctcttgagagtattagtgaacatgtcctccagttggtcactagagttgacaaactcaatggtgattnttcctgagagcactttctctctcacaaaatgacagtcttctactgtgtttagtccattcatggaagaccggattagatacaatgtggagaacggcttgattatcgcanataagattggtggcttgagtgtctccaaattggaactgctggagaagtntccttagccatgtaatttcacttgtagttgcaggcatggcacggtattcagcttcagcactggatctagtgactatattttgtttcttgcttccncatgggatcaaatntcctcaaataagaacacaataaccaatcatggacttcgtggctgatggtgagtctgcctaatcagcatcagagtanaacaaatgatct

SEQ ID NO: 43352 - DNA, 456 bp, Glycine max
  unsure (1)..(456): unsure at all n locations
atgtttcttgtaggggtaacctcatgttaaaacctttactcatgcccttaanatcattgaagacatgtgctccaacccctacaacaacttaggggataggagaatcatgaagaggggcatcaaccaagtggagaaggataaatcccaaactgagttggaaaaacatatgcatgctttgagattaatgattgagacactcctaagagcctaagctcaagtcctcatcactacatctaaaatagcaataaacaccctaaaatggggggttgaataatgtgtatatcaaagatataaacttttgcaatataaaggtggatatagatagcaatatatgtgtgtgtgtgtggcaagtcgtccactaaagatacaacttatatttaatgaagatcaatatagtcgtctagtgactagataanagaaagagttcttataacagttttccaaataaacacttgg

SEQ ID NO: 43353 - DNA, 464 bp, Glycine max
  unsure (1)..(464): unsure at all n locations
agcttggtcccacactctgttcagctctctctaatctagaggtaaatctaggatctctatcagatactatgctagatggcacaccatgtaacctgacaacctcacttatatacaaggtggtcaacttctccaaggaaaatctgatattaatgggaatgaagtgagcagacttagtcaatctgtcaacaataacccagatagaatctaaacctctaggggttctaggtagtcctaccacaaaatccatggaaatactgtcccacttccactgnggtatctctatgggttgtaacttccttgaaggtctctgatattctatcttagccttctgacagactangcatgcatacacaaactcactaacctctctcttcatgttgggccaccaaaacgtcgtcttaaatcatgatacatcttggtagcaccaggatggatgctcanantactcctatgtccttcctcta

SEQ ID NO: 43354 - DNA, 421 bp, Glycine max
gaagctccttcttccatggtttattccttaatggatggcgcctcctctcacctcttttcctttgacttccgctgcatctccatggtggaaaatcaccattaaagaatcccattgaagctcaaagatccagcctccatagaagccccacaagcgagcttccatcacttaccacccactctgtcatcatgccgagactcaggaagcccaacaggtttagccttctctaagtattctgaacacaattcaatggcttcttctgcaatgtacctctcaataatagacgcttctggatgatatagattctttgtatacccttttgagatcttcatgtatcgctcaaccgggtacatgcatcgtagataaacacgaccaccacatttgatttctctgaccatatgcacaatcaagtgaatcatgatgt

SEQ ID NO: 43355 - DNA, 275 bp, Glycine max
  unsure (1)..(275): unsure at all n locations
gtcacctgcggcatgcaagcttgtgcgaatatatcactcttgctngtatttcttcatgcattctttctttctttacccactcctcacgtttgtttgtttaaggaacaacaccataactaaacgtgccacaaggcatccctatcgcaccagatccaaatctacaacgatgggtgatcaagaggagacacatgaacagatgacagccgacatgtcggctctgaaagaacaaatggcttccatgatggacgccatgttaagaatgatgcagctcatgg

SEQ ID NO: 43356 - DNA, 409 bp, Glycine max
  unsure (1)..(409): unsure at all n locations
atttggtcttcgccagtgaaaggatcgatgtggttcttataaaaggcaaatttgatcatcctactaggacgactgagaaaactggggcaaataaagagggtgaggatgagggacaaacccatgctgagactgccattcctgtacggccaagtttcccaccaaacccaacaatgtcattactcagtcaataacaaacctcctccttacccaccacccagttatccacaaaggccatccctaaatcaaccacaaagcctatctatcgcacttccaatgacgaacaccacctttggcacaaaccanaaaaacaccaacaaaaaggaattttgcagcaaaaagcctgtagggttcaccccaaattccgttgtcatatgctaaacttgatcccatatccactcaataattcaat

SEQ ID NO: 43357 - DNA, 366 bp, Glycine max
  unsure (1)..(366): unsure at all n locations
agctttgagccataatcctgactcaccatatatcttgacccanggtgagaatgtcaatccttaccctcggaagcgaaaagaatagaagggaaatttccaatcaaagaaaaggaaagaaggaagatttccaatcaaaaagaaagcaaataagaaaagaaggataattccccaatcaaagagtgggagaaagcaaaaagaaaagaaagaaaattcccaatcaaagaatgggagaaagtaaaataggaagaagaagaatgaaagaaagctcctgatcaaggatcgaaggataacagaagaaatgtgcagaaaggtctttggaccggacaatatctgaacaatacagaattgtcaccaaatgaaaaaaaa

SEQ ID NO: 43358 - DNA, 394 bp, Glycine max
  unsure (1)..(394): unsure at all n locations
ntggaacgaganaccaagaaggcccgaaaggaagaacactaccaaagcaaagttttgaggggctttatagggcagcaatagtgagctcaagctccgaagaggtgaaaggaatcatcacgggtcaaaggcatgatcttgaaggacgagctaaaggtttgccttaggtcgaaaagaaatttgtcccaacagttaagcgagactgaagggaatatgtgggccatcatcgataagtgcaaagagaagctaaatctagcggcgactcacgagcaaaggctagaggatgagtatgccaagatatcagcagatagggaagcaagggaaagggtaattgattcattgcaccaagaggcaacaatgtggacggaccgatttgctcttactttgaacaggagtc

SEQ ID NO: 43359 - DNA, 376 bp, Glycine max
  unsure (1)..(376): unsure at all n locations
agctttanattgaataacggaagctatctatatattcatattgtcataactagtcacacggaagtccgattcaggcgagtaatatatcgagaagcttgaaattgaacaacgaatactctcgagaaatgtaaatggtcatcataacttgtcacacggaagtccgattcaggcgcatactatatcgagacgctcgaaatctaaccacggacgctctcgagaaatgcaaatggtcataacttttagcacgagagcccgactcaattgcataatatatcgagacactcgaaattgaacaccgaaagctctcgagaaattcacatgatcataacttcttacacgtgagtcagatgcacacctataatatatcgagatgctc

SEQ ID NO: 43360 - DNA, 442 bp, Glycine max
  unsure (1)..(442): unsure at all n locations
tctatataagctgaaccattttatcaataaacacaagttgagttttattcagaaaattagagtttatctcttttatcttagtgagagtgattctcctaaattcttgagtgattcaagaacaccctggctgtatcaaaggactttcacaacctttgtgtgttgccctcgctggaaagagtgattctttccttcctttcatcttcacccttgttctttcaaaccacaattccagaaaattcacctctgcccagaattatctcgtggccataactcccattttacgcactcaaattaagtgattcttgagcctaaattgaatttcaaaaccagacctttcaccgcgttttggaatcacctcanttggagccctgtagcttcagttattgccaattctatatttctgtccagccaccacttaacctacgttttaccatcccattca

SEQ ID NO: 43361 - DNA, 448 bp, Glycine max
  unsure (1)..(448): unsure at all n locations
agcttgaagagaggaagtatggaagggtgtttattttctactnttattcgttgaccacagagtggtacctgtagatatgtcgcggcggtcaggagaccttgnggacgtcaggtggngtgctattgcccaaaaccaagcttgaccaatcctgacccaactcgggcatagtcagtcagtgagaacctgtgatgtacctaaacaggggagctcctggcagtcaaccgataaaagaacaaagaccacaaagcaaggaggcttgtgtggtggctggccagctatggatcttgagtaatatgtggaatatagcctctggtaatcgattaccaagggtgggtaatcgattacaacgcttaaaaatgaagacaggaagttaagatggtctctggtaatcaattaccaacggtgtgtaatcgattaccaagcctaanaatgggatcatgagcgtgag

SEQ ID NO: 43362 - DNA, 223 bp, Glycine max
tttgaatctgactttcgaggtatctatctgggggaatatcgcctgttaacataacaattgttacttaattgtcgcttcttcgtaagagaacatcattggtgcaaccaaaattacgacccactgtgtgatcaatcgctagactgaggagaccctacatggggaaacgcctgcgtgttaacataacgcgtgacaggacactgttatacttgactactcattgtga

SEQ ID NO: 43363 - DNA, 449 bp, Glycine max
  unsure (1)..(449): unsure at all n locations
agccttgacttaagtcatcaagagattatatatatgtgaccatggcatgaatntcatatcatctttttaaaacatctctttcaacaatcaagaaatctatctttcaatcttctctctcaacatcattcaactntttctatagaattntctgattctttttctcttcatctttctaaaagtttttgttcaaaaatttctcttctaagataagttctttgttcaaaaacttgtgctattcatctttntcagtctcttctccctttgccaaaagaatgaaggactaaccgcctgagaattcttttatggtacaagttgagggtacatctacttgnggagggttatactaagaacaagagagggtacatctcttgtggatcagttcaagtggagggtacatccacttgngttttcaaagagaacaagggaggtacatcccttgtggatctttt

SEQ ID NO: 43364 - DNA, 371 bp, Glycine max
  unsure (1)..(371): unsure at all n locations
ntcactcggaggcccgattcaggcgcataatatatcgatacgctcgaaattgaacaacggaagctatcgagaaattcaaatggtcaatacttcgaactcggaggtcctattaaggtgcataatatatctagacgctcaaaattttacaatggaagctctttggctatacaaatggtcataacttttcactcgaaggtccgattaaggcgcataatatatcgagacgctcaaaattgaacaatggaagctcttgagcaattcaaatggtcataacttgtcactcggaggtgcgattcaggcgcataatatatcgtgacgctcgaaattgaagaatggaagctcttgagcaattaaatgggataacttgtact

SEQ ID NO: 43365 - DNA, 375 bp, Glycine max
agccttgatgtaacatttggagaggttaatgattcaactttatgatgcgctccatgagaggttggatcagatggagaatagagaccatatgaattgctcaagagcttccattgttcaatttcgagcgtctagatatataatgcgcctcaatcggacctccgagataaaagttatgaccatttgaaatgctcaagagcttccattgttcaatttcgagcgtcacgatatattatgcacctgaatcggacctgcgagtgacaacttatgaccatttgaattgctcaagagcttccattgttcaattttgagcgtcacgatatattatgcacctgaatcggacctgcgagtgaacacttatgaccatttgaattgctc

SEQ ID NO: 43366 - DNA, 316 bp, Glycine max
  unsure (1)..(316): unsure at all n locations
cgcttgagccanaatcctgactcaccataaaccttgacccattgtgagaatgtcaattcttaccctcggaagcaaaaaaaaaaaaagggggggagagggaaaatttccaatcaaagaggaagcaaaaaaggagagaaggaaaatttccaatcaaaggaaaagaagagaggaaagggagttcccaatcaaagagtgggagaaagcaaaaagaaaagaaagaaaattcccaatcaaagaatgggagaaagaaaaaggagaaggagaagaaggaaagaaagctcctgatcaaggatcgaaagaaaacagaagaaatgtg

SEQ ID NO: 43367 - DNA, 459 bp, Glycine max
  unsure (1)..(459): unsure at all n locations
agctnntactacataaattgatttatcaccagtgtttaanaaaatcaaacaatcagaaaatggaatgatatactcactttggttagcagctcactttctgttcaagcataactttgaaaggactacagatgcttgatcaccacccanaagaaaataatgatgttgtagagcagcatcggcaaataagaaacctattcttanggaacgcctctcggaaacaagctttgttgctaagtcccatgctctaccataacactactatctaaaaattggaattcaggtangaggcgagtatagtccctctatttttcanatcatatccacaacttttcagttacaagttaagattcttcaaaacaacaagagaccttaagcttggtgtntccatttgcangagtacaatcctaactgaatacttatganacanatcgagtctatttaactgcatcaataatcaca

SEQ ID NO: 43368 - DNA, 320 bp, Glycine max
  unsure (1)..(320): unsure at all n locations
ntacccttcacttgcaataaccacttctcataacaacagcacacactcttctgctagtgtccacaacaatctccttagtccaaaagaaattcataatactgttgtatctagttcttctaaactttggcatcaaagactatgccatcctaacaaggatgcactatcaattgtactaaataaatgtaatataccctttatcaataaaactagcagtgatttttgtaattcttgctctatagccaaatctcacaaactaccctcttctccctcttctactgtttatactgcacctcttgaattagtattctttgatgtttggg

SEQ ID NO: 43369 - DNA, 577 bp, Glycine max
  unsure (1)..(577): unsure at all n locations
aggagcggctgatgcatcgagtcccgcgatcctctagagtcacctgcggcatgcaagctntgaatgaactggcacgtgagtcacaagctaagattattctactccaatcatgatcctttggtggtggcacatctcatatttgctggtgcacacactataatgtganaaccatatgcattcgccgaccggtaggcgctacgctctatacctgcttgaatgagagagacttttcttggcatggatgcaaatactatgtgagactgatgttcgagacattccgttgagtattactcgtaccttgatgtgcggatatggctcctgactcggactcatccctattgctgatcgctcagaagacatgctgattgtaccagactatcggtccctgtcgtgatgaaagtatgatggtgacaggactattagtacttacagagatcttgagcgtatcactattatacgtgtgcactattgatgcacaangttactgtatatgtantgcaagcaggagctgataaccatatgtgatcggacatagagatcgtggacaatatatcttcgtactgtgacagtagctaag

SEQ ID NO: 43370 - DNA, 86 bp, Glycine max
tatcattgcttttactacaatgccttactactgaataaaacactgtctaagcagcaagatacctgagtactatactcggatgacta

SEQ ID NO: 43371 - DNA, 353 bp, Glycine max
  unsure (1)..(353): unsure at all n locations
agcttgtgcaaatcanatcactccntacatttatctctatcatgcattgtatgttggtctcgtcctttgtcacgggaagccggaaggtccatatcaccttcttaattgtacacatggngcactacgcccncaaatgcgcaagtaagaagagataattntccgggctctcgtgtccgtaaaatgcattcatatcatgcatcgcataagcatctcttcataacatcataatggacatatcctgcatntgtccgttatcatattccagcctcacantttgcatgagtcatggcatcatcatgcatatgcgttcaacanactnnttgatctgcanaatcgcataccatttgtttcat

SEQ ID NO: 43372 - DNA, 443 bp, Glycine max
  unsure (1)..(443): unsure at all n locations
gcttgaaaggatgcttcaatggagganaaaaaagagagagatattgagagaggggggaagcatgaaattgaaggaagataaagggagagaagttgaattgtgagttgtgtctcacaagactctcattcatcaaagttacaacaagtgttacacatgcttctatttatagactaggtagcttccttgagaagctttcttgagaaaacttccttgagaaacttctttgagaaaacttccttgagaagctagagcttagctacacacacccctctcataactaagctcacctccttgagaagcttccttgagaaaattcctaaagaagctagagcttagctacacacacctctctaatagctaagctcacctccttgagatgagaagctagagcttagctacacacccnctataatagctaagctcacccncatgacaaaatacat

SEQ ID NO: 43373 - DNA, 354 bp, Glycine max
  unsure (1)..(354): unsure at all n locations
agctgaatctgacagctgcatggaatgtcttttgttctcttctatggatggagcaatgcaggatttcacgtgagcatgtatatgccatctggaccagtggagactgttatgccatatctcctaataagggctgaacagaatagaggaatgttggctgcttcgggctatgacaggcaactgatgaggtaacaaaaaaacattttaattatattaaccacttttcattctggcatcatgcacatgaatcacacattgtgatgtgtatgcangaaggagtcgtgaatgagactaacagctgctgtcttttaattttctatactcttatgggacgagttaatgagatgtgataatgtc

SEQ ID NO: 43374 - DNA, 364 bp, Glycine max
tcaatctaagcttcaaaccggcgatgaatcctcctccccacagttaattatccattggagttgcccctgttgcttaaacatcccactctcctcgaccccggaaaatatcaatgccttgctggcttcgaagccaactctgaaaaccatcttacgactcaccggaaaccctacttcaagactaatctgcattaacatcatcatcccacacattgtcctcacgatcctacacactatagcctattcttctcattcaagatatcatacaacccttcaacttcggacatagcaccattccaccttctaaaaactccacactatcccttcacacttagaaacccataaatttttcttatcacatcaacaa

SEQ ID NO: 43375 - DNA, 355 bp, Glycine max
  unsure (1)..(355): unsure at all n locations
ttctgattctgttatacatttctgactntatggcatgagatgaaattcanagattggacctctagctagttgttattaatgaataacttanacacttgcgcttgagtgaaacagtagccgtgagagtgtggtttaagctactttccttgatatttgtcttatgcctaactccatctatttgttcaagttacatttcattcttttctttggataactgcataccttgtgaaagacaagtgatgaggggcatttacaccattctcctattatgcaatcagtaacctttgttgcatacacctttgtatatagtcactgcatgtcattgtcacttgaggacaagtgagctgttctcttt

SEQ ID NO: 43376 - DNA, 203 bp, Glycine max
  unsure (1)..(203): unsure at all n locations
tatgactcttattggaaagacaatctatacatttatcatttgtattcanaaaaggaaatatggttggatttgagtgcatgtttgagagtatgggatgctgggtcgaccaactccttggtgccatagtttgatggatgaattggaacacatgcacgaggcttattggctgggtgcaactgggttaaacctggacacattgtctt

SEQ ID NO: 43377 - DNA, 402 bp, Glycine max
  unsure (1)..(402): unsure at all n locations
gagacgtatgtganactttggcatcatcaaaacattcatcttgatcctttgtctacaatctccccctttttgatgatgacaatccctgaaatcaagacaagctatatacaagatgatagtacgttcacacaacccttactccccctatcttttggcatgtatgcctaactttacttgataattgatttctaacccaagttctctcccactttggcaacatcaaaaagaactaagcaacacaatcaaaatccaaacacagccaaacattaaaccaaaataaatccatacattgtcataaccaaccaaagtactaataataatagtgcaagagtactataactagagcaacaaaaagccaaatacacggcgataaaacaaagtactaataatacttaatttcta

SEQ ID NO: 43378 - DNA, 308 bp, Glycine max
  unsure (1)..(308): unsure at all n locations
aacaacaaaagtatntntatctttgaaatgccatntgcctcttttgaagctcttataatctactaaacctatgctgttaaacccaaatatcttgttagcagtggttgttatgcatttntatgcctgtaacttgtttcctattctaaattgcaggttcttgtggaactgtctatcatgctctgtggtatggatcagtatgttcttttctcttcctgtaattacctggtttagtttcatgcattataaaggatattctctaagcaatttaccataacttaagaattctttgatatcccgtcttttccttc

SEQ ID NO: 43379 - DNA, 408 bp, Glycine max
  unsure (1)..(408): unsure at all n locations
ntgtcattcaatagtaaccgganataaataagcatgtgttgtgaaatatatttgatatgaatgaatgtttgtgctgtatcaaccttatgacccagtatagaatgcatccaaaataccaactactaactggagtttcaaaatgtacaagcgaacccgtaagaccaattaagaaaaggttggccatgacctgtaagagattttcatttcaggtcatggtactatatattattattcagattgaaacaaagcaacctaattaagtgcacatgttatttgttaattgcaaacctaccgacgtacccttacaaatttacaactctgatagagtttattaacctacttaccagttcaagtgacaccaacttacatcgtacaccatatattcctttcctcaacaacattattatt

SEQ ID NO: 43380 - DNA, 360 bp, Glycine max
  unsure (1)..(360): unsure at all n locations
agcttccacaaacattcactagtccaacactcatctcatatataatcatcatcagtccatagtttcaaatcaatcatgctcagtatgctgcatgcacctgacctcaactntcaaatgtaatgtggtaccatccccaaggaaatagcctaagcgtgtccacatgacactctcacttaagaaaactatgcagtaagtttcgaggccaccctgtcgtgcacaggcaactccaccctccacggtgatcagcctgagtctcaagggagtttcaaaccgagtgacacactcgctagtacaagtatatctcctcacaaggaactacaagtacttactggcaaagttatactatttctgcgtatatga

SEQ ID NO: 43381 - DNA, 398 bp, Glycine max
tgctgatttggtcttcaccagtgaaaggatccatgtgtttcctaagagaggcctatttgatcatcctactaagacgactgagaaaactggggcgaataaagagggtgaggatgagggagaaacccatgctgtgactgccattcctgtacggccaaatttcccaccaacccaacaatatctttactcaaccaataacaaactttctccttacccaccacccagttatccacaaaggccattcctaaatctaccacaaagtctgtctaccgcacttccaatgacgaacaccacctttagcacaaaccaaaaacaccaaccaagaagtgaattttgcagcgagaaagcctgtagaaatcaccccaattccagtgtcctatgctgacttgctcccatatcta

SEQ ID NO: 43382 - DNA, 489 bp, Glycine max
gcttgtgtcgatcccacatgagtgaagctttctctgcaaacagtgtgaccctgataggtctccctacgactctacctagtgagagtgacctgacttactagtgtgtggtctgtcttgtcatgcactcctaggtacttgacgaggtttttcactgacatggtaccacattgcatataggattcagtcttagtgtatctattgcataacgcctaagtaatgatcattgtgacttgtcacgtgatggtgggtaatgaattgtgtgagtatgaaatgttgtgttgcacttgagatacgttgttctgaacacgtgattaatgtgaaggtgtggaatgtgattttgtgataaatccttggaaaagaatgttcccaatgagtggtaaatgatgcaagcgtgtaatttgagctcgtatacttatatatatatatgtgccttctttatctcacttgttaagaatatgatactcactcttatgtgtgtcatgtttgatc

SEQ ID NO: 43383 - DNA, 443 bp, Glycine max
  unsure (1)..(443): unsure at all n locations
tcanaccacagcaacacaaaatctaggtgtccaaaacctctcaattcaatggcttttctaggcttgaaaggtggaatttaaaatgaggtaaatttggagcaaactctcacctcacacaagtctataacatcaatctaaacttgctcaaactggatttacacctaaatttccaccgaatcaaaatttgactcctcaacacccaattttgccctagaaatggctcttggttcactttggtcatttgtttttctctctagctcagcctaacctttctcacatgtcctaaatgacatttcaagctattattaactcactttaacctccatttaccacagaattcagacttagccttccaactctcaaagactcactctttgtattccactcataacatcacattctcactgtctaaccctacgctagttctacccttcatctctaac

SEQ ID NO: 43384 - DNA, 370 bp, Glycine max
  unsure (1)..(370): unsure at all n locations
caagcttgcccagaaaggaatctacggagganatgcttaccacctcgaaagactggaaagtggtttctaatgactcctctgcggcctccacataaggcatagaggatgggcaactcaccaagatgtcttcctcgcctgatacgatgaccagatgcccttccactacgaatttcaacttttggtggagtgtagagggaacaactcccactgagtggatccacggacgccccgacagacagctgtagggggggttaatatccattatttggaaggtaacttggcatgtgtgagggcatatctgtactgngaggttgatctctcctctaacctctcggcgggtgccgtcgaaggcacgaaccaccattgaact

SEQ ID NO: 43385 - DNA, 431 bp, Glycine max
  unsure (1)..(431): unsure at all n locations
gtttatccatgatatcctatgatggtgagcttcttcttgtttcatcttctcattgttgtggcgtgtccaatcatctttcttccttctccattctgctgccattgaacttcaagaagcaaagaactccattgatgaagaagatccaaggcctacaagctccacatggagttacatcacatgcatatcatactctgagtgtagctagtaacaacacacaacaaatgataatttttgggaggatgatccaaaagtttttgcttcatacacctacaacaactaagtcatagtagagaagaagagtcaaagtctttcaagtatcatgtatttggcagtttttaaggtcaacatagctgaatctttntctgcaacctttatatgtttgattgaagaacgaaatgttgaatactctanatcaactcactttttaattt

SEQ ID NO: 43386 - DNA, 398 bp, Glycine max
  unsure (1)..(398): unsure at all n locations
ccgcttgtcattatttctntaacaaattagtattaatcctactacaaaactgcttanatgtaaaagttgaaaaaatgttatattgttagataacaattcttgtgagatgaatcactatttggttggtgttgcttggccaaggttttaatttccgtgctgaagttgaagaatataactgtaaactatatataaactcactcacaatatatgctttgttttattcagatggggaagagggcatctcaatttttcccttgaggggagggtcaacttgcaatattagaattatttggattacggacatttcaacttcttaaaaaaaatattgcatcctgttggaaggtttggtatttaaattagacaaaatattttcctttnttaacgtaaatgatctgaaa

SEQ ID NO: 43387 - DNA, 414 bp, Glycine max
  unsure (1)..(414): unsure at all n locations
agcttgtaagaaggttgcagtaacaagcattaattaacacggtaggagaaatgatcatttgttctttgatactcacaaaacaattaaatataaataaaaaatattcagatcagttacaaaaatgactnttatgttcttttctttttcttgtttttactgtcttcttctcanaatattaaaataaaacgaaacacaattcaagtattgctttagtgttntcaaaccattgaanatttacaaaactacaaagagataagcatggtaatacatcaaattagttcttcanattacaagcatcaattaatntaataattcaacatngtcatttagtctctaaaataacgacaacattaattttttttaaccaccgtaattagaaacctttgctttctagtgaaacctcaaatattccac

SEQ ID NO: 43388 - DNA, 362 bp, Glycine max
  unsure (1)..(362): unsure at all n locations
ntatgttgcgctatcagctccagatcgtgtgacattcgttaaccaatgagccaaaaccaaatttgcgaaaaaaaactaggaaatacaaccacctttgaatagcttcaagacactctccttcgaggtcatgaagggtggacaacaagtcgattaaatgatgggaaatgatagatgattatggcatcattgttttgaaggtgttgttgttccaacacagtgagcaagataatgttccaatgcagtattgtgagccgtttggattgaagacaactacgacaaaattggaaaaacaagatataaaagtaaaaaaatcttaacccttgatttaaaatcaaataaaatccactgatccatattttttt

SEQ ID NO: 43389 - DNA, 403 bp, Glycine max
  unsure (1)..(403): unsure at all n locations
tatgcatgtgaattaggacgcatcaacaagaatcaagccaaggctattgtgcaagcaatcaatggggcaaaacacaccaaatgattatgatgatggatggctcanattctcacaaaggtaaactcatcactttcaaattaagctttcaaaactatcatgacatgtagaggagaatcaaggatttcaagtcacanaatgtcaaaaacttttattttcaaaacaattacccatttcttgaacatatcctataattcaaagaanaacatgcaaagtcgtacatgcacacaaaatngacccataatattaaactaacaatccgacgaaactaacaacattaacanattaacanaaccaagaaaactagcanaaccaaagaacactcctctcctacttaaacaacaca

SEQ ID NO: 43390 - DNA, 277 bp, Glycine max
ttgagccaaaatcctgactcaccataaaccttgacccatggtgagaatgtcaatccttaccctcggaagcaaagaaaaaaggagagaaggaaaatttcctatcaaaggaaaaaaggagaagaaaggaaattcccaatcaaagagtgggagaaagctacaagaaaagaaagaaaattcccaaatcaagaatgggagaaagaaaaagagaatgacaataaggaaggaaagctcctgatcaaggatcgaaagaaaacagaagaaatgtgcagaggggatc

SEQ ID NO: 43391 - DNA, 397 bp, Glycine max
  unsure (1)..(397): unsure at all n locations
agcttcttccaataagtatgcatcacagtttcacgtgttctacttgnggtctatgaaacttaaccccggagatggaattaatgcttgatatgagtttttttcacgttatatatcatatccacgaatatagtttggtatctatatgtgtaatggcttctattttgtcacttataattctgcataacaactctgtatttctggtttgtttgaaaagggatgcaaaaatcccaacagattntaaagagagaatattgaactggtttgactttgtggttaaggaaagcgtgcagtaccttttatttggctgccttgtaatcctaattaaatggctattatttaatctgctatgtagcattgatacacttatgttggagacacatgcaagcatacacttatg

SEQ ID NO: 43392 - DNA, 424 bp, Glycine max
  unsure (1)..(424): unsure at all n locations
tatcctcctctanagcatggaagcctaatgccgagaaggattttgatgccatgtattatattctttaagctaatagaatgtattttctattttaaagaaaaagcttaaaaatcactaatttattttctttaatgcattaggattgttcattttcatttctttttccaacttttgtttctataattaaaagatgatagcaattcttctatttgcagaaatgacttaaatgtgaaggtgtcaaacatcaaaattcagggtgtggggcataaatatatatgcctaagatcacattattatgtaatcaattctaatttttataataaagtattatgtttctttattatatttacactatttgataagatagctattttgataaagtcctttataattgagattatgaaaatgagaaacaagtctctta

SEQ ID NO: 43393 - DNA, 374 bp, Glycine max
  unsure (1)..(374): unsure at all n locations
agcttcttcttacgtctntaataaaacgagtatcgtgtttgacatgttattgatttcgtcgcttctcatccagattccattgaatgtgttggtttctcgcgaaggtatgtgtcataattaataaacttcttatagcttgtgtgtatgttcagttttgcacattntcatgtccacaataagcttctcattcagatntcattgaatattntggtttctcgccaaggtacgtgtcataattaagaaacttcttatagcctgtgtgtatgtgcagttttgcacattatcatgtccatgataggcttctcatccagattccattaaatgtgtnggtttctcgccaaggtatgtgtcatataaatntcttatagcctatg

SEQ ID NO: 43394 - DNA, 424 bp, Glycine max
  unsure (1)..(424): unsure at all n locations
tcaggctgctcaattgctccaggttgctgcatggaagggcaaatgtctgtatggtggtcagcagaggagcacaaaccacaaacccttgcaacaggtatagatttctgattcaaggtgtcgcaacctacccttcggcgggagggcgacgcgagactcgcgggatgcgtgttccacgaaaggaatacgcgcggattcgccaccaacgtttatttgaggaaaacatcggaaaaactggaaaagacgcgatctacgaacttttaagtgaaaggttcgggagttgtatttacgcacggngaaggtattagcaccccacacgtccgtcccaagggacggcagcctttaatcgaatgtgcaaacatgactntgatttttacgttcccttttatgtctttatatcctttatacnccttttatatttttctct

SEQ ID NO: 43395 - DNA, 512 bp, Glycine max
  unsure (1)..(512): unsure at all n locations
ctacagtccagtgtgtggcatctcatttgctatgataaatgtctcgtagccatgatagtcgtacatatgccacatgacaatgtactgtctcaactttggcttcatttgcactgacttcaagtaattccactaacatcaacaccgctntgtcgacatgaagagtctcatagctgtggaagacacctgtgatgggcagatgaagcanagaggccacatcatcgagggtgatgatgacctatcctactggaagatgganattgctagtttccttatgtcacctctacgcanaagacgatataagttcccaatcgccagtgtgcaatgaacatgtgatcagaagaactaatcgtatggtagcaactaacccttcaatctctatagcanggcctcctaaattctgatcccttccttcatgggaggatagcttcaattcaagatgttccctaaaaagataataatttaacaaaaatatagatactattgaatataattatttaaactataatacctct

SEQ ID NO: 43396 - DNA, 151 bp, Glycine max
  unsure (1)..(151): unsure at all n locations
tgagcgtcgctcatggatgtattatctttactggtgtcttgtgtggtgcagngtctcaatatatatggacttgtggatctggctacgtgcctttcttgcttatcaccatatcaaggaaagcctgattgttgctgctgttacacgatatata

SEQ ID NO: 43397 - DNA, 431 bp, Glycine max
  unsure (1)..(431): unsure at all n locations
tgaaccatcttctaatagttctgacttgcagcagcctcttatccctcttccatttcctcccagagcaattccaaacaaaaagatggaagaagtggataaggagatcttatagacctccaggaaagtagaggtgaatatacctcaagcaaattccaagatatcccaagtttctaaaggagttgtgcacccacaaaaggaagcttanaggcaatgaaaggattagcatgggcagaaatgtgtcagcattaataggtaaatnntgtcctcatattcctaagaaatgtaaggacccangtactttctgtgtaccttgcattatngggaacaccaaatntaagaatgccatgctagatctangagcatcagttagtgtcatgcctctgtccattttcaattctttatctcttgaacctttgcaatctacagatgtg

SEQ ID NO: 43398 - DNA, 423 bp, Glycine max
  unsure (1)..(423): unsure at all n locations
tttcttctagaggaattcgacaaggagttatgctttctacttacatttttgtattgtgcattgagaggcttttccttcttatttctatagctatggaccaaggagtgtagcgtcatattcatcttagtagacatggccctcctataacatatttagcctttgcatatgatgttattctatttgtgaaggctatcctagagcatgtccatgtgatgaagaatattctaaatctattttgcaagagctccaggtagaaattaagcttagagaaatctcgcatgttatttttaaatattgtgggaagaaatctcaagcaacatttgagtgatgctatatggatgtagtggacagaggacctangcaattaccttgtgtcccaaattttcatagnaggccctcatgaattaccttctagtttattat

SEQ ID NO: 43399 - DNA, 340 bp, Glycine max
  unsure (1)..(340): unsure at all n locations
ggatcttaagcaccgctgctgcagctntcactcggtgtccattaggcgtctttatatcgagacgctcgaaattgaacaacggaagctctcgagaaatggaaatgatcatcactcttcactcagatgtccgaatcagacgcataatatatcgagacgctcgaaattgaactacggaagctctcgagaaatttaaatgatcataaattctcactcggatgtccaattgaggaacatcagatatcgagacgctcgaaantgagcaacggaacctctcaggagattcaaatgggcatagactttcagacggaagttcgattcaagcacatcacatatggagacg

SEQ ID NO: 43400 - DNA, 426 bp, Glycine max
tccgttgttcaatttcgagcgtctcgatatgtgatgtttctgaatcgaacctccgtgtgataacttgatgagaatcctgatattggccaaatacaggcgataggcccaagtggagaatggcgaacgcccaagtggagaacgataaagcccccgagtgtagatggatgaaggcccaagtggagaacgatgaaggcccaagtggaaaatgatgaaggcctataggcagagacactatcaagactattaattgttgctgaaggcccagattaatttgaaggcccaagttaaatatatgtttaagctataatctttattcattgcaattgtggcccacactatatagaagacccatgctctattttatctttttcgtcacatacactataagtattggtttttgctctgaataaaaaaaaacttttggca

SEQ ID NO: 43401 - DNA, 391 bp, Glycine max
cactcatgggtgtcagccatgaagtaagtctcattactcttgtgctgggtaaggtactaatagcccattaataatcatatgtaagcgtacgttgtcctacgcaaaaatcaaattaaaaatgtccgcacgaaatgttgaaacaaaacatattgattagtgattagttagtttaccataacgtaaagtcaagtatggcgagcacatgctgattgccaaagcctccctattgttcttgtcatagagtttaggcgcgaggatagatgtaagattcagaacttataagcttttacgccgtaattatctcttatgtagaattgatgaaccgtacaagcgatactttttccaataaacatctatgtgtatatatgtgtgatgtgccaacgtgttggag

SEQ ID NO: 43402 - DNA, 402 bp, Glycine max
tcgcctcgttcatggcactggaggtctggtcactcttttttattttcatacattgcaatcatatatgctcatgcacatgttttttgaaacgataaataacttataataatacttattattcttatcaataaccatgttttctattgaaatatctggtcttgtttttgttgttttgcaattataggaaatgataacgaccatgcatgcctattattttgttcctattaatgtcgccgatccttgcttgatgttttctcaaatgcagctatgttagagttcaatgaatcaggtagctccaacaacagtcttggtcagaaacttgcaaaaccctcctactcaatttctgaaacaactagtttagaacatatgttttggcacgttttatgcaatggtagtaatttg

SEQ ID NO: 43403 - DNA, 405 bp, Glycine max
  unsure (1)..(405): unsure at all n locations
agctttatgatgctaaagtgttagcacactttattgcttcaagaataattcanagttaagcaaatatgattgattcaagatgaattcaagatcaagcaaacaaagattaagagaaagataaggcttagtttatgtgttaaaagaatctcacatcggttcaaaaataaatgtttntgcactggtaattgattgccaggaattgtaatcaattgtcagagacagattgcaaatgggcttttcaaaaaggattntgaaaagttttaanatcttgtaatcgattaccaactgcttgtaattgattaccaataacaaatcttcaaaanataaccttcaanagtcatgacccttcaaaaacataattgtgtaatcgattaccaagatgctataatcaattactagtgagag

SEQ ID NO: 43404 - DNA, 229 bp, Glycine max
gctacctgcctttcttgcttatcaccatatcgaggaaagcctgattgttgctgtgttaaacgatatatatgatacgttcgaactgacatgtgagaagaatagtgcaaggattatttgttgcacacttgcactatatgtaggggtggtgtcccatgtccttaatcatggaagcagatttgtctggcctctacaaggtcatcgcatgtgcttgggaacaaacaaattaaat

SEQ ID NO: 43405 - DNA, 429 bp, Glycine max
  unsure (1)..(429): unsure at all n locations
agcttcgaattanatcatgttatatactctctgttctattgatcctaatcctgaaaattgattcttgtttatatcatattcgttgtttattttgcagagcttctacctggaatcagggaagatgcagaagctggaactctgcctgctaatgttgttgcgggaatggaaggattctacaatatataactataaaaatgcagtaagtntatattctatgtcttatattcatatacacacatgcattgtgatatccaaacttttcataatatcggtggtgtgggaacagatattagtttactcataattcactatgaagctgaactcagaaaatcacgtgtttcaagtatgagaagattgcgtctattggcgctgtcatctattcttgttcctttactttnttcatgtgttgattcatagttgggtataata

SEQ ID NO: 43406 - DNA, 542 bp, Glycine max
  unsure (1)..(542): unsure at all n locations
cggaacaccntttgatacactccgctcagcagtgtccgcngacactatacgaatacctcaacgctggcatgcgattctcagtcgacatcgtagagtgatagcagcgatgttctctctcgtctactctacatcctgatgaagttgtgctattgacgactgcctactggctctctctactttctatanctcatcgacacgcagaacgactcgccgtatacatcttatctaacttgggcctactatgacatatgcagccgttgcatctcctgttatagccatctgcgagagctcttctctccatgagcgcagccattacgaaattgtaaacctatctgcatgactcctgcccaaattaacctacataacacacacacgtgactctatctattgtgggaagaataatccgcagcattagactgatgctatatggatgctagggacacaagacctaggcgattacattgtgtgccagattatcatgaaatgccctcgagcaataccttctaatatattatagacaaagttcaccaggcgtgcgacgn

SEQ ID NO: 43407 - DNA, 382 bp, Glycine max
  unsure (1)..(382): unsure at all n locations
tgcatgcacnctatacactatgatgcacaaccttattcatgtacaatatgagataaaagcccaatattaatttaagaattgcaccaacagtaccacaggtactgtgtctgaacacattttaagaaacatgctaatgaatntaattgtttcaaggcggtcaattagcacggtgaagttctaactttattttcaatgcatatttatgggatccaaccgagaatgtccatttcaattggttgtacaagaagcgtgagtgaatgtaaacctcctaatatccgtcttccattcctacggataaaaaaataaatccaagaaagtttgaaaaacatatttattctttataacttttatgtgcctccattgactatgttnttatatgtat

SEQ ID NO: 43408 - DNA, 423 bp, Glycine max
  unsure (1)..(423): unsure at all n locations
agcttcatggccgaaaattcgaggatattcacgttgagcctcgttcttaaattggtgccccatanaagaatgaaaataagaatcatcaataaacaatatatattagatataacttatgtttgactaccaaatttacttgttaatgatatttaattagacatattatataattatatgtataccttgccttgccaagaactgagatcggtgtggcagattgtggtgaagaggatcttgattcgaacctccattntctgaggaggatgaacaagaacacgttccaccacaaagggctctccatgaccatatgccacggcagcttcatcataataataataataataataataataataatattgagctatgagaatgagaatttgtgcgcattctgtacgatagtatgatctgaatanataatat

SEQ ID NO: 43409 - DNA, 387 bp, Glycine max
tcaggtctgcttaatataacactttttagtttactatttcttaatttcttcctgctattagtgcaaaccattttgctatgttttgtgtttttttgttcgtgttgtggttttgagtttgaaagttgaacggttgtgcttagctttttgaactttacggtatgttgttgttgttggatggcactatatcacatgaatgcatttggtttgcaacctgctgcgtttgcaaggggttgtgaagcgaatttaataataaataaaacaatgttttctctctggctctctttgtatatttattgaaaaactatacaatatttatagagtatcttcaataatacttaaaaaattaagtattatgataaaaaaatttttacataagtgacttaatga

SEQ ID NO: 43410 - DNA, 278 bp, Glycine max
  unsure (1)..(278): unsure at all n locations
ttattgtgaccacagagtggtacctggagatatgtcacgggggtcaggagaccttgnggacgtcaggtggggtgctattgcccaaaaccaagcttgaccaatcccgacccaacccgggcatagtcggtcagtgagaacctgtgatgtacctaagcaggcgagctcctggcagtcaacagataataggaacaaagaccacaaagcaaggaggcttatggtggctggccagctgtgaaacttgattgatatgtgagatatggtctctggtaatcgattac

SEQ ID NO: 43411 - DNA, 357 bp, Glycine max
taggcccaattgtagagtttcttatagccataaaaggtttacattatgcttgtcacgtaaatgcctgggcgctcctccactcaccaatttcctagttggaaatcaagagggcatggtcgtaccaaatccgaaccacttggagcatcatcttcgcatattgcaacgacttggccttcgtcccctagacccgtgcttataaagctcctacttgtgtggaagggtgggcttccttcgtcttcttgtcttaatcgtgagccttgacctgtgcttttccttcccgcgatgcttttccttatatctgcttgtgtgggtttgtagcctaacccaaactttccacgatttcctttggcacttatc

SEQ ID NO: 43412 - DNA, 384 bp, Glycine max
  unsure (1)..(384): unsure at all n locations
tttcgagcgtctcgaattattactggactcaatcggacttccgagtgaaaagttattgtcgttagaattagctgcgagcttcggttntaaatttcgagcgtctcgatatattacgggactcaatcggacttccgagtgaaatgttattgtcgttcgaatntgctacgagcttcggttntaaatttcgagcgtctcgatatgttacgggactcagtcggacttccgagtgaaatgttattgtcgttagcatttgctgcgagcttcggttttaaaattcgagcgtcacgatatattacgggactcaatcagacttccgagtgaaatgttattgtcgttagcatntgctgcgagcttcggtntataatttgagcgtcttatatatta

SEQ ID NO: 43413 - DNA, 279 bp, Glycine max
aaacacacaaggacaacccttcctttgtgtttagagatcttttacaacaagagactcacagtctcttaatcccttagaaatgagaagaagaagaggaacaaatctctctagaaagagatggagtttacagactgagcactcaattaattccttaatgaattgcaactgaattggccaaggaattcttaagaggatgaaatgaaaatgctttttgagaggatgaaacactatgttgttctgaaaatctctgagcaatttcgtgttaagtcacatatatat

SEQ ID NO: 43414 - DNA, 411 bp, Glycine max
  unsure (1)..(411): unsure at all n locations
cgcgggtctgggagacagatgtcaagtgttcgcgatatgcgaagatgatgctccgagtactttggatatagtacgaccatgcnctcctgatttccagctgggaaattggcgagtggaggaacgccccggcatttacgcaacgagcataatgtaaacctttacggttttaaaagctctatagttgggcctaggctttagagtttttccttttgttaaggctntgtgtctttagtttttgaatatataatacaaggatctttcttcatctgttcctggtctctacccattctcattcagttgcatgtttacttctttttctgaaacggcagatccgatgacgagtcccccgaaggtactaatacctgggacccgcctatcgacttcgagcaagaaatgaatcaaacgggagat

SEQ ID NO: 43415 - DNA, 368 bp, Glycine max
ctgtgatgtacctaaacaggcgagctcctggcagtcgacagattatatgaacaaagaccacatagcaaggaggcttgtggtggctggccagctgtgaattttgtgtaatatgtggattatggcctctggtaattgattaccaagggtgggtaatcgattacaaggcttaaaaatggagacaggaggcaaagatggcctctggtaatcgattaccaaagggtgtaatcgattaccaggcttgaaaacgaagtcaggaaactaagggagcctctggtaatcgattaccagcctgtgtaatcgattacacagagggatgggtcactggtaattgattaccaggtatgtgtaatcaattacacagtgcattt

SEQ ID NO: 43416 - DNA, 336 bp, Glycine max
agcttgtagtcattaaaagagaatatgcatgttgatattgtattactgacaatgttagtcagtttgtcatattgattgtgaaggaatgcattgaccgtatcctggtgagagtgtgatccttaaattttgagagacacgactatcatttagtactgatttttcatgaatctctgaagtatggactgaatgcatgaaattgatgatgatgaaggccatgtgtcgagtgtgatagccacttagccaaaaagctgaccctgtgcttgaatgatatcccttgcacccagtttgagctgaatgaattattgattgattgaaccctgagcctatgcaatgtta

SEQ ID NO: 43417 - DNA, 241 bp, Glycine max
aagctcatacatgcttagtgataaccatgatatcaccttacccttaaggaatattggagctctggaattgtttttggaataagtgtgggggggggggtcttcataaatataattctactcaacacgatgtataatcccatctccaccatagtatcctacatctggttggttaattattcatctattttctcacatatctaatttcttcttcttatcccatttgtactatttaacctcctct

SEQ ID NO: 43418 - DNA, 465 bp, Glycine max
  unsure (1)..(465): unsure at all n locations
agctntaataaatttctatagaaaagatgtggtagtttttatatcttttaattaactattgtttagctgatgggatttctgttttatttttagtgttagaaggaaccttatatcaccttcatattttgaattagtttgttagacttatatcacattaggcggtttcaacttaagtttaaacaacaaaaccaattcataattaaaagaccgaaatttattgattcagttataaattaatatgaatttttgaaacagtcattgtaagcattgaggacaaaattttgtttacatagtccaatcataatagtcgttgtaaagtactaatagtatattcaatacctatacatcctttaatttcttcaaacaaccttcgagattgatttacttagattgccagtatagtttaatgggtacggaatccattaacaataatctctatgataaaatatcaagacttanagttca

SEQ ID NO: 43419 - DNA, 457 bp, Glycine max
  unsure (1)..(457): unsure at all n locations
tcttatttaactctcttatgttgctaattgatattgtatgatgttataataatctatcttttcggattattacctttggactatgatttttgttctccagacttacaagattcatgtgcttatgagataaaaggagttaaagacatggaaattgactctaaaggagaacaacacttatatgatgcataactttaaaattgtaaacaacgagggtcaatataagctatgtttgcatccatataaattgaattttatttgtgtcactgttgtcatagaacaagacctgcctaatatctctttataggcatatgaatatattaattntactgatatccttgctagaacctattgacgcaatctngtagttggttatgctatntattgtcacacaagtttcaggatctgatgtttttgtctacaattagctttatttaacgaggatgtatatgaaatatga

SEQ ID NO: 43420 - DNA, 472 bp, Glycine max
  unsure (1)..(472): unsure at all n locations
agctatngaattagtattacttgagatcatatatttggtgttaaaaaattctttctctttctggtattatntgtctttttaaaataatgcattatttcataaaaaagttaactacactagctagtatgataaaatcattctccttgactaanatatcctcattaaaatagttaanatctaattgtaaattagtttaaatagtaatatttttgccatagcacagtatacaatataaattgttatttttatataactaaattcataataataaaaaaattaatatgtaaatcatattaaaattaaagttcataataaataaatatttagaacatataaattatagtttagatctacaataaataatttatattgtagtacaagaatactnttaactatttgataatttcttttaaaaattaaaatatgtacaacaataaagatgaaaatgatagattgaaaggtataataacca

SEQ ID NO: 43421 - DNA, 493 bp, Glycine max
  unsure (1)..(493): unsure at all n locations
tgatgatgtcaagaagaatctaacaaggctgcttcaaatgataagcatttgcttcaagaataattcaagattgcttcaacaaacaaagccttgtttcaagattcactaaagaccaagccttgccttataacaaagtgctttcaagacatgtaaggctctggtaatcgattaccangaagtgtaatcgattaccagaagacagggttgagaaatagttgttgaaaaaggttttgaatttgaattttcaacatgtaatcgattaccatatgtctgtaatcgattaccagcaacgaaactttggaaattcaaattcaaaagtcataacccttcaaattataattgtgtaatcgattacacaaacattgtaatcgattaccagtgaaaagttttcagaaaatctgtcaacagtcacatcttttattatatttgtgaatggcatcaaggcctataatagtgacttggcacaaattatgcaagagtttgttgcaaaatg

SEQ ID NO: 43422 - DNA, 384 bp, Glycine max
  unsure (1)..(384): unsure at all n locations
aatgacactaacttgtgactcggatatctgattgagtcatttcatcatgcgaaacgctcgaaattgaatacagaagctctaagcaagtacacatgacaataactcttgactcagatattcgagtgagtcattttataattagagacgctcataattgaatgctcgagctctcaccaaattcaaatgacaataactttatactcagatgtccgattgagtcccgtaatatatcttgacgctcaaaatggaaaacagaagctctgagcaaattcgagcgaaagtaacttttgactcanatgtccgatngagtcatttaataattgaagacgctcggaatatgaatatagaagctctcacaaaaatcatatgacaataactttatac

SEQ ID NO: 43423 - DNA, 115 bp, Glycine max
cttgtgggagaaaaaatttgtgccggatgttataacataaccggattgctatattaacattgggcatagtaatctttaattgtactttaaatttgttaaaacctctcgaatatgc

SEQ ID NO: 43424 - DNA, 470 bp, Glycine max
  unsure (1)..(470): unsure at all n locations
agcttcattcatgtaggtatcaaaaatatgcttattgttgttccatgattcctttgcgaagaattggtgagctntaagtgcactaacaaccattatacgtgtatggtattatagggtaaaaaaaaacatacgcatgttccagtagaatcacaaacttaaagcaaaactattctaacacttaaatgacaataaaacttgggaaatggagagactggaactctcaacttctagagcaatagtttgctgaattgtctgagcaatccttttgacaacactcctaatgcaataaaaaaagattatataatgggttgccatgtcgccaacaaagctgacaatggcattacccataatcctccttttttataatattataattataatatagataatagataataatagagaaatatctatgatgcatcataagatactgaggtacctgaagtcataatcgggatacatgtgataca

SEQ ID NO: 43425 - DNA, 111 bp, Glycine max
aatcagaaataaggaccccggtaaccaaaccatccggtaatgaataaaaaaggatggtctctgtgtattataccacgtatgtgtattaattacacagagcatttttgcata

SEQ ID NO: 43426 - DNA, 389 bp, Glycine max
tgtcacatcctatcagagtgttgtgttcctgtgtcctctagcatgaggttcttcatagacatccacctattcatctgctcccccaccacaagttcagaatctatccaggacccaaccacaccacacacatgggagtgagagttactccttcctataccatagagagaaacaagacacttaaatatacatattatataaatgagataccacttgcttacacataactgacgtaatttcaccacgttgccattcaaaattcactttcaatcatcaatcacatcacacaagaatcccacactccaatcaagatataataacacatcaatttcataataaacaattaacaagcgtatgcaacagttatgctaagactcaatcctatatgcaat

SEQ ID NO: 43427 - DNA, 278 bp, Glycine max
gcattctcacaccgtcgatgctaccactccctacactggacaatacttgtctatgcttggggctcgactgactagtcaccctcctacttgttaagccactatccctgacatcagacaagctccctcgatacggaacaatctccttcaacactatacaacctctttcacccgcatgttatcttatagcttggggcttatgtattgtccatgtccacaaaatacatgtggcatcctacgtggcacttcgagacatatgtcaaccctctatgtcagccctg

SEQ ID NO: 43428 - DNA, 447 bp, Glycine max
gcaagctttataagcgcgggttcgggagacatagttctatctttcacgatatgcgaagatgatattccgagtactttggatttggtacgaccatgccctcctgattatcagctggtgaattggcgagtggaggaacgccccggcatttgcgcaacaagcataatgtaaacctttacggttctaaaagctctatagatgggcctacgctttagagtttttccttttgtaatgctatgtgtcttttgtttttgaatttataatacaaggatgctgcttcatctgtacctggtctctacccattctcattcatatgcatgtttacttctttttctgaaacggcagatccgatgacgagtcctccgaatgtactaatacctgggacccgtctatcgacttcgagcaagagatgaatctaactgaagatgaatgagatgatgatgtgggact

SEQ ID NO: 43429 - DNA, 407 bp, Glycine max
tgactacaggtcggggtgactaatagggtgaaactcaaatactctcgatcaacatgctcgattgcctctacttgataacagtgcggattacccttgggtatcgtcccattccatcgaacttgccttcctatgaatgacaaatgggtgagactaaaataatctcgatcaatatgctcgctttgcctctatttgacaaaggagtggataacccttgggtgtctccacatgtcatcggacttgccgtctctggatgacaaaggggtgagactaatatactctctatcaacatgctcgctcgcttctagttgacaaaggagtggataaccattgggtgtctctgcatgccacctgactcacgggctgtggtgacataactgtggcgtggtcgacaaaagcggggcttttgc

SEQ ID NO: 43430 - DNA, 476 bp, Glycine max
  unsure (1)..(476): unsure at all n locations
agctntagtgcccttaattntgaagcaatatttgacattcccataatgtattccctgaaatttcctttgccttgatacttcatggaaatcaagttctaaaggacagtacttgtttccaccttatcgctttttttttttgcaaagcatttttctatttcaacaaggaaatctttggcacgcttaggaatgccacgcttaatgatcataagactcatgcgatttgagtgatcccacttctcatgaagtttcctctattgagaggtactagaatctgtaggagaagagggtttctcaatccttaatgcaaggtctagatccatgcaaccaagaataatttgcatgttctctttccagtccttanaatttgcaccattaagaattggaaccgaatttagattagcagatatagaagcaacaactgaaaatacattagaggtgccaagcctactattagttggtgttctgttctatggaac

SEQ ID NO: 43431 - DNA, 431 bp, Glycine max
  unsure (1)..(431): unsure at all n locations
agctntagactaaaggatatcatgaatatttctatagttagagatgagattaggtcaggtcagaccaggctaggctttatgtaaataggcctagattgttttataaaacaaagacctaagcttgacctattatctattagaggctnttttctttgtctagcctaacctttttaaaagtctagtatgacctattagcttatttaanagcgtcatttatattctttccaaagtaaaactcacaccacatattagtttttcagcaaataagaaactaacaatcaacaacatatttgcatatttgatccattgatcacgtctttcaattggataaaattatctatgcatacatgctatgttcnncttttagtatttgattcttcatctattaattaagtttatgtcaagatcaaaaagaagaaaaataaaacaac

SEQ ID NO: 43432 - DNA, 177 bp, Glycine max
  unsure (1)..(177): unsure at all n locations
tgcgattgaatataaattngttaatgtatgctatactcaaatttaaccatgagcttcggctccattgttttttctcgtcgaaacgaataagtaacacgaggcaaaagccgcttagacctgtctttctttttttaaagattgtanaaaacacttgtttgacaataaaacgatccctta

SEQ ID NO: 43433 - DNA, 391 bp, Glycine max
  unsure (1)..(391): unsure at all n locations
gcttgaagaaaagtcttatgagacttctctttgtttgttctanagtttttggtgtttatcaccaatcattaactgtacaccatcttgagttttagctttgattatagcctttcttgtttcttaccagcaatgcagagaaggccaggatgtcctccctgagcaaattaaagcggtgctctcggattctgctggcttccatggtatgatgtgattggaatgctngataaatgcttccccctgatagaggagccaaccgtagttgctgtagcttgcagtttgtaaatgcattgcttcttcttctcctttgaactgtttaggcccagatcaaataggttagttaaatctgtagttntaggagttagctatgatattttgttcaattctgcttctg

SEQ ID NO: 43434 - DNA, 468 bp, Glycine max
cttgcttctacaatctcacacgttatgattatgacttcttctgaaatgaagaaagaatatatgctatatttgatctatcgttcacttatccctttctcctcctttctttatgaatttgtgcttaatttaaaactcagtacataattttatgtcttgatttctaaaatacccattttctctccccctctggcaacatcgaatagccaaagtgcgcagaaatggaataaaataacaaacatatatcatatgctaacaaacatagcaacaagacaaaaacacaatgaacacctatttatctaagtcactagcatctaaaagaccaagttctcttctaatggcaaagaaggtttcctttgtgagaggtttggtgaagatgtcaacaagttgattttattatctacaaattctataacacaatcttctttaataacatgatcccttacaagagacgcctaatctctatatgct

SEQ ID NO: 43435 - DNA, 492 bp, Glycine max
tcctttttcaataattctatgatggacttatcttcatggagaggagtatgattgatgctgcctatggtggagctcttggtgatatgacccctgctgaagctagggaatttgattgagaagatggcttccaattccaacaacttagtgcatgaaatgatgctattgctcttataggtgtccatgaggtggccacagattcatcttcatctactgaaaataaaagcttgaaggaaaacttgatgccttggtcaacctattaactcagcttgccatgaatagaaatctacacttgttgcagagtctgtggtctatgttcttttgcaaatcaccatacataaatctgtcttttttcagcatcttgagtcatgagcacctgaagctttctgcaacattatatttacctcttctcgcaatccacacaccaaatatttgacttcagcatagatcatcctgtggagaatatcaatctaatggcatcctcacaacacacac

SEQ ID NO: 43436 - DNA, 406 bp, Glycine max
  unsure (1)..(406): unsure at all n locations
gcttcatggtatgcccaagatnttggnctcttactgttacccattgtttattactaaattctggcatgaactattccaattaagtggaacaaaactgcgcataagttctgcgtactacctgcaatccaatggtcagaccaaagttcttaatcgagtcattgagcaataccttcgtgcttttgttcacaacaagccatcttcttggggtaaatcttttatttggtatggatggtcctacaataccttcaaacgctcagctntaggtgcttctccttatgaaatcacttacgggaaaaaagccccttagcattccccaatatcttacaggaacctcaacaaatgatgtagttgacaacttcttaagtaatagggaagccgcttttgcagagctgaaaagaagcttttg

SEQ ID NO: 43437 - DNA, 407 bp, Glycine max
tgggatgtaaccctcccttgatgacattttttcatgttctgcttatccatgatttgtagaaagcccccatttctgcgtgtcaatttatattgctttcatccaaataggtggctgttaactgtaccgctttcttctcctgttccttaaatttatttccctgattcactctggattatcagtgtggctctataccaaagaaatcttatccggggaccatgtgaaccggatgcacgacatacccttatacatgcaaatatatgtgtccgttgacagattaacattgttacacaaagaatgttacccaattcggcacctaccacactggggcaccaccgtgggaaaacctctcaatgtagtcatggctaacgcctgttacacttttcctacactacgtggattttctaacc

SEQ ID NO: 43438 - DNA, 465 bp, Glycine max
  unsure (1)..(465): unsure at all n locations
tttgctcatggtagatcagatttatgtgctatttattttcanaggagaaattaatttacttgtgcagcaaccaaactatagagttcagtttgtgatgaggagacaagctaatgctcttgttcatcctttggctagagtgacaacttcccatgcatgttcaaaggtttttcaatacatgcattctatcatgtatcttccaacacagtatgaatgaaaggtaattaacattgcttgaaattttatggtaggctaaaattgatagagttacttgataactaatggcagagacaaaaaaaaaactcgtataaggattaaaatatgaatcttctagatataaggagtaaaaatacacataataaataagtgtaactttgataattattatataacttttataacttaatatatgatatgatttttattgaccttatcattgaactatatttacatattattaagattatc

SEQ ID NO: 43439 - DNA, 383 bp, Glycine max
tgatattctctctctgtgggtactgtaagattatccttcatcctacttgctgttttatataaaggtttcacttcctcattctactttgcctgccacttgatgctggactattatgaattggtgtcggctatcgatggtttgaaacccgcctaaatctgtgacctgatacacgattgtgtcaaccatttcaccgattgttgttaatagtactcaagtgatagtaacggcttttgtgacttatattggagctcatactccgaatgctccttttctaactatagatataaccactagtaagttctggccattttcttactccatgatgtgatggcttctctctactaacgatgatacacatctttacatgtatactataattgact

SEQ ID NO: 43440 - DNA, 443 bp, Glycine max
  unsure (1)..(443): unsure at all n locations
agctntatgtgacacactttgtcactcagtgtttcttttgaaaaccattgtgaaaatactattttatcaattactagatgacaatgcttttgttttcataaaatatggttttactcattggacaaaactatctataacttggtttttgcaaatttgttagtgaaaaacaacttcttgcgaacagattttattttcatctaacacgttattcaaccctccttctagtgtgatatctattttttcattatcttggacaacataatttagttgcattgatgtatctatgtatttcttttatgtatgttatgatacccacatcttgagggtgaaatgtatttaactatatatggagtgcgttgatttttatatatatatctggtccattcgaatgatattgtcgatgaaggcttctattttaagctacaataattacttattctatt

SEQ ID NO: 43441 - DNA, 265 bp, Glycine max
actttgattcttttatgttcccaatgccttatattgataattaatatatatctggtatggtataccaaataatgtggaatgtgcattctcatgtcgctggaattatgatatattcttgttttacgaaaagaacgaaaaaataatggctgaagctactgctgcttattctcttcccatatcattaagtcatcagtttacttctcgcaatgatcctccaacattctccatggatgactttgaaggtatctgctttttggatgttgga

SEQ ID NO: 43442 - DNA, 248 bp, Glycine max
tgatggatgttctattgtgttgtataatatatggcataagggcggatcgatgtaagtaaatttggctcgtgtaacggaggaactaccggagtggggaaaggatacttctggttaggctcctaatataataaataacttttaaaaaaagttgaattggttacacaatgatccaactgttcttgcttaagtcaaacgtattcttgaagaagaaaacaatattggtagcctactgtaccatgatgaaatga

SEQ ID NO: 43443 - DNA, 464 bp, Glycine max
  unsure (1)..(464): unsure at all n locations
tgcaagcttatcctctcaggtgaagatattccttgtgtctctgtgttaaatgtatgtttatgcattagtttttaactgatttttttcttatttctgcgtagaccaatgaactttatcagttggcatcagtggcattctgcctacttgttgcttgggtgtgacttctatcaagtcttaatcttcattacttggcaaaccatgtcttctgtgaagtctgttttattatctacactatataataaccttaatcttggacgagtctgtggttgttttctcttgatgtgtagcatgcaccgaactttatttctctaaatctgagggattgcttaaatgcatgcatgcctgaaacttatatatacatacatttataaagtccacacaacttgtattgctaaaatgcgggcatgcttgacacttatttatacatacatnttataagtccaaacaacttgtgttccttaaca

SEQ ID NO: 43444 - DNA, 373 bp, Glycine max
gtgtgtgttttttcttcttcgagtagtccggtcattaatatgtaatatatttttggcaacgtgatacttgatgatcacatatcaatctcatgagaattgatgaataacttgacatgtatattggtgtgacataattacacttttggtcctcttggtggtccaatatgaagtgccaaaagaacaaatacgctttggaggatatattagttattgcacagaggatgaaccatttcgttgtgtagttataggatgattttgcattaaataatatacattctataccaaaaatattcaatcttttttattggattatctgttgtgaatattattactgaaacattaataaatattccaatcaatagaaggtagataa

SEQ ID NO: 43445 - DNA, 470 bp, Glycine max
agctttaagccaaacatgtaatcaattacattatattaccttaaaccatatcaccacagaataaatcatggtaatggattaaatcatggggtaatcgattaaaatagaaggtttcaaaaatcgataaccacacaacaacacagtgtaatcgtttaacacgagagagtaatcgattaaaatagtgaaaaacacaatatgataaagtaaaatatgtatgttttaaaaaaaaaattcaaccacatatcagcatatcaacatactaagatattactgaagataataacaaacatagagagcatatataacaagctacatgtactaaaacataacatcatccaacactagatccatctaagatacctagttcattcctaataaagaagaacttatctctagcaagagggttagtaaagatgtcagctagatgatgttcactatcatcaaactcaatgcaacaatcacactttgat

SEQ ID NO: 43446 - DNA, 533 bp, Glycine max
ctatggaggctggattctttagcttctttattgtcctatattggtgagtttccaccatggagatgcagcggatgacaaatgacaataggtgagaggaggcgccatccactatggaataagccatggaagaatgagcttcaccactaatatgagccttggataataagcttggaaggatgcttcaatggatgaaaagatatatggatagaattagagagggggggagcactatattgaacgatgacaaatggagatatagatgaactttgagttgtgtcttacaagactctcattcatcaaagttacaacaagtgttacacatgtttctatttatagactaggtagctttcttgagaagctttattgagaaaacttccttgagaagcttctttgagaaaacttgcttgagaagctagagcttagctacacacacccttctcataactaagctcacctccttgagaagcttccttatgatgattcctcaagacgctagagcttatcttcacacacctctctaatagctaagctca

SEQ ID NO: 43447 - DNA, 447 bp, Glycine max
  unsure (1)..(447): unsure at all n locations
agcttgtgcaaatcaaatcactcctacatctcatctctagcatgcattttctttctttacccactcctcacgtttggttntttagggaaaaacaccataactaaacgcgccgcaagggatccctatcgcaccagatccaaatctagaacgatgggtgatcaagaggagacgcangaacagatgaaagccgacatgtcggctctgaaagaacaaatggcctccatgatggaggccatgttaggtatgaaacagctcatggagaagaacgcggccactgccgccgctgtcagttcggctgtcgaagcagacccgactctcttggcaactacgcaccatcctccctcaaacatagtaggacggngaagggacacactgnggcacgatggcagccctcacctgngatacaaccgagcggcttacccttatggatttgccgccaactattca

SEQ ID NO: 43448 - DNA, 419 bp, Glycine max
  unsure (1)..(419): unsure at all n locations
agctagagatgaggaagtgtagaaggataattcttcctgcntttattcgttgaccacaaagtggtacctggagatatgtcgcgggggtcaggagaccttggggacgtcaggtggggtgctattgcccaaaaccaagcttgaccaatcccgacccaacccgggcatagtcagtcagtgagaacctgtgatgtacctaaacaggcgagctcctggcagtcaacagataaaaggaactaagaccataaagcaaggaggcttgtgtggtggctggcaaactgtgaatcttgtgtgatatatgtgttatggcctctggtaatcgattaccaagggtgggtaatcgattacaaggcttanaaatgaagacaagaggctaagatggtctctggtaatcgattaccaagggggtgtaatcgattacc

SEQ ID NO: 43449 - DNA, 466 bp, Glycine max
  unsure (1)..(466): unsure at all n locations
agctatctatttctcccaagcatcatcccgttactttgtgcccagctatctaaaattgagaatcttctcttggtctatggttaagaaacttctccttggcttcatcccaagtggtttgactgtggttaggatgtgagttcaacaatgtagtggcatttcctccaaaaaagaaaggaaaaaggattagtttagtttgatcctcattgatttcgggtagcctcattgaaacacataactgtaagacccttgttaggtgaccattgnggactttgttagggtttaattcacgttattgacccgcctcatcactatgatatcatcactctaaagcacgtaaatttcaattttaaaatgaaactccgttaatttggatatgaaaaatgagaagtaaatttccacgatgtatatatatatatctatatatatatatatatatatatgtctacatatatgtatctctatatat

SEQ ID NO: 43450 - DNA, 220 bp, Glycine max
gctgcaacgcttctaataagcgaagcgccagaatctgtcttcttgtttttagtatgaccatatgaatcgcttgagagctatcgtagctcaattgccagcgtcatgatatataatgcacatgaattggacttctgcgtgacaagatgttaccatatgaatttctagagaaccttcgctgttccattctgagcgtatcggtattatatgcacctaattggga

SEQ ID NO: 43451 - DNA, 476 bp, Glycine max
  unsure (1)..(476): unsure at all n locations
gcttccatgcaattcactaaatgggcatctttgtttttgtgcatcgcattctctaacgggagattgtgaggacataacaagtgtctactagtatggtaacttgttattgtacccacttgttaccaaggttgagatcattaccagcttttttgcatatccgactctaaggtataattgagttaaataccttactatanagtctgaccaggacgacattaattggtcaattgtcttaagaattactacatattaggtttttcttatttaaaaagtagttatttatttttaatcccccaaaaaaattgttttagataaaacaaaacttgtaaaactcttattgtgaaaataaactgatacaagtatccatttgataaatatataaaatttgttttttcactataaagcatgttntaatataaaanaagtttaattaanatttaattaaacacacatctcaattatatntaaatctaaaa

SEQ ID NO: 43452 - DNA, 345 bp, Glycine max
ttacattccacactagagggatctttattggtcacgtaaccaacgtaaaaatcctcatgtgtaccccatcacactttctatatgcgcttatatatatacttggatgttaattttaggggaaggactttatcaagctggctcatgatatatttaaacattcatgaagactttaccaatgacaccttttcttcttcataaaaagaaagagaaagagaacccttaaaacacttttctaataatacttgttcgcaaatgtaatcctattcacaaggattccgggcgttattcctctgtttcacatgatcgtaaaaatgggctagacccagggaatataaaatattctac

SEQ ID NO: 43453 - DNA, 447 bp, Glycine max
  unsure (1)..(447): unsure at all n locations
taaatgtttgtcttatttgtacacacgcgcaattgcaattattattgaatatcanattatcaatagtaagtactaagtactaagtacaacgaaattcaataaaatttgatcgattcttttccgctctcccaccaaggaatatcaccaccatccaaatcttagattgttactaattatacaagtctaattatcaaattaatagagcaatatcatcctaagcaagaacctgggaaaaaaacgttctatttntctttataaacattacagtgttttgtttatatatatattctaaatatcaaattatgtttagcaccattaaacaaaacgtgtgtgatcaattcattttaatgtgtttatagctagcacatgaggaaaacagatacgactagattataattgttttacaaaccgaatcaatgaccaatatatctctttctttcttcctaa

SEQ ID NO: 43454 - DNA, 437 bp, Glycine max
  unsure (1)..(437): unsure at all n locations
ataatgtgaggtaggtcttcttggattataaagtgtgtgtattttctccttcgattagtcagtcataaatatttaatatattttgtcaacgtgatactacatgatcacatatnaatctcatgagaattgattgaatacttgacatgtatattgatgtgacttaattacacttttgcgctctttgntgttccaatatgaagtaccaaaagaacaaataactttgttagtgtatattagttattgaccagaggataaaccatttgtgtgtgtagatataggatgattttgcattaaataatatcattctataacacaaaatattcaatgttttttgttgattactctgtntgaaaattatcactaaacatataaaaaattcgatcaataaaggtgatacattgtactataacaaacaatattggtgtataaagtgtgta

SEQ ID NO: 43455 - DNA, 424 bp, Glycine max
  unsure (1)..(424): unsure at all n locations
acccctcaatttagtggatgttcaaggtttgagaagtgaaaatgagactggggtaattttggagcaaactctcagagcatcattataaaccctaaaacagaatgggtatatttagctcacatcaaacatgacaagtttagcatgctntcaacaaattccttcacaaataactaccagaaggcataaacctagtagaactacccgttatatctcccanaacccagtacccacgaaaatcatgtgagaaagaagtctacccaaacctgaaatttgaagtcccacaatgtagaggtgcgcttcacgactccgnaaatggcttccttttgcgatttggagcagaaatggtgagcaaagtttggagctctgatggatgcttcaatggtgaggaagaagaacggaatagcaacgtgaaagagagagggag

SEQ ID NO: 43456 - DNA, 294 bp, Glycine max
ctcacccaattcaatttaccacccccattcgggttttttttttctgtttaaatattactgacatttaactaacttctttaatataatttctcaaatgcgtaacaatttaagaaaattaatttttcaaattggttaaaataagagtttcatgtgctgactcacaatatactatcattcttgtgtatcttttaaaataatttttgtcaaaattatcatacattaaaatctatgattagatgatattataaaattactttatattatcaattaattaactattttgttaaaaaacat

SEQ ID NO: 43457 - DNA, 454 bp, Glycine max
  unsure (1)..(454): unsure at all n locations
agcttattacaccaaattcaataagatattcttatatttaaagttatcctaaaattagtgtacacaataattacatgtcatttttaacagatcaagcattgactaaatgacttactttaactggagtccatttagcagtttccttggacttacatccttgattattgttcaatcccttcaaagcattggttaagagaaacatgcatgcatattgtacaattaaaatattgatgtcaaatactaatgataaagtaaatgtctaacaaattacaactaacatgttaataattcctttcaagtagttggtgggcttattgtgcaaggaaccaaaccagacgacaagattgtccttaggacatataatgancaaatgccaatgttcactgcattggagagcattaagttattatattgcatactgtaacgacccgtctcgtcgctacgatatcaacac

SEQ ID NO: 43458 - DNA, 454 bp, Glycine max
  unsure (1)..(454): unsure at all n locations
ttttcattttattccaactctattacttgccttttcgcacttagactttctttttcttaaatagcaacacacacacttttattttatacttataagttttttttaaatacttgttgcttattagatgactgtgtgttgctcttttcttaccattacaagctttgaccccataattcccccaaatttgggcaaatttgctttgaaccaaaattccttttatgaatgatgctttcctacaacctaagacaaggtagaaggatataaactatacagacttaaggttcaatcaaacaatcatactttcagctcaaaatgggtgtaagggataaatcaatcatgcgcaaggtaagctttttagctaagtggctatcttcanatcaaacatggccttcatcatcttcattnaacgcattcatttcatactcagagattatgcaaaaaccattattaacat

SEQ ID NO: 43459 - DNA, 372 bp, Glycine max
  unsure (1)..(372): unsure at all n locations
agcttccatttttntaagattntcttaaactctttcatctcacatcanattcaaatagttttccatcaaatccaatatataaccacatcaaaacatcatcattccaagtacaaatcatacaatcaaagtattaatcaaaccaaattaaagattttcttacctctatagtagcaaaaggagaactctgtgaagaaaggataaatgaacgaacttttgggccaaggaggaattttcctccactttagcaacaagcccatcacaacatcaccaaaacctcaaaataactataatatgacacaaaaatccacaaatagatttttcatgagttcttaggggtgctttataaggaacatgaaaagagtcatagagagg

SEQ ID NO: 43460 - DNA, 456 bp, Glycine max
  unsure (1)..(456): unsure at all n locations
agctaagcactaacattcttcttctttggcaaattttgtctaaaacatacttagacacttcctgagcaggtacgagcagttatgcaagtgggatcagcaactttcattatcagagtaatcaagcacagcggtatctgtagtggcgacagcataattctgcaagttgcaagtcgtttcccggatgtcaagacatctcacgtgaccatcagcttttgctccccctgtctccatgctcttactgctgtgaagcagttcactgcagcatcttctatcagctactagtcttttccaggatgtcaagacatctcatgtgacatncagcttttgctccccctgtctccatgctcgtactgcatcttctatcagctactagttgcagtagcttacatcaatcatcatcagcagcagcagtctccccctcagaatcatatacatacaactccccctcaaatcatg

SEQ ID NO: 43461 - DNA, 368 bp, Glycine max
gagagaagtggaaccttgttttatgtctcacaagactctcctttgtcacagttacaacgagtgctgacgcctcgcttctagtatatagactaggtagctatcctgagaagctttgttgagaaaacttcctggataagcttctttgagaaaacatccttgaaaagctagagcttacctacacacacccctctcataactaaagctcacctcctcgagaagctggtcttaagaagactcctaaagaagctagagctcagctacgcatacctctctaatagctcagctcacctgcttgagatgagaggctctaacttagcttcgcaccctctatattagtaagctcaccccattgacataggacatgaata

SEQ ID NO: 43462 - DNA, 430 bp, Glycine max
  unsure (1)..(430): unsure at all n locations
ctgcagctgctctagcccatcagctatattctttntgggcgaaatgttcatgaaaagacgcatttgcccttctttgtggctctgtttctggatctaactagaaaccatcaaaaccctaagtgacccctttgccttgcgctataaccaatgccaaatgccgcaattcgattggcaatgataaaaacattctacccgtatgataaaagcattatacctagatgaaattaggctttaacacacatgtttaaggattaaacttttacttgtccgtttgttacatattctagaattcaaatagacttctagactttgaaagtttaatttgataatgatacaattagaaattattgaaagttcaaatatactcaaaacgtagcaatagcaaaatcatactttntttctatttnttcatctttcgactaaataaaat

SEQ ID NO: 43463 - DNA, 460 bp, Glycine max
  unsure (1)..(460): unsure at all n locations
aagaaaataatgtcccgatcccgaccggagaaagcaaagaaaatttcgatcaagaatggagagaccaaaagaaaaaagaaaaagaatatccccgatccaagatcataagagaacaaaagatatctgcaaaaagggtctatgaccagacatatatctaaacagtacaaaattgtcaccaccaaataaggaaagaaaggaaaccacaacctgaagtggtcctctccctttggttgccgaccaanaatcctatgcgtcagtgattttttcgccttgcactagacaaaaacataaaagggaaaatgccagaacactcagagccaaattgccctccaaaaaatactattcccaaggaaaagtcctattgatccatgatcacgcgtgtaatctttgattngataggaaatgatttgtaaatcaagtgctgacatatgcatgggctagaattaggatgaaacactta

SEQ ID NO: 43464 - DNA, 402 bp, Glycine max
  unsure (1)..(402): unsure at all n locations
agcttctcccncaattntctataaatatggttagaagtgaagtagaaaagggttcagcccctttggcacttctctttctttcgaatttgcttaagaaaattgttttcgtgaagaaaatccaagcggaggcgcttccgtaacgtttccgtaacgtttccgtgagtgatttcgcgaaggttttcgaccgttcttcgacgttcttcatcgttcttcagtcttcaacgggtaagtacctcaaaccaagcttttcgattcattctatgtacccgtggtggtccacatttggtttcatgcatttttatttaagccattttatttaagtcatttctcgcttaacctaaaaataaaataaatttccaccgatcgttngaattgtattatccgttaactttggttgaaatg

SEQ ID NO: 43465 - DNA, 404 bp, Glycine max
  unsure (1)..(404): unsure at all n locations
aaaaatgtcatggctcctttcttccattcctaagntgcaacatggcattcctttgcatgagcattcacattgggcaagctctctgacaatggaagcttctcattcttttttctatgaactaacactttgtcaaaacacacaaaaggctaataattgtaatgacttattacaaaaacaagaatactaagaaaacatttaattcatctaattagcacaaagctaagcaataaatgaagcaaagataaataatttttgtgtcattnttttagtgaatgaattgttgtgtaaattgagtgtaaaagaatatcatgcacaanaaattatcaaactcttccaaattaaaaagctttgcttgtcctcagcnaaacanaaactaacttaaccaactaataactaagaaactc

SEQ ID NO: 43466 - DNA, 333 bp, Glycine max
  unsure (1)..(333): unsure at all n locations
gaacaatgcttgcaaggccagatttttaagatcaaagagaaagaagaccactgtgaattaaggggtgcacctaattgggtctctctcctacaaattgattaatatgctttgaggccaacttgaaaattactttgggaagccttaattaaaggacaagaagcaaccatgggctgagttgatcaattttggtgaactattaatattgngctcattagataataattaagcccaacatactcataaattttaaccaacttttaaaataagaattaatttcatttttaattgtattttgggcctattttttttgtttggaatggtgctaccttttac

SEQ ID NO: 43467 - DNA, 464 bp, Glycine max
gcttgaagagttgaagacacataccaacatgctaatatttaatatgtgttgttccttcttctctaagctctttctttgtcaattcgtaagttgtaaagatcttgaaacaccttgtgaatcctgagagaaaaagattgagtgatgaacttgtatatccgtctctaagatgattaagctagtctatgtgcaaacaaacctcaacaaatgtgctggtatattaagagttgaaagtggcttgttgaagaaagaatacttatgttgtaaagctttggtataagttgtgttgtaagaataagaagtggcaagaaaaaatacttgtaatttttgtgaaagttagttaaacttgatgggttgtaagaattggacataatctcagtggtaaaaatgaaccactataaaactctgtgtgtcttatatccttatcgccttttgttctttaacggataagagtatgaatttgatct

SEQ ID NO: 43468 - DNA, 500 bp, Glycine max
  unsure (1)..(500): unsure at all n locations
tgagccatgaaatgttgacagaccctggctaacgcagttgttggctaacccaattccacccgaggaaaaattgtgcttatcgcgagctgtcatgcttagcgcacaccttcagcgtgaatttaaggaaagtcctaatttttctatttgtgtaatggacttgagctcgatgcaaataggtcttattagaggcttagttatcttcttaaatctagttatataaatacccaaaaactcttaattgagaaaaacttttgatataattgcaattaagcttgtgcttagagaaagcttagcctcttctttggttnttttttactgaaaaccaaattgattcttatcaaggaatctattcctttgtgacgaaatcccctctgacttatcgattctccgtggatcgtggcgtcagtctgttcatcttcttcatcttatacatatttttggttctctggtctaagatctggaaggtaacaatgatgattcttgacttacattcggacgat

SEQ ID NO: 43469 - DNA, 287 bp, Glycine max
ctctgtggttatgctcctctgccgacaccacacagatctttgcccttctgtgcaacaatgtgaagcaattgaacaaccagaagcttatgctgaacacatatacaatagacctcctgctcctcagcagcggaagcagccacaatagaacaactatgacctctccagcaacatgtacaatcccgactggaggaatcatcccaaccttagatggtcgaatccttcacaacaatagcagcaacaacaacgaccttattctcaaatgttgttggaccaagaagaccatacgt

SEQ ID NO: 43470 - DNA, 319 bp, Glycine max
  unsure (1)..(319): unsure at all n locations
gttggcaggtttaacagcttaagcttctggtagttcttatgactttagctgttttgaaagctaccgaagtgtatcttaaggatggcagctttagcttatagcatgttcgaagtactcttccagcatttattatgcgatacacttatgtcatttgtctaagttggacttttttaaatgaaccataactggattagttttctatcattttacagaaatcggttactcgaaccaggagttttatcgaatacttatacactggggagctagtatttcaacaactatagcttccagctattaggcggntgcattgagcatacgc

SEQ ID NO: 43471 - DNA, 464 bp, Glycine max
  unsure (1)..(464): unsure at all n locations
agcttattacaccaaattcaataagatattcttttatttaaagttatcctaaaattagtgtacacaataattacatgtcatttttaacccatcaagcattgactaaatgacttactttaactggagtccatttagcagtttccttggacttacatccttgattattgttcaatcccttcaaagcattggttaagagaaacatgcatgcatattgtacaattaaaatattgatgtcaaatactaatgataaagtaaatgtctaacaaattacaactaacatgttaataattcctttcaagtagttggtgggcttattgtgcaatgaaccaaaccagacgacaagattgtccttatgacatataatgacaaatngccaatgttcactgcattggagagcattaagttattatattgcatactgtaacgacccgtctcgncgctacgatattcacactctaaaccgt

SEQ ID NO: 43472 - DNA, 347 bp, Glycine max
  unsure (1)..(347): unsure at all n locations
actctattacttgcctttccgcacttagcttttctttttcttaaatagcaacacacacacttttattttatacttatagtgtttttttaaatacttggtgcttattaaatgactgtgtgttgctcttttcttaccattacaagctttgaccccataatatccccanatttgggggaaattgctttgaaccacaattccttttatgaatgatgctttcctacaacctaaaacaaggtagaaggatataaactatacagacttaaagttaatcaaacaatcatacttttagctcaaaatgggtggtagggataaataaatcatgcgcaaggtaagctttttatctaagt

SEQ ID NO: 43473 - DNA, 377 bp, Glycine max
  unsure (1)..(377): unsure at all n locations
acatanggggagtatgatatgagtgaacgcaatatatcttgcatatgcattgcttgtatcttgatttcaagaattaaatngtcatcatanaaaaggaggagattgtagaagccaagaccttgcctttgatgttntgatgatgccatatgatcatgatgttttatgccttataaaatgcactttcaagtttattcaagacaaaatccaagaaaacggatcaacaacaagaagatctctattgttnaggaaggaattccaattgaaactgcaaaggtttggccagatattaacaaaatgtcttttcaaaattactcttggtatcattaccaagatgtattaatccatggcaaatgattatacgcatcaaattaatcaat

SEQ ID NO: 43474 - DNA, 511 bp, Glycine max
atgttgatgcacagtgttaagggattatgttcgtttcctaattaggaaccagtgttaaattgtaccgtcatactttaacatgtttgacacacgagtgtgaggtcgtgagtattgtataattcatgagtagtgcctgcttataatattgttgttgaaaacgagttttattactgtcgcaacctacccttctgcgggagggcgacactgtgctcgcgggttctttcttcatgggaggaaaatgcgcatagtcgccaccaactgttttttcgaggaattacgtttaaaaaccagaaatgtgtagtcttacgactttaatttttaaaagttcgggagttgtttttcacccgggtaagttttacattcccacgttcattcaagggatgacatcttttataagtgtgctatatgactttaaatgtgtaatttgccttttatgatctaagtctttatgccttctgaatgttaactttttggtaataggtgtatcctcccccccccccccccccccccc

SEQ ID NO: 43475 - DNA, 369 bp, Glycine max
  unsure (1)..(369): unsure at all n locations
tctaatcatctaatggtcgtattcttcatcgcggtcaattcgtactctaaagaattaaatgcaatcgatcaaactaagatagctttcgtcaattttaaatgtctctaatattaaaactgggctttgaataaagagagcantcattgatcgtacacttagtgtaagaattaatgtctcatgtgagtggcatgtgggttattaaggattaataattaaataattaatttgtatggactaagatgtaaatgggtcatgggcttaagtggagcaatttctagatacatcatactattgatgggagtagtggttataaagggatcaatacccgctaacatgagataagaatctccccctaacattagaatatta

SEQ ID NO: 43476 - DNA, 338 bp, Glycine max
  unsure (1)..(338): unsure at all n locations
ggtcttacaggaaccttctctgtattgatcatcactttatanttgaacaatatttgttgtgatacattgttgcctccatctccattcggtggctctgtactaaacctgcttggtacttacagagaaaacaaaattcttgtggccattgttttcttgaaatacttaatattactttccctcctatgtataagaaacaaatgggaacatttatttgttcttaaatataagaaacatatgaccacctttaaatgtattaagtgcccattctcttctatattcttggttattgggaagactaggtaattagataagtcatatgtattggtggaaaaaattat

SEQ ID NO: 43477 - DNA, 377 bp, Glycine max
  unsure (1)..(377): unsure at all n locations
aaaagntattgtcatttgaatntgttcaaagcttctatttccaatttcaagcatcatgatatatgacgggactcaatcggacatccgagtaaaaactaattgtcgtttgaatttcctcagagtttctattttcaattttgcgagagcctctgtattaatctcgaccgtcatatactattaaataagtcaatcggacatccgagtcaaaagttattggcattagaatttgctcacagcgcctgttttcaattctgagcgtctctatatattacgggaatcaatctgacatccgagtataaatttattggcgatagaattagatcaatgtttctattttcaataccgcgcgtctcgatatatgaagggactacatttga

SEQ ID NO: 43478 - DNA, 466 bp, Glycine max
  unsure (1)..(466): unsure at all n locations
gtgtgaaaggatgtgactcttcatattngaatttgaatttcaacgttcaaaggcactggtaatcgattacagctttttgaaattaattggaacgttgtaaattcaatttgaaaactttttcaaatccattttgctactggtaatcgattacaacaatctggtaatcgattaccagagagtaaaactcttntggtaaacatgtttgagaaaaatcatgtgctactcaatttttgagaaaaaacttttcatacttatcttgattaagccttctcttgattcttgaatcttgagtcttgaatcttgatcttgattcttgagatcttgaaccttgaatcttgattcttgactctaaactttcttcttgagacttgaattcttcttgattcttatcttgaactcttngaatgttcttgattcacttgagttgttctttgatngatctttgattcactttgagttgtctttg

SEQ ID NO: 43479 - DNA, 469 bp, Glycine max
  unsure (1)..(469): unsure at all n locations
cagccccttatgcacttctctctctctcgaaatagctgaggaaaattagttcagtgaacacaattcaagccgaggcgctttcgtaacgtttctgtaacgtattcgtgagtaattacccgaagattctcgaacggtcttcaagattcatcgntcggtcttcgttttcttcaggtcttcaacgggtaagtacctcaaaccgagcttttcaattcattctatgtaccccgggtggtccacattttgattcatgtatttttattctcgttttcatttactttttatacccccttttgacgtgcttaagccatttatttaagtcatttcttgcttaatctaaaaataaaataaatttccaccgatcgtttgaatggtatcatccgttagttttggttanaatgaatttcgaccgttcggtcgtgccgttaccacgttggaatatctaaagaggggaaataatcatataataata

SEQ ID NO: 43480 - DNA, 248 bp, Glycine max
ctgcactttaccagcaggctaattttagtatgcagaaggttaccctggaaactagagaatcaagactgaagctagataagggagggactaattatcatttaatttgccttatataaacatgttaagacctgcaggattggttagtccctgaatacccaaaccaattctaaatttttttttcacaagtcttgtttagttctgacgatacccatttgatatcactccggggtcctacatctttgaactat

SEQ ID NO: 43481 - DNA, 382 bp, Glycine max
  unsure (1)..(382): unsure at all n locations
aaaatgagaaactttattttaacacatataccttttacacacaccttaattgatccacctccttacacttctaaaggtaaagaatatgctccacctccttacactcttgcagggtcatngtgctcaagtgagtcatcataatactagttttaggaaaactttatttgatccttaccatttaacaaaattaagaaaatgtatttacagttaacaaatttccattagtaactagtgttatataagtttaggcgctagtttcttagcccaaaagggttaataagtctaaacatcttaaacatcttttatttaaaatgaatacctcttattaaccaaaatatatatatttatatatatatatatacatataatttataatatatta

SEQ ID NO: 43482 - DNA, 387 bp, Glycine max
  unsure (1)..(387): unsure at all n locations
agcttgagatgaggaagtgtagaatggtgattcttctcttcttttattcgtgactacagagtggtaccaggagatatgtcgcgagggtcaggagaccttggggacgtcaggtggggtgctattgcccaaaaccaagcttgaccaatcccgaacccaacccggcatantcagtcagtgagaacctatgatgtacctaaacaggcgagctcctcgcagtcaacagataaaaggaacaaataccacaaagcaaggaggcttgtgtggtggctggccagctgtgaactttgtttgatatatgggatatggcctctggtaatcgatcaccaggggtgggtaatcaattccagggcttaaaaatgaacacaagagactaagatggtctctggt

SEQ ID NO: 43483 - DNA, 493 bp, Glycine max
  unsure (1)..(493): unsure at all n locations
cctaatacaggctatgcgcatatttcagataatnttttcttgcaaaaagtgctatgcgcatcctgctgtgctaaaccccaaatgctcactggactttacaactatcagttgggcttagcgtgaggctagcctaagcgcttgggtttctaaactcaaacgtcatgtgggtaccctaatcgcaactgtgcgctaagcgtgccatacaaatttcaatttttataaaaaaccaaaggctgaggcacttggttgttaccccaaatacctttagcttctgcctttgttaactttgagcaagtgtgtatntctattgcatgtgtgtcctgctgcgtgtctacatcttctttgcttcatttcaatcacaatccaagttagtgggtacatttccatttttatttttcattcttcaaaccttangatagatgacatcttgttttcttagatgtatgttgataagttaagtattttagttctagggttaggcattttatgatct

SEQ ID NO: 43484 - DNA, 429 bp, Glycine max
  unsure (1)..(429): unsure at all n locations
agcttgaacaaaggtgaggatgctcatcctctttgcatcactctttcattagtacttttgttgttttccaaccttagaacagcttagtgttcttttcttagactataagccttttttcgtgctaaagatccgagcttgcataactatgagttctcccttcatctggggcttcatcggttntgtcccttgttttctaaatggcaaanaagaaggcgaagaagaataaaagaccctcttttgcataatgtagttttgttttgtgcacaaggttgtcaacagtgttccaagtgttcatgtttttttttgtgtgtgtgtgatcatacttggtattacagtgttatttgttgctacgatgttggatgcatancctttttatcntgtttaagcatgtntatgggtttgtccctctctgatgttaccttatgttga

SEQ ID NO: 43485 - DNA, 368 bp, Glycine max
  unsure (1)..(368): unsure at all n locations
aaatttattaaacggagtgtcaacctgaggtaagtttttatcaaaatgacaatgaagtgtcaattaataatgaaaaaaaaattgacaaaattataaataaattattataaaacattattataaatcgttggaacaaagagtagtcttgaaaattctgtggtgaaaattatttttgaggaaaaatcaattttctaaattaaaaactaatcataaacttaatatattgaactttaacacgtggaacttaataatactctaaagggaaaaaaaccatcaaattaattttctaaagtctcacgaattggtatatnttctctaaaataattggttattaaataaatcctattaagacctacaatattagcata

SEQ ID NO: 43486 - DNA, 439 bp, Glycine max
agccttggagtttccaagtgccaattcgtcctcttctttagtccagtcttcttctggcttcaattcatcagtgggctttccttctgtgtccagcatcttgggatgttcccagcctttgatgacagctttccaggttctgctatccagtgatttgaggaaggccaccattcttgctttccagtattcatagttgcttccatcaagaattggtggtctgttcactggtcctccttctttctccatgttcatcagaatttatctccccagatctcactctgtgatttcgagtgttggctctgataccaattgaaattctgataccaggggacagatgtcgtacaggatgtcacgacatcacgcttcagaacatgcagtttatgtgtgtccgtatgaacagattaaacaagtaaataacacaagagaattgttacccagttcg

SEQ ID NO: 43487 - DNA, 348 bp, Glycine max
  unsure (1)..(348): unsure at all n locations
cggtttatgatcccaacatggttgggctcgggtggctaacacatgaaacttaaaatgtaatgtgaagtttcacgcttcccccctttttgtttttgtttgtagaggataacgcaaggatgagcanacatgaaaacaaatggtatgcaattntgcagatcaaaaagtttgttgaacgcatatgcatgatgatgccatgactcatgcaaaatgtgaggcttgaatattgatacggacaaatgcangatatgtccattatgatgttatgaagagatgcttatgcgatgcatgatatgaatgcattttacggacacgagagcccggaaaatatctctcttactccgcatttgg

SEQ ID NO: 43488 - DNA, 451 bp, Glycine max
  unsure (1)..(451): unsure at all n locations
gcttctagaaggagatcaacttgatgttctatgcttcttgaaggtggcagtccatgaggaatctccttggaaaagacatctttaaattcctgcaataagggttgaacactangagaaacataaatagttaactgattagaattatcactctctctcttttgtgtatcactcttttcctcgggtgtatcactcttcttnttcatattcctttgtggagcctcactattttctttctcttgttctctcttttctctcattctgatttggtcatcacatgcttctctaggggatagaggtttaagagtaaacgaggaagatttgactattcgtctgtagggctcttctttgttacggttcaacaaacgttgcatttgatagtccacgntccagaaatagcgctgagattntccagttgatatatacaccaccattgcaccagttcttgcatgat

SEQ ID NO: 43489 - DNA, 238 bp, Glycine max
ctttcaatgtgtctgatctatctctttttgatgcagatggaggaaccttggatttgaggacaaatccttttaaaaaagatggagtgatgaggacataaccaatggcaaagaccatgaaccacttgaatgtcccatgaccagatgcagactttaacaagcccaacacgtcatatagacaaggctggtcatttgtatagctgtcattgatgatgattgaaagcccaagtggagaaagatg

SEQ ID NO: 43490 - DNA, 455 bp, Glycine max
  unsure (1)..(455): unsure at all n locations
gaggtacttacccgttgaagactgaatattacgaagaacgaacgatgaatcttgaagaacggtcgagaatcttcgcgtaattactcacggaaacgttacggaagcgccttggcttggattttcttcacggaaataattntcctcagcanattcgagagagagagaagtgcctagggggttgaaccctnttcttcttcacttctccccctatntatagcaaaataggggagaagcttgccgcccagctcgcccaggcgagcaagggtgcttcctccagtcttctggagggcccaagtgggtctagttgctatttgcacccccctgtttactaaatgcaccccctttctatttttttgtaattctttttccgtaacgttacgaaactntatgaatttcgaacgatacttattttcctttcgcaaggttacgaatccttacagagtatgtatttactc

SEQ ID NO: 43491 - DNA, 359 bp, Glycine max
  unsure (1)..(359): unsure at all n locations
atatcatacgattatgaaacaaataagaataagggttattattagatggaatttggaatgcgtcattgtaatccacgaaaatcacaggtgaatgtcaagaactcaagagaagtaatggccataataattaataaatcatataaggatgtgctgaaggtttgaatacagatatgcatctgataatctactccacagacacgagagccgcataagataatattgggtgtacttatgaancaaccattttatacaatagacagattgacacccatttgaataaagagattacttacttattaactatgttatacacgtcaaaccatcaatgcaagcatcagtctccctcttatttacttcta

SEQ ID NO: 43492 - DNA, 447 bp, Glycine max
  unsure (1)..(447): unsure at all n locations
atcactggtaatcgattacagganactgctaatcaattactagagagtaaatactctagtaacttagaaaattttgagagaaactctttttgtaaacaaaattgtgctatgtttggtttttgaaaaatccttttcaatagttctcttgtgaaatcatcttctcttgaatcttgaattcatcttctcttgaatcttgattcttcttcatgtcttttctttaatcttgatcttgaacttgttgactcaatcttgacatcattcttttgggcttgcttctacaacgaccatagtaaaccaggtctgtgatctgttgtgctacctccaccctccaccatgttgttgttgggttgggtttgaggaagttatggagggcatcggcaaatggttttcttggtagtttctgaattttattcccatttacaaattatntacccaattttttcaatg

SEQ ID NO: 43493 - DNA, 323 bp, Glycine max
tttttgacagatacaaagctgatggaaagggtgcatccctgcatccttcttccaagagacattgttaattaagtgggtggggttggaatgagctcgtgttatacaacaaaaattatatacacaaaatatttttgcctttagaaaataagcaatcatattcattaaaatggaaacacaaaacaagaactcgttacattctgagctagaaaaaaaacaaacatcaatgaccaatgtacagtgcaatgaaaccacaacactcaatgcaaaacattgtcttgttgaaaagaaaacaaccattaccacagagataagaactcagaaaa

SEQ ID NO: 43494 - DNA, 355 bp, Glycine max
ccatttgtctacctaggaatacctatatgtgcaaatccgaggcggggtcagctgtgggatcctattctcaaaaagtgtgagagagtattatctcagcggaagcaaagacacctttcgtttggggggagagtgacgcttatccagtcagtcttaacttccattcccatttattttttgtgttctttcgggattcccaagaaggaggtggacaagttagtcagtttgcaatgtatattcctatggggaggaggagcagatcacaacaagattgcttggattaaatgggagacagtatgcctcccacaagataaaggggacttgtgtatcaaggacatatatactttcaatcttgctc

SEQ ID NO: 43495 - DNA, 243 bp, Glycine max
  unsure (1)..(243): unsure at all n locations
ttcttgacattcataatgcgaaatccaatgcaaaatgaataaataaacttgttaatacaatcttgttatggcgcatgtagatgaagacgctttcatttgcatgcatgatgggtgttatgatgggctttgggagatccanatatgcctttaaaattaaataactaagcgactacataggatatagttaatatttatattattattgagatgttgacacacaattaataatatccattgattagt

SEQ ID NO: 43496 - DNA, 481 bp, Glycine max
  unsure (1)..(481): unsure at all n locations
gcatgcaagctngagccttgatgccttaagttttgtcttttttgatgnatccagccaggagaggttattgaaaattttccagtgacagcggacaatggtgttttgtgttggataaaatggctacactcctggagggaggggtgaatatgagtgttcataactttataaaaaaaatcctctctaattgttcacaaacatcttgatatatttttcagactttctaataaataaaagcttgctttggatagatccaagtataaaaaatattttgaatcaatgatgactaagtgatgcttttgaaatttcctttagttcttgggttcagtgtcatatcagcttaatctttaacaattacagttaactaaagcatgttaaaaaaccaaactcaatagaaagaattttaaggagagagagaaagtgtttggcagatcactaacctctcaatactcaaagtagcaagtgtggtagcctgatcttcatg

SEQ ID NO: 43497 - DNA, 405 bp, Glycine max
  unsure (1)..(405): unsure at all n locations
catgcaagcttatattcacagagggtcctagtattggatgccttagtctctnttcctggggtgggaaatatatatcgattgtaattgcttgtaagaattctcgatgcatagtggaaatctaattcatgttgtggattagataactggattagcatctttataaatagagagtgaaccagtataaaagattgtatcattttctcttattcatgcctttcagtcattcaaggtttaatcaactcattcaagttttatcaaggttttaaagattcaagttttatgattgtgaaagaaaggaagttaatgaatgatcatgtgtaaggaagggttcatgaccttgtagcanggaacctattgggtgagaacttctaatctgtctctaggtttgcttcaggttcatgcacg

SEQ ID NO: 43498 - DNA, 216 bp, Glycine max
cttggctttgaggggtaataaacaaaatagctttatgattccccagggagtaagttcaactcacacaaagcgctatgtcccaccttaagttatctacttagtggagcctaacgaagtaccaaagcatgcccctatacttcacatgtgataccctatttctcgggacctttttgttgatgtactcgttgacattcaatgttatcccattgctgatct

SEQ ID NO: 43499 - DNA, 459 bp, Glycine max
  unsure (1)..(459): unsure at all n locations
agcttcaaagaatattcagacaaattgttttttattaaccgaaaggagagagaataaattgcatcaatataattcttccacaacattgactgaaaaaggaactgaatctaagacaccccaagatagtagaccaactgcaaataattntctaagagattcaaaagaacatataatgtgaaacgggcaaagcaaaagaacatacaggtcanactacgtccagtcaacaaggtaatagagacccctaccccaaccaaaaaaacatagtccaacgacaacaatgtgggtctctacaacaatgtccttataaaaagcaaagaanatagagtctaaatgcaacaaaaatgaatgaagacatgaagtttacctagagtggcagctagaggcaacgcagagtgngactaagatagaagagtcacgatgtgatgtggttgtagtgacgatagggtttcaacggcagtc

SEQ ID NO: 43500 - DNA, 424 bp, Glycine max
  unsure (1)..(424): unsure at all n locations
agctngtatcttctattaatggagattaatcttttcttccacatcgtgtgngctgcaggaaatgatcaaccatatgaagattggtatagtagaagcaaagcatggtctctatcacctgataccaaactagttgaccaccaaagctgtaaactctaccatcacccatcctcnatgcaatgtaattcccataaaccttcggcactttaggttgcgtcacccttcancttgaaagaatacaatgtatgaaaacctattatcctcttctaagaaataacacaaattgtgtctgcaacacatgtcatttatgcacagcacaagaatatgccttttctcctaacagttcacatgcatctcatgttatcgatttacttcacatggatttatggggtccgtgtcaaaactatcaatgcatggacacaaatat

SEQ ID NO: 43501 - DNA, 246 bp, Glycine max
ataaatttatagtgtacaaaagaccaatcttcaatgcctcaaagctaaaccccaaccatcttattaccttttctctctgcacacgaatatggcatcaatttgcgacaaagatatacctattcgactaacaacatcgacgctttcaatgtttttacagtactccctcactcgctagagcaccgaactcaagccggcgatctaatgcacgcttttacttacacttccaatagtaactatggttacact

SEQ ID NO: 43502 - DNA, 360 bp, Glycine max
  unsure (1)..(360): unsure at all n locations
gaatattntgatgtcctatgaaataactctcatgtaaccgaaatcttcctagtcccagaattgatgagctaacaaggcttcttgtgtaaaggcagtggaaagtcntnacaaatacctaggattgccacattcataagtagatcaaaataataggtcttccaacttgttaaagagtgtggatgaaagtaatanggtggaaagagaaagcaatggtggggcctcgtatgttttgaaaattcattggtggcctgagtgctaaaggcaaaatactatccacggtgtcaccctttagacgcatccagaggacatagaccaagttatgtgtggtctagtattattttggcatcaaaggatataatg

SEQ ID NO: 43503 - DNA, 503 bp, Glycine max
  unsure (1)..(503): unsure at all n locations
atattttataaattaattatatcatgatntattcattttgtttttgtagcccacatcattaatattataagagttataggtggaaaaacattatttaattttacattgagaatttgaaatgacaattatttcaaaagaaattttttacatgatgattattatgggattgaggaactactctcttttatttaataatgttagttttttaaaaatatatttttcacctatttattaaacttaggatgcttcacctatttttaagaattcttataaagtaagaaataatattctacacaactaaccttattaaataaacgaaagaaagtactccctcatgcatactaattctcacataagaagaaatttttttttctaaaatacttttattttagattttaacgttacttaantaattattttcactataactcttgtatattatgagatggacaaaagaatcaaatgataagcgatataagataatttattaaatggtatatcta

SEQ ID NO: 43504 - DNA, 473 bp, Glycine max
  unsure (1)..(473): unsure at all n locations
gcttgtccatatcattattaagtgaacacagtttaattttctcaccatacatgtnattgagtgatcacagattaattntctcgccagacatgttatttaattaaacttgtggctaatatgcgcttaatacatgtacttttggcatttatatcatatcgaaagacttatttattgtgctaaaggaaaaattgggtgcaaattttaagtcctttatttcggaaaaagtgactctggtgccgggggacatttcttacgaggacttgtgtttaactgattccattctaagggaagagaattgcaaccagacagatgttattgtcaatttggcagctaccactaagtttgatgaaaggtacaagcttttgtatcataagaattntttttccaccaatttacgagtttaatatttatgtacaggagatataaaaactttcatttccttaaaaagaattaagnaattatatactggtaat

SEQ ID NO: 43505 - DNA, 466 bp, Glycine max
  unsure (1)..(466): unsure at all n locations
gctagttggtaattcctgagtcgtaagtgttgaaggggtttgttatatgctgactttggagggtatgtgtatgttttttctgtctttgtgatgtgaatgtgattgtgcttgtgcatactgtgaagttgattggaacgtacttaaaagcagtggttctatacttctatatcacatattccatcaatttctatctttttaaccaatattcttacactattgattaaataactaaaaaaatatttattatataaattataaaaaagtgtaaaaaagtatacataatataattaagacattatacataatataattttttatttgctaacaaaaatatttgtgttttcttaatcaatatacttaagaaataagacactagttaggtatcaccaaacttttcgctttcgcatatgaatgggtaccgctgcagatagaatataagtcngatgatgagaattgagccttctca

SEQ ID NO: 43506 - DNA, 448 bp, Glycine max
  unsure (1)..(448): unsure at all n locations
tcacaagacttgcttactcatttagtgttgatttctctaccttcacacggtagtctgtttaagatctcttataactgttagaaggagaaatggtctcttaatgagcttatttcataccgtgtgcaagaaaaggaaatgctgaagctagaaaggactganagtgctcatgttgtgagtacctctaaatacaaatgccatagaaataggactgaggagcccaaaatgaagttgtttatggtccaggacataaaaatcaaaatcaaggtgacaactttctctcttacactaacctggacatgtagagaagaaatgtaacaaatatcatgcttggcgtgcaaagataggtatgtttcttactttaatctatctaaggtcaattaagctttagtacctatacacactaggtggttatattctggcgccactactaacattattgtttcaatgc

SEQ ID NO: 43507 - DNA, 422 bp, Glycine max
  unsure (1)..(422): unsure at all n locations
atgctttctttttcacttgtgaagatgttaaagtttggctatgaagatgggtcacactgagaaacatttggtattccattggtttataaacttattgagctagctttgatattgccggtgtcgacagcatccgttgaaagagctttttcagcaatgaagattatcaagtctaaattgcgcaataagatcaacgatgtgtggttcaatgacttgatggtatgttacaccgagccggagatatcaagtcgctgatgatatngatattattcgaacattaccgcaaagaagtctcggaaggacacttgcctcgtaatttattaaccccctattgaagaatatgtcatctcttttatttaaactatattttgttgacaaatgacgagttcttttattttgttgatactattacatttatttccatg

SEQ ID NO: 43508 - DNA, 344 bp, Glycine max
ctcaccagcaccgatgaagatacactctctcaactgtgcatccaactaggatatgtcatcctttgaaacatgcacacaagatttgtagcaaaacacttcacattgatgccgaaccaaatggtattcagcaccttactattctaagcaacaacaggactaagatcgataacatgcactgcatacagtgtctaaccccagaagagcttgcgtaactttgcttgagagagcatacatcatactctctcaatcaatgtcctgttcatcctttctgccaaaccattcatgtgaggattataatgaagaggtttctcatgagcaatgccatgcagcttgcagtaaacatc

SEQ ID NO: 43509 - DNA, 412 bp, Glycine max
  unsure (1)..(412): unsure at all n locations
atacgaaagttgagccgtaattatcctaagcttctttcgtatatccttcatgtaagacaaggcctaaactaaacnnnnttattgtatcaacataattaacaccaaaacttanaccgcaaatccctcatgtgaaactaagattcaatcctacttcaatcaagttctaaggcaatactactatttccaatgctaaagtcacctaactgtgcatgcaaatgggtgatcagaccaaaagcatacaaacatcaagcattgaatgaagcattgaacacagaacacacaatcaattagatattatgtanttacatctagctgtcattataaatccccaactagggtggttagccagccattataaagataccctaacaataaatgagattaaaagcagcgaatgatagttccttacaca

SEQ ID NO: 43510 - DNA, 214 bp, Glycine max
agctatgtgttcttgttctgaatatataatacaaggagctttcttcatctgttcctacgtgtctacccgtactcattcatttgcatgcttacttctttatttctgaaacggcacatccgatgacgagttccctctaggtactaatacctgtgacccgcttatcaactttgagctagaaaccaatcaaacggtaaatgaacggaaccacgatgtg

SEQ ID NO: 43511 - DNA, 445 bp, Glycine max
  unsure (1)..(445): unsure at all n locations
gcatgcaagcttataagaacaaaactgccttattcattttttaatatgcatgtgaattaggacgcatcaacaataatcaagccaaggctattgtgcaagcaatcaatggggcaaaacacaccaaatgattataatgatggatgactcatattctcacaaaggtaaaatcatcactttcaaattgagctttcataactatcatgacatgtacggaagaatcaangatttcaagtcacaaaatgtcaagaaaaacagtagtgggatttacctgccaggcgttcaagcatctggtcaatgaatggcaggggaaaatggtcctttttggtaacctggttcagcctcctatagtcaatgcagactctccaactgttctgcacccgagtaggaatcatctcctccttctcatttctgatcactgtgaggccagtctttntctggactacct

SEQ ID NO: 43512 - DNA, 83 bp, Glycine max
tactggatgactctagtacataagtctacatcttgaccggtgggatcttcttacataatgtctataacccaatatgtactacc

SEQ ID NO: 43513 - DNA, 480 bp, Glycine max
ttcccttgaagaccactgtttttatcttgtgatcccatagatttggcgtgctatactattcgattgccgagttgcccactgtgtacgtgcaccacaaatctggttccgttgccatggctatcgaatgagttcataggaccatgattcgatcgacctgacattcttgatcttaatcctaaaattccctctatatataattggtttgggattggatatatagccttaataattttcacaaacacaggcccaatatatagtcttagatgcaaagaagggaatccaatgcttttcccactatttcgcggaaatcaataataatttgaatacttacaataacatattctctacccacttcttttaatatactctctatatttttggtacatatactatttaatattatttgttaaaaaaattaacaactatggatagaattattagatcaaaatacaaatcagatattatataattttaacaaat

SEQ ID NO: 43514 - DNA, 349 bp, Glycine max
ctgcagcttgcattggacttgcgaagcttcacttttttattatgattattaccggccatctgatactattatataaacgtacgagacatttgtcgtgtgtgatcctcacccactcatggagccacaatatgatttttaagacaacccttgccttacacctattcccttggtcctttgaattaagatatatggctcatacaaaaaatatttaccaatatgttctaggctttgctatagatactaagaaaacgttcaccaagaaaaaggctaacaatcgtttttggcactatttatatggaaatagattcagaattttagaattcttgtaacattcctttatactacctat

SEQ ID NO: 43515 - DNA, 426 bp, Glycine max
  unsure (1)..(426): unsure at all n locations
ttataccccctgttgacgtgcttaaaccattttacttaagtcatttctcgcttagcttaanaaataaataaatntccaccgaacgtttgaaatgtattatccattaacttcggttaaaataaattccgaccgttcggtcgtgccgtaaccacgttggaaatcataaagaggttaaaaaaaaaagaatataaataatcaaaaaaaaaaacatcttttagtaaaataaagcggaaaaccaatcggacgttttctctttgggatttctcattcttaatcgaactgattaataactaaagtgaaactaaggctaaaatcaactcgcctagtcaagctcgtccacaaaaataggtttttgaagtttgtcatttcaatttctcactaagtaaaatggatcatttttaaggtccaacgccttataaatgatca

SEQ ID NO: 43516 - DNA, 437 bp, Glycine max
  unsure (1)..(437): unsure at all n locations
agcttataagaccaaaacatatacaatgtatgtttgcaacaatctaatactcacgctaatctagttgtccaaaacacatatgaattatacaaaaatacttctcacaacatgggaagtaaaacccctcagacaatttcacataatcatatcacaatcataggttcaaaaacaccaagagcattaaattgtatcaaccaattcgcattatggcatcaattgccccatcaaacataataatctcatgattataattataaaggcgtaattacaatacaataaacatcccaaaataaatctcaatgtgatcctctaaggatccctacacatgttcattataacctcaattgcgataaactcatctcttacctctatgcgggtttacttgtgtagtccgacagagatagtggcatctctagcgngctacttatattcctcat

SEQ ID NO: 43517 - DNA, 415 bp, Glycine max
ctctacaaggaaaatattgagtctatggatattatgaaattcgttacggagattggaacttataacttcgaacttatgaagacaatattaataataacaaatcaaaaactgatggaaacttgagtggccgatgggaaggtagtcacatggccacacacgtcgacacaaagataaagactattgtactactgtcaatgaatggagagtggcgtgggaagttgctttcctcacaacattatgttttatccttcgtactatgattgcttatacccccccatgaatgatgcataagaaatgaattgaaaggcaacaataattggtacaatccctactactacccacaccatgaatgatatgacatgcatgatgcatgtgatacatctgctctcattctggccaactaagaaaattaaca

SEQ ID NO: 43518 - DNA, 473 bp, Glycine max
  unsure (1)..(473): unsure at all n locations
agcttaaagatccagcctctatagaagcttctcaagcaaacttccatcattccttaactcctttgttaatgaactacttttcattatcggagatcaaagtgttaggaatttccaaatggcaaacaatgtttttccaaatgaatttttgaacatttgttgctgaaatggttgctataggctcaggctcgatctattttgtgaaatgatcaatgccaactaggagaaactttacttgtccttttgcaggggaaaaggtccaagtatgtctactacccaagaggcgaaaggccatgaagccactacattgtgtaattcttcatccggtaggtgatatatgtttccaaattnttagcattcttcanatattctattntgtctcttctcattgtcggccagtagtatccaacactaagtacttgggcagtcattaattgagatcccaagtgcatttcgaanattcctttatgcatctt

SEQ ID NO: 43519 - DNA, 343 bp, Glycine max
  unsure (1)..(343): unsure at all n locations
tgctataaataggcgtggggggttgacgggacagcgttcaacatccttaataagcatatttcactaaaattagtgagaagaacgagatacaaagaagaaaaatcatggccaaggtgcttccgtaacgcttccatgacgtatccgtgatcgattccatgaacatttgatgtagctcctatgttgagctcgtatgccttggatcttcttcatcaatggagtcctttgngtaacaaacccttctgtcgttctatttaccactctataactggaaataaattcttatcttctttatgaaacccatcattgcttatgaaacattctaattatatttattatatatctt

SEQ ID NO: 43520 - DNA, 187 bp, Glycine max
  unsure (1)..(187): unsure at all n locations
aaaacnagaatagaagaccctcgcagcgcgagagttttgattttccagctgggggggaattagcactatgaaccaccccatccaaacgatcccctacaccagccatcacaacgcaaccagcatgcaacgctggagtcccgaaggaagggaatgaatcgcaactaaaagcagaacataacagaacgga

SEQ ID NO: 43521 - DNA, 401 bp, Glycine max
catgcaatcttcttatccaaggctcatcttggtggttattctcctttttctatggcttattccctagaggatgacgcctcctctcacctcttctcctatgacttacgctgcatctacatggtggaaagctcccattcaaggacctcattgaagcttatagatccatcctccatataagccccacaagcaagcttgcatcgggtgttatcacagcacaagagctattagttggtgctccttaaacctccattaaatttctctctataccttctctgccattgtagtttctacattgttctccatgtatctcctcacatgttcagttctaaatgtcgttcacatgactctttagaagactcccacgattaaacttgctatagaaactagatcttagtctctat

SEQ ID NO: 43522 - DNA, 185 bp, Glycine max
atgatccacacttcggttaagcactggctacgaaacactttagttaacctctttttctaaatggagcttaccgttctgaacaatgatatgcaacgtgctatatgtgtcaaacctacaattcaatcattttattgcgaggaagcttatctatggatctctctaacccatacattattcttaaccaa

SEQ ID NO: 43523 - DNA, 181 bp, Glycine max
acgagacatcttgccaaacaaagtcaagttcaccataactcgcctgtgcgttttcttccatgctatatgtagcaaagagaatgatccagtaatgtctgatgagttggaaaatgaagccgcaattatactgtgcctgttggagatgtattttccccctgctatctttgacatcatgattcac

SEQ ID NO: 43524 - DNA, 283 bp, Glycine max
actgcgctcagctggagtaatatatgttttgcattaccaccttaatgtacttgacaaggatgcgtcaattataacatgtaaatttgttgtgatcattaggtattaccatattacgccttattattatgaatgtctatattgtcttagtgcagatttgataaaaagtacagttgttaataaactatggtatatgactctactagaatttagaaaatattgaacatggagacataataagagcacgccatgatgtttattataaatatagacagaaacatacttt

SEQ ID NO: 43525 - DNA, 338 bp, Glycine max
  unsure (1)..(338): unsure at all n locations
tttaaatcctntgcattcactaattcttgtgtaagtacccttccaaccaaccaatgatgatctggttctatcttccaaacatgaccatattcacctagatctagaatcttaatcacatctccatcatcttccactaaaactttatttgtgcacaatccatgataacattcacgagatccacaccacaaaccctaatgagttgtgcatgtgagcgggattaaaccctaacaatcaacaatagtgctgagaaaagcaagaatacatatcttgngaatgtcaaaaccttaatgacacccctaagggagcatgtangaagaataaacttaggttttcttttg

SEQ ID NO: 43526 - DNA, 409 bp, Glycine max
cagctgagattaactgcggctgcagcatttattgctgaccttttccaacctccgtcacccttgttgcccaaatttctttgatctctaagtacatcagccaatacacattccatttccaaatttcatgtaaaataacttattgtttcctcattattttttcctaaaacttttcttttgtccatcatttttttattagacgactccattgaagttaatgtcacttattcaacctgcacataacaaatagtagatatgacctactttattcatttgactagttcactgcacaatcatagaaaatatttcaagcaaagtttttatgcaatagcaaagtacataatagtctatcttcaatagaaaagtacaatagtaacacagcacacaaagtttgtcagcaatatcaaattac

SEQ ID NO: 43527 - DNA, 247 bp, Glycine max
  unsure (1)..(247): unsure at all n locations
tatanggttaaagtctcacgattgtcacgtgctcatgcaactattgttagncgnggctatacgagacatcttgcctaacaaagtcaagttcacgataactcgcctgtgctttttctttcatgctatatgtagcaaagtgattgatccactaatgtttgatgagttggaaaatgaggccgcaattatactgtgcctgttggagatgtattttccccctgctattcttgacatcatgattcacttgatc

SEQ ID NO: 43528 - DNA, 362 bp, Glycine max
  unsure (1)..(362): unsure at all n locations
agctntagtgattatgtgtaactacaaattttatattgagtgtcctcattgatatgttctacagttggtttcgcatgaatttctaattgaacatatgattcatgggtatgatcaaggcatgctttctttctttacattntaagccactggccaaacagctatcccaatgtatactatnttatcatttgcaagccctttgagccaaacacttgatattttattggaacactaacctacgataaaagtttccaaccttaccttangttaggagagcaagggtgtttatgatggggatttctattatttggtggctaatgtgatgtgaatacgttgtttttatgggtattacaggaaattaaata

SEQ ID NO: 43529 - DNA, 550 bp, Glycine max
  unsure (1)..(550): unsure at all n locations
atgctacggggnnnagnnntttggggcccttgnnnccctaaagcccctcgcnattnatccgcncacctagaaaactaacctctggagtntnnaagtgnnaattnngtttttttttattttagttttnttnnggnnttaattnatnagtggggttttnttttgtgtncagcatcttgggatgtntccagnctttgatgacagctttccaggttctgctatccagtgaattgaggaaggccaccattcttgctttccagtattcatagttgcttccatcaagaattggtggtctgttcactggtcctccttctttctccatgttcatcagaatttatctccccaaatctcattctgagatttagagtgtgggctctgatcccaattgaaattctgatacccaggaacagatgtcgcaccgtatgtccagacatcgctctttaaaatatgcatagtgtgtgtgtgcgtgtgcacattataacacatgtatataacaccaagaaaattgtntacacacgttgtgtgcactctcccatacatgtgggtgttcaag

SEQ ID NO: 43530 - DNA, 231 bp, Glycine max
  unsure (1)..(231): unsure at all n locations
tgctcaaggtctttctgcaatggactaacatcattacaacacttgatctatttcgctcagaatgttctgttataattcgagttttttacatgaacgccttctagctatatatagacttcagagcttcaattgattganatatcccatctggccgttgcttaataactatantgcatgacacgaggtcttttctgtatctagagagtgaggaccacatacactttttgcgtt

SEQ ID NO: 43531 - DNA, 260 bp, Glycine max
  unsure (1)..(260): unsure at all n locations
agcttgcctcanagaggtccaggaaagacaatgcggccgattgatctagttccgccccggagtacgacagtcaccgctttaggagcgttgtacaccagcagcgtttcgaagccatcaagggatggtcgtttctccgagagcgacgcgttcagctcatggaggacgagtatactgatttccaggaggaaatagggcgccggcggtgggcaccaactgtgtactcccatggccaagtttgatccagatatagtccttgagtt

SEQ ID NO: 43532 - DNA, 408 bp, Glycine max
  unsure (1)..(408): unsure at all n locations
gcaagacttacggaaagatcttagagttgaccatagcatttgtgtccatataagccattgcagcacttacccaatactacgaccagcccttgagatgcttcacattcggggacttccaattagtaccaaccattgaagaatttgaggaaattctaggatgtcctctcgggggaaggaaaccatatctttcctccgggtgtctcccctctntgagcagaattgcaactgtggtcaaggattcagccagaggtttggaccgcataaaacagactcggaacggcatagcgggcctgccacagaagtacctataagacaaggcgaggggtatggccaatcaaggagactgggtcccgtttatggatgtngttagctttgctaattttggggtcatcctctttccaaacgtgg

SEQ ID NO: 43533 - DNA, 424 bp, Glycine max
agcttagccaaatgcacgtcattttaattcatatataatgttcattgcatagtcttcatccagggctgggcttgcgtgccattagagtcaatgcaactattagaataagccaatttaagtagtgacattatgttaactacaagattcatttgactattaaaataacattgattaattcttaggtgtttgctcacatgtagtagttgtgcaataatatcttattagaattagtagctaataattagattattgacatgaagaaaatagatcttaattagatgtattgtaagatttggacggtccaatatgatatatctagacgatataaaatactcataattttgatgataatagaaatataaattatcgatggactaatgctttatataaagtgaaatagaacatacttggtacaaactcaaat

SEQ ID NO: 43534 - DNA, 317 bp, Glycine max
acaaaataattatgatctttcaagcaacagatacaatccaggttagaggaatcatccaaatctgagatggacaagtcctccacaacaacagcagcttgtccctccatttctgaatgttgctggcccaagcaagccatatgttcctcccccaatgcagcagcagcaacaacaacaaaggcaacaagcaactgagggatcctcctcaccttccttagaagagttagtgaggaaaatgaccatccagaatatgccaatttagcaagagacaagagccttcattcagagtctgacaaataagatggggcagatggctactc

SEQ ID NO: 43535 - DNA, 393 bp, Glycine max
agctttatggtttcttggatggctactcattgttaaatcagataagaccaagaaaaaaccacttttacatgcccctttggtgtctttgcttacaaaaggatatcgtttgggttatgtaatgtccctgccacctttcagagatgtatgctagccattttgttgatctggtaaaaaaatgcatcgatgtgttcatggattatttctttgtctttggattttcctttgaccattgtttatccaacttggaattggtgtgaccacaagatctcgtctcgagggattgaagtggacaaggcaaaaattgatattattgagaagttgcctccacttatgaatgtgaaaggcatccaaagttttctcatacatgcccgacttctatcggaggttcataaa

SEQ ID NO: 43536 - DNA, 461 bp, Glycine max
  unsure (1)..(461): unsure at all n locations
aagcttataggctacatgccagctaactttgcgaatctcgtcttcgtcggagaaaggattgaatccggactacgaaaaggcaagttcgaatatgcttccaatgtggcccccaacaacagaagagccccagtagtggacgcgaggaaaaaggaaggagacgcccacgcggtcagcaccgccccgatgtggataaaagcaccccaaaatatccaaagctcataccagcccaatcccccaaatttttcaatctgagccgggagttcccccccgactcaagtaaaaggaccgcccgcggcagagagaacgccggcccaacgcacagctccagccacgctccggccagtcaacaatacggcccccggcacgagctataataatgcacagagcccactcncgaaagataacttctctcctattcccatggcataatccgaattatggccttcattattggagaatca

SEQ ID NO: 43537 - DNA, 485 bp, Glycine max
  unsure (1)..(485): unsure at all n locations
tgtccgggagnccgttgttcctggtatctctgcanaacgaacacagnaaannaacctttatacactnctttcatgttgggacaaggatttatcttccttaacngtcccaacgacccgtcactgcttatgctaactaacttacgaacccatggtcatggatgccctcacttgttctggtccttttacttaatcgatcaactccttaagttgcctgccgcttgttcgtgagtcctccttctgagttgcgagtggtgaatcttaacctctactactactgttgctaacatcatatacctggaggtgtggcttttaacttcaccgtacagagagccctcacggccgatatagctacaactccgtagtggagaccatccctctccaaaggcccttaagattgggggactctaagagagggtctcttcccatcccgttgccctaataccccccatgttaaagacgccgaaacgagcagaagagaatccccn

SEQ ID NO: 43538 - DNA, 506 bp, Glycine max
  unsure (1)..(506): unsure at all n locations
tgtatgaaggaacattganacattgaaaccgatgagnacccgngatcctctagagtcacctgcggcatgcaagctntacagcagaatttagtattgacccacttatctataattaatataacgtaatgccattaacctagggaattaaacaaaacttaatggctgagtgtaaactgctattgtggcaaccaataattaccctcaacagccaacaagtcagccaccatttggttttccaaaaggctgatgcctaggttgccaatggggcctctataacacttgaactatacctactaagtcccttttaattattaactcaaaactttttttggcaaccactttacaggattggcccttatttaaacaactaaacactctgtattgagacaacaggattcatttactctcctctattgggcataatacaactacaactctgattttttctttgaactcggcttgattaaaagtatggaatcactggagaagacctcctggctttcttg

SEQ ID NO: 43539 - DNA, 432 bp, Glycine max
  unsure (1)..(432): unsure at all n locations
tcttacatagtccgcctttgctagaccttcttaatgcttattaacataaacattaggcataggcacaaagatcaagaggagttattgggttaaaaccatatacaacttctaaaggagaacaattagtggtgctatgaacagctctattgtaagaaaattcaacatggggtaaacaagcttcccaagtttttaagttcttcctcaaaactgtcctaagcaaagttcccaaagtcctattaacaacttccgtttgcccatcggtttgtgggtgacaagtggttgaaaataacaatttagtgcccaacttgctccacaaagtcctccaaagatggcttaggaacttagagtccctatcactaacaatgctccttggcanaccatggagtctcacaatctccttgaaaacaaatcagccacatgggaagcattatc

SEQ ID NO: 43540 - DNA, 470 bp, Glycine max
  unsure (1)..(470): unsure at all n locations
agcttagaaagacaatactttattcataacattaaataaactagaaagtcatccacaatattcaaataaaagatatatgaaaaattaaaaaaaaaatatacataaaacacaataccaaatggaagtacataccactagtcatatatcattaaagtaattaagtttaaaacacataatcataaacaactaagagcaagccaatataatcatcatgttcagtcatactaagcaagtattaaaagaaatactaagtattcaaatgccataaaaacatagccaaatacaagacttaaaaacaaaatataattataatctaaatctattatcagagaatcaaaacttagttctaagtaacaaaaattagttatgaacacatacatggtaactcattacttatctcaattattgtagcatatcaatataattttgacanaaatccaatcatgtcaaatcatacataaatagataag

SEQ ID NO: 43541 - DNA, 379 bp, Glycine max
  unsure (1)..(379): unsure at all n locations
ntaacctcattgtctctcacagtctntagatttgggagccaatccaatccttgggtccggactctcagccacttatgatagccgccgatgatcccattactgcttcgcctaagctctctgtcctttcttcacgccgcatcccatgccttgcgaactccttggagtaccctcgcgttgtggtcactgaaaccccatgcgatgaatggcgtgatgctttcgtctgatggcactcctctcatggggtagcccaacctgcttatggcgaagggacgggttatattaataccaccccttgttccatcaacggaacatttggacatccttcgcatgaagatagaatcctgattcttccttccttctagcgagggaaccaattaac

SEQ ID NO: 43542 - DNA, 248 bp, Glycine max
acggactctagcacgcgcgcgctggatagggcttgtttttccaagcaaaggcattcccatctgaggaacttctacgcttcttagttggaaactaaaagtgtaaactatcatacatacacaattaggaaaaagctcacacagaaattacctaaacacggaacctatctactaacactgggaaaaatatcacactacataggcagaaaaacttaagcagaaagtgtaactaactctacctctttatccac

SEQ ID NO: 43543 - DNA, 294 bp, Glycine max
  unsure (1)..(294): unsure at all n locations
ctgcaagctattgttgggggaaaagttgtataaagtgacgccattntctcacaggcgaaagaaaaaggctctatgataccatattaaaagaaagagaccacaataaaacatctagaagaagagagaaactcttaggaaaatcaattgtataaaactacgaaatatcacaactgaaatacagagatatcttagtcctatttataaggtgcagcacaacttagcaaaggctaagttagttacagagtttgatgcaatcctccatatgaagggaccagtcactagagccatgagcaa

SEQ ID NO: 43544 - DNA, 279 bp, Glycine max
tgctgcatgcaagctttgagcatattcaaacgtattattactttgactcggatgtcccgatcgtgtcccgtaatatatcgagacactcttaattggaaacagaagctctgatgcaattcaaacgactataactttttacacggatgtccgattgagttccgtaatatatcgagacgctattaattgaaaacagaagctctgatcatattcatacggaccatactttttactcggtgttctattgtgtactgaaaatatcgagacgctcgcaatcgataa

SEQ ID NO: 43545 - DNA, 341 bp, Glycine max
  unsure (1)..(341): unsure at all n locations
tctgttntcaatttcgagcgtctcgatattttacgggcctctatccgacatgcgagagcaaagtcattgtcggttgatttttctaagagcttcccttttcaattacgagcgtctcgatatattacgggacacaatcggacacccgagataaaagttattggcgtttgaatctgcttacagcttctaatttcaattacgagcgtgtcgatatattacgggactcaatcggacatccgagtccaaaggtactgtcgcttgaatgtgatcagagcttatgtattcaattacgagcgtctccatatattacaggactcaatcggacatgctgatgaaaagttatt

SEQ ID NO: 43546 - DNA, 127 bp, Glycine max
gccataagtgctaaggttggaaataacaaaaaatagattgcatatgtgttaaggctgaaaaacaaataaagcctaggctaagtatacgttttcctaggatgaatgctctcttattaccttaagtttg

SEQ ID NO: 43547 - DNA, 422 bp, Glycine max
  unsure (1)..(422): unsure at all n locations
taagtaatcaggggtctcgtctccctacataaagcatagcactagtntacatcgtttaaataacaataccactacagattaatgtggctggtcagtcaatattccatctaaatgttcacaatcacatcaagcattaaagcttacaaacaagaaactaccactcatcacctgcccatcccatagagtgctaccaacattttttttaacctgcacatctgtcaagaatttttttaaaaaaaatagaagacatttgcctgcacaataagcatgacctctgcaataccaccaaaagtctcagcatcaacagcattcccattngttcttccttctcgaaccttacaagagaaatgtgaaaanaattgcttcagaagggtaagaatattaaactgatcaacatatcaaatgtccactacatcttaaca

SEQ ID NO: 43548 - DNA, 63 bp, Glycine max
tagcttatgatgagaagcatattattaagcatattattactgagaaaatctttaagatgcaac

SEQ ID NO: 43549 - DNA, 389 bp, Glycine max
  unsure (1)..(389): unsure at all n locations
tcttcctctgtgcctacaaaaatgatgtaagatataccgatattgataaccgannaaacaaaaattaaattgtctctctaaattctgaaactctctttctttctctctctctctctgtagaacaaaacctaagcaaagcaaaagctagaaaaattaaaataagcaagcaatgaggcacaatgagtttgagtatttanaatttgagtgttgaatacatactcaattaaatcatacataaacagagacagttaatacaaaacaaagtttagaanaagactttgtagtagagatataagccattagtagagaacaaattntgactgtaactaccaataaaatattaaatgtaataacccataatgcttgagacaacatgtaaatctgtaagt

SEQ ID NO: 43550 - DNA, 376 bp, Glycine max
  unsure (1)..(376): unsure at all n locations
ccaaaaactaagctaactgtcatgcgttgttaggatggagctttcatcatctcatttgacaacggatgngaagaagggattaataactggattgttcacatcgacgtatgtnctttactaacacgaaaaaattcttatacttggtttatgtatatctattgattgttgtatgtgtattagtacaatacaactacttcatctgttgagtaattcttaaatgtcaaaactgtcaattgtttgttctctttgttttggacaaccgtggaaagttctctttctttggtaatgatcttcatctgaatttactttatggaggaggatggtgcaacaatgttaagagttgcctataccgtaatgatagtcgcttaagttcatc

SEQ ID NO: 43551 - DNA, 435 bp, Glycine max
  unsure (1)..(435): unsure at all n locations
agcttgaaggtgtgtaacctatctatttccatattagaacactagtaatatgtctactatcattgttattatntcattcttcgtcattgagggaaacacttgggctgccatatccctccacctttgggcatattctttgaaagatctgtgccccctttttgcacatgttatgtagttgcatcctatctgaagccattatactgacactacctaacgaaggcaaccattaggtccttccaagaatgcactctggaaggttccaagttagtgtaccatgtaacagctaccccagtaagactttcttggaaggaatgtatcagtaatttctcatcttttgcgtatgcccccatcttcggacaatacatctttagattgttttgattgctcttgatcttatgatngtgctacattgatgacaatgtgttgtttaagtgt

SEQ ID NO: 43552 - DNA, 371 bp, Glycine max
  unsure (1)..(371): unsure at all n locations
ctcagctgccccagctccccagcgagcaggttgtttctctatttcaaccgccttctggaggaattntctggaaggcccaagttggcctggttgctatttgcacccctatttttactaaatacatcccccttgctcttttttggtgattctttttccgtaatgttacgaaactttacgactttcgtaacgatgcatgttttctttccgtaatgttacgaaaccttacnggactatgtaatcaaccccttttggtttccgggatgtcatggaactntacggattgcgcacgaacacttccttttaatttccagcatgtcacggaacttcacagattgtgctacaatgctttcttttgacnttccgcatgtcac

SEQ ID NO: 43553 - DNA, 423 bp, Glycine max
  unsure (1)..(423): unsure at all n locations
agcttctacttatgtggcagggcgggcttccttcaccttcttgtctccaacgccgaacttgaccattgttcttccttcccgcgatgcttcttttcatgtccgcctgagtgggcttatagcctaaaccatacttcccacgatttccttgggtatttatcaggctagttatgccgccgttgttttttcctaaacccatcccgggttcataaccgttccccaacataactcgggccatcattaccgctgcatcggacagacaaggctgcccaaagagggagtccacggaggaaatgctgaccacctcanaagactggaaagcagtttctaacgattcttctgcggcttccacataaggcatggaggatgggcagcttaccaagatatcttcctcgcctgacacgatgaccaagtgccccttcacta

SEQ ID NO: 43554 - DNA, 428 bp, Glycine max
  unsure (1)..(428): unsure at all n locations
aactaagctatgccatattccttaatacgttctttgccaagaatttaccgaaaagtgcacccatatacaatcaggcggcttcgtacctagatatntacacgtactgccaaggtgtatntgttacttacatcacacacatctccttggctgaatntacatacatgcatactcaaagtatnttggggtaccaaaaattgcacatgtgcacatcttggtatntctaatacctatacatacacaaacttcatgatgaatcttgactatctacacaataaggtgctacatttcatccctttttttcaagttttgctacctaaagccgcatgcanattcaagccatatttcctttgcggactaaaattgtattcaattaaaaggtatacattntttggtaatgatcttcttacttacatgcacatattatgata

SEQ ID NO: 43555 - DNA, 469 bp, Glycine max
agcttctatggctagaatgatacacacaaaattctaatctatatgaagtcttcgacttatcttgtaggtcgtagcttaagatgtgaggatgaaacctaatattatatgttaacaactcttcgaaataatattgatgtccaggtattggtaaaatttaaaaatcaatatgtgtaaagagaaataggtgtgatttgtggggtgtagtgttaatcttttgagtatttataacagagggtggactataaatggaagatacaaatttcatcctacatctttaattgacctttcacattaaaatgttgattctgacgtgacacttctatagaccgttgagattgtactcattgaaatgtgataaatgatgtgaaaaatataaaaatggtcgattagaaattaatttaagacatatgtttcgtcctatattattaatcgatcatgtccaatcagatgttgattatgatgtgacact

SEQ ID NO: 43556 - DNA, 334 bp, Glycine max
  unsure (1)..(334): unsure at all n locations
accctccttattaattnttttaaaaatgatcattttattaatttctaactagaattaacccacattaaagataaataacataattagcactaccttgcggtgatttgcttgtggcgaaaaagtatattccgtagtcaacaaattgatcacagcagttatcctatcatgatccccagcaccagcaagctgcttcactatcccctcaaccctatataataacacaaaaccctttaaattcaccaacgccctcaaatttcactaaattggaacaacccataaaaatagaaaggaacaaaaaatcataattactggagagagaaaaaaaaacctccag

SEQ ID NO: 43557 - DNA, 539 bp, Glycine max
  unsure (1)..(539): unsure at all n locations
agtccacgagnnncnnnatgatgccnttgatnnatagtaccttgtaganccacgcnnntgagtactancagacaactagttgaatggcgcganatatgttgtcacaaattntgtttatgactccgggaatttanactcatagtatctcatttcttataccaattacctatcttctcactcaaataaataaggaggggcaacttagtccagctgtgccatgtatatgcaaatgtgataagggaaaatctatatagtggacaatgaggggtgattccattaccaatangcagagactcgggtaaagcaaatggataactgaactcactatgcttatgacgtaaaggactattatgcatatcctcacattcattgtggacatatattggtcggatcagactacactacgaaaatacatatatctacgcttttattctctaggatggaggagaacacttctaataagaaacagtctaagaggacaatttctcactatgacataaactatgtcgatgtgctttaaccaccacaagctatgatcn

SEQ ID NO: 43558 - DNA, 197 bp, Glycine max
catgcaagcttggatatcctttagaaatgaatctattattcatacgatggagccaaacccagtcgccttcattaagaactagcattcttcctcctctattgcctttaaatgaatacacctttgtttgcgtatctatttggttcttaaccctctcatgcaacttctatactaactctgacctatattccccttcttat

SEQ ID NO: 43559 - DNA, 215 bp, Glycine max
actatagcataatttctggcgctaaactgctgggagttggaagccatcttctcaattaaatttctggcttcagcaagagtcatgtctccaagggctccatcactggcaacatctatcatacttctctccatattactgagtccttcataaaaatattggagaaacaactgctctgaaatctgatgtgagggcaactggcacgtagttttttaaat

SEQ ID NO: 43560 - DNA, 622 bp, Glycine max
  unsure (1)..(622): unsure at all n locations
ctcactcctcctcttatattcattactaactatcacacattactgtcataactgtatacancaatcgcacaaaggccanatgaaacattgaatcatggtgatacgtgtaacaccnaagttaaccgcaggcattcgactatgtagaggatgcnttatatggtatgaaatatatatcacantatggcgtgatccaccacaattgctcagaatgactatagtggagaacaacttaaacttatgaactgtgaccccttacatacttatcattcattacatgatatcatctacgtgtcacatcttgcttcttatatgtagactacgtagctccctcgaaagcgtttctgagataacttccttgataagctaactttagtaaacttccttgataagcttgagcttatctacacacacccttataataactaagctcacctccttgagaacattcctattgaagctagagctgagctatacacaccttttataatagctaatctcactcccatgcctataatcaagaaaatactaacatgtcctttctacaaataatacttataactgcaagttataacccttatcatctatcatggtcataatacactggctaaattacgtaataacg

SEQ ID NO: 43561 - DNA, 292 bp, Glycine max
tcatgcactatcttacatgaatttattctctttgaacccttacatgaatatgtcttatctcgatccaaacttatattgaatggcctcatccaaaaacgggagattattaactttgaaccgatcactatgtcataattggactatctcatcccaccacatgttttgatgattacaatgacataaatattttatggactaatagtatattcttaagtccaacaacactcactttatatgagttccattacaaaacatatcctatttctcatattagtaattgtccaaggtcaca

SEQ ID NO: 43562 - DNA, 365 bp, Glycine max
  unsure (1)..(365): unsure at all n locations
agctnttatataataaanatttaatgaagtttttntntttcaaccagaattcaatctcttttatctttgttagaaaaaattcaatttttcttatgaagatatgaacgttcaaatgatagaaagaatagattattaagtttattgtgaataataaaatttataaggaagatattcaaagtattctctagcttcctaaaaaagagatcatttgaaataaaatcccaaatgaagggtattttgaagatgggtacattcaataatatgaaaataggtaacatttacttatattgagacaaacaaacactttgcttatatttaagactggatgtaacattattctatgttttcttatataagagatgtgt

SEQ ID NO: 43563 - DNA, 224 bp, Glycine max
cagcttgaagggctgaaagaagagcttggaggattatatgtatttgggcttctagcaggctccaataatgtgagcataagcatattacactatgcggatgatacaatcttttttggggaagcttctatggagaatgttaaagatataaaagctatcctaagtacatttgaacttgtctctggcttacaaattcaattatgctaatagttgtttcggagcatctg

SEQ ID NO: 43564 - DNA, 411 bp, Glycine max
  unsure (1)..(411): unsure at all n locations
ctgcaagcttacaataggaatntcagctgtctacagttattaagaatactaactaaacttcagttaagccaattttaactgtgttttactatttaagtcctagtttacaatttctcttattctttntctttcaattacttgttttgaaagcaatcatctgaattttctctatcttgtataatgataagaaccttgggagatctacaccacaaaagcgagtcattgtagtttggagagctaacagtcttatacatcctanacttcaaatgtgagattcaagtctcataccttgcaattggatcctaacattccatcttgcttcgcagccccatgcccacatgggcaggctgtgcactaaccctttaactagtccctagcanaaactacaatgccagcatcaccacacatgcc

SEQ ID NO: 43565 - DNA, 426 bp, Glycine max
  unsure (1)..(426): unsure at all n locations
actaaccctaattggaagaaacagggattcggctaatgcatgaagatattgattntagtatcaaacatttagttcttcgagataagtcctgagagcttgaattatttatagcccaaaaatcaaccaaagtgcgatgcattntgttctttagttaatcatccaatgtgtcaatatgatccacaattagtgggtaaagtttatacacaagtcaaaccaaaataaggaatgttatgcaaattgaggaccagaggaataaaaagttgaagttagagaaaacaattccttttcgtcctctttctcctttcacaacatacccgaaatgganatgaaaacattagacatttctcaaaatcatattgaaatgaaagacaaatgtggcatttccatcgtgaagaatatcatntccttcacagacacctcatgtat

SEQ ID NO: 43566 - DNA, 271 bp, Glycine max
taagaataagtcacagttaagagtattgtggggtgtgcatgcctaccttacactaagaattaagaatattcgtatgagtatgatattggaagctcaccttgtgaagatggaaagtcatgtcattcacttcaatcactatggcacttggcaatccacatgtgctaaacctgcatgaaagaattgtatgcatattggctcgattggaatatgaaaatactgatacacagacagttagggagaaaagagtatttttctaaccatgcttgccctc

SEQ ID NO: 43567 - DNA, 394 bp, Glycine max
  unsure (1)..(394): unsure at all n locations
actaagcttgagtgccaggtattgggactatgtttatatatataatatatatatatatgtatatatataagggggggttacctacaagaacttatttttagtaatattnttttctaacatttaataaaaatattactataatgtctcttaattacatgtaaaaaaatattatcgaattataaataaatattattcatatatgtttatgatattttatcaaaaaatatatatagatgatgtggttaaaacttgaaataataataaaaaattaacatgaattatatataacatttgataaatgttacagaaaaaagtaacaatatgtgttcataattngataatatgttgtttaaagttatagaaaaatttaataatattttaataaagttagata

SEQ ID NO: 43568 - DNA, 394 bp, Glycine max
  unsure (1)..(394): unsure at all n locations
acgaccataactgttgactcgaatgtatgatcgatgccgattatatatcgagacactcaaaattgaaaaacagaagctcacgagaaattcanatgggtataacttttcactcggatgtctgattcacgcgcataatatatcgagaccctctanattgaacagggaagctctcggcaaatccaaacgaccataacatttgactcgaatgtatcatcgacgcccacgatatttcgagacgctcaaaattgaataacggaagctcttgagaaattcatatggctataacttttcactcgaatgtccgattcacacgcataagatatctagacccttgaattgagcatggaagctcttggcaattcaaacgaatataacttttgacttaatgtatgat

SEQ ID NO: 43569 - DNA, 454 bp, Glycine max
  unsure (1)..(454): unsure at all n locations
ctcagcttattccaccggtgaagtcgaatcatagtaattgaatgtcctatgttctatttttttcttgaatagaataattaaattaaattttcttcatttatgaaaaaaaacagttatactgtaaaaaataaaatttgccaggtgttgattaatttatatttttttggtgaatcttaatttgtttaatgtttatcgatgcaagaaaaatatatattaataatttaaacttgatgataaatctcatggattatggtagtgttgaatttgatcgatattaaagcacacaacatgaatacatggatattttaaaagaagtcatatatganaagatcatgaagaaagaaaaagaaataagatatatatggggaatgctaatattcttcttaattggagtgtattagcattcaacacacaataatntggactataaattatttattttctgtttccaaat

SEQ ID NO: 43570 - DNA, 348 bp, Glycine max
acacgagtttatgagcctttattgacaatgataaatacttgtaacttgttgaagttagtgaaacttggtgcgttgacaagaatcggacatagtctcggtggttgagactaactaatataaatcctctgtctcattctatgtatactctcttccattatttgaactaacctatggtttgaatttgatcttttctttcaaaaaatctatttgttttacaagatttaaatctatcctatgatctatcctgccaaaatatattatttgatgtacttacctctcatcagacgattaacttattgattcacaacaacgtttacattaagcaaaaatcatatttcactcccctct

SEQ ID NO: 43571 - DNA, 214 bp, Glycine max
agctgaggcaagatgacggttgttgcacttgtacgactcacaacctaccctacagcggaaacgccactcacggctcacggttgcatcctctaatgagcgaaggcgctactagtcgcgaccaacttgtatgtcatgatcactatctactgatcgccgcaggagatgtttccaccactttactgagaagggtccgctacttgtctctacgctcgag

SEQ ID NO: 43572 - DNA, 432 bp, Glycine max
  unsure (1)..(432): unsure at all n locations
agctntagggtatatnttggacgcatggacttagtatgtgtcgcaacctacccttcggcggaaaggcgacgcanggctcacgggtgcgtcttctaaggaaggaaggcgcgtggagtcgccaccaacgtttatttgaggaaaacgtctgaaaaatcgaaaaaggtgtggtctacaaactttaagtgtgaaaggtccgatagttgtttttacgcacgaggaaggtattatcaccccacgcgtccgtcacaagggacgacaacctttaatcaagtgtgcaaatatgacttcaaaatattttattttcccttntttatgtctttttgtgtttttatgctttttatgttttttgtattttttttacctttttgtggtcgacaagggtggttccctcgctcctacgtatcctcaattgcgatgaggaaatcagaccta

SEQ ID NO: 43573 - DNA, 350 bp, Glycine max
  unsure (1)..(350): unsure at all n locations
tgncttgtgggctagcttgtgaggcttctatggatgctggatctttgagcctcaatgaggtcctttaatggtgattttccaccatggagatgcagcggaagacaaaggagaagaggtaagaggcggcgccatccactatggaataatccatggaagaaggagcttcatcaccaagatgagccttggataagaagcttggagaggatgcttcaatggagcanaagaaagagggagacaaagagaaaggtgggagcatgaaattgaaggaagaanaagggagaggagttgaactttgagttgtgtctcacaagactctcattcatcaaagttacaacaagtgttacacattc

SEQ ID NO: 43574 - DNA, 363 bp, Glycine max
  unsure (1)..(363): unsure at all n locations
agcttgagattatgaagtgttgaagggtgaatcttcctgctnttattgttgaccacagagtggtacctggagatatgtcgcgggggtcaggagaccttggggacgtcaggtggggtgctattgcccaaaaccaagcttgaccaatcccgacccaacccgggcatagtcggtcagtgagaacctgtgatgtacctaaacaggcgagctcctggcagtcaacagataaaaggaagacaagaccacaaagccaggaggctggtggtggctggccagctgtgaatattgtgtaatatgtggatggtggcctctggtaatcgaataccaacggtgggtaatctattacaatgcttaaaattgaggaca

SEQ ID NO: 43575 - DNA, 380 bp, Glycine max
gacactatgaaactcaactatgctgcaatatttacaatagacctcctcaacctcatcatttaaatcaaccacagcagagcaattatgacctctctagcaacagatacaaccctggatggaggaatcaccctaacctcagatggtccagccctcagcaacaacaacagcagcctgctccttccttccaaaatgttgttggcccaagcagaccatacattcctccaccaatccaacaacagcaacaacccctgaaacagccaacagttttaggccacattatttccaataagggtattgaagtagatcctgcaaaaatttctgttatttcacaattgccttacccctcctgtgtgcgagaggtgtgatcatttcttggtcat

SEQ ID NO: 43576 - DNA, 406 bp, Glycine max
  unsure (1)..(406): unsure at all n locations
agcttgccgcccatctcgcgcaagcgagctagtttgctttcttcataacaacagccttctggaggaatcatttggagggcccaactgggcctgactgctatttgcacccaactatatactaaatgcactcccgttcctattgagtgaacattctcacacgtaacgctacgaaactctgcgaattntgcaacgatacttattgtccttccgcaaggatacgagtacttaccgattataaatatactcttttttagctttcgaagaagataccgaaactcacagattgcgcaaaaacacctctgttatatatctgccacattacggaaattcacgaaccacgcaagcctgcttgctgtccaattctgagacgtctcaagacttcattcattgcatgtcatcatgtaat

SEQ ID NO: 43577 - DNA, 217 bp, Glycine max
tccagctgtttattttccgcagatgaccatgaatcccgggccacctcattgactcctctaagacaattgcatgatttcttgaactgaattgttgggagtcggaagccatctcctccatcaaattcctagactcaacttgagtcatatcatccagagctgccccactggcagcatgaatcatactcctctccatgttgctgaatgcctcatacaaata

SEQ ID NO: 43578 - DNA, 470 bp, Glycine max
  unsure (1)..(470): unsure at all n locations
agtctgtccttggtttaggcatgattggtacatgatttgtgacttgtangattcaatttgggcaaaattggatgaaggcaagagtggttttcgaaatctgcactttatgcagaattntgctgttgaaatgtgcagcagaattttgtataagtgcagaaaaatgctagtgtatggctggttgtgaaaagggtagtacatatggggttatgaacatttgctagcagatcccaacggtaaaaatgtagacttatgtactagagacttccagtaaaattttcgagtcgatccaacggttaacgaattggaacgaaggaaatgttactggggtatttgtatgtgaaaagctgtgatattggtttgtgttttgggcagagttatctgcctttgccctgttatgcttgggtntgtgagtccatgatgattggatgtggaattacctggatgttgtggaagcttgtgaggattgatgg

SEQ ID NO: 43579 - DNA, 452 bp, Glycine max
  unsure (1)..(452): unsure at all n locations
tacccatcacatgtggtactatgtggcggtcgggcgatggtgcacaacaaattttccacatccacaaatcgcgcataaacccaccatcccctgttgcccacctccaactgagctcatgtactcccaagtagcccatatcctcgtttctctcaacaccgagtccccatcaatcctcccaagcttccccaacatccaagtaattcaacattcaaacaacacaaactatcacagccaagaaaacagggcaaaggtagaaaactctgcccaaaacaccaaccaaaatcacagcttttctcacttanagaccccagtaacaattccttcgttccagtttgttaaccgttggatcgactcaaaaatttcactggaagtctcttgtacataaacctacatattgaccgttgggatctactagaaaacacccataactcattctgcatcactctttccac

SEQ ID NO: 43580 - DNA, 432 bp, Glycine max
  unsure (1)..(432): unsure at all n locations
gcttctccaaacaatagtatcgtctgcatattggagaatattatcatgcactttattcttccccactacagagctttggaagcaattatagctgattgctaccctcatcatacctgtcaaaccttcagcaaccaggtcaaaaacgagtggggccaaaaggtccacttgtctcaagcctctctgaggcttaaactctgacgctgggcttacattagcaatgactgacacagaagctgaagtaatgcaccccttgatccagctaatccatctctcattaaagcccattcttctcaacatatagaataggaactgccatgacacatagtcatangccttttcaagacaactttaaagaccatacatgacctgttggacctacttgcctcctccactacctcattagcaaccaaagccccatacaacagctttcta

SEQ ID NO: 43581 - DNA, 407 bp, Glycine max
  unsure (1)..(407): unsure at all n locations
aaaacccctcaatttagtggattttcaaggtttgagaagtgaaaatgagaatgggacttggagcaaactctcatctcaaacaagtctatatcatcaatttaaactcgctcaaactggttttacgacgaatactctaccgaatcaaaatttgactcctcaacacccaatnttaccctacaaatggctcttgttttcactttggtcactcatattcctcattcgcacagtctaagctttctcataagtcctaaatgacatttcaaactaggattaactccctttaacctccatataccactaaatccagattttgccttccaactctcatagcctcactctgtgtttcactcataacaccacattctcactttctaaccctaggataactctacccttcatctctagca

SEQ ID NO: 43582 - DNA, 268 bp, Glycine max
tttattgacctgtgagccagtatcaatgtgatgtcactctctatgtgcagaagattgggagagttggaaataatgcccacttgaatgactatacaattagctgacagctccattaccaggtcatatagagtaattgaagatgttgtggtcagagtaaaacattttatcttctcgacagactatgtggtaatggatatctctgaagatactgacatccctgtaatattgtgaaggccattcatgctgattggaggctgcatagttgata

SEQ ID NO: 43583 - DNA, 445 bp, Glycine max
  unsure (1)..(445): unsure at all n locations
gatgaatgaagggagaggaagagaaagtctcttaatttgtgctntaaaagagctctaaaatctgaagattaattttcaaatgatcaaagntggaaaaatgcacacacatagcctctatttatagcctaagtgtcatataaaattggaggaaaatttgaatatctattcaaatttcactttaatttgaaattgaatttgtggagccgtattttggagccaaaatttcactaattatgattagtgaatttcagatatggttcagcccattaatccaagatcaagtccaagattctccactaagtgtgcttaggtgtcatgaagcatgtaaagcatgaatgacatgcacaaagtgtgactatatgatgtggcaatggggtgtagcaagaaaatggctcacctcccctctaaaattaattggatgggcttcaccattcaattaattatt

SEQ ID NO: 43584 - DNA, 312 bp, Glycine max
  unsure (1)..(312): unsure at all n locations
atatagcctttagcggcatgggcttgagtattttttgtcaaccaaattattagaatccatcaatttaagtttatcaaattacaaaaattaaatctcatgtgcataaaatgctataaagaacagtaatttaccacgaaaaagatccatcatgtccacgcattgcanatcttggtgaacgggtactgtccataacaggtactgaacaggtggttgcaacaccattgaactctagtgacgcttcgattgctgaacctacagcttcttaagatgaattctccagactcaggactaaataattcacatttaggttct

SEQ ID NO: 43585 - DNA, 462 bp, Glycine max
  unsure (1)..(462): unsure at all n locations
agctntaagaaaatttgcaacatcgttntggttatttaacaagaacattctatttcttgacattggtaccttggtaattatattatttctcccatctctgatggaaagactggaatctttcatgtgaatatcatagccttttttgagtaattgtcccaaactcaaaatattgttcttcatatttgggacgtagtagacatttgatatgaattcatgtcttgcatccttcanatggattatgatcttaccttttntcctttataggaatattggaattattaccaaattaggcattgccacttactgactcatcaagatccacgaacatgcttctttttccacacatatggttgcttgcaccagtctccangtaccatgtngtttcttggttacctatattacctccatgtgctangagaactgtttcannacttccatctttttgctccacatagttagtct

SEQ ID NO: 43586 - DNA, 361 bp, Glycine max
  unsure (1)..(361): unsure at all n locations
ctgctccaatctttgaagatggcattttcggagtcgngaagcgcgtctctacgtgtgggacttctgaaattcaggtttgggtggacctttttctcctttgantttcgtgggtatggagttctgggagatatgatgggtagtcttgctagttttctgcttcatgatagttatttgtgaagaaacttgttgaaagcatgttgaaactgccatgtttggaagagttaaacatacccattctgctttagggtttttatgatgatgcttgtgatgttcatgtgctgaaattgcttatggaaaactgttagagatgaagggtagaattaacctanggttagaaagtgaaaatgtggtggtatgagtg

SEQ ID NO: 43587 - DNA, 433 bp, Glycine max
  unsure (1)..(433): unsure at all n locations
agctntacagctatatttagtaatgacccactaacctagaattataataacttaatgccattaacctagggaattaaaaaaaacttaatggctgagtgtaactgaaattgtggcaaccaaaagtcacccccaacagccaacaagtcagccaccatttggtctcccaaaaggctgatgcctatgttgccaattgagcccttattacaacttgaactaaacctaactaaagcccttttaattgattaacccaaaacatatttttggtcagccaactttacaaggattgggccattatttagacaaactaaacactctaaaaattgagacaaagtggtgtcatttagtcctcctccatttgggccatgatacaactcacaaccttggacttttctccttgaaacttgngcttgtattcaaatagtatggacagcac

SEQ ID NO: 43588 - DNA, 469 bp, Glycine max
  unsure (1)..(469): unsure at all n locations
ctttataagatgaaccaatttatcattagacacatgttaagtgntattcaaaanaattagagtgtatctctgttatcttagtgagagtgattctcctaagttcttgagtgattcaggaacaccctggctatatcaaaggtctttcacatccttggtgtgttgccctcgccgaaaagagagattctttccttccaccattatatcttcaaccttgttctttcaaaccacatttccaagagatccaatactgcccataattatctcgagaccataactctcatattactcgttcaaataaagtgattcttgagcctaaattgaatatcaaaacgagagctctcaccttgtttaggaatcacatcatgnagagccctatcgcttgagatatacgcatttctatattactatccagtcaccaattaacctacgttttaccatctcattcatcattntatgcaaagatcgcctg

SEQ ID NO: 43589 - DNA, 393 bp, Glycine max
  unsure (1)..(393): unsure at all n locations
agctngaaggcaaactggatgcattggttaacttggtaacccagctggccttgaaccagaaattgtacctgtcgcaagggtctgtgttttgtgctcctctgctgaccaccatacagacctttgcccttccatgcagcaacccggagcaatggagtagcccgaagcttatgctgcaaacatttacaatagacctccttaacctcagcagcaaaatcaaccacaacagaacaattatgacctctctagcaaaagatacaaccctggatggaggaatcaccctaatctcagatggtctagccctcagcaacaacaacagcagcctgctccttccttccaaaatgctactggcccaagtagaccatacattcctccaccaatccaacaacaacaaca

SEQ ID NO: 43590 - DNA, 442 bp, Glycine max
  unsure (1)..(442): unsure at all n locations
ctcagcttctctctcanacaagcctttcgctcttggaataaatggttgtttggcaatgttcatgataatgttaaagcttgtcaagatgtggttaatgttgtgcagcgtgatattgacacttcggtttactctgatgagttgaaagatagggaatctcaagctcagattgaccttgaaaagctntatccatgcagaggaaactttttggaggaaaagggtaagtattaaatggcagcgtcaaggagatcataatacaacttattttcacaaattagcacatattatgcatgcagctaagaggatgtcagttcttcaaagtggggatgttatgatggaatcccaagaagctctggatgtgcttggcttttctctaatatntatgggagacaataactgtgtccaattatctgatcagtagaatcattcttgctttcagtctcag

SEQ ID NO: 43591 - DNA, 423 bp, Glycine max
  unsure (1)..(423): unsure at all n locations
tatactctnncttcatnatatacgatatagatgttaagttgacgtatccgcatcttcataatagagatgtctctaaaataatacaaaattaattttaaaatatataaaattagaaattcccaaattaaattgtagctagaaatagttattatctataaataattgtattatttattaagagtgtgtgaattattataaattataccgcagacgtatatgatttttacgaataaaaaattaagtatatttcttatgatatgatcttatctcttaatttactctcattaatagagtgggatatattgttcttcattaatcttaacatttaaattcaaaacttttaccaacaactatttatgcactccaaaatcctatctatattcaatcggtatatatttactctatgctcattcatttctatat

SEQ ID NO: 43592 - DNA, 406 bp, Glycine max
  unsure (1)..(406): unsure at all n locations
agcttgtagccattataagagaatgagcatgtggttggaagtatgactggaaatggtagtcagtatgtcagatagattgtgagggaatgcattaatcgtatccagtgagagtgtgatccttaaattttgagagaaacgactatcatttagtactgatttttgcgtgaatctctgaagtatggactaaatgcatgaaattgaggatgatgaacaccatgtttgattgtgatagccacttagccaaaaagctgaccatgtgcttgaatgaattatcccttgtacctagtttgagttgaatgaattattgattgatggaaccctgagcctatacagtgttatctcctgctaccttgacttaggttgtaggagagcatcatccacatgaagcatggtttanagcaaattt

SEQ ID NO: 43593 - DNA, 399 bp, Glycine max
gcgcagttgggcttaatctgacctcgacccaaaactagctttgatctcatgacctagggcttttggttttttcttttaacacgccggtacttttatcccctgtgacgggctacccatttcttaatcatttccgctaactaaaaaaagaaaattccccgaggttaaatggttatccttacactcggaaaaaaaaccccatgttggtcgcgcctcccctttggactcaaaagggtaaaaatttatatcctaaaacactcttttgaaaaaaagcgaaatctgcgacgtttctttggattctatcttatcattgtaaaacagggaaccaggctaatactccctatcagctgcccaaatagctttaagtggctacattctttagtaatgacatctaagccacgg

SEQ ID NO: 43594 - DNA, 387 bp, Glycine max
cgcatgctagcttgtagaaatagccatgtttgtgtgagtttgacatacccattccgttgtatggtttgtgtgatgatgtttgcgatgtctatacgcttaaaatgctgatggacatctgttacagatgaatgtgttaactaaccctaagtcagaatgtgataatgcgacctatgatggaaaagagtgacacttataagttggaggctaagtcgactcttggtaacgtgggtatagtgagttaatctagcttgaacgtctttagatctgcagaaaggtacgctagctatatagaaaacaaagaccaagtgaacaacaccattgctaggcaaattgggtgtgaaagtaatttgattcgtgaattatgtgtatcatttgaacagctaatgg

SEQ ID NO: 43595 - DNA, 535 bp, Glycine max
  unsure (1)..(535): unsure at all n locations
tgtccgccagncacgatgaaccatgatagcttgattacggaccttanctactcagctgcttctacctttatgttgacaacgctgtgtatcttcatgatccttcncacgagggcacactatacgaccttcaagtcactgagaatctgacatacgaatcattgcctttgaagatcatggatagatggaaaataacttaacaaggaaaaagacttcgttgatcaacgtggtctggggaggtgctccctgagacgaatcaacatgggatctaatgagtacaacgccagacaccaattccacgcttgatcgagtctagtaaatattggtgatgacattcactaaaggttgtggagagtggaacgccctgatagttccataactgatacaagatgcctgacgtatttattgtatatagtaatatcttaattaatataacataatggaagaaacctggaatcttccttgcgctactggtaggtgtggatcgtatgtatgtgtgagttaggttgatcttcatctgaaatataatcctcaaacc

SEQ ID NO: 43596 - DNA, 534 bp, Glycine max
  unsure (1)..(534): unsure at all n locations
agttacgagacacnatttgagcccttgagtgccctcgantaacgtgatcttcggaaggaccccgacgctgcagctttctgtcaccacgaattttgactatttatgtatgtctagtgtgtacgcctttgaatgggcaacacgcaatacttgagcgtgttcgaataagtaggtttaatgtatattatggaattttggatagcgctatgaagaagaccttgtctaagtacaagttaaactgtggcggtcatggaaaaagaagatgacataaagtcagttcatgtttgagtttaactctcgattaaaaggcttgcaactcatctggtagggcgttgttatgctttgcgaagcatctgtaacattctacttttgtggaaagagactaaatggattttattgttaataacatatacttttacttaattgctaattctcggtgtataatcaaatactgagatatatctttacgtgtcgactacacgattatctgcgtgatgaacatctgtttcatgtcatcgtgtgcttggcactgagcgt

SEQ ID NO: 43597 - DNA, 180 bp, Glycine max
  unsure (1)..(180): unsure at all n locations
tgacatatcccacactctatgtggntcccgtataccctngtctagccatgcatggcnaaccaacattcgacctcagtcacaacctcaagcattgcacatgctctttcatatcttcttcaagaccgcacccctccaataatgcataaagacatatcaaccgtcaatgtctcggttaactca

SEQ ID NO: 43598 - DNA, 328 bp, Glycine max
  unsure (1)..(328): unsure at all n locations
catgcaacttgagaatggtagacattatcatgttatggtttggttggtcaaggataaaagggatgccccacattatctccatgacacaaatgcaaaaatgatgatttggaaactntatgcaaaactggtcatgcatgcacctatgcggacactcaagtgtcaaattttatggtcatgtgatgctanggctcangattcgtttcctctattttaatcaacccaatgtttccaaaatatgttcttttatcaatttgtgcattcatccgaatccatttcgggcgtccggggaaatttcacagcattcactcttcatgtgtagacacatttt

SEQ ID NO: 43599 - DNA, 437 bp, Glycine max
  unsure (1)..(437): unsure at all n locations
tataagaacanaagtgcctcaatcatttccaaatattcatgtgaattaggacgcatcaacaagagtcaagccaaagctatngtgcaagcaatctatttggcataacacaccaaatgaatatgatgatggatggctcaaattctcaccaaggtaaactcatcactttcaaattgagctttcaaaactatcatgacatgtagagaagaatcaaggatntcaagtcacaaaatgtcaagaacttttattntcaaaacaattacccatttcttgaacatatcctataattcaaagaaaaacatgcanagtcgtacgtgcacacaaaattgacccaaaatattaaactaaaaatccgacgaaactaacaacattaacatattaacacaactaacanattaacataaccaacanaactagcataactaagaaacactccccca

SEQ ID NO: 43600 - DNA, 314 bp, Glycine max
agccttgagattcacgctctatttatgctcatctagcgaacttccatcatctcatatctcctttgaacatgaactccttgtctttaacggtgatcaaagggattggaacttatacgactgcaacgaaggcttgtcgagggaattctacatcattagggactacaatggctgctattggctctcgctctatcgatatggtgatatgagcgttgccttctatgtgagactttacttttcttttgcatgggaaagcgtccaagtatatcttctgaccaaggggagataggacgagatatcactacattgtgacatta

SEQ ID NO: 43601 - DNA, 471 bp, Glycine max
  unsure (1)..(471): unsure at all n locations
gacatcatgccacctccagagtgctgtgactgacttaactttactatatggggcctatgcaagtaggaagccattgaggaanaaagtgagcctgttgatgagtgagatgattctccagatatacataaggatcgtgtatcataaatgaaccatacacctgggctgtgtgaatatcatagatgcccacactttactacgtgtcaatgcgtgtcacagggacaatttcgactactcctagcagagagtatacaatcaacccgattaatgtgttctgcgtctacgaaggcatcactgctgaatacgatgtntgcttcactcttcttcttatatgcatatattagatggatacctcctgtctgcagaagtcatctgcggtcattcgtggctccatataactaacctattatctatgggttgacgccatgaactctgcttgctgtttcatcgacggagacacgctcatgagatgan

SEQ ID NO: 43602 - DNA, 401 bp, Glycine max
  unsure (1)..(401): unsure at all n locations
agcnttggactttgacttctgacaagttgtttatttgccttctttcctaatggactatgtgagatgtgataaacttcttcattagatgatgaagatgcaccttttaacttattggatgcttgtagctttaggctttaacttataattagttcttcacctgactcatccaatgatatatttgttgtggcgaagtgagctccttttttcatttaaatattaactagtggatgagagtgcatttataagaggtatttaatcttggggtatgtcagccttattttcattttgggtatgaaggagttcaaatgtttatgtgtttagaatttgttacacatctcaattgagaattgtgaagtgtgctacactattgtcatcatatactctcaattgtatcttgaacc

SEQ ID NO: 43603 - DNA, 340 bp, Glycine max
  unsure (1)..(340): unsure at all n locations
tgtgttctcagttctgtgtgtgaatgaattgcgagctaatatatgtgaaataaagagggaagattaagtgcttanaataaatgcgactcacaaattctaaacttcgtttttgaagatctcatggtgaaaagtgagttgtgaatttctcttaagttcaagaagacactcattcactcaagaaaggttcttgcacatgattgattacgttatgtctttccttgactatgtttttcatgtgtttctacacattgctagcatatgcatgaatttcaaaaggcatactagaatatgtttttctagttcacgctaagggtatgtgtctcttaggctcttattcaca

SEQ ID NO: 43604 - DNA, 473 bp, Glycine max
  unsure (1)..(473): unsure at all n locations
tgcaagcttcaagaaaaagatggcctcaacaaacttcttatttccagtaaggaattctattaatagacctccaatctttaatggagagggttaccattactggaaaacccgaatgcaaatttttattgaggcaatagacctaaatatttgggaagccatagaaatagggccttatatacccaccacagtagaaagaattacaatagatggcagttcatcaagtgaaagtataactatagaaaaacctagagatagatgttctgaagaggatagaaaacgagtacaatacaatttaaaagccaaaaacataataacatctgccctgngaatggatgatatattcagggtttcaaattgtaagagtgctaacgaaatgtgggacactcttcgattaacacatgaaggaactacatatgttaaaagatctangataaatgcactaactcatgagtatgaattatntagaatgaatg

SEQ ID NO: 43605 - DNA, 405 bp, Glycine max
  unsure (1)..(405): unsure at all n locations
cagagattgatcttttgtttactttaaataagagaattatatgttgagtctttttgtcaatcacttctttttggtttaaaaataattacaaatacttttttttatgagtctaaaatttgggggctcttgttagttacattttctttcattgatagataaaattctattttcctttttttccaagatatttcctgaatgctttttgattttcaaattaatttcctaatagtatatgtccgaaaactagctcacttgttttctagactattggaaagaactaattaagttgaaaacaaaagagcatcgaagaatatatctttaaaacagaggaataggaagatattntataaatgaagaaagatgaattaacatgagtaaatttgagttaattatttaaccttggat

SEQ ID NO: 43606 - DNA, 441 bp, Glycine max
atgtttgtgaaatatgaagccgatgctcttgtgcaagcgattattggagaaaaacactccacttgattatgatgattgactagctccaaatgctcactgatgttaacctttcactatgtaattcagctgtcgactctatgatgacgtgttaaggaaaattcaggatttcaagtgacagaatttcatgaacttatatctttaaaacacttacccgtttcatgaacgtatgctataattcacagaaatagatgtcgggtgcatacttgcacacgaaagttgcccgaaatattgaactttatatcctacacaactggcgacgtgtacattttagcgcttctaacaaattatcacaacgctcacaactatcaactgccaggaacacttcacgctcatacttaaacaacacgatgtgatctatgtatctaatatgcagagtagaag

SEQ ID NO: 43607 - DNA, 304 bp, Glycine max
  unsure (1)..(304): unsure at all n locations
atcaagctatcgatgttctattaagtgcataacataaacatgatcgcactagaataaatgagaataagggagagagaaatgccaactcaatttatactggttctgccacttaccgtgcctacatccaggccttaagcaacccacttgagaatgtcattaccgtagtcaatcttacttccatgtctgaaccactcanggatgccctttcctcgtgttcacaaatctctacaactcacgagactcacagtctctggacccacaatcacttgctttatagtaagaatattatttctctcttgaacag

SEQ ID NO: 43608 - DNA, 425 bp, Glycine max
agcttccaaccatagagcttgttaggctgctatatcaacaacaatatattctacttcacatgttgacaaagcaactacactctgcttctttgagcaccaagagattggtgatgttccatatttgaaaacataaccagtagtgcttttcctatcatccttatcaccacaccaatctgaatcactataaccaaacacttctccttctatttcttgtgactgaaaggatataaaatgccaacatccaatgttcctatcacatatctcagaatcctctttgctgccaagaaatgaggtgtctttggtttctccataaacctgcttatcaatataacacaatatgcaattatatgtttggtgtacatatgaaccataattgacctacatattggtggacgagggatgatcaatttgtttctcatacccat

SEQ ID NO: 43609 - DNA, 428 bp, Glycine max
  unsure (1)..(428): unsure at all n locations
tctgcatcgggaaggtaagtggtggtgcgaatatgttagattattccatgagatanagaatgaaagaatggatatgcgtgttgctgaagaacaacgagatgcgaatatactgtgtgtgttgtgaatgtgaagtgaatgggatggaacatgatgctcggaacttggttgtgaacatttgagggatggatcttcttagtgcctcaatagattttttattttttctatccacgatgggatatggatgaaatgaattttgtttattattacttttacatacactatgacaaacaattgtaggtataagtattttatgacttttacctacactaatttatgtgtgtaggcaaaagtctccgtaatatatgtcattttcttgtaatgaggagctatggaccagcaaacctgcagatggcctgatatgaggtgat

SEQ ID NO: 43610 - DNA, 514 bp, Glycine max
  unsure (1)..(514): unsure at all n locations
tgacggaccgcaaccgtgagaccccttaatgccctgaganacgntgaactcacagnncacctganagcatgcaagcttgtggcgtaatanttttatcaagtttctataaacgaaacttgcatgccatgtatatggggtggaatggtaacatattcttctatcggctggacggatgttacaaatcacaacataagagttgccataattttttaaaagtcagagtatctctctcgcacacaaaattaagaaaagaatgttaccgttatacattcaatacactaatatttacgggctgttaatttgagaaacattttagccattaggttgtataaacacttaaaagaaagtaaaacgaataccgaaaccatatgtgtaacccttactggttctgttctggtgaaacttttcaaacaggacacaatggtacacattaatctatttgtaattagtgaacatataaaatgaatacgaaaatgtgtttccaaccaacatccatttcttatcattcatgccn

SEQ ID NO: 43611 - DNA, 469 bp, Glycine max
tataagcttgcgtcagatttgaatgctgcaatgaagatgatatacatgtattctactttgcctgcccttggaaattgctaaaagtatgaaggcgtgtggagaaagcatgcgagagaacattattgctgcaagaatcttgcgatccatgattctgaaatttaactatgttgtgtgctcgattgaagaatccaataatttggatactatgacaatcgatgaactgcagagtagtcttttagttcataagtaaaggatggtgtgttatgaagaggagtgacaagcaccgtatattacgcatgaagataggggatgaagaggacgaggatgatgaaaaccacgacgaatagggttttccgtcgtagaggaagacggagacagtcaatcaacaaagttgatattgaatgcttcaagtgtcacaaacatggacattgtcaatatgaatgtctacctgggaataaaataaatatgc

SEQ ID NO: 43612 - DNA, 391 bp, Glycine max
agcttaagcttgtgagtaaacagtcactactctcttaaaatctagcttcaacttggcatcaaagcgggttccatgcgctgtctccgccgtcgccagccgatattctctctggcgagaccagggttacgatcgccgtgagaagcgcgatccacccgtgcaagtcgatctgccatcagagccgccacgcgctgatacagtacctcatgctttccggcgcgtgaagtccacgcgccgtcgtaccttcgccggaagcttgcaccgatatgtcctgccagcttcatcgtcctcctctgagtacgttccaagtgttgtgacttgagttcagcaagtcacggtgccaactcgtgcattcctctacctgtgtagcagattgggcctttatcatagatct

SEQ ID NO: 43613 - DNA, 167 bp, Glycine max
aagatatagtgttagacattgctcatatttataaagaaagaaacttttgtgctgacaagctggctcatgttgatgctctgtctcgtgattctcgcacttgctgggactcgattcccatttctgttacgaatgagtttcttagaaatagaacgtctctttcgtattac

SEQ ID NO: 43614 - DNA, 534 bp, Glycine max
  unsure (1)..(534): unsure at all n locations
agaaatcagannacaattgaaccagtgataccgtttggagtccgtggatactctacagctacctgcatgcatgcaatcatattggctggacctatatgttgaactgttcttgaataatgttgactcatcaccttgtgcaacatttcagagttaaaacctcccaacgcggatctgatgttggagtggacgaactcacacagttgatgacccatcctcttgaaaggcgacgagatgatgcattattacctctgaagggaccactccgaatatcagtgacaaagatgctttaacatgattgggctatacctgctcacgatagttgaacgttctcatgaatcttaggatagattgtgggctcatacgctcacacagaagccgcctatactagtgaactctatactccgcctaactttatacgggccattgttatcacgccgtattacctatgaaaagcgccttaactttcaaatgcaaggacactaatcgtcatcatnttccctcgttgtcatgacgtattcagatgcagagtagaan

SEQ ID NO: 43615 - DNA, 331 bp, Glycine max
  unsure (1)..(331): unsure at all n locations
tatcctgatgagggtgtgccatatgttctctttactggactaatacatttgctgcccaagtttcatggtcttgcaagtgaagatcctcataagcatcataatgagggtcatattgtttgttccaccatgaagcctcctgatgtccaagaagatcatgtctttctaaagcttttcttcattctctagaaggagtggcataagattgtctatactaccttgctcctacgtccatttttagctgggatgaccttaagaaagtgttcttggagaaattcttccctgctactatgaccactgccctcanaaaagacatttcaagcatcaggcaact

SEQ ID NO: 43616 - DNA, 384 bp, Glycine max
  unsure (1)..(384): unsure at all n locations
agcttataggttggacctatatgttggacctcatagaagagtatggagtcaacaccactnttaacatttctgatttaattccttttataggcggagctgatactaatgaggaggaaccaacaaatttgaggtcaaatcctcttcaagggcgaggagatgatgcaatcatccctcagaagggaccagtcaccatagctatgagaaagaggctctaagaggattgggctatagctgctaaagaaggccctanggttctcatgagtcttangatagattttgggcccatgggctaagtatgaacccacttatctttgtaaatattataataggttttcctttttttgggccttgtattntggctcatttacgtttgtatggcacctt

SEQ ID NO: 43617 - DNA, 419 bp, Glycine max
  unsure (1)..(419): unsure at all n locations
tgtgcattcaatatcctgatgagggtgttccatatgttctctagactggactaatacatttgctgcccaagtttcatggtcttgcaagtgaagatcctcataagcatcttaaggagttccatattgtttgttccaccatgaagccccctgatgtccaagaagatcatgtctntctaaaggcttttcttcattctctagagggagtggcaaaagattggctatactaccttgctcctaggtccatttntagctgggatgaccttaagaaggtgttcttggagaaattcttccctgcaactaggaccactgccatcagaaaagacatttcatgcatcaggcaacttagtggagaaagcttgtatgagtactgggaaagattcaagaaattgtgtgcaagctgtcctcaccaattgatttct

SEQ ID NO: 43618 - DNA, 424 bp, Glycine max
  unsure (1)..(424): unsure at all n locations
agctngcttctacagtttaaacttgtttaatgtaacacttaatgtttgttaatagtcagaggagcttggttgattagtatatgtggatgaagtatttcagcaaactcatttacaaaaggatacttgtcaatttgtcgatgatagatctagacagacacatgtgagaccattgtcttgcatatttttttctttaaaatgtttattatattattggaataataattatttatgaattataggaagaatttgaggctagactatctcaagctaggcctgttgctgcatcaagtgtttgtgaatccaaactcactcccttagaccttgatgaagaacaaagacttangagtcagtgttgggttgcagttgcaggaccatagcataagggacaactttatggtactggagaccttgttcatacttacaa

SEQ ID NO: 43619 - DNA, 441 bp, Glycine max
  unsure (1)..(441): unsure at all n locations
agcttctttctttagcctgaaattgaagtggtttcaacattaattcacaaaatgggagtattcaatatataaaatcaaactaaacataagaatatgtataattcctacaaaaagaaccataanttggaggaaagatgctaattttatgtaactattcaatacaaaagttagtcgtaaacaacgactaacaatgccccctatcactttcgttgatgaagactntggagatattaatcaatgccacaatgatccaatgtttgtcaggatagagatggcaaacttcctagtatgcaaagtgttactcgacaatgaaacttggtagacgtcttgtaatggtcaaccttcaagtagttaggcataccagagagccaaatagagtcattctcaaagaaacttatagaactttcaggagagactaccgacaccatcaaatacgttcac

SEQ ID NO: 43620 - DNA, 397 bp, Glycine max
agcttgaaggataacttgatgccttggacaactctggaactcagctttccatgaataaaaaatctacacctgttgcaagtgtctgtggtctatgttcttttgcagatcaccatacagatctctgtccttctttacagcaatctggagtcaatgagcaacctgaagcttatgctgcaaacatttataatagacctcctcagcagggaaaccaacaacagcagaataattatgacttttcgagcaatagatacaatccaggttggaggaatcatcaaaatctgagatggacaagtcctccacaacaacaacagcctgtccctcctttccagaatgctgctggtccaagcaagccatatgttcctcctccgatgcagcagcagtcacaacaaagacaaca

SEQ ID NO: 43621 - DNA, 421 bp, Glycine max
  unsure (1)..(421): unsure at all n locations
ctcagcttcntgagaaacttccttggaagcatagcttattactcttccccctctataactaagctcacctccttgagaagctcccttgagaagattcctaaagaagctagagcttcgctacacacacctctntaatagctatgttcacctccttgagatgagaagctagagcttagctacacaccccttataatagctaagatcatccccattccaaaaatacatgagaatacaagaaaagtccttactataaagactactcanaatgccctataatacaatgctaacaccctatactactagaatggccaaaatacaaggcccaaaagaaggagaaacctattctaatatttacaaagaagagtgggatccaccttgacccatgggctcatgagaatcctacgggccttcctgggatctc

SEQ ID NO: 43622 - DNA, 380 bp, Glycine max
  unsure (1)..(380): unsure at all n locations
gctcagggcttcggtattccatatcgagcgtctcgatatattacgggactcaatcggacatcatagtaaaaagttataggtgtttgaatttgctcagagcttcngtattccatttcgagcatctcgatatattacgggactcaatcagacatccgagtataaagttattgtatgttgaatttgctcacggcttctatattccatttcgagcgtctcgatgtattaccggactcaatcagacatccgactataaatgtattgtcgtttgaattgctcagagctctacatatcatttagcttctcattatacggactcaatataatccgataaaattattggcttgatttgtagacttcgaatcattttaggttgattatta

SEQ ID NO: 43623 - DNA, 143 bp, Glycine max
  unsure (1)..(143): unsure at all n locations
ttgaaatcgcacagcggaagctctcgagaaagtcaaatggtcttaacttgtctcacggaagtccgattcaggcacatactatatcgagactcccaaatagaacaacgnaagctctcgttatatttaaatagtcataacctttc

SEQ ID NO: 43624 - DNA, 497 bp, Glycine max
  unsure (1)..(497): unsure at all n locations
gcttggtgaagtaacccggcttctggtgtgtgcaggtattggttntgctgacaaatagtgtagttgcaaacaaaatctttagtgtcaaagtacatgtgttggatcgagtggcctcagaataattaagaaggaggggtttaattaattattcctaagcctttactaattaaaaatttactcttctaaggcttttactatgttgttaagagaataaggagtagaagagaaacttaaccaaaagtaaaagcggaaattaaaatgcacagcggaaagtaaaagagtagggaagaaggagacaaacatacaagagtttttatactggttcggcaacaactcgtgcctacatccagtccccaagcgacctgcggtccttgagatttctttcaaccttgtaaaaatccttttacaagcaaagatccacaanggatgtaccctccctttgtctctttgaacctagtggatgtaccctccactagaactgatccacaagagatgta

SEQ ID NO: 43625 - DNA, 445 bp, Glycine max
  unsure (1)..(445): unsure at all n locations
agctggcctaaggtggngaaattcaggatcgttgatatgccagttgggtattacttagttcagtttacatctgaggagggctataaaatgccatgtttaatggatcctagatggttgcagaccactatatcattgtgtagagatggaagccaacttttattcagaatgcaaaaaagatgtaaaaggtagcagaatgggtgcaatttctccttttgccaatgaaactttatcatgatgtgttcctatgaacaacatggtctttactaggtactattctgaatatcgattgatgtacctctattcactccaaagcaagattntctcctacatgcgtagaggttgttctaaacaaaacanaagtggtgtccaagtttgaagcaagatggaatgtgtattttgtggaatagaaggggtngcatttgatttgctntcaatgtggcacata

SEQ ID NO: 43626 - DNA, 446 bp, Glycine max
  unsure (1)..(446): unsure at all n locations
gcttattctctgcagtnggtatggattatgtatcatacattttgttgatatctaatttagaaattgtatctgtcacactgtttactccatctgaagaagtctgtggttcatccttcccagacctgtgctaaattataagatgtaatgtaaacaattcctagataatattgatctcaagtagaaaataacataagcgaggttaaattgacaagtaaaatactagtaaaggaaggttaaattgacaagtaaaaggagaaacataagcgaacacaagttaaaaattgtctgtcagcaaccccaacttacgagttagaaaaaaagcaagaggcactttactgtcgcatagactattgagccaatggcctcttaaagtaaacaacatcatcaatgaagtcttatcccactatgtgaggttaacttcatggatcacacaacgccaatgttga

SEQ ID NO: 43627 - DNA, 380 bp, Glycine max
  unsure (1)..(380): unsure at all n locations
tctaagaggcaatggacaaaannataacttaaaatttttttgttgtccactcgctaagcgcaccactcgtgctaagcaccattttcttcacacctaagcgagctcttgcttgcactaagcgcattgacccctgatcattggctgaacgttctcgctaagcgcacagactcgccaagcgcaaaaacctctctggaatttaattcttttggattgtgctaagcgagcctattcatgctaagcataggccactactgcatttaatgagcattaattcgctaagcgcagcctttggcggctaagcgcaagatgtaggaccaatcaaagctgcagtacccgctaagtgcaagcttgcgcgctaagctgaaaagcttctctagaat

SEQ ID NO: 43628 - DNA, 432 bp, Glycine max
gcttgagctgaagttcttgatatgtgctgttattggttaggcaatagcaaaagacatattcccctgctttcatttactggaagctcaaaggtacttcatctctctcttattttgattaaacaatcgaatctttatttttttttatgtgtttacaatgtacattacattttcatgatagtatttatatgttacgacctctattagttagctaacaagtgtaatttattataatttcttgtaattcattttttttgttggttccattggtttttattctaaatacctattcttattttataacatatatggtagtagctgtaacatacaaaatggtattgaatcttagagtatgcttcttcccctaccaattattcttttagttagaataattattataagtcttcttcttaagttatattataatttatatta

SEQ ID NO: 43629 - DNA, 422 bp, Glycine max
  unsure (1)..(422): unsure at all n locations
gcttttgcagttggaatcatttatcctatctccgacagccaacaggtgagtcccatctaggtagttccgaagaaaatcggcctcaccgtgatcaanaatgagaaggaggagctgattcctactcgggtgcagaacagttggagagtctgcattgactataggaggctgaaccaagttaccaaaaaggaccattttcccctgccattcattgaacagatgcttgaacgcctgacaggtaaatctcactactgtttccttgacagtttttctggttatatgcaaatcactattgctcctaaggatcaggaaaataccacattcacctggcctttcggcacttttgcccatagaaggatgactntcggcctgtgcaatgcccctggtactctttttgcggtgcatgaatcaatatttcagtgatt

SEQ ID NO: 43630 - DNA, 579 bp, Glycine max
  unsure (1)..(579): unsure at all n locations
ccactcactcnnncntcttnnnnnnctgtnnntnntataatagagaagaggnnnntctnnntttcctaatnnntcnnatcnnnnnnnnnnnaagactcgcacgatcgnatagcgcgnnnnnnnnnnctntnnntntgtggcnnggcgggcctccttactttttgctttcacgctactctgaaacagtcttccgtccgcgagctcttttcatgtccgcctgaatgggcttataacctaaaccatacttcccacgattcccttgggtttttatcagactaattatgcccccattgtcttttcctaaacccatcccgggttcataaccgctcccctacataactcgggccatcattaccgccgcatctgacagacaaaggttgccaaagagggagtccacggatgaaatgctgaccaactctaaagactggaaagcggtttctaaccattcttctgcggttccacataacgcatggaggatgggcacttacaagatatcttctcgcctgaacgagaccagtgccctcactacaattcacttttggtgagtgtaaagacaccccactgatgatcacggccccg

SEQ ID NO: 43631 - DNA, 389 bp, Glycine max
  unsure (1)..(389): unsure at all n locations
gcttaaccttcggtttggctcgaagacatacttaataagagaatccttaatagacaacagctctggaaattccttcttcaatttggctgcgtcaagctaattaattgttgctcctgngagcaacaatcaccttcgcctgttcctcaagagtgaagttcttccaagtgaaattggggtcaacataatccctgtacatctccaagatntcattgtgactaaccactccagggttagtaaagttccagatcccagtcagattcctcttccccatctcaatggagataggaagcagttcatccaatatagtcatcgaattcggaatgtcggtttctttgaagccgattccggatccaagggggtgatcggagtcgtactcnaagatgcagtcg

SEQ ID NO: 43632 - DNA, 434 bp, Glycine max
  unsure (1)..(434): unsure at all n locations
ttggcctctcttaatggatctagacgtgaccaacataatggtctctataagactaaataagggacaaatcaaccagtctcctccaaatggaggtccaacaatcctaacaatagctagccctggctgtggctttgcctttgcctccgcctactgatgttgttgtcgcttttcatcatagtgctagtgctccaatgtagtcactctatgatgtctctctgcaacatcttcccctttctacaaggggccttcatggaaacggtcacgtctaacaacgtacaatgtctgcttcgtgcaagccatctaaattttttttataaaattaactcaataatcataataaaaaattatatntaaccaagacaataaaataaaatattccatntgtctaaaactaataaaaaaataaataaaacatacaacagaatcatgaattc

SEQ ID NO: 43633 - DNA, 485 bp, Glycine max
  unsure (1)..(485): unsure at all n locations
gcttatagttcaagagttggatatacctctctacctcttgcagnctccacgaaatttagaaggaagaatgagggagtttaaattccaatatccaaccttcaagagtgcaaaaataagatttgaaactacaagtgagaataaaccaaggtaataaagtgaaaatcaagcttagaagtgaaaacgaaggtcatttacctaagcttgatggaagaaggtttcaagaacacttggaaaagcttggaagaagagtggaaatggtggtccttcccttttgaccagcttgtgaaaatggaggaagaatgagcaactttggtgagtnttggattctaaatggacttgtagaagaagcttatagcatgttccattggattgttgtgtaggcttatcttactcactcaattttgacccatgaatgactcttgcttagtcatggaaaatgtgtacatcactaccagatgtggtgcacatattttctctatcgatct

SEQ ID NO: 43634 - DNA, 263 bp, Glycine max
  unsure (1)..(263): unsure at all n locations
actctctagaaattcanatggtcataacttttcacacggatgtccgatcgggcgcataatatgtcgagaggctcgaaattgaacaacggaagctcttgagaaattcaaatggtcataacttttcacacggatgtccgattcaggagcatcacatattgagacgctcgaaattcaaatggggataacttttcaaacagatgatggacttaagcttatactatgatgatacactcgagcgcaaacatcgtagactctctcgaaat

SEQ ID NO: 43635 - DNA, 300 bp, Glycine max
  unsure (1)..(300): unsure at all n locations
cgtgctctgcnactattgttagtcgcggctatacgagacatctttgccaacaaagatagttagccataacttgcctttgctttttcttccatgctatatgtagcaaagtcattgatcctgtcaagtttgatgagctggaaaatgaggccgcaattatactgtgccaggtggagatgtattttccccttgctttctttgacatcatgattcacttgattgtgcatctggtcagagaaatcaaatgttatggtcctgcttatctatggaggatatacccggctgagcgatacatgaagatct

SEQ ID NO: 43636 - DNA, 304 bp, Glycine max
  unsure (1)..(304): unsure at all n locations
gcttcttaaactcgttcttagcgtaggatcttgtcacaggtctagacacggaagacttgtttcgatctattgtgaaagcaagaagcaaactcgtccttgacagagcccttcttaaactcacacaagttntctgaatatctcttgattaaatttcaatcaattctgccctttaaataggttacaaagatatctaataattatcctaattgataaaataaaaataaagagaatcctaattgataggaccataactaacaattatcctaattaataacaaaaataatatccctaatatataatatct

SEQ ID NO: 43637 - DNA, 421 bp, Glycine max
tcagctgctactgatgagcttgttggaagcttaatggatgctggatctttgagcttcaatgaggctcttcaaagggattttccaccatggagatgcagtggaagataaaggagaagaggtgagaggaggcgccatccactagggaataagccatggaagaaggagcttcacgaccaagagagtgccttggataagaagtttagagaggaaacttcaatggaggaaaagaaagaaagagagaaagagagagaggggagcacgaaattgaaggaggaaaagagggagagaagttgaactttgaagtgtctcacaagactctcattcatcaaagttacaataagcattacacatgcttctatttatagcctaggtagcttccttgagaagctagagcttagctacacacacctctctaataact

SEQ ID NO: 43638 - DNA, 390 bp, Glycine max
  unsure (1)..(390): unsure at all n locations
agcttgtaatcgattacacacatactgntatcgattaccagaggagattttcagaagatattctcaacagtcacatctttctgtgtggttcttgaatggctatcaaaggcctatatatatgtgacttgagacacgaatttgaaaagagtgtttcaaaacaaaaaggtcttatcctcttataaagcaaaatcgttttatcctcttacaaattccttggccaaattacttgtgattcaataaggaattatttgagtgctcaaattgttcaatctatctctttcaagagagatttcttcttttcttcttctttattctgaaaagggattaagagaccgatggtctcttgttgtgaaagaattgtcaacacaaaggaagggttgtccttgtgtg

SEQ ID NO: 43639 - DNA, 243 bp, Glycine max
gatttgagagctgtgaagaatggtctaggcagattttggaaggccttttatatcttcacagtcacaatccaccggttattcaccgaaaccttaattgcaataacatttttgtcaatgggaatcaaggggaggtgaaaattggtgatttaagattggcggctatccttcaacaggccaattcagctcacagtgtcataggtaacgtttcctgagaaatattacatttattttacccttttttat

SEQ ID NO: 43640 - DNA, 245 bp, Glycine max
  unsure (1)..(245): unsure at all n locations
acttcaagatcaagcatcaagaatccaatccaagattcaagattcantagaagaaatcaagaagccacaagtcaggacttcatatatgataagtattaaaaaaaaattcaaaaaccaaatagcacagttttggtttacaaaacaattttctcanattttctaagttaccagagtgantactctctggtaatcaattaccagttggcagtaatagattaccagtgaccagtttggggtttcaaatg

SEQ ID NO: 43641 - DNA, 349 bp, Glycine max
  unsure (1)..(349): unsure at all n locations
gctttgagcaaattcaaacgacaataactnttatctcgggtgtccgattgtgtcccgtagtatatcgagacgctcgaaattgacaacagaagctcaaagcacattcgaacggcaataactttttactcagatgtccgattgagtcccagtatatatcgagacgctcgtaattgaaaacagaagctctcagcaaattcacacgacaataactatntactcggatgtccgattgagtcncgtaatatatcgagacgctcgtaattgataacagaagctctgagcaaattcaaacgacaataactctttactcggatgttcgactgagttccgtaatatatctagacgctcg

SEQ ID NO: 43642 - DNA, 410 bp, Glycine max
  unsure (1)..(410): unsure at all n locations
aattaacatgaacttcagaattctaactgtttttttatttcatatcttaatttttttttatagagtagcttagtgtgccgtgtcctgggtattaattttataatttaattttctttatacattataattatttaatgtatttatttattatatnttaattagtagaatatatattaataaaaatatatattatatatacacacacaatagttaacaatattaatatacaataaaatgtaaagtattataaaaaccacaccagaattttgtatgatgtatactatattttcatatgcatgcatcaagtttgtatttttataannattggtacttncaaaaaaaggtatccccataaatcttatnttagaattgatgtattntatatatttntatattaataaaattatata

SEQ ID NO: 43643 - DNA, 427 bp, Glycine max
  unsure (1)..(427): unsure at all n locations
atggaagctcctaatatctcccacactnntttgggtgggccattcttggatggccttgattttctcagggtccacttggaccccatttctaccaactacaaaccctaagaaaactatattatctacacaaaaaagtacacttctctatatttgcatagagggtgtttttcctaaggactgaaagaacttgcctaagatgtcctaagtgatcatctaggctcctactgtacactaaaatatcatcaaaataaacaactacaaatctacctatgaaatcccttaagacatgatgcataagcctcataaaggtgcttggtgcattagtgagcccgaaaggcatcactagccattcatacaaaccaaacttggtcttgagagccggtttccactcatcaccctttttcatcctgatgtggtgatacccact

SEQ ID NO: 43644 - DNA, 303 bp, Glycine max
  unsure (1)..(303): unsure at all n locations
actctcaaactcagcttgagcctgtggataaatgctaaagaacaaatcttctctcatatttcggtattctggatattcaccctgatggtgataaccttcaagcaatgtgtctaggggtgtaaatgtttatatgccaaactgtccttcctatagagacgatgatcccaagatgttcatcccgaagggtgtacaaccttccaagcattgagcctagtgacatanatccttaaaggccagatcgtcctctcttgtagaagtggtgatttcaagatgtttaccctaaacaatgtacaactctcctcc

SEQ ID NO: 43645 - DNA, 504 bp, Glycine max
tgcagcatgcaagctgttggtgctcaagcctacttctcttctttgagtgaatctataataatttaaaaaacatgaatgttagttacttagtttcaatttcagcttctaatgtttcataatcaaattaaaaatgttcactttcatataatactatagattaagtgattaacttacatgctcaaaggtactccaattacgctcacatcctgatgagctacaggtcaaacttaaaattttaatggcaatggtttgcaagtgtggtgttttccctccacacaatttccaccactcaactggtaaatgcaattcatatgcattagcatgtacacagattattaattaatcattcaaatttataagtgaactttcccacttactaggagatatctcagtccttgctttcattgctacaatcataccaaacctctctctagctctattatacactagcaattgttgtgaacatcattacaaaatatcatcttactaagccatcatacattg

SEQ ID NO: 43646 - DNA, 358 bp, Glycine max
  unsure (1)..(358): unsure at all n locations
actcagcttggcttgtttaattanactcctatgatcatgagcaactatgtgtgttcttctatgactngagaaacagaagtgatcaaatatcatgtagaatctaacacgtactaggctgcctcctagtagcgcttctttaatgtcttgagctggacgccttatgacttgtcggtcacggacctagtactattcttacctttggctttggacttggtcgcctattggtcggccatgtgtcgtatgcaacgctctaaccttttagtggatgagctgatgtgaactctacacgtggtggcggtgtacctgctgcccgctgtcagccttcccgaggctactgaggtgtctcaccctgctcctt

SEQ ID NO: 43647 - DNA, 454 bp, Glycine max
  unsure (1)..(454): unsure at all n locations
ctgcagcttcccaagagccacgatgtagtttgttgtgtcaaatttctggtcttgtgtaatgagtactcaacttataaaaagaggagctttatttgttgtttttctttcgtctgccctttagcatcatattatggacagtatatgctcacacgatgtttacttatgcatgagacttanaattgtctactttctagcatgatgggaaggtgtgggttcatgatttttgcttatttcattgtgctaatatctctgtagcatcttcacacaagagaggctagagcggttgacaaaaggtgtaggagatttaaatttagaatatgatgaatgtaaccataaggaagaaaacctacagggctactcggagagtggtttggtgagtgatggaccaatacaagacagacttggtggagatacagtaatttctcaatctagagtgagatacgtctacacctga

SEQ ID NO: 43648 - DNA, 322 bp, Glycine max
agagaaacttagaatggctctagagtagagtattaaactgaaataaagactcaacaaaactctagctttggaacttgtcttcaactaattttcaattgaaatttccaattatagaataaattttgagccaaaacaacaagcacacttccctttcaccttttttttttttggatactgattttcctgccaacttgtgtgaattttcgtattttttccttttatccaaatcacttggtttcttttttataacttttttccagatgtctagaaaattaagtaaaaatttcagctcacaattcgaagtaaacaattctcagtaata

SEQ ID NO: 43649 - DNA, 372 bp, Glycine max
  unsure (1)..(372): unsure at all n locations
ctcatccactcactcagcgcgccctatgcgctaagcgtatcattgtgcacgtgctgagcgagtcattactcgcgctaagcgcaccaacccctactcattggttgatgaagcatcgctaagcgagccatgtgcgctaagcccatacacctcactggaatttcatcttttggaattgggctaagcgagtcatctcgctaagagccccagtgcgctaagcgcaattccctctctgtntgaaccttcatgtgaattgcgcccagtaggtcaacctgctaagcccaaatccctttcgggtttggaattgtgctaagcgagcgcatctcgctaagcgcgctccactactacatcaagaagcatttaattcgctaagct

SEQ ID NO: 43650 - DNA, 378 bp, Glycine max
  unsure (1)..(378): unsure at all n locations
cgatcagaattgccattccttggattatagagttaaccaagctcatgcttttacaaaaaggttcatcaagtcaagttgaaatatggaagtaaccgtcttgcaaaattggggcaaaagatgaatcgagtcacatcactgcttcgtctactgccaaacatatttaggattattgatgtccttgttacttccagtttcaccttgacaaagatgtcatggaccatgttgaaaatctaaattgattcaaccccatatcttgcgtaaaaattcgcaatacttcaactgtacatcattcgcatgcatccatgcttttcattggttgcattgctcgttgcattctttccttganaaataaaataaaatgaacttaatcattggtat

SEQ ID NO: 43651 - DNA, 406 bp, Glycine max
  unsure (1)..(406): unsure at all n locations
atatagcgcactggctggaatgtttattgtgtgggtttatatctgtacttgcttgaaaaaatgattggtaaagattgtgatttaatggcttggtatattattgcttcctaatttcttaccgctagataatagacgggctttttcaccaacacagctcaactgactttgcttgtgtagagctatctgtttttttcttaaaaactttcgttgacaaactgcagattttntctttaactaatactaatataactgcttagaccttctggatattttctcatacataacatctatggatntaattaatggcatggtaaggcttatggacgttataacgtgcacacctttggaacagggacagggaattgatattatcgcgatgtattagtttctataaatgatggtgctc

SEQ ID NO: 43652 - DNA, 602 bp, Glycine max
  unsure (1)..(602): unsure at all n locations
aganagcngatganccccatganaccgtcgtcgacccgcgatcctctgagtcacctgcggcatgcaagcttctgcaagatcgaatcctttatactatcttacacagcctacatgtgagtaccatctaggtagtttactattaattatctgcctcgacagtgatctataactgagagactgaggatcatgattcctacatcccgttgcatatacaatatggacgagtctcgcatctgtctatgtggtaggctctaactcgaattacaaagaatacgaccacttcctcttctgccatctcatctgagacatatgctaagcacacactgacagagtaaactcctactagccgataactagacacgtgttcatggctatacgctatacacacattgctcctaaggatcatgaacataccacatttatctggactatatgtactaccgcccatagaaagatgactatttggctgcgcgtgcccgaggtattgtattgctgtgcatgagaacatcacactgaatctcagaatatcgtcgcatactctcatttctgccgagaacatcttattgtcgcctgcacacttctatcgcccatccttgaatttn

SEQ ID NO: 43653 - DNA, 367 bp, Glycine max
  unsure (1)..(367): unsure at all n locations
atttgatcatcctactttgatgagtgagaagctggggcaaatgaagaggatgagaatgagggagaaacccatgctgtgactgccattcctatacgaccaagtttcccaccaacccaataatgtcattactcagccaataacaacccttctccttaaccaccaccagttatccacaaaggccatccctaaatcaaccacaaaacccacctaccacacaaccaatgctaaacaccacctttagcacgaaccaaaacaccaaccaaaaatgaatnttgcagcaaatagcctgtatgattcaccccaaattctggtgtcatatgctaacttgctctcatatctactcgataattcaatggttgctataacc

SEQ ID NO: 43654 - DNA, 331 bp, Glycine max
  unsure (1)..(331): unsure at all n locations
cgaggccatcataggatggtcattcctcatacagagacaggggcagctgagggatgataaaattctgcacttccttggacgatgcggagccatacaaccgacatcaccaaacttgtgatttatctatcattaatgctttcaattcttctattattttgttatttcccttgtgatctgacattatctgcttccaattattatgtccattgtgattaaactgaacatgcagttatttgtcgcattgcgagtaatttatcgatatgggcatatggtcgtacttactttatgatgatttgcttgaaacacacaanaatgtgtaggtcttgtgcac

SEQ ID NO: 43655 - DNA, 463 bp, Glycine max
  unsure (1)..(463): unsure at all n locations
agcttgcttgggagctttatggaggctgatctttgagcttcaagaggccttcaatggtgattttcaccatggagatgcagcggaagacaaaggagaagaggtgagaggaggcgccatccattaaggaataagccatggaaaaaagagcttcaccaccaagatgagccttggataagaagcttggaaggatgcttcaatggaggaaaagaaagagggagagaaagagagaggggggagcacgaaattgaaggaagacaaagggagagaagttgaactttgagttgtgtctcacaagactcttattcatcaaagttaccacaagtgttacacatgcttctatttatagactagctagcttccttgagaagctgtcttgagaaaacttccttgagaagcttctttgagaanacttccttgagaagctagagcttagctatacacacccctctcataactaagctca

SEQ ID NO: 43656 - DNA, 335 bp, Glycine max
  unsure (1)..(335): unsure at all n locations
cttttggagtataaacctgtggaccaactcatttatttcctataaagaagtcatatctagtcaaggtctgagagaccatacaagtttctaacgatctctaattatgtgggccattaagtctatcatatgctgacaatagccgagaagcccatgaatctcttcgggggcggagtaagtgtctgccattgccttggccttggctaacaatcggggaagttcttgactcccgttcaaggtaagagcataccgatccatccacatggttgcctcttggtgtaaagagtcgatcacccttcctctagcctctttntccgcatatactggggcatactcat

SEQ ID NO: 43657 - DNA, 376 bp, Glycine max
ctgtctcgggccggatataaagcgggttgcagcaccggctccgcttccctaactgtactggagacggttggtgtggctttatcctctatagtattctggagttttaacatgacctacgagatggaagccatttgatcttttaaagccgatagatcagccttcatctgttgctgcacgccctcttcattatccatttttctggatcgagtgttataggggtgccttggtgttttattaggtatgatgaaattcctatagagataaccggcggtgagtatgccaccacgacatgaatatgctaatggatgatcggagcacttggatccaccccaaggtttctagataacatgatgagttcagaccttctcattgtata

SEQ ID NO: 43658 - DNA, 359 bp, Glycine max
  unsure (1)..(359): unsure at all n locations
agaagtgaagtttattagggttcagccccttaggcacttctctctctttcaattttcttagaacaattgtttccgtgaagaaaatccaagccgaggcgcttccgtaacgtttccgtaacattttcgtgagtgattttgcgaacgttntcgaccgttcttcgacgttcttcattcgttcttcagtcttcaacgggtaagtacctcaaaccaagcttttcaattcattctatgtacccgtggtggtccacacttggtttcatggtatattattctcgtttcatttatattttatacccccttttgacgtgcttaagccattttatttaagtcatctctcgcttaaactaaaaataaaataa

SEQ ID NO: 43659 - DNA, 400 bp, Glycine max
  unsure (1)..(400): unsure at all n locations
gctgtgtattgatagatattgattgattggttgagtgatattgtgtttgacccttgagtacatgaataatgtgaaaataaatgaggcatgttgtgttgaggtgtggtgttacgcaacacgtgatggaatggcatgaactatgttttagtaagttatatttcatttatatgatatgtatatctatgttgccttgtttctctctattagttaggaatgtgataactcactccccgtgtgctatttgtgtttggatcctatgatgatctcgaactttgtgttcgtgggagtagatggttaggtggatgactatggagaacctcgtgctagaggacgttggaacacaatgctttgatangatttgacattgggatatgggtttctatattaatngcatgaagtc

SEQ ID NO: 43660 - DNA, 265 bp, Glycine max
  unsure (1)..(265): unsure at all n locations
tccctttgaacagcccatgaaaacttaagttctccatatatattntagaccttgaattgttccattgtatttaattctatgtagattctgaaccttgtaatggcaaaggcacatcacatgtatgatattgatacatccaagcacaaaagaagcaacaaaaaagggtacctgccagataaatgatcagtataatatgtgacttgtaaaaagatagacatctatacaaacaagtgtcctanatatttctggactgtttctagatctg

SEQ ID NO: 43661 - DNA, 409 bp, Glycine max
  unsure (1)..(409): unsure at all n locations
aaaaaaactgaatttctanagtatatgatctcaactagtcgtcaacaaaagttgtgggaccacaaatcttaatggaaaaaaatgagggatcttgagaaatcaaacatttggttagagactaaaaaattaaatttcaaaaaagtttaattactaagaactcagttaacccttttaacttttattgactatttttttcgacaattggtatccttttcagctcattggatacttttattctctattcaactaaatattttatttccttttcagctcaccaaacttgattntatagtattaatgtttttatttgaatatgtacggcgataataattattgagagaggcgcttcaagttcaacagaatcttccttagaatatgatcataannagcctaaaaattaaagaagttg

SEQ ID NO: 43662 - DNA, 434 bp, Glycine max
  unsure (1)..(434): unsure at all n locations
gtagttgatctttgatgtctaanaagtctttgtatatgcctcttatcagctntgcttcgtcatttaggattttgtaaacttctcctaaagcaaaagatactactgtttctgtcatttcacttttatctcatattactactctacaattatgcttttttcatatgtatcaagtcataggtgattatgatgaactaactcactataatttagtgngagttcaactcagcttggtggaatttgatgattagtatttactacctcattcctatatatgttaatctcaccttcaagaggaataatgacactctcaagaggaacaaaatcatcttccttgtgatctgcatgtaaccttctaagagtttcttctcatattctttagtgccttccagtgaagaactcttgaacaagtaatattgtgatgaatttgtgtggtt

SEQ ID NO: 43663 - DNA, 149 bp, Glycine max
  unsure (1)..(149): unsure at all n locations
ccactgagctgccaggttctccacctttgggtgtattctntgaaagaatccgtgccctttnttgcacatgtcctgtttttacatcctatccagaaccatatcaaaattgtactgatactgcctatcacaggcaacgactaggtccttcc

SEQ ID NO: 43664 - DNA, 483 bp, Glycine max
  unsure (1)..(483): unsure at all n locations
cttgttcttgaatttttctaagttctatatctagctntgaacaatatacttggccttcatttaactgtctctgggctaggcggccactctcaacaaagtactttcgacacctactgtatgttgatttgaccaaggctgttatgggaatgttgccacaatccttcaaaaccttattgatacattctgagaggttggctgtcatgtgtccatatcgacgtccttctctatcataagccatagtccatttttcctttgaaatgcgatcaatccatgttgctatggctggacttatntcacgaaattattctaaattttgataacaaatgtgcttgcaaggagtgtatgctgcataaaattacttatcaataacaatcttaagtatataaggaagttaaatatacgtgaccataaatatgaatcttacccacttctgcacatttcttttgttggcgttagtgatttcgattgaagtgcttgtatgtg

SEQ ID NO: 43665 - DNA, 457 bp, Glycine max
tctggaggaagcctcttaatgaagcttctagagaaagctacttgcagctgcctcagttaaaatgctgcccagccttaattaaccgttggatctctcgaaatttggtcttaaactttagaagacacttttccatgatctgaccgttgggatatttgacaagatttctggagtgtgctataagcctcttaatgaagcttctggaggaagcctcttaatgaagcttctagagaaaactacatgaagctgcctctgtaaaaatgcttcccggccttcattaaccgttggatcttctcgaaatttggtcttaaacttcacaagacacttgtccataatctaaccgttgggatctgtgagaagatatctggagtgtgctcgaagcttccattccggagagcatctcttatttaagcatttcagcctttgctttcgtgtagcttaggaaaaacgtcatttcttc

SEQ ID NO: 43666 - DNA, 497 bp, Glycine max
  unsure (1)..(497): unsure at all n locations
gcttcaaacagcttggtataataaattacaatgaggttgttattgattaaaacagagagttgttgcctctgaagaaatatttctaactttgaaattattcttcacacatactatgatgatgcataatgcaaaacaaatatcaaatgcactaagatgcaacaaccaagataaaaaccaatacaaatgtcactcaagggagttgggcatgtaaaagccaaaacttcttcaaaacctcttcaagcttttccttgagcttcaagctttacccttatgttgttcactatattgcttatgttgcccccctatctctacacaacttggcacaaagacttggaaaactcatattctttgggaagcatgtcaacaagggatacaaatcaaaacgtctttcatatccaactagaacattgaatctggaaggaaagaggtatgactntatcatagtagatgactattctagatatactngggatacttccttgccataagcatgagtc

SEQ ID NO: 43667 - DNA, 472 bp, Glycine max
  unsure (1)..(472): unsure at all n locations
tactaagcttgcttcccacgacccaacaccgattgaggatggttgatgtcttgatttattntatttttctgctatttagacaatttttaattctcagttactttactcctatttattttacttagcacttgtacacaactgtntgaacaatatactggttgttgattatgcacagtggtttttgaaacatgttttggttttaattgctggtgtttgttgattcgtttgaattgaattgattgtgtgaattgagtgaattgcgatactagatcacatgccttgaataagtatgcgatatttataagagatagaacatgatactaggggcgtgagtaaaaatgttagtctgtatgatacggttatatcgaacgtaatcaatcactataacccactgagatgtgtgaatctaaattgtgagagaacgactagcatttagtatcaatgtgtgcatgaatctctanatactgaatga

SEQ ID NO: 43668 - DNA, 453 bp, Glycine max
  unsure (1)..(453): unsure at all n locations
gctggagaggatgcgttaatggaggataagttagacggagagaaatatagagacgcgagcacgaaattgaatgaagaccaacggagagaagttgaactttgagttgtgtctcacaaaactctcattcatcatagttacaacaagtgttacacatgtttctatatatagattacgtagctgccttgagaagctntcttgagaaaacttgcttgagaagctagagcttaactacacacacccctctcataactaagctcaccttcttgagaagcttccttaagaagattcctaaagaagctagagcttagctgcacacacctacctaatagctaagctcacctccttgagatgagaagctagagcttagctacacacccgctataatagctaagctcacctccattccgaaaatacgtgagaatacatacaaaaagtcctactacaaagactact

SEQ ID NO: 43669 - DNA, 418 bp, Glycine max
gaacatactcgacaccacatcatgccgccacactactaaacaacatagaccaatttctatgattaacaatttcacataccttctgaagaagatatctacttcccttaacttgaattatgagatcactagaaacttcaaaagagactcacctgtatacaaaagaaaatatatactatagtcattaaccaaaagagaaaaatatacataatctatgaagaaagaatcaaatagatgagttgattaatatctcaccttactgcttatgcagtgtagaatgtatgaggacgacatcctagtttcatgaacttcatggctttcaatttcttatcatctaaatgatgcactaattatgactagctagttgcataataattcacttgctaacacagaagaagtgcaaaaacagatagtcaaataa

SEQ ID NO: 43670 - DNA, 433 bp, Glycine max
  unsure (1)..(433): unsure at all n locations
acttaatccagataagtatgaaaaagttttttcaaaaactagtagcacatggattnttctcaaaatctatttaccaaagattttttactctctagtaatagattaccagattattgtaatcgattaccaatagaaaaaatggttttcaaaaagctttcaactgaatttacaacgctccaattgatttcaaaatgttgtaatcgattacaatgttttggtaatcgattacctgtgtgcttgaacgttgaaattcaaattcaaatgtgaagagtcacattctttcacaaaaaagctttgtgtaattgattacactattttggtaatcgattactagtgaaagnttctgaacanatcanaatatgtaactcttcaaatagtttttgacttttacacattgctcttaagtttaataaaagtcataactcttctaatg

SEQ ID NO: 43671 - DNA, 313 bp, Glycine max
taaagaggcatgtgcatgtcataataggatcattgagatgtcttgcattccttcagttgcagcttatagtaacctcactaaagggctttgccatattggagagattgacgaagccatggtgcttgttcccgaatgcttgcgcaatgttagtgatggaccattggagtttaagtatagtcttaccatcattcatgcatgtaaatcaaatgttgctgagaaggtgattgatgtattaaatgagatgatagaacaacgttgctctctagataatgtcatttattgctcaatcatctctggcatgtgtaagcatgga

SEQ ID NO: 43672 - DNA, 372 bp, Glycine max
  unsure (1)..(372): unsure at all n locations
ccccgtggcattcaacacttggtgaaacttgaaaatctcactctctggggtgtgccaactgaagttaaacagagcattgatcccaatggaggacaagagcattggatgatccaacatgtgcctagcgttgctattgctgattcgtttatggtccagagattataagaatttctagaggaggaaaggatgacgatattacgatttacaagatatgttctttcctcttgttaatatttctatagattgataattttgtcccttattctttcttcaattataanaatgaaactgtttcctaattactaatctgatttctttacttttggtctcccttcattactcttctatgtctacatatctcccgtgtctcat

SEQ ID NO: 43673 - DNA, 459 bp, Glycine max
  unsure (1)..(459): unsure at all n locations
gagactaagaaattnctaatgaatatatttgatatgaaagatcttggggaagcctcttttgtattaggaatcaagatctaagagatcgctctcaagatatcctaaggttgtcacaagagagttatgtctataaggtcctagacagattcggcatgaaagatagtaaaccaggagataccccgatagctaaaggagacaaatttagtctcaaacaatgccctaataatgaccttgaaagaatagagatgcaaaagattccttatgcatcagcagtaggaagtctaatgtacactcaagtttgcactcgtctcgatataacatatgtagtaggagtcctgggcaaatatttgagtaatcctggaatgctgcattgaaaagcagcanaacgtgtgatgcgttacctacagagaataaaaggatacatgctcacttatcaaaattctgggaatatggagatca

SEQ ID NO: 43674 - DNA, 361 bp, Glycine max
  unsure (1)..(361): unsure at all n locations
ttctctctctttcgaatttcttaaaacaattgtttccgtgaagaaaatccaaaccgaggcgcttccgtaacgtttccgtaacgttttcgtgagtgatttcgcgaaggttttcgaccgttcttcgacgttcttcattcgttcttcatcgntcttcagtcttcaacgggtaagtacctcaaaccaagctttttaattcattctatgtacccgtggtggtccacatttggtttcatgtatttttattctcgttttcatttactttttatacccccttttgacgtgcttaagccatttatttaagtcatttctcgcttaacctanaaataaaataaatatccaccgatcgtttgaattgtatcat

SEQ ID NO: 43675 - DNA, 347 bp, Glycine max
  unsure (1)..(347): unsure at all n locations
cttgagcanattcaaacgacaataacgttttactcttatgtctgattgagtcccgtaatatatcgagacgctcgaaattgaataccaagctctgagcaaattcaaacgacaataactttttactcgaatgtccgattgagtcccgtaatatatcgaaacgctcgaaattgaatgttgaagctctgagcatattcaaacgacaataactgtttactcggatgtctgattgagtcccgtaatgtatcaaaacgctcgatattgaatgttgaagctctgagcacattcaaacgacaacaagtttttactcggatgttcgattgagtcccgtaatatatcgaaacgctcga

SEQ ID NO: 43676 - DNA, 373 bp, Glycine max
  unsure (1)..(373): unsure at all n locations
agcaagaaattatgtgcatatatagctacaaacgtcttggaattgatacatacagatattngtgggccatttcatacaccttcatggaatggtcaacaatattttatatcattcatagacgattactccagatatgcatacttgtttcttatacatgacaagtcacaatctttggatgtgttcaaaatatttaaagttgaagttgaaaatcaacttaacaaaaagaataaaatgtgtcagatttgaccgtgatggtgaatattatgacagatatgacggttcaggtgaacaacattcgggaccttgtgccaggtacctagaggaatgtggaatcgtcccacagtacaccatgccanggtcacctagcatgaat

SEQ ID NO: 43677 - DNA, 321 bp, Glycine max
  unsure (1)..(321): unsure at all n locations
gtctatctgcttcaaatttggactgatgttgctaattgttggcacaaccttcctcctcattcaatggtggtgtaacttatcatatgttcactgatgactcaaccactacaatttttgcagcctatgcagcctatgttttgcacacagccacaaatgcaccctcttatgtagtatggtgttgttgctcctcctatgcttaacaatttttttgcttaatatgttattccacaacagctgcagcaacaaacttaattgggcaacacttctcaagctcctatgattgccaattatccttcaccactaccacagntagctcctaca

SEQ ID NO: 43678 - DNA, 254 bp, Glycine max
  unsure (1)..(254): unsure at all n locations
agccatgtttggacgcctcccaactattntaaatgcattatgttatcttaacaaagcttttgataactatgattatattgacaaaatttaaagaaacttgtccagaaagtggagaccgctagtaacaacttaaaggattatgaagaacctgaaatctgtgttcattgcaaaactgattgggaccttctatggtcatgaacacaaaattcaacaagtggaaggattctaaagggaaaatacttggctctaacaac

SEQ ID NO: 43679 - DNA, 415 bp, Glycine max
  unsure (1)..(415): unsure at all n locations
tctggaggaagcctcttaatgaagcttctagagaaagctacatgcagctgcctcagtaaaaatgctgcccagccttattaaccgttggatcttctcngaaattggtcttaaactttagaagacacttttccatgatctgaccgttgggatatttgacaagatttctggagtgtgctataagcctcttaatgaagcttctggaggaagcctcttaatgaagcttctagagaaaactacatgaagctgcctctgtaaaaatgcttcccggccttcattaaccgttggatcttctcgaaatttggtcttaaacttcacaagacacttgtccataatctaaccgttgggatctgtgagaagatatctggagtgtgctcgaagcttccattccggagagcatctcttatttaagcatttc

SEQ ID NO: 43680 - DNA, 568 bp, Glycine max
  unsure (1)..(568): unsure at all n locations
aggatgcggggnatgagaccatcgagacctcgatctctagagtcacctgcggcatgcagcttnncgtttcaattggagcgtctcgatatattacnggactcaatccgacctctaaatataaagttattggtcgttgaattatctcaaagcctcttgtggtcaatttgagccactccatataataccggacctcatcggacattcgaagtaaaaagtattggcgtttaaatttgcctacaacttcccgttttcatttggagcgattcgatatattacgagactcaaccggacattcgagttaaaaattattgtggtttgcatttgctatgagctttctcattttcaaattcacacatctcgatatattacgggactcaaatagatatctcgagtaagaggtatttccgttttcatatgcacagggcatcttgtttcaatttcgagtgtctcgatatattacgggacttcatcggagatccaataaaatttgttgtcgttgatttgatctaacttccctttaaattagacgcctcatttatgacggactcatcagacatcgagtaaaatn

SEQ ID NO: 43681 - DNA, 474 bp, Glycine max
  unsure (1)..(474): unsure at all n locations
tgcgctatttccttcatacgttctcttgcacaagacatttaaccgataaagtgcacccatatacaatcaaggcggcttcgttacctagatatttacacgtactgccaaggtgtatttgttacttacatcacacacatctccttggctgaatttacatacatgcatactcaaagtattttggggtaccaaaaattgcacatgtgcacatcttggtatttctaatacctatacatacacaaacttcatgatgaatcttgactatctacacaataaggtgctacatttcatcccttttttcaaagttttgctacctaaagccgcatgcaaaatcaagcatattttcctttgcggactataaatgtattcaaattaaaagggatacattntttggtaatgtatcttctttacataacatgcaacatatttatgtatatttttttgtgagacttttgacaccaaaaatatatgtacata

SEQ ID NO: 43682 - DNA, 475 bp, Glycine max
  unsure (1)..(475): unsure at all n locations
gcttctaatctactntntaattcttacagcttaacaaattgagagttacttctttctagaacctttataacctcatgagtgtcaaacaaccagctaaatagtagagcatattatgttttcatttaacactgtttaccagattactcaagtcttcacataacttttgctgtaatgattcctcatctcttactactttntatggaagcaatgctttccaagattattttgatgatgccaaagactcaagtcaagaatcaagagtcaagatagtttcaagaatcaaagattcattcaatcaaagcaagtttcaagaatcaaagagttgttcaatcaagattcaagattcaagtaaagattcaagagaagactcaatcaagagaagtattaaaagagttcttcataatatcggatagcacaattctgttcaaaagaattntcaaagaaaatctttaccaagagtttactctctgtaatc

SEQ ID NO: 43683 - DNA, 354 bp, Glycine max
ctggcctcctcccaatggagatgaagcaactttgaacctccatttcataaataaacctatacaaattctagcatcatttcatataaataaaaataggaagagaaagcacaaatataaataccatatgtagactagtgaaattgagtcatttgaacagaatgggtataaaaaatttatataaatcaagaaaataaacgattgaatatttgttgccatgaatgaaccagttattcaatagtaatggaaaacaatcgcacctagttgtactctttcaataagcctctagcaatcatttatcggagaattttctctgccttatcatgatcatctgtttcagatagggcacaaataatt

SEQ ID NO: 43684 - DNA, 402 bp, Glycine max
  unsure (1)..(402): unsure at all n locations
tgaaatgattgaatcatgtttcagtggtttgttngatattatttgagtgttagtgaatgacttgaatgagaaaatgtataacgaccggactggaatgattacatgtttngtctgatcaagcttgcatcctatagaagagaaaaaatgtgattagaagtatgaatcaaaatgttagtcagttggtcatattgattatgaacgaatgcattaaccacatcctgttgaaagtgtgatccttatatgttgaaagaaacaactatcgttcagtactgatttttgcatgaatctttgaagtatggactatatgcatgaattgatgatgatgaaggccatgttttgattgtgataactacttagccaaaaagctaaccttgtgcttgagtgattaatgccttgctccca

SEQ ID NO: 43685 - DNA, 324 bp, Glycine max
acataaaatcttataaatctaaagctacagttaaagtcttctaccctaaagttaagacaagaaaaagagaaaaaggatcaaggaacttacttggacggtgtatgattgatgcttcaaagtcgaaaatgcacaaagagagtacaaatcaaaatgtgcatatctttggagagagagaatgcataggcgatagttctgtaatctggaaaatgtgagtgaaactatttgtacactcacttaagcaatttcgatactttcgcttagcggaccgttgcgctaagcgagcaagagagacgtttggtttctcaaccaagttcgcttagccaa

SEQ ID NO: 43686 - DNA, 176 bp, Glycine max
ctctcgcgatattcatatcgtcataacttttcacacggatgttcgattctggcgcttatatgtcgagaggctcgaacttgaacgacgcaagctcttgacaaattaaactggcataacctttcacaccgaagctctcatcaaagtcatatgggcatcaccttactcacacatgtccg

SEQ ID NO: 43687 - DNA, 577 bp, Glycine max
  unsure (1)..(577): unsure at all n locations
aggacgatgcnnnatgaaccctttggagaccatgtagancccngagatcatctagagngcatgcgcacgcatgctatctatgcagagcgggactatatgttgcgatacttggacatactgtcctacagatactgatggacgagctggattggatgaagacaggatgtcctatgttctagcactttctctcgataccgtactgaaccacacatagctaaaaattgcttataccgaaattacttacgttcaacaaccgaaatcatggctgaaactaacactatgcgcttagagagatacagctcactcagtgcaccctcagagacgtagcatatcagcttaaccgctgccaagctcgcttagccccatagtttctattatgagatgcgcttatcctatgccgactcggcttaacatgaggcttccaacacaaaaggctctaagtgatcattgcgtancggattacccttcactggacacaagtatatgaacaagaggatgagtgtcatcctcaccgatgaactccttactgcttaagggcgtcactgagtcgttgggacacatggtcacggattgatag

SEQ ID NO: 43688 - DNA, 452 bp, Glycine max
  unsure (1)..(452): unsure at all n locations
aaaagcaatgggcaatggttatagaaagattgtgaanaaaaattgtttggaagaatattatacatatatattaacatgtgccaaagtcatgcttttatagactcttcatgtctagtcaaagaaaccattggaagagttgtgactttagagaaaaccatgttaagagttataactcttaactttttcttcaaaattgttcactggtagtcgattaccacaaaggcgtaatcgattacacaatgagttttatgaaaaattgtgactcttcacaattgggattgaattccaacgttcagattcacttgtaatcaattactaatattgtgtaatcgattacactatntgaaaatcattttggaacgttgcaacccatctgaaaaccatttgaaaaccaaactggtaactggtaatccattactgataactagtaatcgattactagagagtaatca

SEQ ID NO: 43689 - DNA, 411 bp, Glycine max
  unsure (1)..(411): unsure at all n locations
agctntgaattcattctatgcacccttagggatccattcttgctntgtatgtcttcatcttcattcttctaccgccactattctttttctttgttttaagagagtttcaactgatcttttaagccgtaatctcacttaatcaatgttaaaatgaatttcaacttatagtttgcattgtaatcacctaaaataaaattcaaccgatcgtttatgctataacctcagttaatgatcaaaaaggtaagtttcaactggtcatttactttgaaagttcgcttttaacgagttgagaaataaccaagtgaaaccaaagctaatatcaactcacaaatcaagctttgtccacaagaaaataagttgaatccgttcanaggtccaacgctntaacaatctcccttttttactnntatc

SEQ ID NO: 43690 - DNA, 461 bp, Glycine max
  unsure (1)..(461): unsure at all n locations
catacctttcaagaatttagagtagagtgacatctactgcaaagcttctccaaagggcatgcttatttccagtttcctgaaaatatctaaaaatctcaccagatgacgatctttttccttcttggaaggtaccatangatatggtacttccataccttcatccatagctttttcacttctactcttctttgcattcttattattttttttcttctttttcattttggtcattttctattttttttctacttcttttttttcttggtccttcaattctttattcttgaccattatttgttcctctttttcttgattactttcacctcttacctcatttttcatgccatcggtacctttcttgtcagcagtttcttcttatgcacaaattatcctcatgctcagcctccacaaacactttactccttgtcatcacagctttgcattcctccttgggattctat

SEQ ID NO: 43691 - DNA, 307 bp, Glycine max
  unsure (1)..(307): unsure at all n locations
gaagatgatgttccaagaactctggatttggtccgacatgccctcctgatttccagctgggaaatttgggggtggaggaacgtcccggcatttacacaacaagcataatgtaaacctttacggttttaaaagctctatagttgggcctaggctttagaagtttcattctgntaaggctttgtgtcttttgtctttgaatttataatacaaagatctttcttcatctgttcctggtctctacccattctcattcatttgcatgtctacttcttttttctaaacggcagatccgatgacgagttccccg

SEQ ID NO: 43692 - DNA, 472 bp, Glycine max
  unsure (1)..(472): unsure at all n locations
cttaagacttcacagccttatcctcactctgatngaccataaatcntatgatccttttacacgctatcaaagttgtcccaccaattgcaatttaaattgacttgacttggaactcattttttctgcagacatgatttattttatttttctacttcatatctttgtttaaattacacatagaaatgaaataacattacacatgcatgtattgtcttgaaaccttcacggcaaatccttctttttaatgcattttttcaactgtcaaggtaaaacactatcttagtgtatggactgagttgctctctgaaatntaatttaaaaatgtaacatcttattaatttaatatccactagtcaagaagtactagacggaaattataagtctcgttcaaagagaattgcataactggtgattattcatgttcttttatgttataaacgatntaaatattgttttagttcatcatacatca

SEQ ID NO: 43693 - DNA, 457 bp, Glycine max
  unsure (1)..(457): unsure at all n locations
gcaagctngatcttnntagtttntatctttaatctttaatccctgaacgaactattcaagtggggggagtcgaactttaattatcttttacttcgcgcctaaagagggagcgccaaatatagataatatactgctcgttaatctgggaaagatataacagatttatgtgtccagtattttcgggcaagatgtcctgcacatcgtatccgacatcgtggatcctgcagcttcaattcttcatttgacattttatcttgccttgtgcattgtgcatcccaatctgattccttgacataacgtaggacatcatgtgcagcaactccagctttccttcattatctaagagcttatgttgtaacaanattttagccaatcttttagaactcagtaaagctaagcactaacattccgtgttcaaatacgagcgtctcgctatcctacgggacaccatcggaca

SEQ ID NO: 43694 - DNA, 232 bp, Glycine max
  unsure (1)..(232): unsure at all n locations
ntgaagtctgtataaagcctgaagatgttcgtgttaaggttgttgaattacaagagaacattctgagataaaacgaacaagtgtttaacactgtcaatccactagacgaaggaaacttgagcaaattgagtgaatcttngctctactaagttaacgaagttctttatattccatattattatgtaaacacactttgagcgaataagaatacaatttctatctaacatatatt

SEQ ID NO: 43695 - DNA, 498 bp, Glycine max
  unsure (1)..(498): unsure at all n locations
gcttataacctgtatgggtaagaatattggtctaggtgagaataatgacctatagagataagaaagataagaatacttagtgcagacttacaaaggtgtaataattcatgtacctgcaagacaatttaacctaaaaaataatctgattaggtgattttttttaactacacatataattttaaatattactagttaaatttatgagtgcttataaatccatctaatataataaaaattgataaactgatcataaactgaaaaccgaataaacgaaaaaaaaaaacaaaccaaaatagaaaaaaaatttaattggattgaattccatatttactttcgaaaaccaattcaattcaactgaattatagatatacatatatatgtttatttataaatntatgatatcgctcatgcttatattnttattncgtatatatttatatataatcacantaattatatctatctacaaanatgtattcaattaagaataacttctag

SEQ ID NO: 43696 - DNA, 442 bp, Glycine max
  unsure (1)..(442): unsure at all n locations
tctcagcttcacatcagaccacttcaggtgctggaactacttccatggacttgatggggcctatgcaagttgaaagccttgaggaaagaggtatgcctatgttgttgtggatgatttctccaaatttacctgcgtcaactttatcagagagaaatcagacacctttgaagtattcaaggagttgagtctaagacttcaaagagaaaaagactgtgtcatcaagagaatcaggagtgaccatggcagagagtntgaaaacagcaagtttactgaattctgcacatctgaaggcatcactcatgagttctctgcagccattacaccacaacaaaatggcatagttgaaaggaaaaacatgactctgcaagaagctgctanggtcatgcttcatgccaaagaacttccctataatctctgggctgaagccatgaacacagcatgc

SEQ ID NO: 43697 - DNA, 384 bp, Glycine max
  unsure (1)..(384): unsure at all n locations
ccaccatctnttcatagtagaatatcggtaatgtgtctactatcattatcattttttctccgccattgaggtgccacttgagctgccaggtctctccacctttgggcgtattctttgaaagatctgtgcccctttatgcacatgttctgtagttgcatcctatccggaaccatatcaaaattgtactgatactgcctaacaaaggcaaccattatgtccttccaagaatggactcgggaaggttccaagttagtgtaccaggttacagctaccctagtaagactttcatggaaggaatgtatcagcaattcctcatcttttgcgtattcccccatcttctgacaatacatctntagatggntcttgtgacaagtagtccccttg

SEQ ID NO: 43698 - DNA, 210 bp, Glycine max
  unsure (1)..(210): unsure at all n locations
ctactaaacggtccatcaatgagcatgtaaatctgacaaaataacaagttaaatagaacaaactgcaaattaacaatntacatcaaataagcatatacaaagtccttaataagagaaaagataagataattgtctaaatccacatgtctcaattaagtatctttggaaattatcaatcgtcacccgactaaaagtactaaactacaccta

SEQ ID NO: 43699 - DNA, 564 bp, Glycine max
  unsure (1)..(564): unsure at all n locations
agatgctccnnattggaccatgaagacctgtgatactcagagacacctgcgggcatgcaagctgtaaaatcaatgtccaatttcaaggtttataaatccaatccctttgtccattggaagaatttgatatattcatacctaaagtctaacccaatagaataagttaacggttttttttttcaccataatcttggtatgaaatatccatcaagatttatcgataactaatttttattagaaaatctaactaattaccttaaattggatctcctctttttaacaatattttttccattctaaaaaaattataattgtgaccttcattagggaaactgattccagttatacttggacacgactagagctatagggttgacctattagttcaaagagaagagaaggaataagaagtatatagttgaattcttcctgctaataaaactaacaaatgataacatatatttgtctaataaaaatactttagtagtgttagtacacaatctctatatatgttaaaatatagataactaatttaggttgcctatgttagtcaaataaacaact

SEQ ID NO: 43700 - DNA, 337 bp, Glycine max
  unsure (1)..(337): unsure at all n locations
gatctgaggatgaagctttgattgatttantcaactagggattgaggttttgtaatttaggctacagcatagaacacaaaagcatgattgattagagaaacatctttatatacatcagctggtctgttagaaagacccaacatctttacctacgactgtcaattttacttggcattttaatatttttagcctagaattagtttaattatgttccaaatcatcaattatcaatgtttctttcaacaatgccttattcatgaatttaaccttgtcttagactagttccctgagttcgatactcgaattcatccattntaattntaaatacttgatgatc

SEQ ID NO: 43701 - DNA, 486 bp, Glycine max
  unsure (1)..(486): unsure at all n locations
gcttgcattggaattgcgaaagcnccactctatcattatgattagtacctgacatctcaaacaaacaaatcaaacgtaacaagacaattatagttgctgtttgaatacctcacccactcaagtgtatcacacaattatggattttcttcaatgaaaacactcttgccttttaccactctaattccccttgagttcttaggcaatgcaagagattatggccacaacaaagaacaattcaccaatatgtgtaaggtaaggctagagagacaaggaaaaggttaaccaagaaaaaggctaacaatatttttaggcacaattgaaggaaataaaattcagaatntaggaattcaagtaacaatccttcatacaaccaatatattaccttanagagaattttttacaaaaaagtcttcangcatgaaccattcagccccatttcttttttgttntngcgaattntnngttttttgtntttatatataacaa

SEQ ID NO: 43702 - DNA, 449 bp, Glycine max
  unsure (1)..(449): unsure at all n locations
agaaagtggaacaatgcaacaaatgcgaaacaattctacaagatgcttgccttaccgnttgcctacccctagtgcttactccaaatgtgtggtgttgaccatcactcaaactgactctttattcatcttccgatttatgagatcctgaatgataaggtgcaaatgcatgcatgtttatgatcggacgttcaatgtaacatttaaacaggtgttatcgtgctcaattttatttaaatgcttacggcaccccgttgattgagccaaatggctccggattcagcgagcaagatcgagaatgtatgttcttaaagacaataataagtaaagagacacaacacaggaggttgagatgcaaatcattaacccacatctattaatgctgtganttatggtttacaaaagaattcaaggcttggagattcaatgagttcttgggaatagtcatatgt

SEQ ID NO: 43703 - DNA, 474 bp, Glycine max
  unsure (1)..(474): unsure at all n locations
agcttcgtccgcanatccctcatgtaagactatgcctaaactaaacagcattattgtaacagcataattaagaccaaaacttaacccgcaaatccctcatgtaagactaagtctcggtcctgcttcaatcaagttctatggctcttttctcgaattaagcactatggctgctctggaatctgtgccaatcatttgcttaccctaattttgcacaaaacaagctttaaatatgctctgaaatcgcgacattgtgcttagtgccaccctcgtgcttagcgcgggtaagtgaaattgggcttagcgccagtctcacgcttagcctagctgaaggcacctgctgcacttagcgcactgatctcgcgcttagcgcgcggccttgatatcgatgccctgccagattcttctgtcgcgcttagcggtggatgcacgcttagcccaactgctgagcatagctcagctatcacttttgatact

SEQ ID NO: 43704 - DNA, 448 bp, Glycine max
tgagcacattcaaacgacgaataactttgactcgaatgtccgattgtgtcccgtatgatatcgagacgctcgtaattgaaaacggaagctctatgaaaatctaacgacaataacttttaactcgggtgtctgatcgagccctgtaatatatcaagacactcgcaatttaaaacagaagttctgagcatattcaaacgacaataacttttgatactgatgtccgattgagtcccgtaagatatcgagacgctcataattgaaaactaaagctctgagcaaattgaaacgacaataacttttgactcgtatgtccgattgtgtcccgaaggatatcgagacgctcgtaattgaaaacggacgctctgaggaaaatctaacgacaataacttttaactctgatgtccgattgagctcctgaatatatcgagacgctcgtaattgataacag

SEQ ID NO: 43705 - DNA, 365 bp, Glycine max
  unsure (1)..(365): unsure at all n locations
tagcttgtctcancgtntatgcgagacggagtatatcatgctatctatcatcgctaagtaccaagaagagttatgtctatccgccgcccacgagcatatgattgcggacgaatatgcccaagtatacacagaanaagaggctagaggaagggtgatcgactctttacaccaagaggcaaccatgtggatggatcggtttgctcttaccttgaacgggagtcaagaactttcccgattgttagccaaggccaaggcgatggcagacacctactccgcccccgaagagattcatgggcttctcggctattgtcaacatatgatagacttactggcccacataattagaaatcgttaggaaacttgta

SEQ ID NO: 43706 - DNA, 390 bp, Glycine max
  unsure (1)..(390): unsure at all n locations
tcctagaaaaccatcatgtgttggcagcctatccccattacaagcctagaaagtcattgggattcattttgtatgttcattgctgtgtgatatgagatgaagtgcaaaggataggattaattttatttgttnatgatggaatgagcctaaacacttaagcttgagtgaaacaatgactctgaggtttttggtgatgatccttccttgaattctgccatcctaactagcttattttagttgtgactctaatacgtgtgttcctatctttgaaaagctgcatgtttgtgaaaagcaatttattgaagctttccatgatattcagttcatatggtagaatttctctatgaagcaaacaccatttttgggtgaccactgtaggttgccacttga

SEQ ID NO: 43707 - DNA, 238 bp, Glycine max
atgttctcatgactggtctaatacatttgctgcccaagtttcatggtcttgctcgtgaagacctcataaacatcttaacgagttccatattgtttgttccaccatgaagcctcctgatgttcaagaagatcatatctctctaaaagttgttcctcattctctggagagagtggcataagattggctatactaccttgctcccaggttcattttcagctgggatgaccttaaaagggtg

SEQ ID NO: 43708 - DNA, 499 bp, Glycine max
  unsure (1)..(499): unsure at all n locations
aaatgatgccnnnatgtgaccattgtgacccctgcagancngagannancagaggganctgccgcgtgcagctaggtcagatncacgtttttctnttctatgcttgaacaatgtacgagtcctatatattactgtctaagggctaggccaccacactcaacaaaggactttctacacctactatacgttgatatgaccaatgttgtaataggaatggtgcgacaatcctttataaacatattgacacatatctccttaagttcggagctactgttgccatatatactttcttctctataaaagctatattcgttaccctttgaaggagacgatccatgtagctgggacacattaacattgggtgtcctatttcgaaaaagaaagataccactattgaagctccctgtttacacttctagatgcatttggtttaaaaatctgattgctaccatactgtttttggagtgcatactgttatgcgcctgcttcactaagcatg

SEQ ID NO: 43709 - DNA, 466 bp, Glycine max
  unsure (1)..(466): unsure at all n locations
tcctcaatatccaacaattcgatttcatttatcatgaaactaccctaaaccaagaaaacagagtagaggcagaanactctgcccaaactcattcaaattccacagctttccttactcatataccccagtaacattatctttgttccaatttgttaaccattggatcgacttgaaaattntactggaggttcctagtacataaatctacattttgaccgttgggatctgctagaaaatgcctggaacctgagatgtactactcttcccatgactagcaatgcacaaccatttttctgcactatgttaaaaaaaactattgcacaattntgatagtatttttctgcataatatggcagatttccgaaatccaacttgcccacatccaattntgctcanattggatcctacaagtcctaaatcatgtataaatcanattcctacaattgtgcttcacgacttcgaaaat

SEQ ID NO: 43710 - DNA, 141 bp, Glycine max
  unsure (1)..(141): unsure at all n locations
agctntgcggatttggtcttctctagtgaaatgatcgatgtgngtccgaacagaggcatatctgatcatcctactaagacgactgacaaaactggggccaataaagagggtgacgataagggagaaacccatgttgtgact

SEQ ID NO: 43711 - DNA, 557 bp, Glycine max
  unsure (1)..(557): unsure at all n locations
cacccctcttctcaccttctgttnttcgtggggaagtactcctttacttcannnnnnnnnnnnaatactatgatacggacttnatntnanctnttctaaatcctctgtggacagcttanttagctcccttctangntanacgaacttatactaagcgttagcccacatacctcttgttggactagaatcagcttaaataacttatgaagcttagactaattagcctaagtatgttcttagatccctcttgttggactagacttagaccaaacaacacttattgtaacagcatacttaataccaaaacttaatccgcagatacatcttgtagaactaagttcaattctgcttcattcaaagtctaaggcaacaatacattttccaatgtaaaatcacctaactaggcacacaaattgcttatcaaaccaagagcatacaaaacttaagcactgaaagaagcattgaacacaagaaacacaatcaattagatatgaaaataattacgttagttgttcagcagaaatcctcaacaaccggtgttagccagccatacagan

SEQ ID NO: 43712 - DNA, 342 bp, Glycine max
cccgagagctatcgttgatcattttcgagggtcgttatatgtgatgcgccttaatctaacatccgtgtgaagagttatgaccatgtgtatctctctagagcttttgttgttcaatttcgagcctctcgacattatttgcgcccgaatcggatattcgcgcgaaaatttatggccatgtgaatttctctagagtttctgatgttctattatgagcgtatctatatattataagccagaatcggacatccgcgtgaaaacgtatgaccatttgaacttctccagagctctccgtgatcaatttcgagcctctcgacatatcattccgcccgaatcgcacattcg

SEQ ID NO: 43713 - DNA, 465 bp, Glycine max
tatgtctggtcgagtacagatctgagcatacattatactcctagcaactaatgcatacaaaattgcttccatttgttttcattccaattatttctaggacattgtgtgagactaaatttgtctcatttctgaattggaacgagtaatgctgagcacttttccatcctaaatctttctagtactttattgatatatgttttttgagataagcctaacaattcttgtgatctatttcagaatatttctatccctatcacatagcttccctcacccttatccttcatttcaaagttactagaaagaaacttagtctcatgaagaagaccaagatcattagttgcaaggaatgtatcatcaacatataggattacaaaaataaccttactcccactgaacttcagatatatacaccgatcaacaatatttttcttaaatccaaaggaaacaatggtatcattaaactta

SEQ ID NO: 43714 - DNA, 305 bp, Glycine max
gtctcgaaaacttgataggacctaaagagagttgcttctttggactgatattcgtttgcaactcgtccctatactagttgtaagtcgctataacacctgagcattcttgctcccacttcctttgtcacttttacgcctgctatgactgcttcatattcagccaggttatttgatgctttaaaatcctagggcctgctccgacgaaccttattgggtccttctaggatgatgcctgcctctcttgctttcatattggatgcactatttacattagagcccactagtcaagggtggcttggacatta

SEQ ID NO: 43715 - DNA, 391 bp, Glycine max
gctagagtgcaaaagctcacctcattttctatgttcacttgtctcacaatattctcgtgaaagcacccaaggtctttttcaaaaatctcacaacaactcataagatcacaccattatagggacccttgtttgttcataacacactctcacaagaccctccaagttactaataccaaatctttccatgaacatatctctccgaagacacttttcaccactcaaaagcctcctaagtaattgtcctataagagcctcattgaaaagctctaagatttttattccaagtccacccttctcaattggataacatacaacattccagatcacccataacacattttatttctcacccttagcccctgtcaaaaatttctttgattataattaaaat

SEQ ID NO: 43716 - DNA, 441 bp, Glycine max
  unsure (1)..(441): unsure at all n locations
tctcgtctntctcaccttatctagaggccctcgccctcgaatccaactttcttttcttgttccctatcaaatgaagtaaaccaagtttggaaattttaaatgtctccttgttccctaaatcattgagattttcaattatagtttagtttatgtttttttttcaaacaaaggatttggtatcaagcattttaagaaattgcactacaatcaactacgctggacacatcaaaccctactgtcgtagctacgtatcatatatttatctccatgataataggtgtttcanaaactattaaaaatttaaactgtttgatgatggagtgggtagggtacaaagttaatntaccatctatgctnggactctaagtcaatntaagtagaaaatacttattctgcatctatgcttggactcttagttcanaatacttaggcatgatattc

SEQ ID NO: 43717 - DNA, 84 bp, Glycine max
gcgaaaaggcatactgttcctgtggaatgtatccgtccatcccccaacatacgacggaccttaggtggaacctggggcctaatg

SEQ ID NO: 43718 - DNA, 365 bp, Glycine max
  unsure (1)..(365): unsure at all n locations
gatgaaccaggtntcacacttgcgcaatctttccctgaactccttctccgttgcaacaacatccttctacctcttcaccgccacactcgcccccatctccatcgtcgccttataagtcgttccaaaggtgcctttccaccaaacttcaactgatgccctcaacaactcatccaaactaaatactctactcacattcccaataaacaccaaactcttattatctccaccaccaccactgctactctgaacctcactcttctccactgaacctgaattcccgccactctcattactcttctcacgagacactacttcaccttccacgacacacttctcaggtggcaagattcattctcatcttcttg

SEQ ID NO: 43719 - DNA, 447 bp, Glycine max
  unsure (1)..(447): unsure at all n locations
acaacattttaacagcacaagctatcacatccaagcaaaacagagcagaggcagaaaactctgccaagacaccaaccaaatcacagcttttctcacttaaagaccccagtaacaattccttcgttccggttcattaaccgttggatcgactcgaaaattctactggaagtctttagtacataagcctacattatgaccgttgggatctactagaaaacatccagaactcattctgtactactcttcccacagccaaccacacacaagcatttttctgcacaagccaaaatcctgctgcacccattttgacagcaaaattctgcataagtgcagatttcgaaaatcacacttcctctcatccaatcttgcccaaatcaattcctacaagntccanatcatgtatcaatcatgtctaacccaaagtcaagcttcacaacacaacaacac

SEQ ID NO: 43720 - DNA, 377 bp, Glycine max
  unsure (1)..(377): unsure at all n locations
ntgagccanaatcctgactcaccatataccttgacccagtgtgagaatgccaatccttaccctcggaagcaaaaaaaagaagagaaggaaaatttccaatcaaaggaaaaaggagaaggaaaatttccaatcaaaggaaaggaaattcccaatcaaagagtgggagaaagcaaaaagaaaagaaagaaaattcccaatcaaagaatgggagaaagaaaaaaagagaagtnaaaaagaagaaagctcctggtcaaagaaaccagaagaaatgtgccgagaggtccttggactagacgatatctgaacaatacagaattgtcaccaaatgaacaaaagaaagaaaaggaaaccatgacctaaaagtggtcttctccctt

SEQ ID NO: 43721 - DNA, 267 bp, Glycine max
gcttgtacgcacatcgttcgcgtgtatgatatccactccacaagggtttgaagtagaggagagcttcaaccctataacgcaacgtggcggacaatagtgggcagtaaacttgaatgatcgtcattgtcaatgcggaaagtattctgcgcttcactatccatgttcacatattattgcagcttgtggttacgtgagcatgaactactaccaatatatagatgttgtttatacaaacgagcacatcttaaagcttactcccacaatggt

SEQ ID NO: 43722 - DNA, 435 bp, Glycine max
  unsure (1)..(435): unsure at all n locations
cttgaatctcagctgtggagtcatacacattctccaccctgtgatagtccgtgtagggatgagttcattcttctcattatggatcattgtcataccgcctttctgggcatcacttggactagactcacccaagcactgtcagagatcggatagataagtcttgcttcaagcaacttgaggacttctttttggacttcctccttcatggatgggttaagtctcctttgtgattgtttccccagtctataatcagctttcatcatgattntatgcatgcagtaggatgggctaatccccttaagatcgaagatatgccatcctattgctaccttatacttcttgagtacctccactaactgtgcttccttagctgaagacaagtcattactgatgactactggcttggcatcatttgcctcaagaaaaacatacttc

SEQ ID NO: 43723 - DNA, 504 bp, Glycine max
  unsure (1)..(504): unsure at all n locations
agcttgcgatgaggaagtgttgaagggtgaatcttcctgcttttattgttgaccacagagtggtacctggagatatgtcgcgggggtcaggagaccttgnggacgtcaggtggggtgctattgcccaaaaccaagcttgaccaatcccgacccaacccgggcatagtcggtcagtgagaacctgtgatgtacctaagcaggcgagctcctggcagtcaacagataaaaggaacaaagaccacaaagcaaggaggcttgtggtggctggccaagctgtgaatttgtgtaatatgtggtttgtggcctctggtaatcgattaccaagggtgggtaattgattacaaggcttanaattgaagacagaaggctaagatggtctctggtaatcgattaccaaggggtgtaatcgattaccaggcttgaaaatgaagtcaggaaacttanggagcctctggtaatcgattaccagcctgtgtaattgattacacagaggaatgggtcact

SEQ ID NO: 43724 - DNA, 490 bp, Glycine max
  unsure (1)..(490): unsure at all n locations
tactcagctttgaagtgttaacacgactaattccctattggatggttacttgttggtgggcttcatataagtcaggttggaaaacaatattcaaactaacaacaattgtcaacttcgattcccaataaataagggactactccaatctagagaaagtcctaccttgaacttgaagcaaccaactgaactaaacaaacattcttcaactttggattttgaagcttctgggctttcctcttcctggtttctttctagggaaaaaataggagtaattaaagaaaaaatggcatgttgaaaagggtattgctatttgctgccgttcacagaaataaaatcttatgataagaatggatgatgacgtgaactacgtacaaagtgctaaagtctgatggctnttaatttgtgtaagaagctaanaatgctaaatatagacccaaattccaatataattctattaaatatttccgaattatatattanacatcaatat

SEQ ID NO: 43725 - DNA, 112 bp, Glycine max
attcaatttcgagcgttccgatatattacgggactcaatctaacatccgagttaaaagttattgtcgtttgagcatattcaaaccactattactttattctcagatgttcga

SEQ ID NO: 43726 - DNA, 463 bp, Glycine max
actggatgcattggttaacttggtaacccatctggccttgaaccagaaatctgtacctgttgcaagggtctgtggtttgtgctcctctgctgaccaccatacagacctttgcccttccatgcagcaacctggagcaattgagcagcccgaatcttatgctgctaatatttacaatagacctcctcaacctcagcagcaaaatcaaccacagcagaacaattatgacctctccagcaacagatacaaccctagatggaggaatcaccctaatctcagagggtctagccctcagcaacaacaacaacagcctgctccttccttccaaaatgctgctggcccaagcagaccatacattcctccaccaatccaacaacagcaacagccccagaaacagccaacagttgaggctcctccacaaccttccctcaaagaacttgtgaggcaaattactatgcagaacatg

SEQ ID NO: 43727 - DNA, 328 bp, Glycine max
  unsure (1)..(328): unsure at all n locations
agcttgcatgcattcctgtattcagatgtgactcagcggatcttttattggttcttgcgaacccttacgaacgtcccatcaactctaaacatcttcctcacccatccgaggtaaaactgaatcttcttatatgtgaanactctactctaagtgtttcatcatctcctactctatctaaggattgtatatcatgacatcatgtataaaataatcgtgaacattataaccctcctggtacgattcatagacatgcatatagctaatgaatgtcattcaagtaacaattgcataggtggcgtccaactagtctaccttctgatctaatctc

SEQ ID NO: 43728 - DNA, 455 bp, Glycine max
  unsure (1)..(455): unsure at all n locations
gcttaaccttgagctaatatatagttntttgtatgggtatgatatacaatgagtaatggtaaatctagagagggaacgacatgaaacataccatgacttagcagataagtaagaactctcgactccacaaacaagtttcctatgttcgtagcactatcaatgtatcagagagtgagaaaacaagtaaattaaggaattaattacacaatgaaatgctgcagtaaaactaaaacttcattgttgtgttttaaaaactgaggcagacaagagtactacgtaacgagaactacactggttcattggaattaaaactaaagaaccccagtcgtagaagaatgaacggaagatgcctcacaactacaaggttactgaaactacattggtacattggtattaacacttaaggaacccgagataaaagaagataaatggtgctaaccacgtagttgtggact

SEQ ID NO: 43729 - DNA, 374 bp, Glycine max
  unsure (1)..(374): unsure at all n locations
gatgctgntaacaaaccctgaaagatttaagattgtcttattattttgtcttgcaattntaattttatttcgtgtgggtgagtgaaaaatatggctcagctattgagaattntgttggttatcattatctcggttgtttcttcattaaagcacttactagcatctttgtttttccttaatcttcttacggcagtgatttcagtccttttgaatcttcttactacatntttccattaatctcttacttattctgtatggtcgatattagatgctntttatgttattaagccattatatgtaaagtagatttcaagaggggtataatattacttttcntcaactgccttttgtaaatggatcaactcaacctaaac

SEQ ID NO: 43730 - DNA, 485 bp, Glycine max
  unsure (1)..(485): unsure at all n locations
agcttcaaggagaaggaaattcttaatgagatattgacgaanatgtggaaaagcaaaagcttgttgaaaaggaagaaactgaacaccattccaagaagacttgtgaatcacgaaagccacctgaaaaggctatggtggatgattcccctaacaaggaagggaatgaagaaagcaaaggtttgggcccatctgaaggagagaagagaagggaaataaatggtaaaattggcaataatgttggaaaaaagagtgataagaaggccattcctgaatcaacaacaagggcaagaattaaggaagtggctgcttctgcttctcaagctataactagtctagccaagaaattcaatgaagaagataaacaaaggatagtatacatgggtgcagcagttcttgtggtggcacttggagtttatggtacctacaagcttcgttcacgtagaaccataggcaataatggcatcacatctatttcctttcacatg

SEQ ID NO: 43731 - DNA, 366 bp, Glycine max
  unsure (1)..(366): unsure at all n locations
actcttggaatggaaagcattaaaaactgtctattgcacgggttggcatcaattgatattgattggattttcttttatttaatagggcttcatggatcactttctataacctcaaaagtgctcttacatgcctggcattacaatccagtgaatacagtttattatagctgttatctctttgagttgatcagaatcaagcttgtctaanaattgtttgatgcctatcttgtcctattattntattctgtgtcttttgccatctacattattgatgactgtgatgttgagtcatctaaggttctcttaacttgaagattatatattntcagctttctatgctagttgcttaactgcaaatgtagtgga

SEQ ID NO: 43732 - DNA, 564 bp, Glycine max
  unsure (1)..(564): unsure at all n locations
tgatgggannntttgtcccattgataccatggcgcaccgagaancctanaangaaccggaggcttccaacctttaacccaaattcttacttaccattattcttgaccccgggtgaaaatggccattggtacccttcgaagccaaaaaaaaaagaagagaagggaaatttcccatccaagggaaaaggagaagggaaatttcccatccaaaggaaaaggagaagggaaatttcccatccaaggaaaaaaaaagagaaaggaaatttcccatccaagaatgggagaaagccaaaagaaaagaaaggaaattccccatccaagaatgggagaaagaaaaaaaaagaagaagaagaaagggaagaaagttccccatccaagaaaacaaaagaaatattccgaaagggctttggacccgaccatatcttaaccataccgaattgtccccaatgaaccatagaaaggaaggaaaccccacctanatggctttccctttattgccaacaaatctgtcgctagcacttttcgcccgcctaaccaaacgagaagataaccaccaaatatcaag

SEQ ID NO: 43733 - DNA, 603 bp, Glycine max
  unsure (1)..(603): unsure at all n locations
ctctcccgtccnntctcctccttttttgttttttctccaggctgtatagtacatanttnnnttatannnnnnnnnnnnnnnnaatgagacctagcaanacngaaccnnnannnnnnncttgagactgtgtaattaattgcattgaatagatatgcaccattntatcttaaccaaacaatgttcccctctaaggggcataaattaaaaacggccttctaccgtgggtaaaagacacattccatatccggtatttacccgcgttgtagaaaccttctagaaaagcctccctttctatgattggttcataaaaaaacctgcttataattatcttaaaaatgataccctttctaangaaagctttttaagaatgtactgtgtttttaaaatatgtatatatatatattgaggattctaagataggtttcttgaccaaaatcgtcttatagtgtagacattctaagacgatttttcagagaatcatnctagaatgtattttataaaaataccatattttgaggatgttacatgattttccccaaaccatcttagaatgtagattctaatatgggttttcagagaacattcttatgagtgtgttatttn

SEQ ID NO: 43734 - DNA, 412 bp, Glycine max
  unsure (1)..(412): unsure at all n locations
tgaagctntagtcatgatgtagcttcccttatctctaacggttctcggctagttttaccccaatatacgggagttcattagaaacctctgagatagatagatagatatatatagagagagagagagtttccttgtattatgtttttcggtagtaataacatacacaacgtgtgctactctcttcttcttgtttgacaagcttcttccttattctgaacttatcttctcagtcttaatcacaacaaatatcatgaatgacaaatttgaacctatttaaaaatataaaggaccaatatgaacttactttaattcatagaagagcaatgcgaattaatttttaaaacataaacttcattttataccacattatcacttttcattccaccctctagcagacataatgactatatga

SEQ ID NO: 43735 - DNA, 287 bp, Glycine max
actatacacactccctcgataccacaattaaagcatccttttaagagaccgcaattaaagtgggctaaaagtgatcacaattaaggcagccttcgaacacttatttggaaggggagggggggtttcaaatatactaaccgatgttgtcaaaacttgatacaagtagattacataagctttcatagactcatatcataaaatcgtaaggatctaccaattataaaagtaatattaataaacctattagtgtcacattagcataacataatactcttgacatatttatt

SEQ ID NO: 43736 - DNA, 474 bp, Glycine max
tgttaggctatactcgataaatatgtctggctctactcttttgccaacttgtctcgcttaacctgtggtacatttgtaaacacaaacaaccgaaaacttttagattttttaattgtggcttaaagccataccaagcctcaaaaggagtcttcccatcaactgcttttgtgggaagtctgctcaacaaaaatacaacagtattggttgcctcggcccaatattctttgggaaattccttctcatgaagcagatatctagccctccattatggttctatttttccgctcactgaccccattttgctttggagtgtatggtgttgtaagttgatgctcaattccaacctcctcacagaatttatcaaattcatttaaggtgtattccttgtcgttatatgacctcaaaactcgaattctaaagccactttgattctcaatccagttcttgaatttgaagaacacacctgcaaccgct

SEQ ID NO: 43737 - DNA, 452 bp, Glycine max
agtcacctgcggcatcgcagcttgtacgcacatcgttcgcgtgtatgatatccactccacaaggtttgaagtagaggagagcttcaaccctataacgcaacgtggcggacaaaagtgggcagtaaacttgaatgatcgtcattgtcaatgcggaaggtattctgcgcttcactatccatgttcacatattattgcagcttgtggttacgtgagcatgaactactaccaatatatagatgttgtttatacaaacgagcacatcttataagcttactccgcacaatggtggcctcttgagaatgaagcggctattcctccttctgatgacgcatggacacttatccctgacccaaccacaattcgtgcgaaaggtcggccaaaatcaacaaggataagaaatgagatggattgtgtcgaaccatctgagcaccgaacaaaatgcagtatatgtg

SEQ ID NO: 43738 - DNA, 396 bp, Glycine max
  unsure (1)..(396): unsure at all n locations
tgcgccacttgaaaagcctctnttgaatggtgactctaatgttatcaacaattatgttcccattaaggctagaggaaatgaaaattaacctggtattcaaatgttggatttttcagcattcttactttctcatggatgattcctttaataactctagggaatgagaagactttagagcatgaggatctcccacatcttgctactgatgacagtgtggatgggaatttgccaacttttacaaacaaacttgagtcagagtgtggtaatgtgataacaaccctactctagtttcataacaaccctacganaatatgatgtnactgctcacatgaacaacactacactagtgtgataacaacccttgctacactatgcaaacaaccctgcttcaatgta

SEQ ID NO: 43739 - DNA, 561 bp, Glycine max
  unsure (1)..(561): unsure at all n locations
tgcatgatgagcnnnttttgtnacccatcgtaaganncctgagatcccctgcgagnanccngngatgctntanagtcgacctgcgagcgtgcaagcaccatggatttgacattgcgcctgacagtctatatatgaagatctgttgtaagttaataagatcttgatactattaaggataatcggcgaatgaaactcaaatacctgaatatcctcccgtgtcatattcttctgagcaggggggacatgcttccaagtgtcgtatgtcacgtcgaccttatctctagcgacaataccgaaatatgatattagcttcttgttgtacggaccgtcggccgtggaggtatcatgagcgacattgaacacatgtatttctgccacatgtggtatattggccaaagatcgcatccgcgttccttgaatgtcctttgaacgagaggagaacatggttttgccgatgggaggatacgggatgtgaacgaagtggagatcatgttcttcaacgaacgtgacttcgaatgtacaaaaacctgctgatatgaaatgatgcccactgaatataag

SEQ ID NO: 43740 - DNA, 397 bp, Glycine max
  unsure (1)..(397): unsure at all n locations
agaaagtggcatcatgcaacaaacgtggaacaatactacaagatgcttgcattacctttcacctgcccctatgcttacctaaattggtgtgatgttgaccatcactcaaaatgactctttattcatctttcaatttgcaagatctggatgataagatgcaaatgcatgcatgtttatgattgaacgataaatgtaataattaaacaggcgttatcgtgttcaattttacttaaacgcttacgacaccccattgatcgagccgaatggctccggattcagtaggcaagatcgagggtgcatgttcttaaagacaataaaatgtaaaagacacaacacangaggttgagatgcatatcgttaacccacatttattaatgctgcgattatggtttacaaa

SEQ ID NO: 43741 - DNA, 323 bp, Glycine max
  unsure (1)..(323): unsure at all n locations
gtgtgagggtatggtgggtcgaccagtggaagctacgtaatggaggatacacttatggaatggtcagtgtgcaaagtgggagggtatgaagaanagaatgcagacggacgtagtgagggtatggcgcacagtaatgaggagtcacaaattataaagaaaagtctattatatagttcanaattaaagacgcgttttacactaaccccgttgttgtctctagcatgcttcaaagacagtgtcagccaaatacgtctttgttttttttattgcattgataaataatgagtacatcgctttggcttttaagcctgtcagatcttaac

SEQ ID NO: 43742 - DNA, 375 bp, Glycine max
  unsure (1)..(375): unsure at all n locations
tggagtccatgccgtcacgtttggactctttgagtgacatgttacaagctgtgaatcccggtgatcatgcagtaagttaactgtactgcttggctttcttgaatcctccgtgctactaagtaaaataattaaatgtttggtttttatgctttgtaggctgtaaaagacgaagttattattgatcttgttgaccgctgtcgcacaaaccagaaaaaattgatgcagatgctaacaactactgggttagttccactcagctattccatctggcacacacccaaatgtacttgtgtgttaccttgtgaaggctatccactgatatgtggaatgatcttattgtcttggttntgtcagatggatgacgagcttcttgga

SEQ ID NO: 43743 - DNA, 357 bp, Glycine max
  unsure (1)..(357): unsure at all n locations
gcttctggtgactgggaagcacgttattctgttcatagcctagtatgtgtatatgtgnatatctgtattatattcgtagttctggctgttggttgtatttctggtttctgcagaacaaagaacaagaagttgagatgggagtcgtcatcacagaaagggcgagatggacgaaatcatcgtcctatctttgctttcctcttatctccgatgagaggtaagttaagaggggcaactgtcatacnctaacttcgaccggngattattacttgatgacatgcgataaatgaagtcccaagacgtctcatatatcgacaggaagcgggcttgcgcgttccgtgaaatttcataatgtggcgg

SEQ ID NO: 43744 - DNA, 430 bp, Glycine max
  unsure (1)..(430): unsure at all n locations
ctacttcacatggatttgatggggcctatgcanngtgaaagccttggaggaaagaggtatgctatgttgttgtggatgatttctccagatntacctgggtcaactttatcagagagaaatcagaaacctttgaagtattcaaagagttaagtctaagacttcaaagagaaaaagactgtgtcatcaagagaatcaggagtgaccatggcagagagtttgaaaacagcaggttcactgaattctgcacatctgaaggcatcactcatgagttctctgcagccattacaccacaacagaatggcacagttgaaaggaaaaacaggactttgcaagaggctgctanggtcatgcttcatgccaaagaacttcccttatatctctgggctgaagccatgaacacagcatgctacatccacaacagagtcacact

SEQ ID NO: 43745 - DNA, 473 bp, Glycine max
  unsure (1)..(473): unsure at all n locations
gcttctttggagccatttcttgcgacgacatattcgcaaatttagtttgcatgaaagaccaaccatcatttcatttatctcaaacacaacagaagccaaacaaatttgaatggtgcatactttttttcaccaaatgcaagtgtcattgtgcaattagaaaacaatcatacatcggtgcatatattatnttatgatatatatatatattgaaaataattttagctacctagatgcaacgtgcccatcatggtgtaacaagttcaaatattagtctaaatccaaacaatcatgctcccatattcatgcaattcatacatttttgcatccaagaaaaaacttagatttctatgcctaactcatgcttttggaatntaatctaacaacctaagttgtccacaccttccacatcacaaccatacatgcacaaactcactccacagttcaattttcacaataacacatgcaatggtcat

SEQ ID NO: 43746 - DNA, 480 bp, Glycine max
  unsure (1)..(480): unsure at all n locations
gctgaagaagagcttgaagatgttttgtcttttgcatgcccaactcttttgagtggcatttgtattggttgttatattgaatattgctcttactccatataatatcttttgtacatcatgcatcatcatgagtaagtgagaagaaagtttctatggttggaaaacttcttcagaaggcaaaactctctattttaatcaattacaaccttatcgtaatcgattacacaagttgttttaagcttatagagttatgtctcgtatcagtttaatcgattatacgcttatcataatcgattacatagctgtntttgagacaatgactaatttattcaagagtctctgcttcaaaagtaaacaagaacactctaatcaattactntgagtatcaaatcgattacattgttctggagctctttccaggtgtttggaagaacactttaatcgattaanaagataatctaattggatacttcattgaat

SEQ ID NO: 43747 - DNA, 492 bp, Glycine max
  unsure (1)..(492): unsure at all n locations
ctgcagctatgcgctatttcttacaacgttctttgccaataattctattaaccgaaaaaatgccccatatacaatcaggcagcttcgttacctagattattacacgtacttccaggtgtatttgttacttacatcacacacatttccttggctaaattcacatacatgcatactcaaagcattttggggtaccaaaaattgcacatgtgcacatcttggtatttctaatacctatacatacacaaacttcatgatgaatcttgactatctacacaataaggtgctacatttcatgctcttnttcaagttttgctacctaaagccgcatgcaaattcaagtatatcttcctttgctgactaaaatngtattcaaattaaaaggcacacattttttggtaatgtatcttctctacataacatgcaacatanttatgtatattcttatgtgagacattctgactaccaaaaattatatgtacatacatccaagta

SEQ ID NO: 43748 - DNA, 306 bp, Glycine max
tggaagtatgacttgaaatgttagtctgtttggtagattgattgtgatagaatgcattaatctatcccggtgagagtgtgatccttaaattttgagagaaatgactatcatttaatactgatttttgcgtgaatctctgaagtatggaatagatgcatgatattgacgatgatgaaggccatgtttgattgtgatagtcacttaaccaaaaagctaatcatgtgcttgaatgaattatcccttgtacccaatttgaattgaatgaattattgattgattgaaccctgagcccatacagtgttatct

SEQ ID NO: 43749 - DNA, 441 bp, Glycine max
  unsure (1)..(441): unsure at all n locations
gtatgatntcgcttgctcttgcaccacagctatttggtatntgtatgttttgatacacatcaaaactccaatttttgtacaaaattttggcataaattaggaaggacacttgtgttgtgtttcccaaggcagctaatccaaatcaggttagtcttaacatatgtttgtcacaataacttatcaccaatggtaagtagcatgatcaagtcaatggccatgatttattatgttaagtgcactgttgaaatggatttagctaggagagacctttaactcaatgggatgatgtctcattattaaccaaacaccatgccaattagcttcatttgattttgttgatataataatactangatatcaagatcaacccgttntaacccttcaatctcatagcataattatagtangttattattgtgtgttatccaatcaagtacttct

SEQ ID NO: 43750 - DNA, 468 bp, Glycine max
  unsure (1)..(468): unsure at all n locations
tcagaccanagcaactcanaatctaggtatctaaaaccccttttttagtggattntcaaggtttgagggtgaaaatgagaatggggtatacttggagcaaactctcatctcacacaagtctataacattaatctaaactcgctcaaactggtttttacgatgaaaactctatcgaatcaaaatttgactcctcaacacccaatttaccctagaaatggctcttngccctcacttggtcattcattttcctcctttgtacagcccaagctttcccacaatcctaaatgacatttcaaactaggattaactcactctaacctccaattaccactaaatccagaattggctnttcaaatcctcaaagcatcacacctttccactcatatcactacattctcactttgtaaccctaggttaactctacccttcatctctatncagtttccatcatccatgtcaacacacaag

SEQ ID NO: 43751 - DNA, 388 bp, Glycine max
  unsure (1)..(388): unsure at all n locations
atgacgaagtgtataatggtgagacttcctgcttntattcgttgaccacagagtggtacctggagatatgtcgcggcggtcaagagaccttgtggacgtcaagtggggtgctattgcccataaccaagcttgaccaataccgacccaacccgggcatagtcagtcactgagaacctgtgatgtacctaagcaagcgagcttctggcagtcaacagataataggaacaaataccacaaagcaaggaggcttgtatggtggctggccagctgtgaaactcgatagatatatgtgatatggcctctggtaatctattaccaacggtgggtaatctattacaacgcttaacatgatgacaggagactaagatggtctctggtaatcgattac

SEQ ID NO: 43752 - DNA, 382 bp, Glycine max
tactcctcatgcttctcaccatgtctaattaagttctatttcttcgttctgccacactattatgatctggagaactagcatagtgtattggacaacaatcccatgttcttgaagaaatttcgcacatgaacctggtgcttgtccatcctctgtgtatctaccataatactccccacctctatctgatctcacgatcttaatttgttttccacattgtttctcaacttcagccttataaactttaaaggcatctaaagcttcattcttagaatgaagtaagtcaagatacatatatcgtgaataatcatctataaaggttatgaagtatttcggacaatatgcattcatgtctggacaacatatgtctgcatgtatgatatct

SEQ ID NO: 43753 - DNA, 466 bp, Glycine max
  unsure (1)..(466): unsure at all n locations
agcttcacacaatggttcatcacttttctgatggaagctcaatatanttgtcttagcctggtttcttttttcctcttggaagaaacagtctaaaaacttgtttccaatgtcactccaagtgataaggctctgagatggatgagtattgagtcacttcaaggcattatctcctatgacggaaaaatggaaaaccatcatatagagattctcctcttcagtttgggtcacccctgttgtaccacattgatcataaaatgtggccagatggttgtatgggtcttcattacctaagctaggaaatgcatgttgggcaaggaaagtgattangcctaactttagcctttgttgtgtggttgttgctccttggtctagcaatgttgaagtatactcgtgaaccattatcagtgtcatggtccgcaagagttctcctaacaagtgatgcttcttctacttcctcatatgtact

SEQ ID NO: 43754 - DNA, 605 bp, Glycine max
  unsure (1)..(605): unsure at all n locations
tcccactctcctctactctctctttttattttcttccttatgtcttatatatgttaanctntnnttnntnnnnnnnnnnnnnnntgatctgaagcgtctggatnacccacacatnnnaaannnagcctttaccatatnccaacaattcacattcctcttgtcatgaaaccaccctatatccagaaaaatagagtggatgccgaaaactctacacaaactcatttcaattccacaggttttcctactcacatacctcagtaacaggctctttgtttcgaatcgtcaaccattggatcgccttgaaaaattaactgagaggtcctaatatataaatctaagatttgacccgttggaactgcttgaaaatatataaaacaccagatgtactacctttcccgtgactagtgttgcacaacccattttctgcataattggtaaaatctgttgccaacttgacagcttttgctgcataatttggcagaattcgaattctagcttgctcgtatccaaattcactcacattggattctacaaagtcctaaccatgtctaaatcatgttaaaccaaaaacaaacttcaaccacgtatatcaaatatatgtatcn

SEQ ID NO: 43755 - DNA, 287 bp, Glycine max
tgcttttattcgtggaccacagagtggtacctggagatatgtcgcgggggtcaagagaccttggggacgtcatgtggggtgctattgcccaaaaccaagcttgaccaatcccgacccaacccgggcatagtcaatcagtgagaacctgtgatgtacctaagcaggcgagcttctggcagtcaacagataaaaggaacaaagaccacaaagcaaggaggcttgtgtggtggctggccacctgtgaactatgattgatatatgggatatggcctctggtaatcgattac

SEQ ID NO: 43756 - DNA, 578 bp, Glycine max
  unsure (1)..(578): unsure at all n locations
cgcgcaccattgannccccatgatgtcatgctagccctgagatactcngaaggcacctgcanggcagccagctatcccttcttgaggaagttcatcatcgtgattgacttcttctggaagagcttcatatgtgtaccttatcattttcttcagaatcttggccatgaatatgcatgagacctgaagaatgttctccatcgtctatcatattctttcttgtaaagatatcattttattcgtcccccgtcacatgaccgcntgccacactactgatcangcctatggcctatatcctatatgctcagcgctctgatgaatatgcaataaccatgccatactcagaacttgccgagaaggatcctatattatcattaccctcattgaccacgaatctctttcgatctagtacatgtagatgtgctacgttgggatatctacccttatataacccttatgtgcggttcattatgatgggatgtattaatgcgctgtcatcatataacatgcagtgctggccgctccaccgcaaagatcttggtagataatatttctaatatagtctagaactcttctctgcg

SEQ ID NO: 43757 - DNA, 371 bp, Glycine max
  unsure (1)..(371): unsure at all n locations
ttgaatgggctcaatcataattcataaatacaaaaaagcaagatgctatattaacctctaccatagagtcaccagatctttcaacatacatagaacctgatagtttcagaaaaaaaaagaaattcagatcaacatttaggatgttgcttacgctctagttttttaacatttggtaaaagaattgtatctgggctgagcggtggattatgaacactatttactaattttgggtgtattgatagtttaactaataatttaacaattacccagagaactccttctaactatctaagcccactcattcatcgtatttgaccactgatnactttttcatcttattttaaataaatgtcataaaaattaaggaattg

SEQ ID NO: 43758 - DNA, 445 bp, Glycine max
  unsure (1)..(445): unsure at all n locations
agcttatgagaattattcacaattaaagaatgaggaatgccaatatcaattgcaccattattgtaattaccaactggaccatcacccaaagaaagaattcaatatgaatatattatcttttcactttcatccacatcatttaaaccacttttcaaacgcatgttttgagttaatttcaaagttttacaacatttttcataattgagaagagttaatggtggccaaaataatttcaactttacttgcattangcacaacaaacaaaatttgtttgaaatcaccattgagaatgacaactttttcaccaaaagttttatgcaaactattgtcaatagtaaaacacataatatctcttaatgttctatcaagagcttcaaatgcanatctactaaccatagctgcttcattccatatgatcaaaggtagtgtggttcaacaattctac

SEQ ID NO: 43759 - DNA, 344 bp, Glycine max
  unsure (1)..(344): unsure at all n locations
aacgattggtcacgatatatgtcanggtttggccagcggttcgggataaaggggatgtcccacattatttccatgatatacatgccacaatgatgataaggaaattttatgccaaactggtcatgctggcatctacgtggacgctcaagtgtcaaatttttatggtcatgtgatgctagggctcaagattcatttcctctanttttagtcaacccagcgtttccaaaaatatgttcttttatcaatttgtgcattcatccgagtccattttgggcgtccgggaaaattntcacagcattcacccttaaggtgtatacacattttttcaaaaactattcatgatc

SEQ ID NO: 43760 - DNA, 484 bp, Glycine max
  unsure (1)..(484): unsure at all n locations
tggtgacaacaggtccactccattcatctcctaacaatttccataactggaagctcatcttatcttctttctagttctctgccctcaagcgaacagtctccactgattccttttcttgcgaaaaaaccaattattgtatgatgtcaatgtcacccatttcactacattgccatcatcactccaattgaagacaccaccacctagtcctctgagaatagaaagccccaacccanattgttgtcatccatagtctgccttgttcatgctctcttctaataaacgttatgtagccattgttagattagattccattatttcctattgtaggtaatattntgttttcctgcttttgaatatgattagtagttaactattggtatattagattctgttatttcctactcttgttatttagaactgttaattgtaacagatccatgtatttttcattatgacaactaattaatattgcatttatacttat

SEQ ID NO: 43761 - DNA, 345 bp, Glycine max
  unsure (1)..(345): unsure at all n locations
tctgttntcaatttcgagcgtctcgatattntacagagctctatccgacatccgaggtaaacgttattgtcgtttgattttctaagagcttcccttttcaattacaagcgtcttgatatattacgggacacaatcggacacccgagttaaaagttattgtcgtttgaatatgctcagagcttctattttcaattacgagcgtctcgatatattacgggactcaatcggacatccgagcaaaaatatattgtcgtttgagttttctcagagcttcggttttcaattacgagcgtctcgatgtactacgatacacaatcggacatccgagttaaaagttattgtcgt

SEQ ID NO: 43762 - DNA, 124 bp, Glycine max
  unsure (1)..(124): unsure at all n locations
ataaattanccccgccctgccctcatcgcagactgttgaattattaagcttctgcgacatggagccatacnaacggcatatgaacctgaatctgcagcggatcagcacctgtcgcttgcgatag

SEQ ID NO: 43763 - DNA, 400 bp, Glycine max
  unsure (1)..(400): unsure at all n locations
ngaatgatggtngattccggtacttagagtcacacatttatctaagaatgattgattgagatagataaatagcaaacgagttagtggactcaaaaagtgttgtagcattaattctccttacttggtgtcgtaaacttccccgccatggttccattatctattgaatggccgaaaagtctgatttttggctcctttctttctttgatccattacttgtgaaactagaagatgctgttacaacttaatatacgatatttatacaaatttccattattttggttgtttaaaccatgcttataacggcatatatatgtctccaataagctatagattttgaatntgaatacgcatcaatctcaaaaacatgtaatgatataatgttagntattaatttggtatt

SEQ ID NO: 43764 - DNA, 326 bp, Glycine max
  unsure (1)..(326): unsure at all n locations
acacaccataagattatgatgatggatggctcanattctcacaaaggtaacttatcactttcaaattgagctttcaagacaatcatgacatgtagaggaaaaacaaggatttcaaatcacaaaatgtcaagagacttttattttcgaacaattacccatttcttgacatatcctattattcanagagaaatatgcaaagttgtacatgcaaacagaattgacctaaaatattaaactagaaacccaacanaactaacaaatttaacactaacaaaactagccaaaccaaaaccaaagaacacttcctccatactttaaacacacat

SEQ ID NO: 43765 - DNA, 494 bp, Glycine max
cttgctgatgataagcttgtctaaacttctatctttagaactcgtccctactggaattccatgataagaaaaggctttctttctctctctggccaagggaatgaaactgaacaccatctacggttggcctattaaaattctcctcagaaaatctgtctttgaaatgatataaagctgcatttctaacactgctacgcttatggacccacacaccatctatgatcagaccttgaatagcattgtgcctccttctatgattaatcagtctatgaaaatagttagaattgttgtccccttcttttaccacttcagtctggcctgattcaaaagcataagctgcattcctgagctgatcctgaatgtatttcttgagctccacttcagcttgagacaaagttctatcattaatacctacctccaacacgttcaactccatctttaattttgggatttttagcataataacaccatgggataagctcactgcctatgca

SEQ ID NO: 43766 - DNA, 431 bp, Glycine max
  unsure (1)..(431): unsure at all n locations
agtatttatctactccaattaacaagtcaagtcaaacttgtcaggttccaaacaccaaaataaaggacattctgagaattaatttggaacctttaacatcacaccctaagcaagaatcatattcatacggatagaccaaatgccttattatgaaatttttgttgtttgcttattgtattaataactaataaatcaatttggtgaaattaatttaaggtgaattctgtagttaatacttcgcttcaaacttatacatcctaacttttaccacacatcatcagtattggtagtattctctttttaccacaaattgaaacatcacttgtacttttatgttgttcataagtgcagggggatgctatccatgaccataagcaatggagaagttggttgcttcatgatctcataanaactccaccaacactggtaca

SEQ ID NO: 43767 - DNA, 285 bp, Glycine max
ggaatcataatactacagccagagaccaccatgcgtgtaatgtaattctactggtgcataacatcccatcacttaatattgcctccttccccaaaatcagtttactccatcttatccacctcaacgttcaataaggagaaacctctcattacctataatcagggagtgccttttggcgatatacagcttccccaatatgacttccatcacctcttttatatccaccaccaatctatcttaagtacaccttggtcttgtatcatcacctatgacagattggaacca

SEQ ID NO: 43768 - DNA, 588 bp, Glycine max
  unsure (1)..(588): unsure at all n locations
cgtactatgattaatgacgtgatggatnnnnatnatntnntgaggggggngtttganaccgtgagaccgtggacctctgancgacctgcagcatgcagcttgatcggacatccgtgtgaaatgtttgaccatttgtatttcacgagagcttccgctgttcaatttcgagtgttactatatgtgatgcgccggatatggacattcgagtgatatgttatatttattttatttttcgggagcttccgttgttttattctgagcgtgtcgttatgtgatctgtctgaaacggacatccgtgtgagaagttatgaccatgtgtatatctcatgagcttctgatgttcgattgctagcctctcgacatattatgcgcccgaatcggacattcgtgtgaatagtttgaccatttgagtttctaggagcttctgaagttaatttcgagcctctgcttattatgcctgcgatagacttccgtgtgaaagtttgactatttaattctccaagcttcgatgttaattcgacgattcaaatgtatagccgaactgcatccagggaaagttgacctttgattctcggcagtcgctgtccg

SEQ ID NO: 43769 - DNA, 423 bp, Glycine max
  unsure (1)..(423): unsure at all n locations
gacaaacaccgattccagagcgtggaacatcaatagtgtttcaaggctatctaaggatggttattcctcaaacagagacaggggcagctgacgatgatgaatttttgcacttccttggaggaggcagagccatacaactaggatcggcaaactngtgatctatccatcattatttcttttagttattctattattctgttatttcccttgtgatctgacattatctgcttccaaatattatgtccattgtgattgaactgcacatgcagttatctgtcgcattgtgagtaatttaccgcttttggcatatggtcgtacttaccttacgatgattcgtctgaacacaaaaatgtgtaagtctggtgtactctcgttcacacactctntttcaatataatgtaatctcgggtatcaaccgtaccc

SEQ ID NO: 43770 - DNA, 391 bp, Glycine max
tcaataaaaaaaggttgggactaaggggagtgggtctgtatgatgattacggacttttttcctccacccagcatatttttttaaaactaaaaataactttacatatagtctatacggattatcaatcatcaatttaaaattaatggttcatataagtcttgaacataaactatcgcattattagtatgatgctctaaataactaaattaataggtcaattatgttaaaaaataattaatattgttacatataatactaaaatttctaatgtatatttaatatgcatataagtttacataacaattaattttgatctaataatattttttttaacatatataaatattaaattccgtaaggcccatatggattacaatccgataagctatac

SEQ ID NO: 43771 - DNA, 397 bp, Glycine max
  unsure (1)..(397): unsure at all n locations
ntgcttccatttccgtcgagcagaaagcttctgctgaacatggatgctttccttttcattgttgtcactttcgtgttagcttccaaactcattntgctcaaggaagtgaactacctcgtaccacaagcagttcaaaaacatatattatccatgtgaaggggccacaggataagtcactagatcaaacagaagatttggagagctggtaccattcattcatgccacctactattatgagctctgaggaacagcctcgaatgaattattcatacctcaatgtgatgagtggttctgctgcaagactcactgaagaagagtcgatagctgtggaaaaaaatgatggcttcatttctgctcgttccgaaaagatactgcatcgccaaaccacaaatacccc

SEQ ID NO: 43772 - DNA, 347 bp, Glycine max
atgtcaaaacaacctttcccatggataattggaggaagacatcttgatgcaacaacctgaatgttttgaaatggaatggaagaaataatatgtatgtacgttgaaaaggtttatatatgggttgaaacaatctccaaggaagtggtaccagagattcgatgagttcattattactcatgggtacaacagaagtgcctatgattcatgtatctattatagtaaggtgggggatggttttcgcatctatgtgctactctatgtggatgacatgctcatagcatctcaagacaagtctgaaattcataatttgaagtcactacttagtaataaattttagatgatagata

SEQ ID NO: 43773 - DNA, 407 bp, Glycine max
  unsure (1)..(407): unsure at all n locations
tcggaagaaagtgatgaggtacaagccctanaggcagagcttgaaagagcccgggtagtcgaagagaagttcaagtccatagcctcaaagtctgaaaagagtatgatgaactaagggacgtcaatatggccacagctgaagctttggaacgagaaaccaagaaggcccgaaaggaagaacacgaccaaagcaaagttntgaggggctgtatagggcagcaatagtgagctcaagctccgaagaggtgaaaggaatcatcacgggtcataggcatgatcttgaaggacgagctaaaggtttgccttangtcgaanataaatttgtcccaacagttaagcgagactgaagggaatatgtgggccatcatcgataagtgcaaagagaagctaaatctagcagcgactcac

SEQ ID NO: 43774 - DNA, 240 bp, Glycine max
aaagaccgttgaacacagtatatgtgtgaatgtcagtgtgaggtgagataaaatgctaatgctatgagttgaggatatagtgcatgatactaatgaccttggccctcgtggtgaaactaagaagtgactgtcaggctactgtggaataaacgatactgggtgacgctcactatgtgatacggatagaaatagtgactattatacctctgtgactgtcttacgttgactcacatgacatag

SEQ ID NO: 43775 - DNA, 301 bp, Glycine max
agctaacgaaaaatagaaatagaaatatagaaaaatatgaaaagattctttggatcacacactgtctgaacaatgtgcagaattgtcaaaaagaataagaataaaggggcaaacaaaaatttgtttgatacctgagggatgcctgaagtagtcacctccatgcttgttccatgctgaaccatagagaatagagatatataccgacaatggagaggccagaacactcaaaagcccagattcccaccaaagttcatcttcctatacagtcccattgatccatgttttcacatgttatctttga

SEQ ID NO: 43776 - DNA, 380 bp, Glycine max
  unsure (1)..(380): unsure at all n locations
ctgagatcccttagtcaaatcattatttcttctcaactanattctgttagaattcttggaaactaagacaaacgattctacatgtgcactgtggatattccccacctaacatttacaagtaacattacgtttacaaaaacaagagtaatgtcaattaacacactcttcttaccacatattttatttatcattagtagtttctttacaaagtctatacttgttttaaaaagcgacctatgtcagagacaacgaaattgacatattataacaattaaccaataatagagagcatcaaatagtttgctatccaatggggcatggcatattcatcatgtgcaaatttagtcagaaaacacatcaataccttttttgctacaaaa

SEQ ID NO: 43777 - DNA, 418 bp, Glycine max
  unsure (1)..(418): unsure at all n locations
atgctaaacttgatcccatatctacttgataattcaatggtagccataaccctagccaagggtcatcaacctccatttctccgagaatacgactcgaacgcaacgtgtgcttgtcacggagaagccccggggcgttccattgagcattgtatggctctgaagcgtaaggtgcaaggtctaattgatacgggctggctgaaatttgaggagaatcgcttgttgaatcctaacattaacaagtaacaccatacatggngcaattctggaagcctgtgttatgactcatcangattntcaagtttatgccattattataaaccacagttacaatgctaaatgatatggataaaatggacattcttgtccctcatnctctcacaaacgcatgtttgcttattcaactntcaccggaatgtgg

SEQ ID NO: 43778 - DNA, 299 bp, Glycine max
  unsure (1)..(299): unsure at all n locations
atattcatttacttttattaattntcaacatcttttttaaatattatgtagttggtttaattagaacttcacagttaagtccatggaaatgtaaatcatgagtgcataaattaattgatgtgagattatttcatctgatcaattatttagtcttcacattctatatataaatgtgttaaatatttgaaaagatattttcttaccaataataattttatgatttaaacatgattacctcgtgcccattctaaaagaagttcatagaaatgtaagaggtgatcttagattactaatggtcg

SEQ ID NO: 43779 - DNA, 449 bp, Glycine max
  unsure (1)..(449): unsure at all n locations
gcttctcgatatattatgcgccataatcgtacttccatttgagaagttatgaccatgtgaatntctcgagagcttccgctgttcaatttcgagcgtctcgatatattatgcgcctgaatcagactttcgtgtgataagttatgaccatttgaatatctcgagagcttccgttgttcaatttcaagcttctcgatatattatgcacctgaatcggacttccgtttgaaaagttatgaccatttgaatttctcgagagctttcgttgttcaattatgagcttctcgatatactatgcgccagaatcggacctccgtgtgataagttatgacaatatgaatttctcgagagcttccgttgttcaatatctagcttctcgatatattctgcgcctgaatcggacttccgngtgagtagttatgaccatttgaatattcgagagcttcgttgtt

SEQ ID NO: 43780 - DNA, 280 bp, Glycine max
actcagcttgaaaattcaacgacatacttttactcgatgctgattgatcccgaatatatcgagacgcgtgatatgaatccgaagcgctaacaaattcaaacgacaaaacttttactcggatgtctgattgagtccgaatatatcaaagctcgaagtgaatgagaagctctgacaaatcaaacacaataacttttactcggatgttgattgagtccgaatatatcagatgctcaaatggaaaccgaagctctgacaaattcaacataatacttttactcga

SEQ ID NO: 43781 - DNA, 405 bp, Glycine max
  unsure (1)..(405): unsure at all n locations
ggctcgttgactgtcttcacaaatgatcaaggacgggcgcgtgctgattctgcgcgggccgaagtgtaattatattttcttntgcctggntgcgaaggctggatgtccggacaaagactctgcttcttttgacgaacctatgaccggcttcactgccaaagggggtgatgtgtcatggcacattcatgacgagagatctcttcttgctgtgctgtcatttatccactcttgtgctttgcatatacacacactttaacttctgctttgagttcctcctcacttggattttgtgtggtgtatggcttttaaattaatgtttgaatctcttcgctacttaccttctgcctgtttatttgtgatgaatgtcctctgtgtatcctttcctgacttttgtgatgggtcttc

SEQ ID NO: 43782 - DNA, 317 bp, Glycine max
catttgttattgatttgctttaccttgtacgtggctaaacatgttagcctttgtaagtggttaaaccttgggttatgacttctacttaatggttaaatgtaacattccataacataaatacagatatttattataaaaatatatatattcgacaagattagaaaacatgtatatagttcacagaagatagaatatctcgtttatcttctattctaaaatatcagtattagcattatatttattagataaataatataatatatctcgtttatgttatcattatatctaggatgaaatatgataagatgctatcaaaa

SEQ ID NO: 43783 - DNA, 344 bp, Glycine max
ttttattagcatggttcaccccatggccaaattaatgtgaaatccaataaaatctcctattccaaaaccacttaataatgccttgaaatacagggttaaaaccctatccttctaggattggcaacaatacagggccaaaaggaaagaaccttattttaaatttacgaagatggacccaccttggccatggcttaaaaactacatgagttatgagaccctaggccctcttagtcgtctacctaatcctttgagagtttttaataccctggcggagatggatattcctcccttggaagatagacttaatacgagttttgaactatggcttttctcgccctgtaaag

SEQ ID NO: 43784 - DNA, 364 bp, Glycine max
  unsure (1)..(364): unsure at all n locations
tgcagctatgccacacttcttacgaacgntactttgacaagacattcttataactaagaagaatgcacccatatacaatcaaggcaccttcgttacctagattattcacatgtacttccaaggtgtattngttacctacatcacacacatttcctttgctanattcacatacatgcatactctaagcactttggctataaaaattgcatacgtgcacatcttggtatttctcatacctatacatacacaaacttcatgatgaatcttgactatctacacaataaggngctacatttcatgctnttttcaagtgttgttactacctanagccgcatgcaaattgaagtctattttcttttgctta

SEQ ID NO: 43785 - DNA, 322 bp, Glycine max
atctcagatgggaacctctccatttgctctatctttgccttggaggttattctgatgtcaacctctgttactgaaatgtagaatgggtatcaagtctgtggaagcttgaatatcttgatttgagtaatgcaaacctatccaaagcatttcattgactacacactctccaatctcttccttctttgacccacctatatttgtcacactgcacactccctcactataatgaaccatccttgctcaacttctcatctctgcaaactctccatctatccgatactcattattccactgccatttcttttgtccccagtggatattc

SEQ ID NO: 43786 - DNA, 449 bp, Glycine max
  unsure (1)..(449): unsure at all n locations
gctttctacaccttttctcccctttggttcataaaaagccaagaactcggaaataacacagatatacaatggagtagaaagatatagatatcagagtataaaacacaataaggccaacttcacaagaagaagtaatcaaaccagaatccaaataacctaaaatgtcaacaaccacaaaacatccaagactganagttnaaanaaccacaagataaataagcaaagtacttagcaaaatagtgtaaattctaagaaactaaaagccaaaatacacggcttataaaagacatataattagaaactaaaatctaagaagacgaaggtggtggtggaagatcgaaactctgacgaatgtatccgacatcctcttcaagctgtgtaaggcgaatgtccataccggcaaagcgtgaatctaacaagtcgaagcggtcaccaacataagaacaaag

SEQ ID NO: 43787 - DNA, 343 bp, Glycine max
  unsure (1)..(343): unsure at all n locations
atacaagtttctagcgattctaatatgtggccattagctatctatgctgacatgccgaaacccatgaattcttcggggcggagtangtgtccgccatttgccttgacctggctaacaatcggngaagttcttgactcccgttcaaggtaagagcaaaccgatccatccacatggttgcctcttggtgtaaagagtcgatcacccttcctctagcctctntctccgcgtatacttggggatactcgtccgcgaccttatgctcgtgggccgtggctagacctaactcttcttggtacttggcgatgatagctagcatgttggtctccgtctcgcataaacgctg

SEQ ID NO: 43788 - DNA, 156 bp, Glycine max
  unsure (1)..(156): unsure at all n locations
aagaaataagaagtctgtcacatgaagaagagtgtcaatgtgatctgccggttgatgatgccacaaaaatttactgatatggttgcatcatcaaaagggggagaatgtgaatgtatgtatacagatntttgatgatgccaaagtataagcaaacaa

SEQ ID NO: 43789 - DNA, 286 bp, Glycine max
atgagatcccgttagaacaattgtgccactagtcaacagagttcagtgaacctcggtttagagagagagctacatagaatagagtgagaaaattgtttacactgtaatgtgcattgagtcattaattttattggtccatagtcttgtttagtgaacgttatactgcgcttaataaccagccgtcactttgaatttaccctaactgataccacgctgtgtttgactcagttactacaggttagtgacagctgttaactgctgtcgataaaatactagtacagatctt

SEQ ID NO: 43790 - DNA, 313 bp, Glycine max
acatatcttttcatcacattcctagagaggaaaatcatatggttcgtgcccttgccacactagcatccctgttctagctaagcccgcatggagatttgctgtatcaaattcaaatgtcgtggaaagccttacacattgctacttaatagaggaagagaaaaatggtaagcctttcgtactctgatatcaaatgatacatcgaagacaaggaatactcgcatgaggcctctgacaacaacaagagaacgttgcgaaagttggcggcagacttctttctgagtggggatatcctatacaagaggaaccatgacat

SEQ ID NO: 43791 - DNA, 118 bp, Glycine max
gttgataggagtttttttggagctactcccagaagaaaatgaaatgttgttaagcagaaagttgaagatggctcttgctgtatgccagtctctattatatgatctgccccgcaaaccc

SEQ ID NO: 43792 - DNA, 280 bp, Glycine max
  unsure (1)..(280): unsure at all n locations
actttcttcttctcatgcgcccatatataatttactaataaaccctctttgagaatctaactcttgtcaggtttcctaccngcattatatttcattctttaattatattattaatatgaaatatctattaacttattgatgattaattttaataacaaaactgattgatctagtgcgattcttctcctcccaatcacatgtatcattatgaccaatgatttcttcatcagctattatatttctgagatgaataatgtaatatttgtaatgtgctcttttt

SEQ ID NO: 43793 - DNA, 437 bp, Glycine max
gatcttaagcacctgcggctgcagcttgcggattggtctttcctgtgacatatcgatgtgggtctgaaaagaggcaaatttagtcatcctgcttggacgaatgagaaaactggggcaaatgaagagggtgaggatgaagaagaagcccatgctgtgactgccattcctatatggccaagtttcccaccaacccaataatgtcattactcagccaataacaaccttttttcattacccaccacccggtcatccacaaaggccatccctaaaatcaaccacaaagcctacctaccgcacttccaatgacgaacaccacctttagcacaaaccaaaaacaccaaccaagaaatgaattttgcagcgagaaagcctatagaattcaccccaattccagtgtcctatgcttgacttgctccatatctacttgataattcaat

SEQ ID NO: 43794 - DNA, 407 bp, Glycine max
  unsure (1)..(407): unsure at all n locations
gacttggctactgccttcattatgcagtaccagtacaatacggacatggctccttatcggaaccaacttcagagtatgactaagcgagagcatgagtccattaaggaatatgcccaaagatggagagatctcgcagcccaagtcataccgcccatgacggagagggagatgatcacaattatggtagatatgttacccacgttctactatgaaaagctgataggctacatgccaactaactttgcggatctcgtcttcgccggagaaaggatngaatccggactacgaanaggcaagttcgaatatgcttccaatgtggcccccaacaacaacagaagagccccaatagtgggcgtgaggaanaaggaaggagatgctcacgcagtcaccaccgccccgacgtggat

SEQ ID NO: 43795 - DNA, 265 bp, Glycine max
aaatataaaaagaaattataagaagaaacagaaaaaaatcaaatcaatgaagacaaaggtcaaaaaaaacagaaaaaacgtcgaaggccagaatggagaaccatcaaaaaaaaaaaagaataataaaaacaaaagaaaaaaagcaggaaaaacaataaaaagtagaacggaaaaaaaaaaaaaaagaagactggcaagacaaaaaaaaaaataaaaacaaaacagataagaaaaaaagaggaagaaagaacataaaaaacgaacc

SEQ ID NO: 43796 - DNA, 360 bp, Glycine max
  unsure (1)..(360): unsure at all n locations
gaatcattagacccaacacaaagtccttctccttcttggtattgttagtcaagaaaagtgattgatcatggccgatttgcattgactggcagggccttgaatgccattatcgtcaaggaccacttnctaattttgaccatagacaaattgtaggaatgaatgngtggcgccttgttggttctcnaaaatggacctattgtaggggtatcattagatattgatgaatgatgacgacgtgagcaaaacaacctttagagcccacaatggccattatgaatttcaccgtatgctcattcagatatgtaatgccccatcatcattccatgcaacaatgaaaagtatctttgtgcctatttacgt

SEQ ID NO: 43797 - DNA, 255 bp, Glycine max
gaaatttcagtgaagaaaaaagaaagaaggaattcccatcaagacgggagaagaaaaagaatgaagacattccacccagatggagaagaaaaaggaggagctctgtcaagaaccaaaaaatggcaagagttttggaccaacatttgacagacaaatgcccaatgacaaaggaagaaggaacccgactaaaggctttccttaataccaacaaatccggcgctacgacttttttgccgactaacaataaaaaaaaaa

SEQ ID NO: 43798 - DNA, 373 bp, Glycine max
  unsure (1)..(373): unsure at all n locations
agcacacgccctatcaacataagttngaaacaatttttatcttccttaacacctaaagggtaaaaataggaaaagaacacctgaataatatttttccaaaaataggcactgaggcacaactttggctttaatttggggtttgacccatcacaaccttaatctaaagtttgaatcatccatacactccgcgcctgaagcttcatttttggctctaccctctaatcataaattaactagaaccgccatcaacattaaaaactccatagctctcatagttgaaactcaagattccctctcttcttattctcattgaataatgaatatatatatccaacaccatatgacccacaatccatcaacacacaacaaccac

SEQ ID NO: 43799 - DNA, 248 bp, Glycine max
agaaaattccttaaaaaattacggggaaggcggaaatctagtttaaataaaaattactaaaaaaatataaaccaatatttactggaaataacaatcaaaaatacttaaaaaaatactgaagctgaactagtttaaataaatacttaaaaatatgtacaatatttatgcaactagaataaaaaatttaaaaaatacttaagagaatcacttaataacatactaaaaaaaccgacgctgattatttaata

SEQ ID NO: 43800 - DNA, 442 bp, Glycine max
  unsure (1)..(442): unsure at all n locations
cttctacagtgtggaggggacgactctcactgaatggatccatggacgccccanaagacaactgtaggccgggttgatatccatcacttggaatgtagcttggcaggtatgaggccctatctgtactgngagatcgatctctccccttacctctcggcagctaccgtcgaatgcacagaccaccatggaactnggccttagatgggaagcgttaaatggaaatntctccaacatgctnttgggcatcacgtttaggcttgagccattgtcgatgagtactntggccataacgtgtttcatgcatttgactgacatatgtaaagccctgttatgtcctctcggtggggatttcctcttcagcgaaggtgaggtagtngttagctgtgatgttattgacaattcccccacagccttctatggagatgtcttgggctatgtgagc

SEQ ID NO: 43801 - DNA, 375 bp, Glycine max
  unsure (1)..(375): unsure at all n locations
tcttggtggtgaagctccttcttccatggcttattccctagnggttggcgcctcctctcacctcttctcctttgtcttccactgcatctccatggtggaaaatcaccattaaaggacctcattgaaggtcaaagatccagcctccatagaagcctcacaagtaagcatccatcaagtggtatcagagcacaagagcttcaagtaggtgctccttanacctccatttattttttgctttaccttctcttccattgttgtttcttcattttttctccatctatctcctcacatgtcttgtgctaagtgtttttaacatgattctttagagtttccatcaattaaacttgctatagaagctagaattgattntctatg

SEQ ID NO: 43802 - DNA, 297 bp, Glycine max
atgtcggaaggcttgaatccttgaatgtataaactccattgcagaacaaatggtgcatcactggatatatcagcttttgaaccccatcgatcctcacagccacgctctgcccctacgttcagcacaggcctattaggtatctgcgatatacttgttctgttcacatttgaaatgatatatggcgtacacgtttaaatgcggcttaatccaattccattccgatgcaatcacagtataaactaaagaatctaaaaaataaaactgacctgtgcaaataaaacctggggtatactactt

SEQ ID NO: 43803 - DNA, 455 bp, Glycine max
  unsure (1)..(455): unsure at all n locations
agctnttacgaaccanacccttatccaacaactcatttacttgagaaataacctcaagcccaagaggtgtggcaatgctaacaagtgtctttttacaaaagaggagatgtggaggttntctaagaggggaagcttctttaatgtttgtctttattgtaaaatgaatttctttcttagctaacctcttggaggagacacttacctccttacactcctccttaaccattaatggttgtccttcttgttgggggtagatttcttcactagatttttccccttttgcttcttcactttcactaaaggaaggtgaagtagtactctcatcttggctactacaaatgtcttggcccctcataatcatgtgtttcttgtgggtgcattgagaagtattgtgtcctcttccaagacatntgaagcacttcatggagctagtattctcttgcatactaacctta

SEQ ID NO: 43804 - DNA, 465 bp, Glycine max
  unsure (1)..(465): unsure at all n locations
ctagatccctcttgtggactaggctcaacttaaatatcttacgattgtttagcctaatntagcctaagctttgtcctcatttggatttcttttgtctcttccagatagcttctatatgttggcttatctggtaaggaagctcttagaatgagatcaatttggtgctctatccctctcaaagcatgcaacccatgaggggtgtctttgaggaagacatccgctaacctcttcaataatttttccacacctagaggcaaagaactagctatataagacaaacaataatcatgaggcattagtaaatacataggttgtctagctagaatcactctcttcaccttctgtattctcatgaacaaactcaatatctgtctctcttgaatttcatccttntttgcagttcactcttattttatcgcattctttctttctttctcttctctcatgttctctctcgtttatcaa

SEQ ID NO: 43805 - DNA, 252 bp, Glycine max
tggaggacaggaaaaacataccttggaaaacactttgcagttactgagagctgacaataaaattgaataatagtggcgctagcggcatatcttttctgtattgcctacaggtataactgcatatccaaaattcaaaattacatttcctgtttttgaagactcaacttgcaatatccatcaaggaactcaattatctgaactataaattagacatgtctgatcatttgggatgaagcatccatgactcacaaa

SEQ ID NO: 43806 - DNA, 481 bp, Glycine max
  unsure (1)..(481): unsure at all n locations
tatcgctgcactgganagatattataaaaagttattgttagttgtcttatacgactaacttttgtatagaaaacattttccaaaacttgtatagttctacaatttatggttattntgtagtaatttgtaaataaatcttgttttactgttaaagttatctctagaatactttccattggaattaatgatgaaatctgttcaatttcaggttaaatgaaggtaaatcttgaagtgctataagtggtanttgcgctcagctcaccattnttaggctaagtgcgtagtccatgctaattgtagcttcagtgcgcttagtgcgacagagaatctggcatagcaccaatatcaatgccgcgcgctaagcgcgagatcagtgcgctaagtgcagcggttgtcttcagccaggcttagcgcatgattggcgctaagttcanatccacttactcgtgctaagcgcannggtggcgctaagtgcaacgtc

SEQ ID NO: 43807 - DNA, 443 bp, Glycine max
  unsure (1)..(443): unsure at all n locations
agctttctagctnttcattggtgtattttgttcttctttaggngctctaaatagtgggaatgtgctcaaatatgtggggcaatcttggtttgtnttcttgcttgattgggttgaattgagggtttgtatgagatggccctaggcctataatgtattttgaagcaatggggcatgccacattgtccccgttctcttgctattgatgcctaaacgcgcgcccaccaagtgttcagtgaaatgcctcaatggcattagcgcgtgtattttgtagggaaacaacctatgggacnaattggtttgcacatgttntctattttttgggacatgtattcagtttcgtaagggctagaataattgccccacatatatcctangcctatgaaccaaagttntcatgcaagagaacacatgagtgggtgcatattgtgtgaagctaccctttt

SEQ ID NO: 43808 - DNA, 471 bp, Glycine max
  unsure (1)..(471): unsure at all n locations
cttagcccttaactgtgaaattactatatttgattctgagtttcaagttctaatcaattttactactattgctgaagaaaatatttaaattcttctccattttatctgattacttaatgccacaaaaacaaaatgcaattcttaattattaaatgtgtataaaacagcggagaaggaactatattcttccccagttcccccatcaataaaatctctgatntcaagaactaaatttacaggagtcatagtttatgtaccaagtacataaatgtttttctgaaattaagatgtactcatcagacattacagattcaagaaaagaaacttcaaatatgttggtgttatcgttacaaatagaacacactatctcattttcaaggtcttaacaaagacaacaaacaaaagcacttcctaagactacttatagaaagaacaagccagctgtaaatctcatgttataaccattctaac

SEQ ID NO: 43809 - DNA, 294 bp, Glycine max
  unsure (1)..(294): unsure at all n locations
agcttgtacgaatataagaaacatcttcttctattctggtgattcttgactccatctcatngaagcgcatgtccacttgtaattccaaagtatcaaacctttcaccaacaaaggtttgaagaccatcgaacctatccaaaatcttttgaagaagagaagaatcttctccaccatgtccttcttcatcaataggtcgagcaccctttntcacccaagagccatcatgctcattttgataaccaaaggatgcaatgacaaccacgcctattagaaaggatctctttgatggaacat

SEQ ID NO: 43810 - DNA, 340 bp, Glycine max
  unsure (1)..(340): unsure at all n locations
aaaaacaaataatcaagaatcatcaatcatctntgaatcatctatnncttcaatctttttcatcatcatccttcacaatctttcaatatcttctttcatctctttcaacactttcaacagaacttcctactcatttatcttcgtctgtctaaaaagttttggtcaatactttttctttgaagaaaagttctttgattaannaacttgtgctattcatctttttcattctcttctccctttggcaaaagaatgaaggactaaccgcctgaattcttttgtgtctcccttctctcttacaaaagattcanaggactaatcgcctgagaattcttttgattct

SEQ ID NO: 43811 - DNA, 465 bp, Glycine max
  unsure (1)..(465): unsure at all n locations
agcttctanggaacggaggagaatgggagactgagtgtgaaaataagtaggtgctgagattaatttcaaagacggtcttttaataaatccatttttgaatattttgaatatttcatttttaagacggtttttataaatcctttgttatataacttttattatttacaaaattatcttcgcgtgacattctaagacagtttcacataatctctttagaatttatgtcataaaaaataacttttttagtagtgcttatgttaaagccctctactcatgccatcaaaatcattgaagacatgtgttctagcccctacaacaactncagggataagaggattatgaagagaggcatcagccacgtggagacagatgaatcccaaactgaattgngaaataagatgcaagctctatcattgaagattgagacactcaaagggctcatgctcaagtgctcatcactacacc

SEQ ID NO: 43812 - DNA, 492 bp, Glycine max
  unsure (1)..(492): unsure at all n locations
ctgtcttctttggatgctgacttgtggcaagaagccattaatgattagatggattctttagaatctaacaagacctggcatttagtagactttcctcctggttgcaaaccaattggttgtaaatggatcttgaaaaaaaaactaaaacctgatggtactgtggataaatacaaggctcgccttgtagccaagggttttaggcaaatagagaatatggatttcttcgacaccttttcaccagtcactagaataacatctattcgggtgctaatatctcttgctgctattcacagtctagtgatacaccaaatggatgttaaaactgcttttttaaatggtgaattggaagaggaaatntatatggagcaacctgaagggtttgtgattcatggacaagaagataaagtctacaagttagataaatctttgtatggtctanaacaagcacctaagcagtggcatgaaaaagttgataacttaatagtctcgaat

SEQ ID NO: 43813 - DNA, 391 bp, Glycine max
  unsure (1)..(391): unsure at all n locations
agctanaggagcactcaaatcgggtgtatttactcctaaagcctatactctgaagagtccgtcagggcctctccctccttgattanggttcaccccatataagatgctagcccaaaaactctttctatgacctggacaaaacacacaattcctcaatttttctcaaaataattttatctcgtcgtgcttgtgattaaactcactgagtccccacagtggttcccattacaatactcgtcgcgtattaacttctcgtccttaaagggtcttataatcatgtgattgtacgattcataactctcaacttagtgcacacaacatctcaatgcacatatatattacaagtcaatacatactcaatttatcacatacaatcgggctcaatcacaat

SEQ ID NO: 43814 - DNA, 434 bp, Glycine max
  unsure (1)..(434): unsure at all n locations
tcctagagaagctagagcttagctacacacacctctctgataactaagctggcctcctttagatgagaagctagagcttagctacacacccnctataatatctaagctcacctccatgccaaaatacatcaaaatataaaaaaagtccctactacaaagactagtcaaaatgccctaaaatacaaggctaaaaccctatattactagaatggccaaaatacaagcccaaaagaagaaaaaacctattctaatatttacaaagaagagtggacccaatcttggcccatggactcaataatatgatgatatacaaccattgatnggccgcttcgagatatntggcaccctttgttgcacaatatgtgaggtcccgagacgtgccgaaaatcaaaaggaagaaagcctacgcaatccatgaaaataccgtgatgtga

SEQ ID NO: 43815 - DNA, 509 bp, Glycine max
  unsure (1)..(509): unsure at all n locations
tcaaactaagcttgtcgattagttntcgccggcgaaaagatcanagtgngtctctgaagaagcaaatntgattatcttgctctgatgaataacaagcctgnggaaaatggagagaataagaaagagggaggaacccatgctatgactgttgttcctacatggccaaatttcccaccaactcaacaagatcaatactcagccaatattagccattctcattactcaccatcctatcagccaagaacactcaatcatccacanagaccacctctaaattagccacaaagcctgcctttcgcacattcgataccaaacaccacccttaacataaaccagaacaccaaccagggaaggaattntccagaaaataagcctatagaaatcatcccaatgtcngtgtcatatgctaacttactcccatatctactcaataatgcaatggtagccataatcccagcacatattcctcaacctccattttcccgaggatataactcanatgcaacatg

SEQ ID NO: 43816 - DNA, 305 bp, Glycine max
atctatggaaaataaaaaaataattgtgggtcacgcatcgtatttaatgatactttcttttgattttataatttttaatgaattttaacaataataaaaaatagtatgcttgaatgagtgtgttaaagagtgtgatatcaatcttctttaaccttatacaatatttgagattacagattaatttaactaatttagtaatttctggtgtattgggcgtgttagcttaacctcttcttcatttaaaattccctcgagacagttgttcgaaatatattatcaattagtattctagctgttatattatc

SEQ ID NO: 43817 - DNA, 543 bp, Glycine max
  unsure (1)..(543): unsure at all n locations
tgatagcnnnnnattgtcgcatgtataccctgacacactccactactccgcttggctnatataagtacaggatggataatgcggtcgacaggactatttccgctcctgagtatgacagtcaccgctttatgagcgttgtgcaccatcatcctctttaggccatccaggaatggtcgcttctccagtagcaacgcgtctagctcatggacgacgattatactgatttccatgaagaaatacggcaccggcatgggacatcactggctactctcattgccaagatcgatccagacatattccttgagtattatgccaatgcttgaccaacatacgatggcgtgcgtgacatgagatcctgggttatgtgtcaccggatccagtttgatgccgacgctatctgtcagctcctgggatatccgttggagtgaaatagggccagaatgctagtattgcctaggacgaaccggcctgacggttctatgagacgccattcttcattatatgttaccgggcagatttttactaacgtgcagtgagcatgcg

SEQ ID NO: 43818 - DNA, 366 bp, Glycine max
ctcttcatcagcatctttatattatggtaggatttaataccatacaatcgttttattagacatgtgattaatgtgagtttatataaagttttccttcgagaagctagattttaaatagccatctataattgcatttgtgatcgccagttaataatgtttgacactgtataactgtattacgactatacttacagacacgtttttctataattatcagcgatgcgaaataaaaaatataaaattcatcacaatgcaacggcgacatcaatttaaatacatgcttccagttatatcttctaatattagcatattataatcttgatgctcaaatagtttctttcaaacaaagtggacttacttcatgat

SEQ ID NO: 43819 - DNA, 498 bp, Glycine max
  unsure (1)..(498): unsure at all n locations
catgaatgcatgaattgctcaccagaagttgtgaaactagtgttggcttcggtgaacactangtttctcactggattaacttctaatcagacaccaaacttggattccagctcatgaaataaatatagattagattgaggtttttgttatctgccagcagttacttcaactagtataccctaacaatgttaacatctacacaaaagagtangttttttgtaccaatgggggtataactcactattttgtgggggtgggtgcagcctgccccctgtcagagcctattgttagctgttgcatgtgaaccttttagtgaaactttcagaatcanttttcctttaaggctcttagacacttgtatntaaaaaattaacagactntgtcgagtttgagaatatatttgtaacttcacggagttaaaaggttcctacattttatgatgagcanncgtaagtttatgtcagctatttattcatgctttctnttctctcaataacc

SEQ ID NO: 43820 - DNA, 608 bp, Glycine max
  unsure (1)..(608): unsure at all n locations
agaaacggcgncnattgtaacatcgagcntcgngancncagagnananccgnngcntgcangtctttaagganctttacagaggcgggtggatatttttctttatgttctcttgtccggaaaagagtgccgtcatgtgtcctctctcactccctgatctcacgtctcacacccactatagagactgctagtcgcaacactacatctattcttatgcacttgtgctatatcttctcgcgcgttctctaagatctgttactcgaacacaaacagtatanacacgggcgagtcctctgggcctatcacttccactgcatctccccacagtggttagccattaacattccaaatgccggtttaacttctcgtccttaaagggtcttataatcatgtgattgtacgattcataactctcaacttagtgcacacaacatctcaatgcacatatatattacaagtcantacatactcaatttatcacatacaagtgggctcaatcacaatgggattacctcaaattatcacacctcatgaatcatatacactttacctatgaactatgtaaacacacactactcattgtttaaaatcttttactcgcatccctcc

SEQ ID NO: 43821 - DNA, 403 bp, Glycine max
  unsure (1)..(403): unsure at all n locations
tgtcttgtgcagaattnaggtagagaatagcctgtccatatttttccaacattccagagcacaccatagttgccaatttgggaaaagggctctacatgcagcaagaggagcaatttttgtagagatacctatgttttgtaatctcattattgttagggtttcttctataatggttggttaaacactcttgttggggatttctaatgaacaactgatgtaatcatgttaatatctaattgattgtgcttcttgtgttcaatgcttctttcactgcttaattatgtatgctcttggcctgatacccatttgtgtcatacgtaggtgactttagcattgggaaatgtattgttgccttagaacttgactgaagcagaattgaaacttaatcctacaagaagggact

SEQ ID NO: 43822 - DNA, 184 bp, Glycine max
  unsure (1)..(184): unsure at all n locations
cttgtatactnatattcacactatagattatgataagtcagaaggaaactcactcacgcctcaagaagttcaaccgtagttgtgattttcgacttcagcaacagcatctatctcctttgataatttgttttccattgatctaatttacacacaaacatcatttttcttagtgattattataaaa

SEQ ID NO: 43823 - DNA, 302 bp, Glycine max
acatatccttgctcacaaccttacatactacataaggcaattcgattattatatatctaaagaaacaataagtaggcaagtcaataatgtcttaagagctaagtccaattcattcttcactctcatgagaaaatatcatggatctcacgcttagcacatatgccctccacgcttattcctaagaggtcaaagaacaagttattttcttcttggtttaggcttagcgctagaacatgttaggcttaacaccacatttgggcttactgctaagcttgcggcacttatggctagaggtcatatac

SEQ ID NO: 43824 - DNA, 496 bp, Glycine max
  unsure (1)..(496): unsure at all n locations
tcagaattcaatttcgcgcgtctcaatagattacgggactctatcagacatccaagcaaaacattattgtcgtttgaattagctcagagcttcagaattcaatttcgatggtctcgatatattacgggtctcaatcagacatctgagtaaaaaagttattatcgtttgaatttgctgagagcttcaacattcaatttcgagcgtctcgatgtattacgggacttaatcagacatccgagtaaaaagttatcgtcgtttgaatttggtcagagcttcaacattcagtttagagcgtctcgatatattacgggactcaatcagacatccgagtaaaaagttattgtcgtttgaaaatcctcagagcttcggtattcaatttcgagcgtcttgatatattacgggactcaatcagacatccgagtaaaaagttattgtcgtntgaatntgctcagagcttcaacattcaatttcgagcgcctcgatatatttcgggact

SEQ ID NO: 43825 - DNA, 355 bp, Glycine max
  unsure (1)..(355): unsure at all n locations
tgagaacctgtgatgtacctaagcatgcgagctcctggcagtcaacagattataggaaaacaagaccacaaagcaaggaggcttgtggtggctggcccactgtgaattntgtgtaatatgtggattgtggcctctggtgatccattaccacaggtgagtaatctattacaaggcttaaaattgaagacaggaggctaagatggtctctggtaatcgattaccaaggggtgtaatccattaccacgcttgaaaactaagtcangaaacttagggagcctctggtaatcgattaccagcctgcgttatcgattacacagaggaatgggtcactggtaatccattaccacgcatgtgt

SEQ ID NO: 43826 - DNA, 418 bp, Glycine max
  unsure (1)..(418): unsure at all n locations
ctctgagccaaatcctgactcaccatanaccttgactccaggttataatgtcaattcttaccctcggaagcaaaaaataaggggagagggaaaatttccaatcaaagatgaagcaaacaatgagagaaggaaaatttccaatcaaaggaaaaaaagagaggaaagggaattcccaatcaaagagtgggagaaagcaaaaagaacagaaagaacattcccaatcaaagaatgggagaaagaaaatagagaataaaatagggaagaaagttcccgatctaaaaaaaataatatgcataaaggtctttggaccggacaatatctgaacaatacagaattgtcaccaaatgaataataagaatgaaagggaaccatgacctaacatggtcttcccctttattgccaggcaaatcttgtgcgc

SEQ ID NO: 43827 - DNA, 406 bp, Glycine max
  unsure (1)..(406): unsure at all n locations
agctntaaagaggatcaaatngaacttattgtttctgggttggaacaaagcaagcagaagttcatatgggtgctgagagatgctgataaaggagacatctttgatggaaatgaaacaaaaaggtatgagcttccaaatgggtttgaggagaggattaaaggcatagggcttattgtgagagattgngcaccccaattggaaattctgagccacacttcaacaggggggtttatgagtcattgtggatggaactcctgcttagagagcataaccatggnggtgccaatagcatcatggcctatgcactctgaccagccaagaaacactgttntgataacacatgtgctcaatgttggtttggttgtgaaggattgngcacaaaggaatgcattggtgactgcgtcag

SEQ ID NO: 43828 - DNA, 504 bp, Glycine max
  unsure (1)..(504): unsure at all n locations
ctttatttatgaacaccatggacagaccagaatatgtttggcttcagacatggcaatggatggcagatgatatcatattcaatcatagaaaacaaggtgattntatatattctaaataaatattgtttactcataatcattatgtttattattttactaatcacaggtattcgccttactaaaaaggaaacaattcatttatgcttaactgagattgagaatatgctacaagcgaactgaaggagcttgcgagattttccatccatgccatacccaataggatatgcacgaaaccaacatcataataatctcatccataatgaaatgacatatggcaaagaaatattagcagaacaatacaacacagcataccaattgctcataggtactcacaaattatgacacatttgatatagcaactccttaatcacaatagtatatattactatntgttaatatgtgaatatantaatacagatgaagcacaaactattgtcgatacca

SEQ ID NO: 43829 - DNA, 409 bp, Glycine max
  unsure (1)..(409): unsure at all n locations
agcttcgaatggtcatcgcttcattcttgtgtcgatagattatttcaccaaatgggtcgaagcggcttcttataccaatgtcacgaggagtgtggtggtcagattcataaagaagtgtcgtaacctacccttcggcgggagggcgacgcgagactcgcgggatgcgtgttccacgaaaggaatacgcgcggagtcgccaccaacgtttattcgagganaacgtcggataaaccgganaagacgagatctactgaacttttagtgaaaggttcgggagttgtatttacgcacggtgaaggtattagcaccccacacgcccgtcccaagggacggcagcctttaatcgaatgtgcaacatgactctgatnttatgttcctttatgtcttatatctttatacccttttatat

SEQ ID NO: 43830 - DNA, 481 bp, Glycine max
  unsure (1)..(481): unsure at all n locations
ngagatgaggaagtgtagaagggtgaaacttcctgctnttactcgttgaccacagagtggtacctggagatatgtcgcgggggtcaggagaccttgnggacgtcaggtggggtgctattgcccaaaaccaagcttgaccaatcccgacccaacccgggcatagtcagtcagtgagaacctgtgatgtacctaaacaggcgagctcctgncagtcaacagataanaggaacaaagaccacaaagcaaggaggcttgtggtggctggccagctatgaattntgtgtgatatatgggttgtggcctctggtaatcgattaccaagggtgggtaatcgattacaaggcttanaaatgaagacaggaggctaagatggtctctggtaatcgattaccaggcttannaagggaactgngagatggtggaggcctctggtaatcgattaccagcgtgtgtaatcgattacacagaggaatgggtcact

SEQ ID NO: 43831 - DNA, 487 bp, Glycine max
  unsure (1)..(487): unsure at all n locations
agcttgagaaagtccttctgattctgtttattcttttctgactntatggcatgagatgaaattcanagattggacctcttgctagttgttattaatgaatagcttaaacacttgtgcttgagtgaaacagtagcagtgagactgtggtttaagctactttccttgatatctgtcttatgcctaactccatctatttgttcatgttacattntattcttctctttggataactgcataccttgtgaaagacaagtgatgagggcattttactccattatcttattatgcaatcagtaacttttgttgcatacacctttgtatatagtcactgcatgtcattgtcacttgaggacaagtgagttgttctctttttgctcgaggacaagaaaaactgtaaatntgcgggagttgttagtcggtgaaatcgactaacttttgtgtataaaacttgtataaattgtatcgaactctcccaatgtatggttat

SEQ ID NO: 43832 - DNA, 411 bp, Glycine max
  unsure (1)..(411): unsure at all n locations
ntacccctgtccttccaccctctctaactattgaaatctgggtatcactaactgacaaanaaagaataacataattttcctgttataattcaagatttgatatgaaagcatcttanaattcaaattagaaccagaaaagaatggattgcaacattttatttatcatatataaatataaattcaattcatgcgggtaaagattctacggtcttttacatcacttaacgacaacatcagatacagtgatactggcattagaggttaacctcattataaaggacactagtctgtacgaagatatgcaaactcacctcaacattttcaatctttgcaaaaatttgagtttggctgagatcacctaactntgaaagaaattcacgagcctgcatcacaaacatataaaggtttttt

SEQ ID NO: 43833 - DNA, 395 bp, Glycine max
  unsure (1)..(395): unsure at all n locations
ctgggaaacgaaggtcaagtggtcgcgatatacgaagatgatgttccgagtacattggatttggtacgaccatgccctcctgatttccagctgggaaattggcgagtggaggaacgccccggcatttacgcaacgagcataatgtaaacctttacggttttaaaagctctatagttgggcctaggctntagagttttttccttttgttaaggctntgtgtcttttgtttttgaatttataatacaaggatctttcttcatctgttcctacgtctctacccattctcattcatttgcatgttcacttctttttctgaaacggcagatccgatgacgagtcccccgaaggtactaatacctgngacccgcctatcgacttcgagcaagaaatgagtc

SEQ ID NO: 43834 - DNA, 389 bp, Glycine max
  unsure (1)..(389): unsure at all n locations
gcatgtnttaatttgatgtgcatgtaccgataaacaatcaatcatttttattatttaaactcttgtaatttttactaattnttttatattccagaataacctaacatgcacttttagatctcggggctgtcttctcatgtatgaaatgcatanattttttggaatatatatatatattattgaattgaataacacctcatttggatagttataattcttcattcctaatgtaactgtatactaataagtntaattattaccaaatctctaccaaatataataataaaatatcccatctactaaagtttgagactttatatacacgtatatataattaagtaacgtatcttaaactcactcttgacttcctcgctaagctangcttatat

SEQ ID NO: 43835 - DNA, 508 bp, Glycine max
  unsure (1)..(508): unsure at all n locations
ntccgcgagganatgacaaatacgttaaaaccactttagatgtataggtgtntgaatatacaggtccaataaattatacaaaatccatactggttggtatattataatacgtacatacatcaattgaatctttagtactactataataattttttctataaaaaagaagagaaaaaaaaaatgttacctggtaactttggggtactttgagctgaggccatatcctgtgagaccacagcactgttaatgaagaaaaatatgacatcaggtaattctttattgaaacgatcaacaactgatttaagcttttcattaaaaaagagtgatgcttcaatgtgctcgtcaacccatattgacccagctntcccatgaatagagacttgttgtggactatgcagcctataagccccacgcctatcanagcanacttccttgccccaagttcatccaaatcctgcacatangaaacaacaaactattcggcgcttcatattatanatgttacact

SEQ ID NO: 43836 - DNA, 254 bp, Glycine max
aacccaaaaaaaaagagaaccacattagatcccaaaaacgacacaccgcgtggcagccgaacgagcccatagacggaggaaacgaacagcaagacgatggaaccgaaaaaaaccagcaaagagcaacaacgggaaacaaaaatttggcaggaaatccagaaccagcggaacagaaacaaaagcccgaaacaacgaaaacaacaggctatggaaataacagacaaggacaaaagaaagaaacacatgaaaggaaa

SEQ ID NO: 43837 - DNA, 494 bp, Glycine max
  unsure (1)..(494): unsure at all n locations
agcttcttagtctcagatgatgcagctaagtttgtagctacctcatgcactcctctaatgactatagcatcatttctggcgctaaactgctgggagttagaagccatcttctcaattaaattcctggcttcaacaggagtcatgtctccaagggctccaccactggcagcatctatcatacttctctccatattactgagtccttcataaaaatattggagaagaagctgctccgaaatcagatggtgagggcaactggcacatagttttttaaatcgctcccagtactcatacaggctctctccactgagttgtctaatacctgagatatccttcctgatggttgtggtcctggaagccagggaaaatttttctaagaatactctcttaaggtcatcccagcttgtgatggaccttggagcaaggtaatacagccagtcctttgccactcnctctaatgaatgaggaanagccttcagaaatatgtgatcctc

SEQ ID NO: 43838 - DNA, 498 bp, Glycine max
  unsure (1)..(498): unsure at all n locations
ntgatgcaacatatggagaggttaatgaaacaacgagatgatgcgctccatgagaggttggatcaaatggagaatagagatcataatgaagaagaaaggaggagaagagggaatgatggtgttcctagacaaaaccgaattgatggtattaaactcaacattcctccatttaaaggaaagaatgatccggaggcctacttggagtgggagatgaacatagagcatgttttctcatgccacaactatgaggaggaccagaaggtgaagcttgccgccacggagttttccgactatgctcttgtgtggtggaacaagctacaaaaggagagagcaagaaatgaagagccaatggttgatacatggacggagatgaaaaagatcatgaggaagcggtatgtgccggctagttactcaagggacttgaaattcaagctccaaaaactaacccaaggcaacaagggggtngaggagtatttcaaggaaatggatgtgctcatg

SEQ ID NO: 43839 - DNA, 425 bp, Glycine max
agctgcagctagagcctagtctcactcccatctttattgaaattccctacactgataagggagattataaccatcaagtctaaccaaaagcaagcatgctagtgctatgcatagagcctgaagatagcatcatatcctcccatccgggagccgaccatgcctcatcccatagtggttggaagcacttaagtcatgacagtggatgaagggtctctaatccgagctctaaccgtctaccaagccagcctggatgggtgaattgacatagatccgcaagacgacacctctgacagaggcctataacccatcaaagagcttgtacagctgtaactcagacctagaccggtgtagtgcactcggcttagtagggacctcactagttatgagcaccagcgcatcgccgacatgctatgcaaaaatgcata

SEQ ID NO: 43840 - DNA, 431 bp, Glycine max
  unsure (1)..(431): unsure at all n locations
gtggcattccttatatcaccaaaatctcaactcaatcacctttatagtcctactgaatcaataaaaagtaacttgtagcaatttggtgagtaattcaacactatatataataactacatctgcctgtgaaatttttagaaacatatacatatcttacatgaacttaatcttaattctaggatgtgtcgagtactatgtactcatttatgaaagatgaanaattcactcatgttaatntggaagggattatagaatgcaagattgtttacaatcacgggaggaagactgcaaagattggttctggatggaagtcttttgcaaattcacaaaatctagaacttgcccaggagattatatttgagttcccagatccaaaatctaactttgttctattctagatntagttggaatttaagtgcattatactctac

SEQ ID NO: 43841 - DNA, 449 bp, Glycine max
  unsure (1)..(449): unsure at all n locations
agctntacagcagaatttagtaatgatccactatcctataattaanataacttaatgccattaacctatggaattaaaaaaacttaatggctagtgtaactgaaattgtggcaaccaatagtcaccctcaacagccaacaagtcagccaccatctggtctcccataaggctgatgcctatgttgccaattgngcccttattacaacttgaactaaacctaactaaagcccttttagttgattaacccaaaacatatttttggtcagccaactatacaaggattgggccattatttatacaaactaaacactctaaaattgaaacaaagtggtgtcatttagtcctcctccatttgggccatgatacaactcacaaccttggacttttctccttgaaacttgngcttgtattcanacagtatggacaacacttgttgaagagctttcttg

SEQ ID NO: 43842 - DNA, 461 bp, Glycine max
  unsure (1)..(461): unsure at all n locations
gatcaanttggcctgacctaacctganaccaantagaatatctgccattagcgctgcgtttagacctaaattttctaagagctctcagaattcaaatgtctaatttataactccatgtccgattcacgccccatacatatctagacactcgaaattgaacgactgattttctctagaatttcaaaggtcatcacgtgttatctctcatgtccgattcatgcgcatatcttatcgagacgctcgaatttaacacggatgtctcgagaactctaatggtataactttcactcgctgtccattctgcgaaacatattgaacgctcgaattgtcaacagagctctcagaattcaatggctactttcactcgagtcaatttggcgctgctatcgaacctaacatcgacactgattctcaaaatcaatggcatactttcactccatcccatcagcctaacaatgaag

SEQ ID NO: 43843 - DNA, 387 bp, Glycine max
  unsure (1)..(387): unsure at all n locations
tagataganacattgaacacatganaataaactcttatagatatttaacatatctacatcaagtacttagtagaaattcccgacaaaggaatttagccctccattacaagggagcaactntcacaaataagagaagggttttagagaaaataccatattagaaagcagtggcgatgtctcctccacctctaaaacctagaatctacctaaaagttatgacctttgcttccttgctcagcttttcctctattctctgcacacaattcgcagtcaattcagacctctttcacgtcgtcacgctctctctttttttctgcacaaatcacgcttataaagggcnttctgacctcgacagcgcgcttagcgtgagtaagtgatatttggctt

SEQ ID NO: 43844 - DNA, 250 bp, Glycine max
  unsure (1)..(250): unsure at all n locations
cacaacaatccgctctcatatgggatctaacgagcatagtnatcgtctccataatggctacatctactaactgctcaccatttctctttaggtgattggaaacagcaagaattcttggagaataattggaaatggactcttactctctcatatgtaaggagtctcactcacctcttagagtgtggagacacacctgttttactctgtcttctcctttgagagaggttagaagcctatcacatgcctcctt

SEQ ID NO: 43845 - DNA, 440 bp, Glycine max
  unsure (1)..(440): unsure at all n locations
ctctaaagttgatttgacaagtgggtatcgtcaaattatgattagagagggggatgaatggaanacaactttcaaaactaaatatgggtggtatgaatggctggttatgccctttgggttgaccaatgctcctagctctttcatgagattaatgaaccatgtgttaagggaatttctangaaaatttattgtggtttatttgatgatatcttgatttacancaaattccatgatgaacatcttgttcatttgaggagagttttaaaggcccttaggcatgagagcttgtatgctaacatggataaatgtgtgttctgtntggaccatgtaagtttccttggttntgttgttagctcatacggagtacaggttgatcaagaaaaggtgaaagtcattcaagaatggccaacccacaactgtatgtgaggttagtaactttc

SEQ ID NO: 43846 - DNA, 470 bp, Glycine max
  unsure (1)..(470): unsure at all n locations
agcttgtgcattcaatatcccgatgaaggtgttccatatgttctcaagactggactaatacatttactgcccaagtttcatggtcttgcaggtgaagatcctcataagcatcttaaggagttccatattgtttgttccaccatgaagccccctgatgtccaggaatatcatatctttctaaaggcctttcctcattctctagagggagtggcaaaagattggttgtactaccttgctcccaggtccattttcagctgggatgaccttaagagggtgttcttggagaaattcttccctgcatctaggaccactgccatcaaaaaacacatttcaggcatcagacaacttagtggagaaagcttgtatgagtactgngaaagatntaagaaattgtgtgcaagctgtcctcaccaccagatttctgagcaactccttcttcaatatttctacganggacttanaaacatgga

SEQ ID NO: 43847 - DNA, 490 bp, Glycine max
  unsure (1)..(490): unsure at all n locations
tcttatccaaggctcatcttggtggtgaagctccttcttccatggcttattccctagtggatggcgcctcccttctcctcttctcctttgccttccgctgcatctccatggtgaaaaatcaccattgaaggacctcattgaagctcaaagatccagcctccatagaagctccacaagcaagcttccatcaacaggtcaggcttagcactgaacaaaaattcccaaaatcttaatgtttgaacactangcctgcttagtgcacagacgcgcttagcgggctcatcactttcgttcatcaccagggatgaacacgcttagcgtgacatggtctgcttaccacgatcatttggaaatccaaaattttaacaattgcaaggaacaagctaagcgcagcaggcgtgcttagtgtgttcatcatgatttccaaatagaaccacaggggtcttcacccctttcaaccacattgcccctactgngcttctaagtacct

SEQ ID NO: 43848 - DNA, 364 bp, Glycine max
  unsure (1)..(364): unsure at all n locations
agcttggagttgcaatagtgctaaggtttctgtgtttanttactccatattggcgacaattaacttgtggtcctgtctcatgattctaagtttaatgtgctaagttgtttcaagtttggtctttggcaagtgtgtacaaagatattcttgacccgctgattaataagaaacgttcaacacctataggatatgaagagactattagtgtattgctaaattgctgatttcttaatatgatgcacggcttactcaatgatgtctactccaatatcaatgatatagagtctcgggaaattgatggcatctgcttataaaaattcaaatactcagagttctatttccttaatatctctggtctataaag

SEQ ID NO: 43849 - DNA, 468 bp, Glycine max
  unsure (1)..(468): unsure at all n locations
accccactattacccacaaccacccaccanacttatcaatgttaagaaaatgacatcggcaganatgcagttgagaagagaaaggggcctatgctttacttgtgatgacaagttttcccctagccatcgttgtcctaataagcaatattttgttccacagtgggaagaagaggatgaacctgcattacaaccagatccaccagacgaggttgagacagctggtgaccctagtttgcaagatcatcatttgtcttataatgctttaaaaggctcatcaagtcttggaacaatgaagtttcaaggatcaataaatggattgggagtgcagattctactagataatggaagttcagataatttcctccagcctagactatctcaatgcctgaagttacctgtagaaccaattcctaatttgcagggtttggtgggaaatggaaatgccttgactgctgaaggattaattct

SEQ ID NO: 43850 - DNA, 400 bp, Glycine max
  unsure (1)..(400): unsure at all n locations
attctcttctctagggtccatcaattctactgctccgtgaggtctgacttctttgattatgaacggccctgaccacttggacttcagcttacctgagaatagccttagtctcgagttaaaaagtagtacttgttgccctggctggaattctttcctttgtagcttcttgtcatgatacgccttcatcttttgcttgtagattttggatgactcgtaggcgttcagtcccatttcttctaattccagtaactttagattcctcttttctccgcatgcactgtcatcgaaattaagcaatttgaaagcccaatatgctntgtgctctagctccactggtaagtgacatgcctttccatatactagcagaaatggtgataagccgatgagaatcttgaatact

SEQ ID NO: 43851 - DNA, 473 bp, Glycine max
  unsure (1)..(473): unsure at all n locations
ctgccttcagcctacctgcgtccctccaaaagcttaccttcaataccttctctgcctgcgtaactcccgcaccccgccgcacccagtcgccgccgcgacaccaccccttcccgcagttcgcacgcgcacgcatcgcgacgagccccggcaagcacaaacggcggcgacgagccccggcaacgcatgaacaagacgcgcgaaggaagaagacgaagtcacgaagaagaagaagaagaagacgcgggtcagacctgctctttttttttaattntgttttgggctttttgctgtttgacaccccatttttctgtctacagctttttttttccttttgctatttcacacctttntttactgttaacagtccctttnttttcgtatttgaacaccacaatttttttttctgttcagacctcttttaaatggctgaaccatcatccaatgctgctactgcaagtgcaacgaggaaaaat

SEQ ID NO: 43852 - DNA, 445 bp, Glycine max
  unsure (1)..(445): unsure at all n locations
ctaagcccttatcctggaaattctggtggtgaagctccttcttccttggcttattccctagtggatggtgcctcccctctccttttctccttttccttccgatgcatctccatggtgtaaaatcaccattgaagtaccccactgaagctcaacgatccagcctccatagaagccccacaagcaagcttccatcaagtgatatcagagcacataagcttcttgtgtcgagggaaggagcccagagtatgaagaacctcgggatttgaggtcaaatcctttgcaagatggagaggatgatgcaatcctaccccccaagggtattggatagaagactccaagaggcttatgctagagctactaaagaaggccctagggttctcatgaaccttanggtagctatntgagcccatgggtcaaggttggatcaactattctttgtaaatat

SEQ ID NO: 43853 - DNA, 382 bp, Glycine max
  unsure (1)..(382): unsure at all n locations
actacgctattctcaatggacatctcgtacatctatttttgataccttttatttggtcctgcataagctctggctgtgatatcttttattcatacatattgtggattgctgactactaatcttgggtattatgtgtggcaccaattatttatttatatatatatatatatatatctcaagttttaaccttgtctgcatccttggtgattattggatatgatataactgcaattctagctaaaagctgaaagagtgactcaattatgcttgtagcatcatctaaattaaaaactgggcgtgtgttagaatgagattattttngtatgtggacatgctgtcaatcaaactgctcgagaactattacctgaacagctattttgtg

SEQ ID NO: 43854 - DNA, 480 bp, Glycine max
  unsure (1)..(480): unsure at all n locations
acttactaaaatatgctcnacaattaattattataattaaggaattgttgacacgtggttccatgtattttcattcaatttagtgttgattaaaccaacccaaaacatcttttttcaaatgaaaaatcacttattttattgaaaaaataaatntaaataaactcactcatattctattgttattcctatgtactttgttaatctttatttcaatttttagttaagattataaatataagtaaaaaaatgaagagtatattataattataaagattacaatgaaatataattatataataaaatgttagacaattattcaaaatattgttacaactataattttaattttctttctttataaatatatttatttaataaaataatatattttatcataagagtctaattcaattcgttgaataaaatgtgagtngttgcaaaattcttgatgtgattcgtagagatataaaatattaataa

SEQ ID NO: 43855 - DNA, 399 bp, Glycine max
  unsure (1)..(399): unsure at all n locations
gcaagcttgcttctacaattgggactttntcagccatctcaacttaagcctctattangccatcaaatcctaacgaatatatgtcaaaataagatacattgtatgcgaatcanaacccctaacactattctaactaacaactaacctaacatcatgcagtcaaaatgaaaaacaaggtttaatgaagctttcttggatcgctgaaattgtatgcaaagaacgaagcaaggagaacaagctaagagtgagagcacaaagaagagagaaagctccaacgaaatgccaaaatgtagtttaaaagcacaaatgataatgtaactgccanaggcagctatgccttatnntttggtggttcgaatgcctcgcttagtgcgtcaactcgctaaatgagcatacatg

SEQ ID NO: 43856 - DNA, 435 bp, Glycine max
  unsure (1)..(435): unsure at all n locations
tctttctcaatcaacctgtctactgactgacaattctaatagcgcgctcacattcttgttctttcttggtctaacatacatacttgctcaaactcatgagtagaaacacgaaatccatcacaatcatgcattcaatccagaatctattcataacaccaatcttcacaaagagataaaagtgtttcactgcaatatcatcaaagtcaagttaaactgctccatatgcttcanaacaagcatactagctaatcacagaaagtataagtatataattataaacggaaatcaaaattactcataacaatgtactataactagcatagttataatcattatccaaaaagaataatcatcaggacattaaaagtcttgagatagatcctgagtatcctgagtctgaacatgctgctcatctgtcacatgaagtactggagt

SEQ ID NO: 43857 - DNA, 392 bp, Glycine max
  unsure (1)..(392): unsure at all n locations
tcgagcgtctcgatatatttctttactcattcngacatgcgagtgacaatgtactgtcgtttgaatttgctcatagctacaacattcaatttcaagcgtttcgatatattactggacttaatcagacatccgagtaaaaagttattgttggttgaatttgctcagagcttcgatattccatttcgagcatctcgatatattacgggactcaatcagacatccgagtataaagttattgtagcttgaatcttgctcaggcttcngtattccatttcgagcgtctcgatatattacgggactcaatcagacatccgagtaaaaagttattgtcgtttgaatttgctcagagcttcngcattccatttcgagcatctcgatatattacgggactc

SEQ ID NO: 43858 - DNA, 500 bp, Glycine max
  unsure (1)..(500): unsure at all n locations
ntatcgtgactntctnntgtttgcagaggaaaatgcaaggatcatgcatgagcgaacatgataataaaaggtgtgcataataagatgttagatgcaaatgcatggtgaagaaatgacttatgcaaaatgcaatgcatganatgataagtgacaaatgcaggaatgatatgtccattatgatgccatgaagagatgcttatgcaatgcatttatggacacgagagcctgannaatcatcttttcttacttgcgcatttgggggcgcagtgctccatgtgtgcagttaaaaaggtggtatggaccttcctgcttcctgtgacaaaagacgagtccaacatacaacgcgtgcgtgatgatatgatgcagacgcgcaaaagcacaacacanggatgtacacagtatggcaatatccataaataatcatagagcaaaggcatacatgacatcttggttatatgcatggcagtggttaaaaggcacgcaatgtgtatgcttcgtgc

SEQ ID NO: 43859 - DNA, 431 bp, Glycine max
  unsure (1)..(431): unsure at all n locations
agctntgagccanaatcccaacttatcatattccttgtacccaggtgagaatgtcaatccttgccctcggaagaaaacaaaaaaagagaaaaggaaaattcccaatcaaagagtgggagaaagtaaaaaaaagaaagtccccgatcaaagatcgaaagaaaacataagaaacatgcagaaaggtctttggaccagacaatatctgaacaatacagaattgtcaccaaataaacaagaaaaaaggaaaccacgacctagagtggccctctccctttgattgccaaccaaaatcctttgcgctagcgactttctcgccccgcactaaacaaaaacagaagaggaataggctaaaacactctaagccaaattccccacctaanaatcattctcnaaaaagtcctattgatccatgatcacgcatgtatatcttg

SEQ ID NO: 43860 - DNA, 409 bp, Glycine max
  unsure (1)..(409): unsure at all n locations
agatgaggaagtgttgaagggtgaaacttcctgctcttattgttgaccacagagtggtacctggagatatgtcgcgggggtcaggagaccttgnggacgtcaggtggggtgctattgcccaaaaccaagcttgaccaatcccgacccaacccgggcatagtcggtcagtgagaacctgtgatgtacctaagcaggcgagctcctggcagtcaacagattaaagganaacaagaccacaaagcaaggaggcttgtgatggctggccagctgtgaattttgcgtaatatgtggattgtggcctctggtaatcgattaccaagggtgggtaatcgattacaaggcttataattgaagacaggaggctaagatggtctctggtaatcgattaccaaggggtgtaatcgattac

SEQ ID NO: 43861 - DNA, 453 bp, Glycine max
  unsure (1)..(453): unsure at all n locations
ggtggatctcgacgctttactgaatgaattanagtccatgctcaaggagtctgagctacgggctgctagagagagggaggccaacaaggagcttgaggaggagtttttcattttcaagaatgaggccgtggagcagcatgaaatagggccttaacaagccgttgggcaagctgggttcttcaccaaagaccttgacttgtgtctctttgacccttttaaggacgtgaagaatggtgttttgcttgacaaagacgatattgctgctaaagatgagtaaggcgatgatgccattggttagggtgcctttcgtttattttcttctcttctccattgattgaatttagccgcatgggccttgtaatatgacaaattttcttcataagctntccttcgatgacanatctcgcactatttatgtatgtcgtgtgtgtttgcctttatctatagcatgct

SEQ ID NO: 43862 - DNA, 404 bp, Glycine max
  unsure (1)..(404): unsure at all n locations
cagccaagctattcagccaagcaaaacagagcagaggcagaatactctgctcaaacaccaaccaaatcacagcttttctcacttaaagaccccagtaacaattccttcgatccaattcgttaaccgttggatcgactccaaaatattactggaagtctatagtacataagcctacattgtgaccgttgggatctactangaaacatccagaactcattttacattactctttccacaaccagcaaatacatagcatgtttctacacttgtgcaatatcctgttgtacaatgtcacaacaaaaatctgcacatagtgcagatgtcgaaaatcacacttcctctcatccaatcttgcccaaatcaattcctacaagttccaaatcatgtatcaaccatgtctaacc

SEQ ID NO: 43863 - DNA, 439 bp, Glycine max
aagcacctgcggctgcagctgatcccacaatccaccataatgtgtatttctcccaacggagctcgctctatcaaatgcaatccgatagggcggccatggcccttatctgccaatctatcagcaatagagtagccttctatgagagtatgcgtaattctctaaccaaattctgtcaacccaatcataaagttgcctgataataaccaccatcgggtgattaatgatcacctaagtatctagaataagcttgttcacagtaacataatcactctccaaccatattgtatatctaaaatctatttcccaggccagcttcaacctatatagaattcccatcaattcagctctcaaaacagtacatgatcccagattgaaagtgaagctcgtcatacaaatgtccatactatatctaattgcccctccacatgcagccttgctt

SEQ ID NO: 43864 - DNA, 725 bp, Glycine max
  unsure (1)..(725): unsure at all n locations
acattctctcgctcctcatgccatccantntaatcntcgtgntggtncgcgccgtattactaatatannannnntaggaggggnnnnnttttgatccatgcagncgcagacacagananacnangccctcagtagcacattaaatcttatcataaatgagagaccgaagtattttatatcatttacatcacacttcagatgagctgcaagaacgatatgtgatctgtataccaantcaaaccagtacttggagcatacatcctattattataactatctgagggagagccctaacttaagtgatgaacatgcacattaagcacccttacctggacaactgtgaattatatcatacaagttgatacactaaggcaccttatacagtgccttcattttaatataacatttactctgctgcattagaatatcataaagctcacgtattgataatgcgtagccagtttcagctattcactagcataatagaaatcaatattctcatcagatgcatacctgattcatccaaacctcacaacatgactttcaacggtcgtcacacaggcatatataaattgtatgttcaccatagatatgagcaagtatacatatctgatnattcgaagccctgctctcgttcaacgaatgcataagtttatcgttagtaactactagctgaccagtacctagatctgccagtttcaatagttaattcctgatactggttg

SEQ ID NO: 43865 - DNA, 296 bp, Glycine max
  unsure (1)..(296): unsure at all n locations
actttatagcttctgctagtggaaacatagcaagttaagcttagtttatcaagaattactagcaagtgtgaagtgagaggcttatggtctagactttggaaaagaaaataacacctttaccccattatatgcaagtcaccacctatggttgatgagtgagaattaaaatgataagctaggctnttaagataataataatgctaatcaagatgagattaagatggatgtaatatctaccactctacttaaaaaaagggaggcagtaattaccatatgaagatgatggatacatgatt

SEQ ID NO: 43866 - DNA, 231 bp, Glycine max
  unsure (1)..(231): unsure at all n locations
acaatctggtaacttgaatatattctcactggtaaataattgtcaactgtgacggatcacgttatatatcgttgctatctaaaaagctatttcattcttaatttcttaatgcatgtagagttctagctctgccctatattattcctaccatattctatanccaaccatacatcaaaactcttgctgattataaaaaccccgttctgtactgtcctttctataacttaaact

SEQ ID NO: 43867 - DNA, 463 bp, Glycine max
  unsure (1)..(463): unsure at all n locations
tgtcctcttgtagctcntcatatcttcatctcattctactaccatcagagatctcattcctttgagtaaatcgataacaattgatcactcgtgttgtcatctcattcactgganaataaagtataaatgatcattcatgtcataacctcgtggttatcaatgctaaataaagatacaatcgagcatgtaatatgcaagccatcttttaatgacgttgaaacgacataccngaaaccaaagttaaattcaacacataaacaagctgttattcacacaaatcacttgaatccatacaaaggtccaacaccttagtggtatcttttgcttaatcaggtaaaaagacacctctaatagattaaaactaactctacccagatgattcttgcttataatatctatatgaggtaaagtgcctcacagcacttacgatacacatgaacaacaccctcgcatctgtcgaccg

SEQ ID NO: 43868 - DNA, 296 bp, Glycine max
  unsure (1)..(296): unsure at all n locations
agcttatgctgcagacatgtatattttacctctttcgcagcaagaaccacaacagcagaataattatgatctntcaagctaccgatccaattcaggatggaggaatcatccaaatctgagaaggacgaattcatcacaactacaacagtctgtccctcctttccagaatgttggtggttcgaacaagcgcatatgttcctcttctaatgcagcagctgcatcaacagcatcatagacttcaagcaactgagaccccttcttaacctttctaagaagagttgatgaagcaaatgaac

SEQ ID NO: 43869 - DNA, 453 bp, Glycine max
  unsure (1)..(453): unsure at all n locations
agcttggtagattcagtctgacgatggatctatgtttantaattngggctaacacatagaacacaagagcatgattgattagagaaatatatttatatgcatcagcttgtttgtgagaaagacccaacatttctacctaccgctgtgatcgaggccgtacccgaatcaaataaacattataaatgcagtaacctaggtagtgatcctaggtcatttcccaacgggcaatgactaaccaaatgttcataatatgcttcgtaataacagtaacaattgggggggttgtttgtnttgtgaattaaagaacaagccaattggaatacgaaattaatagtataaaaaacgtgttgtttcctctgattcagaagccattctcttgtcctatggtttgaagaattcgtccataacagttaaccacttaatccaacccctatttatattactgagcgaaaa

SEQ ID NO: 43870 - DNA, 478 bp, Glycine max
  unsure (1)..(478): unsure at all n locations
caaagtanatcaacattcaaacagctcatattaccacagccaagaaaacagggcaaaggcagaaaactctgcccaaaacaccaaccaaaatcacagcttttctcacttaaagaccccagtaacaattccttcgatccaattcgttaaccgttggatcgactccaaaattttactggaagtctatagtacataagcctacattntgaccgttgggatctactagtaaacatccagaactcattctgcactactctttccacagccaaccacacacaagcatttttctgcacaaagccaaaatcctgctgcacctattttgacagcaaaattctgcataagtgcagatttcgaanatcacccttcctctcatccaatcttgcccaaaccaaatcctacaagtcccaaatcatgtatcaatcatgtctaaaccanagtcaagcttcanaacacaacaacacagaatctatgtgtctcatac

SEQ ID NO: 43871 - DNA, 485 bp, Glycine max
  unsure (1)..(485): unsure at all n locations
tcaagcttgaccaggaattattgtattggttggttgttgaattctggttgttcctggtgcggagatgatggtacagcgggtgaaccaggagcggcagtttcttttggtgaggaagccatggaaaaacagagcgtttggaatgatttcgtaaatctcagaaaactattgggaaatgctggagaaaacacgaatgccaagcagatataaatttgaatgaagaatgtagaggggcgtgtgaagcaacggtcgaatttgctttgtggtgaacgtgctattaatgttaagtgattcgtttgggcacgttcagattgcagtagctgctataattcctctagcagacaaatgcccagcttgcccctcagtttttcaaactgattngcatccaaagcctttgtgaaaatatctgctatttgttcctcagtgtcaacatgcttcagtgtgatcactntatcatcaacaagatctctgatatagtgatgtctaat

SEQ ID NO: 43872 - DNA, 394 bp, Glycine max
  unsure (1)..(394): unsure at all n locations
cattattgccattttcactctctccggnttcttcacaaggtaccaaaataaacaagaaattgtcatgatcatcccaatcaattttcctgtaacacagttaaaattctcaatatactagaataatttaattaaactcaattgcttgttacatgataattaactggcaaagtaaacgccctatcgtgtgtgtatgtcaatatgtgtgttgcgtgagatttctgcacatataaacagcgtttacacatataaaaaccgctatctagtaatggattcataacaaatagtgttaaatctgccaatgaagagctgaatcatcatgttagaattgcacacgacagtaattattacaagttaagttgttccatgttcactcgtatataacttcttatctgtg

SEQ ID NO: 43873 - DNA, 138 bp, Glycine max
tgtatttagccatcatcaaaacattcttcgaggaatttaggttatctagcaaacgtggtataacgacttgtgaatattcagatttattaaaaacttagggactgatatattttcacgaggtaacaaactgcttctgaa

SEQ ID NO: 43874 - DNA, 636 bp, Glycine max
  unsure (1)..(636): unsure at all n locations
aactcgccactctctnacatcttaatactatcaaatactgcacaagntgtcagactnnctncncgactnnnnaaaggggnagaagaganatgaaaccttgtaacaatcgagaacncanagacnacctgcatgcatgcaagctagatcagaatccatttcgctgtgatcaatttctgttgagcatcaccaaactaatctatgttaccatcatgtatacttagggcatactcccgccaccccacctcaacatattacaaaggtctcatacagaaacctgtgctagctcacacatgtggaccaagacgacctcgctagctcataacggatatacattgaaggacactaaatatcataccatgttataattggattctagaaagtcgaaacacaactgtctcacaagtataaccacactaactacgccattaatagacttcgtgataggaggggagaatggatgaagaattgatcgtaataataaaatgaatgctccatccacactatgtagatactatacgttaatcatacattacgttgtagagatctatgaaatgttctccaatctccaatcatgactacgataccgcataagtgtacccaacgctacgatacactgactaagatatagcttattct

SEQ ID NO: 43875 - DNA, 484 bp, Glycine max
  unsure (1)..(484): unsure at all n locations
tcatttatcaatagagacaaggtgagttttattcatatnattagagtttatctcttttatcttagtgagagtgattctcctaaattcttgagtgattcaagaacaccctggctgtatcaaaggactttcacaacctttgtgtgttgccctcgctagaaagagtgattctttccttcctttcatcttcacccttgttctttcaaaccacaattccagaatatccacctctgcccagaattatctcgtggccataactcccattgtacgcactcaaattaagtgattcttgagcctaaattgaatntcaaaacgagacatttcacctcgttttggaatcacctcatttggagtcctgtagcttcagttattgccatttctatatttctgtccagccaccacttaacctacngtttaccatcccattcatccattntatgccaagaaccaccttattaagacccacggaattaaccaccttattttg

SEQ ID NO: 43876 - DNA, 477 bp, Glycine max
  unsure (1)..(477): unsure at all n locations
catgcaagcttacatctaaagcaacacactattggtatgctcctgatattcactantcgatctcgcaagcaactcgattatactagcgattgtttaccacatttcagcgtatacacaaccttaattataaacaaatattactagtttgctactactatctaaatcactaaaatatatcctttctttatgttaaacctcatattcctcattttcattaaattacaaaattaaacaagtatcataatccatacaaagcatatcacgagaacaaagttaacataaaaacaatttcaccaagttttcaaataattcacccgaataaaatactagataaactttattgaaagccgacatcatcttatttcaactagaagnttcactttcaggagttcacactattaaataatgcctgagttcttgactcatgatctgctgcnatgaaatctcacgcaaaggaatgtctaatggtgtatgctg

SEQ ID NO: 43877 - DNA, 501 bp, Glycine max
  unsure (1)..(501): unsure at all n locations
atgggtaanaggctcacattcactgtcttctacatcatattcaaacttgtccatataaataataaagtcatctcgactcanagaaagtcatataagtctcatacaattaatatagaacctatatcctaatgtcacatcctatcagagcgtggtgttcccgtgtcctctagcatgaggttcttcatagtcatccacctattcatctgctcccccgaacacaaagttcaaatcatcacaggatcgaaacacaaacagcaaaccgggagtgagttatcacattgctaactactatagagaaacaacacaacatatagtaaccaaatacaatttacttagcatatctcacattatttcatcactttgtcattcatcaatcacacttttcatccattaatcacacctttcaatcatcaatcattatacacaggaatcacacactccgatcaagacataataacacatcaatttcataatanacaattagcaagcgtatgcgacagt

SEQ ID NO: 43878 - DNA, 485 bp, Glycine max
  unsure (1)..(485): unsure at all n locations
tacccatcacatgtggtactatgtggcggtcgggcgatggtgcancaacaagttttcacatccacaatgcgcgcataaacccaccatcccctgttgcccacctccaactgagctcacgtactcccacgtagcccatatcctcgtttctctcaacaccgggtccccatcaatcctcctaagcttccacaacatccaagcaaaacaacattcaaacagcacaagctatcacagccaagcaaaacagagcagaggcagaaaactctgccaaaacaccaaccaaatcacagcttttctcacttaaagaccccagtaacaattccttcgatccaattcgttaaccggtggatcgactccaaaattntactggaagtntatagtacataagcctacattgtgaaccgtgggatctactagcaaacatccagaactcattctgtactactctttccacagccaaccacacacaagcanttttctgcacaaag

SEQ ID NO: 43879 - DNA, 301 bp, Glycine max
catgatggctctcgttcatgcgctgatataggtgactctatcttctagattattgactcgtcagtgtaatatagtgaagcggctaagaaattctgaattgttacagctagtcataacgtgtggcactacatagtgcatagattagtagtcacctaactgaagaaataaagtggataatattcattgcttgtcgtggtcccatataatggctcacacacatatgtatagtcacactcatctaggtttctctagcattagtgtattccatgtttagcggagcaatgttctgagaaatcagaac

SEQ ID NO: 43880 - DNA, 182 bp, Glycine max
  unsure (1)..(182): unsure at all n locations
acccagcgtttataggatctaggatnagggctacgtgggagtacgtgagctcagatggaagtgggcaacagagagatggtgggttatacttgatttatggatgtggagaattgtcttgcgccatcgcccgaccgccacctagtaccacatgtgatgggtaccctcatatgctacaactttga

SEQ ID NO: 43881 - DNA, 228 bp, Glycine max
atgaggaagagaacacgatggataaatgaagtcactcgattgttctgcatgataaaggatcaaggcccccttgagctatgcaagttccactctcaaatatggacttactcctatattccgtagacaaggatctgtgtataggtgggatatgagggtcttgtcttgggggttcacaaaaactctctgtgaggtcatgtatgctggcatgattggaggatatgttgagaa

SEQ ID NO: 43882 - DNA, 292 bp, Glycine max
tctcttaggtagcgcactgctattttcataagcttactaactgcaggattgtctgtgtcacccaatctttcacattctacctgatcccacctagaaatgaatattattagtagttatatatatcattaatctagttgatctcattacatagaaacaactttgtagagactctgataaaatacgtgatagaatatgtctatctctgacattgatatcgtcaatacatacggagattaaaatccgcacttcttacttgttgtaactcacacagaagaagtactatgctctgctc

SEQ ID NO: 43883 - DNA, 363 bp, Glycine max
actgaatatgagaaatagattctccttatacctaaaaatacaatagatgtgcttaaccataataatgtatacagtaataacttcatgggcataagagtatgctgctctcggatccatcattgagtgaagaataataactttgcttttccactaccaaacatgtggaagtatttttgcttaagcttgacttcaaactcccctttaattgcctcattctcacacaaatgtccaccatcctaccaccaaaaaattttcgtgtctgatgttcgaaaatgatatgtggtcatactctccgggattcgtatacgaattatccaactacatgcaacttcatattcacatactttatgtaaaaaacactat

SEQ ID NO: 43884 - DNA, 459 bp, Glycine max
  unsure (1)..(459): unsure at all n locations
cttgattttatcttcaaactccatgaatacaggtttgggtgcttgctttctctatcaaagcttaaatatttgtgtgttcctgagccttcttcgatgttgttttctcttggttttcttgcattttgggttcatatctatagcattgggtatctttgtgaccgactgcaacaacgaagaaaacaaatagtgtccgacatttagaggaacatgttgtgatgtatttcatttctccaaaaagctntgattttgtatgcattttctttccggttttttgtttttcactgcatgttcatcgtttcttataaagcttcattcttatctcaaaaaactttgatttttatctccaaactccatgaacacaagttcgtttttgtgtttatctcaaaagcttcattatgcctttaccctctgatgaggtttgggtgcttgtttccaccccgtctctctatgttcttttta

SEQ ID NO: 43885 - DNA, 500 bp, Glycine max
  unsure (1)..(500): unsure at all n locations
gctgtaatatctgccccatntgtggaaaagaacctgataccgtctaacatgtgttcctggtttatccgtgggcacgacccctttggtttggatgtgatttctagtggtgcattgattccaatacagttcanatcttccaactttggctttggcagaaactcgtggagattcaaagggtatgtccagaaaatgccaaccaagtatctgctcatgtgggaagtatttgttgagctatttggaaaggaagcaatgaatttattcttgaagganaacctgtcaatccgttgattttaaggcagggcatatgtgtatatgatgtgaatgaagagggctggaattntcaatttttaacaagatatgtagcttanaaattggggtgtaaaaagatgtcatatcacccttgaatttttatttattattcgaatgactnntttctaatgatanagtgggattanttttaaagatactcaaaataatgtggtgcaatatgagattatggg

SEQ ID NO: 43886 - DNA, 408 bp, Glycine max
  unsure (1)..(408): unsure at all n locations
tacttgaattgtgacctgcgagaattgattcgcgcaagattggatgatgggaagtgtggttctcnaaatatactctttgagcagaatatgcttgtaaattgagcagcagaattctgcacaagtgcataaaaatccatgtatttgctggttgtggaaagagctatgtataatgatttttggatgtttgctattagatcccaacggtcaaaatgtatgcttatgcactatagacttccagtaaaattgtggagtctatccaacggttaacgaattggatcgaaagaatcgttactggggactttgagtgagaaaagctgttatatttgtgtggtgatgtggcaaatgtttctgccattgctctgttttgcttggctgtgatacttggctgcgtgatagtgtttgctagat

SEQ ID NO: 43887 - DNA, 471 bp, Glycine max
  unsure (1)..(471): unsure at all n locations
tagttaaatgagcttcattgtccatcctagacttgattcctcttcattcccttgttcaattctagcttctctaataacttgaaactatcattntgtttgctcatgaagggaaactttntaaaaactgaatattctccattctccttcaagatttatgaatttcatcaagaggtaaggagggtctctcatatgcttgttgttgaacttctttgaacatcgttgttttgaaattttgagcttgctgccatgtcctaaatctgtgttgagatgttttccttgagattttgatgccaaaaatgagttatttgtatgttaaaacatagagttagccttaaatctcacttaaatcaaagtttcttatcaaaagttacaaacaaaacaagtttaatgacctttagtgaaatgaanaatttgtcatgaattttgattgagaattacaatagtatgaattgttttattaaagtttgacct

SEQ ID NO: 43888 - DNA, 614 bp, Glycine max
  unsure (1)..(614): unsure at all n locations
cacccttccctacnntccttagantccatctaacctcgtcttttcgctgttgactctatcaantnaaagaaaaaacgaaattgaaattgtatcattgcatgccgngcncnntaganagactgcaggctgcaagcnngaagacaacattgaggcagtagcattcttagcttacctattccaacctctgtcacactagttgaccataatactataatccctcagaacaatacacgttccattgtcataatccagaaaataatctctcgatccgcaatagcttatcactaaacggttctgtcgtccgtcagttatacaataaatgactccattgaaacgacggtcactattggaacgagcgcatgactaatattggatgcaacctacttcatcaatctgaatagtccactgcacgaccataaatgatattttctacagaaatttaatgcaatatcatagtacatatgagactatcttctatagccaaatgcaataataaccaagctcacatagtatgctacaatatcaatcatatttaaaaataactatccttaagcaagttctgctaacatgtgtgcatctaacaactcatcgaaatggactcgaacacggcaacg

SEQ ID NO: 43889 - DNA, 194 bp, Glycine max
tttggatatataattgcagcccatagatgatacccatgaatatcattgatcctttatcatcaggtcgtccccttgtctagacatgctatccttatgtcccaaatcttgacatgaaaacattgttacttcttaccacctttgctggattattcttgcaacttctgtggaatctactggaatatacaagatattga

SEQ ID NO: 43890 - DNA, 402 bp, Glycine max
agctttgagccaaaatcctgactcaccataaaccttgacccagagtgagaatgtcaatccttaccctcggaagccaagaatataggagagaaggaatatttccaatcaaaggaaaaaaggagaggaaaggatattcccaatcaaagagtgggagaaagcaaaaagaaaagaaagaatattcccaatcaaagaatgggagaaagaaaaagagaaggagaagaaggaaggacagctcctgatcaaggatcgaaagaaaacagaagaaatgtgcagaggggatctctggaccagacaatatctaaacaaatacagaattgtcaccaaatgaacaaaagaaagagaaggaaaccataacctaaaagtggtcttctccctttgattaccaaccaaaatcctgtgcgt

SEQ ID NO: 43891 - DNA, 493 bp, Glycine max
  unsure (1)..(493): unsure at all n locations
acgaattggtaagaaaaacaagaagaaaattatgagcctcttaccaaagctctgatggacgaaacctcaagaacacttgcatgaatcttagaagaagaacgatatggattcctctctcccttggctgaactcgtgaaaatgaggaagaaggtcccaaaaatttgcttttaaagaattgtgaaaataaggtctaaggcttttgtccaaaagaaattttgattaagcctaattgacaagcttaattgacaccatgattgactaatggccagccatgttgaacgtgctaagtcatgcttccgatgggtattattgcttttgaaatttanaccacaaatggttaaagtagacatacgataaaatagtaaaaattgttntcttaccaaagctcgtaaatcttatcttacatgtctagattaatgtgctaacttcctagactattgtgttaattccctcggatacatgtactcaaataaacctccacagaacatataca

SEQ ID NO: 43892 - DNA, 465 bp, Glycine max
  unsure (1)..(465): unsure at all n locations
agctngctacanaaatntcaatctataaagctatgtggagataggagttcttctatgaataatgagctaaaaatgcaatttcagttatctatgtcctccattntggtgtacttgtttcttgcagctttcaccatagaggtaatgctcatctactttggcagtaaatgaaaaatgaaacatccacaaatgactccatggattgatcaacccaagttcagataggagttgacgtcatcttgtggtttcttcatcaaaaacataagtcaagggtgatataagaactccactgcctctaatttgcatcatacgagtgtagtcaataggaaaccaagtacgagaatcacatccacatagtttttaatagacaagtcaaaatagagagcattgtatttagctcanatataatgccacatgataagcanaaagctttaatggattaaatcattttctggtgaactcagttac

SEQ ID NO: 43893 - DNA, 488 bp, Glycine max
  unsure (1)..(488): unsure at all n locations
ctgaagacagggtnggtgattggagacggtgacgaagaagaatatcaaaataaanaatagatcctccttcacaagcaaaatttaagatcgatctgttaaaaattgatttggctttggattttggattagagaaactaaaaaaatggggtggccaactatgcctatatatgtgctaatttacttataagtcttgtcttggaatgcagcaaatatgatggtacacagctagctagctaaaaaaaatgaccaaagctacaacaacatttgtagtaatgaagttttgatgaataatagttttaaaaaaagttgaaccacctttgttccttttttgtgttatttaagattttttacaagtataaaaaaaagcaataaatnttcttctttcatataaagttctattttattccttttttttcatttatactactatgctatacaataaattcattntagttgtnttcactttcgtgataaatgtataaattaat

SEQ ID NO: 43894 - DNA, 471 bp, Glycine max
  unsure (1)..(471): unsure at all n locations
gcttccttntaatgcatcacgtctaaaaccatgttcgatggtagtacgagcctntgacggtagtcggngggaggtgatgggggaaatcgacatccccattcagataggcccccacacttgcaatgtggttnttcaagtaatggacataaatcccgcctacagctgccttttggggagaccttggattcacccgctaggagtggtcccttcgacgcttcaccaaaaattgaaattcgcggttggtggactcttggtaatagtgtcgggcgaagaagatatgttggtaagctgcccctccttcgcaccatatgtagaagcagcggaggaatcattggaaacaactctccaatccttcgaggtggtgagttgtgcctctgtgtaaacgagtccgtngctaccttgtctctctaatgcggccctaatggtggcgcgagtaatgctcaggcacagttatgatcccggaatgggtct

SEQ ID NO: 43895 - DNA, 478 bp, Glycine max
  unsure (1)..(478): unsure at all n locations
aaaagttcccaatcaaagaatcggaagaaagcaaaaggagaaaattcccaatcaaagagtgggagaaagcaaaaacacaagagaaagaaaattcccgatcaaggatcgaaagaaaacagaagaaatatgcagaaaggtctttggaccagacaatatctgaacaatacagaattgtcacccaagtaaacagaaaagaaaggaaaccacgacctanagtgatcctctccctttgattgccaaccaaaatcctgtgcgccggtgacttgtccagctcacactaaacaaaaaacagaaaaggaaaaggccaagaacactcaaagccaaatttcccacaaaccattcccaagaaaaaagtcctattgatccatgatcacacatgtaatctttgatntgatagaanatgaattgcaaaaccaagtcatgacatatctatggttcggaattaggatgaaacacttacctatgtgagattggacac

SEQ ID NO: 43896 - DNA, 362 bp, Glycine max
ctatgctcttgtgttgtggaacaagctacaaaaagagagagcaagatatgaagatcccatggttgatacatggacgaagattaaaaatatcatgaggaagcggtatgtgccggctagttactcaatggacttgaaattcaagctccataaactaacccaatgcaacatgggggttgaggagtatttcaaggaaatggatgtgctcatgattcaagcaaatattgaagaagatgacgaggtaactatggctcgatttcttaatggtttgactaatgatatccgtgatattgttgagctgcacgagtttgttgaaatggatgatctgcttcacatagcaatccaagtggagcaactattaaaaa

SEQ ID NO: 43897 - DNA, 457 bp, Glycine max
  unsure (1)..(457): unsure at all n locations
catcggatttagtaatgacccactaacctagatntaatagaacttaatgccattaacctagggaattaaagaacttaatggctgagtgtaactgaaattgtggcaaccaaaagtcacccccaacagccatcaagtcagccaccatttggtctcccaaaaggctgatgcctaggttgccaattgngcccttattataacttgaactaaacctaactaaaagccctttagttgattaacccaaaacatatttttggtcagccaactttacaaggattgggccattatttagacaaactgaatactctaaaattgagacaaagtggtgtcatttagtcctcctccatttgggccatgatacaactcacaaccttggactnttctccttgaaactngnngttgtattcaaatagtatggacagtacttgttgaagagcttcattgccattccctgctctcg

SEQ ID NO: 43898 - DNA, 388 bp, Glycine max
gcttgaagaatcttaaggaacctctagagacaccactatcactattggactacatacgtgagcccgattagagtataggacgagtttatcgtaattagggttggaatgaacatgtgtaaggatccttagaggatcaaattaggatctgttttgagatctttattgtattttgattattcctttatgattatattaatgaaattgttgtgtttgacacgccaattgatgccatgatgtgaattgattgataaaattgagtgctcttggtgttttcatgtttttgacctatggttttgattcctttagatttgatatgattatgtgaaattatttgaggggttttatcagatgaacaacacatatcaatattattattgtgtgacatgta

SEQ ID NO: 43899 - DNA, 481 bp, Glycine max
  unsure (1)..(481): unsure at all n locations
gtgtcataagctacctttggttcattntcctcatcaatattgtgtttttatgatcaanattccaaacatagcctggttgttactgtgagaaattcttagaaaatataagattgacatgataataaaaaaaagtgggggagagagggataggtgttcgaatcctcctctaaattttttttaataaactaacatttgtctaacaaaaagaaacattagttttcaataatggaattttgaactactacagtccttaattatcgtgaagcattcaaaataatattgtagcaatgacggttcagtctctaattangaaccagttgggtggaattcaaatagtctaagacggtgaatatgttactgattcttgccatgggtttaggattgngatattttaagcgttgaactttgcaatatacaatgcagaccctacaccagagaataaattatccatatataanacaaaataattatctattaatga

SEQ ID NO: 43900 - DNA, 482 bp, Glycine max
  unsure (1)..(482): unsure at all n locations
agcttgtagtgagggttggctacaaaaattcattggttnttctaggattcaaaggattagattctaagagagcacaactcctaaacttatccaagtggtcattntaatacaattagcttgctcactagctnttcacttccatttgcttttgaccttattacatcagcacacattttctttgattgttttttaacacaatntatttatcgtgtgtgtgcttatgcttttacctctntctttacatcccaattaactccactcccccaaatttggggtaaaattgccttgaaccatatgctctcctaaattctaaacaaggtatctggagataatcatttaggttcagggtttaattattgacaaatcattcaactcataaagagtgcaaagggtacagttatcattaaaggtaagctntttggtcaaaaggcttgtgtatgcacaatcatggcctccatcatgtcctcatttatacatntcat

SEQ ID NO: 43901 - DNA, 447 bp, Glycine max
  unsure (1)..(447): unsure at all n locations
cttttcatagtagagtatcgattatgtgtctaccatcacgattatcgtctccctttccatcattgngggtaccacctgngccgccagatccctccaccttttatgcgtgttctttgaaagatctgtccccctttttgcacatgttatgtagttgcatcctatccgaaaccatatcaaaattgtactgatactgcctaacaaaggcaaccattangtccttccaagaatggactcgggaaggttccaagttagtgtaccangtaacagctaccccagtaagactttcttggaaggaatgtattagcaattcctcatcttttgcgtattccccatcttctgacaatacatctttagatggttcttgggacaagtagtctccttgtacttgtcagagtccagcaccttgaacttgggaggggtgatgatattatgtactangaacaactc

SEQ ID NO: 43902 - DNA, 486 bp, Glycine max
gctacgatagtacttatggataacttaattacttataactactaattaataaaaatcaaattatcttccaatgctattcttttattaattgagttaattatccattactagtcatatattgaaaaaatgtcctttaaatgtaaaaaatgatagacattaagattgtcttcattgatatatagtctttgcctctcttttttaatcctaacatatgatatattaatagtatatttcatttttttaaaattaatataattatatattagtatgaaaaaacattcatgattgaattataattaatatgttcttagttcgaataaaattgatacaattttcttataaaatgtctcacatttggattttatcatataaaaacataaatattttacatcaatatcatgataatctacgaattaagataatataaaagtataatatttctattgtagatttaatgtatattaaacacacaaaccaacttataca

SEQ ID NO: 43903 - DNA, 455 bp, Glycine max
  unsure (1)..(455): unsure at all n locations
ttcaataatctaacttacagagattagcgaatcttaataaatatatagagcttaagataataattaagttcaatagaataaaaaacttccacccccaacaaaactcctgtatggtcctcctacacaaaccaaaacataaaatacacactctcgacagcaaaacatttaaaattataaacatacngggttgtagacacaattgacataatgcanaaccaaaagtgtgcctatcaacaaaactagaaagntttgctcacaattataataagatagaacaaatgggctttactacaagtgtctattactataattttatattgcatgactctattttatatttactatttaaattgtgtggaatggtgtgctacattatattataataattgaaaacatgtacacaaatagaaatttatacaagttctcttagatcataatggcctgatgaataatat

SEQ ID NO: 43904 - DNA, 628 bp, Glycine max
  unsure (1)..(628): unsure at all n locations
cctccacccccacnctcacacactcaacattactcntcctcttcacaaatgtacgtttcacntcctatcannntnnaaatgnnaaaagaagnaggtttgggccttgatgcactcgcagaaccncngancctatagagangacctgcaggcatagcagcnnatacatgtgctattactaatatgaagttactanacttaagcacctgcttactcgacaagacttgcaacttgagtaatcaactgagagacctgactcttgagttgccaacactgaacatgatggttctgctataagccttagcaggtggttcctcacttgatctgacttccatacgaagagaaattccatcggatgaactatcaacggcgaccttgtctattacatacaaatgataccattatgtgtgtcccatgagaagactttcacaagttacacaatctagtgaagtctgtatgaacttctacaacacactctatgaacacataaaatggtctactggactaaacaacatcatctcagcatgtacagctttgataatcatatgcgacacactcttcttcacgacagctacttcatctctcccttacatacgttgcaatttatttctacatcacattacctatatcg

SEQ ID NO: 43905 - DNA, 450 bp, Glycine max
  unsure (1)..(450): unsure at all n locations
agcttgagccanaatcctaactcaccatanaccttgacccangatgagaatgtcaatccttaccctcggaagcaaaanagaagagaaggaaaatttccaatcaaagaataaaataagagaaggataatttccaatcaaagagaaagctaaaaaaagagagaaggaaaatttccaatcaaagaaataaaagagaaggataatttccaatcaaagagaaagcacaacaaagagagaaggataatttccaatcaaaggaaaaaagagaggaaaggaaattcccaatcaaagagtgggagaaagcgaaaagaatagaaagataattcccaaccaaagagtgggagaaagtaaaaggaaggaaagaaagctcctgatcaatgatcgaaagaaatcagaagaaatgtgcagaaaggtctctggaccggacaatatctgtacaatatagaattgtca

SEQ ID NO: 43906 - DNA, 513 bp, Glycine max
  unsure (1)..(513): unsure at all n locations
gacactataaaactcagctanagtatgcccgagtcattcatccctatgagatgttgttgaagtattggcaatcagaattgccattccttggattatagggttgaaccaagctcatgcttttacaaaaaggttcatcaagtcaagttgaaatatggaagtaaccgtctttcaaaattggggcaaaagatgaatcgagtcacatcactgcttcgtctactgccaaacatatttaggattattgatgtccttgttacttccagtttcaccctgacaaagatgtcatggaccatgttgaaaatctaaattgattaaaccccatatcttgcgtaaaaattcgcaatacttcaactgtacatcattcgcatgcatccatgcttttcattggttgcattgctcgttgcattctttccttanaaaataaaataaaatgaacttaatcattgttataaaaaagaaagggacacgctntacgacgcccttaccgaactcgtgctagagctagagtaatgggtg

SEQ ID NO: 43907 - DNA, 499 bp, Glycine max
  unsure (1)..(499): unsure at all n locations
agcntacgagagnngnnatgaagcctgggacnttcgagancngganacntaacgaanctgctgcatgcagcatgaattgggaacataaatttctttttgcttgcaatgcacatactggttacctccatcatattataactgtctttttcgtcattgacaataactgccttatgatggccaccgttatctaagtactgcgaccggaccagactcatttttgaatatggcatactgagtgttgcactaattttgctttcatttcatcatctgtcgttgcaataactatatcatcagtatggactacctagtaaacttgtctgatagatgagcatgtatgatcacgtttattgctcctatacattcttcacgtctactaaaatgctactgttgctactttgcacgaatctgtggttgcctcaagtataatgacacatcaacttggtattacgtccatatcgactcgttttaattgctgctgaccctatacagataatacacg

SEQ ID NO: 43908 - DNA, 300 bp, Glycine max
cggaagggatatggttttctctcacccagggaactttatcccctgacggcttaaccatatctaacatgctgcttactataataaccaattcacggcgtgaatgatttccaaattggtaaatgatcctccgtctctacctacccctgaaccaatagctcaatattatctaaacctctttattaataatgaataatagcatatattgggatatctggtataatatacactaggaacaagcttacaatacataagccgtccgaatgcatgattgctttaccttaaggcagatatttaggtcac

SEQ ID NO: 43909 - DNA, 517 bp, Glycine max
  unsure (1)..(517): unsure at all n locations
aggatgatggacgnnnnttgatgcccattgatagtcatgctancatctcacacnncttagtaaaaagccgntccactcgccgataagatgatagagagtgagattaatgttttgccgagtgtatactattgatcttccatgtatcagttgacataccttgatgctcctcacaaataaggcgtgcatgatggtccttaacactgtttccactcacattatcttatgctcgaaagtcattaatggtacaatataacttctcactcgaccggaatggttttattgatgcccctttatccgacttcccattttccactacttttctagcttcccttccctgactttgaaaacatcatgcttttcctgagtgtcatgtcccgattgattgtgacgactcatgatttcgtttatgccatctcataacgcaggaaatactattattaggcatgttgtgataatgtaaacagctagaaattattacgccaaacacctatatgtctataggtattttaatataaac

SEQ ID NO: 43910 - DNA, 427 bp, Glycine max
  unsure (1)..(427): unsure at all n locations
agcctgatgtaagaaagcgtggaagagtcagtcttcctactgttgtttgttgatcacagagtggtacctgaagatatgtcgcgggggtcaggagaccttgnggacgtcaggtggggtgctatttcccaaaaccaagcttgaccaatcccgacccaacccgggcataatcagttagtgagaacctgtgacgtacctaaacaggtgagctcctgacagttaaccaataaaagaacaaagtccacaaagcaaggaggcttgtgtggcggctggccagctatgtatcttgcgtggtatatgaaatttagcctctggtaatcgattaccattcgtgggtaatcgattacagggcttacaaatggagacaggatgttgaatgacctctggtaatcgattaccaatggtgtgtgatcgattacacagagtaaca

SEQ ID NO: 43911 - DNA, 451 bp, Glycine max
  unsure (1)..(451): unsure at all n locations
ngccttgccccttgatatatatgagggactcatggtcgctatgaatgacaaattccttgcgataaaggtagtgttgccatgttttcaaagcccgtactaaggcatacaactccttatcataagttgaatagttaaaggtaggaccacttaacttttcactaaaataagcaattggatggtcttcttgcaacaacacagccccaatcccgacatttgaagcatcacacttaatttcaaaagatatttgaaagtttggcaatgcaagtatgagggcattagttaccttttgcttaagaatattgaaagcttcttcttgtttctttcctcatttgaaaccaacatttttcttgagcacttcattgagaggtgctgccaatgtgctaaaatccttcacacatcgtctataataacttgctaagccatgataactcctcacctcgatcacagactt

SEQ ID NO: 43912 - DNA, 457 bp, Glycine max
  unsure (1)..(457): unsure at all n locations
agctntcaacaaatgtcttcacaaataatcatcacacagcagaaaactaacaaaactacccctcatatctcccaaaaccccatacccacgaaatttaagagagaaagaagtccacccaaacctggattttcgaagtcccactcgtagccacgcacttcacgaccccgaaaatgccctcctttcgcgatttggagcagaaatgagcaccaaaggttggagctntgttggggtttcaatggagaatggaggagaaggaaaaagcaacgtgaggaagagggagagcttctgaattttctgttntggctgagtgaggagagagaanagctttttggtcttaaataaaaggttttcctctntttctattattttattcaagctctaccacatgtccctatttgattggagcaaaaagggcccactntctctttttgactgtgacccatactcagtcacaaaa

SEQ ID NO: 43913 - DNA, 451 bp, Glycine max
  unsure (1)..(451): unsure at all n locations
tgagaatggagaattgcactaagcaatcactacgcatagctctcaactcgaaggtggaggacacatgaacgaaaacacaattcatggggctccgaanaaggggttgagaatggagaattacactaagcaatcactacgcatagctccaaactcgaaggtggaggacacatgaacgataacgcaattcatggggctccgaaaagattgagaatggagaattgcactacgcaatcactacgcatagctccaaacgcgaaggtggaggacacatgaatgaaaacgcaattcatggggctccgaatagattgagaatggagaattgcactaagcaatcactacgcatagctccaaactcgaaggtggaggacacatgaatgaaaatgcaattcatggggctccgaanagattcgaatggagaattgcactaagcaatcactacgcatagctccaa

SEQ ID NO: 43914 - DNA, 148 bp, Glycine max
agcttcctgcttgtctattatcgtcagtggtgtctaccacccatggctgaacaacagtggtgtgctcctcctcatcacatcgtcatggtgatatgctacaacggctatgccactgcttgcatgtttccctttcacaatggggtaactc

SEQ ID NO: 43915 - DNA, 572 bp, Glycine max
  unsure (1)..(572): unsure at all n locations
aggaacgaagannnnnnttganaccttgngtgcnatcgntatactctacagncgatctgcaggcgtgcnctctagtgatgctgactctccgatatgtcttctttagatatagtttcacgacgttggcgaacattactacccaccgtgtctctctcatgcactgacttctgacattatgccatactgaggtactcccggtcctgcattatgcttgtatgtctgtctcaccgcacttatcgacccatatgatgccctctgtgcttgagtagttgcgcctgtgattctttaatgtacactctctgttggcgttacaatggagaacgtaggtatacagagtatcttctgactggttcaggtatagctattcaatcttctgtttgggctatatgatggatagaaaagtagttatggcattataaagatgttatatgctatttctatttannaatacaagctcattctcatgaacttatatgatatgtgacanaagggtcatactccttatcatgatgagactctaatcttaattactacatgatgagattatgtgctttagtgacgattaaatattn

SEQ ID NO: 43916 - DNA, 616 bp, Glycine max
  unsure (1)..(616): unsure at all n locations
cacactgctcacccncncacactcttnctaatgctactctataaangatacaaatntntnntcancaaaatgagangnnaggaatgaagccttgaancgctgcatctctanaanacactctaaagcattgtaactaacctaccaaagctaaacaactaatagaaggtatctgtgctctatgacgccatgatcgtgctcacgactccattgagaagcttcactcgttccttcattctgcatggcttctatcgtacccttctagatatgctggggtgagatgttctcttcgtggcctctaattacttgctacctgtaccttccttgctagtgacatccgcttctatacttctctcgtacaataactttataagcagttatgtcatatagtatcaaacaagctccaccattacaaaaatgcatagatcgccaaataagacaacatgaataatatacagttcctcttttagaagtctatcaccaccacctttacgcaaacacatacacacagataagaaagctcttgcctatataaacaagttatgtccattgaaatgctcataagtaataacacacaacactttggttgggtaatacatagatntccaaccattatatt

SEQ ID NO: 43917 - DNA, 403 bp, Glycine max
  unsure (1)..(403): unsure at all n locations
tcatgttaacctaataaatcaattcatggttataacttatgcaaaaatagtattcggcacacttacattaatgtctttctaaatgtctttaagcatctgtaattataatcattgtatcactggaattcccctcatntccttgaactangaataaagatacgtgcttcctttatttgtaagtagcttcatctcaaaatggctatctgtttaaaacatgtattggattctattgcagtatcaacaagatgacccacgtaccctttgcgtgaacaaagttggtccttataacaatccacaagatacgtacaattattacagcctaccatgttgccgcccacctgttaattctgcacacagatgtggagtgcttgatgaagtccagtgtggcaatgatctcattgat

SEQ ID NO: 43918 - DNA, 321 bp, Glycine max
agctgggttcgagggtacttacccgtgaagatcgaagaacgatgaagaacgaatgaagaacgtcgaagaacggttgaaacctttgcaagattcctcacggaaaatgttacggaaacgtttcggaagcgcctcggcttagattttcttcacggaaacaatttttccaagcaaattccaaagagagagaagtgcctaaagggctgggatccttttcttcttcattttctcccctatttatagcaaaataggggagatgcttgccgcccagctcgcccaggcgagctcagctcgcccaggcgagctcagctcgcccaggcgagc

SEQ ID NO: 43919 - DNA, 344 bp, Glycine max
gaattcaaaaccctcagagattgatgcttatcgctttgtggcccactaagcccaacttaaaaactcaagttacagaattgatctggggcttagcgcaggatagcgcacttaatgctgctataataaaatttttcccgagatgaaatggcgcttattgcatcatccatgctaagcccactagttaaagttcaattattgcaacgatgttgggcttatcgcacagatgtgcgcttagctaatctattcaaccaaacaatcaggggtatatgcacttatcgcgagtaagctcggcttaacgcgtgaagactgagcgcttaacgcaaggtctgcgcttatcggataga

SEQ ID NO: 43920 - DNA, 354 bp, Glycine max
  unsure (1)..(354): unsure at all n locations
agcttgaccttgaagatagaatataagagatgctgaacgagagagagctattttattcataaagagaaaattacgcacactcttgcacacacacacttatgtggccctntatatctcacagctctatctattacagcttaacagaaaataacagaatgttaaccaactaactcctaactaccactaaataaggtctgaactgcctccaagcttcaacatgtttcacctgtgaagagaagtataatcctactcatgtgtgtatgaataaacagctcagattgatgattatggaagaagaggatgaaagagacccttgcttatgaaatgcatgctgctgttctcaacttgaccttg

SEQ ID NO: 43921 - DNA, 346 bp, Glycine max
tgtgacgattgttatgtctaatgaaatgtaaacatgagcaactatgggctttaagaagttattatctggatttttgttgaacaagatggtatacgggacattaaaatgcacagaagcagtaagcaatctatttatcaagtatactgctctagtgaaggtaaaaaaacttgataagcacggaggcttgtttaaaaacagtgagtcctaattccacaatatgtctgcgcttcctttccactacaccattttggtgatgagtgtgaggactgatccatctatgagtgataccttggcttgctataaaaatagtgataggtctgaactccactctccggtctgtttgaac

SEQ ID NO: 43922 - DNA, 478 bp, Glycine max
  unsure (1)..(478): unsure at all n locations
agcttaagaaaggtcaaactcctttcagaaatttgatttcaggcttaaataggtggctttgttcgtgctcgtgcgcttagcgcaattctgaaccgcttagcgcgcattagtgaatttcggcttagcgcatgcttttcttgctcaacggatggactaaagcggtgcgcttagtgggatgacccttcgctcagcgaacacgcacaactcatccttcttccagattcttcgtcgcgcttagctgaggaatgttgcgctcagcggatggtttgctaagccagcagattggcttagcgagagggtgaatatcaacacttcaaaacttgcctaattatccagaaattgagagaaaattattattaaacacacaaaatggaagtactaattatttattaccaatctttaacaaaaattaattacaacactacaanataaccataaattggaggaagttgatacaatttacacaagttntatacac

SEQ ID NO: 43923 - DNA, 347 bp, Glycine max
  unsure (1)..(347): unsure at all n locations
tgcttgagaagcttctatgaactctagatctttgagcttcaatattgtccttcaatggtgaatttcacccatggagttgcagcggaagataaatgacaagaggtgagaggatgtgtcatccactatagaataaggcttggaaggagaagcttctacaccaagagagtgtcttagataagaagcttatagagaaagcttcaatggaggaacagaataatagagaggcggcatgggaattgaaggacattagggagagaagttcaactttgaagtgtatctcacaagtttctcattcatgaaagttgtgataagtgttacacatgtttctatntatagcctaacacatg

SEQ ID NO: 43924 - DNA, 484 bp, Glycine max
  unsure (1)..(484): unsure at all n locations
caacaacttaaaaaataatataaaagtgtttgtaatnnaannnnnaagagaaggaatgattgatgctgatgcancannnnnannnnaanagananaaaaaaaaggaggggataaataaaaaaaaaaaggaggggaaaaaaaggagaaaaagagaagggagggaaaagaagataaaagaaagggaagaagaaggagaaagagagggaagaagaggagggataaaaggatagaaaagagaagaaatagagagaaaaaattaaaagaagagaagaaaagaaaaaaggaaaaaaggaaagagaaagagaaagaaagagagagagagagagaggagagagaagaagggaagaaaagagggaaaaaaagaaagggaaaaaaaagaagaaagagagaaaggaaggaaaaaaagaagaagaagggaaaaaaagagaggaggagaaagaaggaaaaagtaaaataggaaagaaaaataaagaaaaaaagaggg

SEQ ID NO: 43925 - DNA, 346 bp, Glycine max
  unsure (1)..(346): unsure at all n locations
gtggtggaacaagctacagtaggagagagcttgaaatgaatagccaatggttgatacatggacggagatgaaaaatatcatgacgactcggcttgtgccggctatttactcatgggacttgaaattcaagctccaanaactaacccaacgcaacaagggggtagaggattatttcaaggaaatggatgtgctcatgattcaagcaaatattgaagaagatgacgaggtaactatggctcgatatcttaatggtgtgactaatgatatccgtgatattgttgagctgcttgagtttgatgaaacggatgacttgcttcactattcaatcctagtggagcatcatatt

SEQ ID NO: 43926 - DNA, 323 bp, Glycine max
  unsure (1)..(323): unsure at all n locations
tggtcataactaatcactcagaggtcttattgangcgcataatatatcgacacgctcgaaattgaacaatggaagctcttgaacgattcaaatggtcatatctgtttcacacataggtcagattcatgcgccaaatatatccagacgctccagattgaacaacagaatctctcgagaaaatccgatggtaatgactcattactcggttgcccgattcttgagcgttatatatcacaanctctatattgtacactggaagctattgacctattcaaatggtcataactaatcactcggatgtctgattgtagcgcgtaatatat

SEQ ID NO: 43927 - DNA, 281 bp, Glycine max
cctaacagattgatgcttagcgctttgtggcccactaaacccaacttaaaaacttaagttacagaattgatctggggcttatcgcaagatagcgcacttaatgctgctataataaaaattttcccgacatgaaatggcgcttactgcatcatccatgcttaacccactattttaagttcaattattgcaactatgtgcggcttatcacagtgatgtgcgcttagctaatctatttaaccacacaatcatgggtatatgcacttagcgcgagtatgctctgc

SEQ ID NO: 43928 - DNA, 290 bp, Glycine max
gggaaaggagggaaagagggaaagttatgagtgagaggaagggggaaaggaaaaagagaagaaagaaagagaaagaggggagggaagaaggaaaggagggagaagaggaaggaaggaggaaggaataaaggaaagaagaaaatataaaaaggagaaagataagaaggaaagaagaaaggaaggaaagaaagagaaggggggaggaaggaagagagggagggaggaaaaaggagaggagagaaaaaggaagaagggagaagaagggaaaaagaaaagaaaaagaaagagaa

SEQ ID NO: 43929 - DNA, 272 bp, Glycine max
gcgaacaacaatcactacagtcaatgtctatgtatgtatactcactactccttgtttatatgtcctggtccatgttataaacattacataactcttatgataaatagcgagaccatgaaaatatttattacaaccattaactatgattacaaataatattacttaatattaaatattttaagaaatatgacaaataattaatcttaaattctaaaggacattaaacaatctgtttaagatattaattatcgtaaccaaactatatcatgact

SEQ ID NO: 43930 - DNA, 457 bp, Glycine max
  unsure (1)..(457): unsure at all n locations
agcttcaccgcagtgtcgccttcgctgctatatttgcaacatttatgcggaaattgctttccattttcgagggtaaggtgggagatgatgaatgaagagttctctcagtaccgaacaagcctagcaaacattttcaggtgctctcaaaatcaatcccaagggattgagttggatgtacataangagaaggtgtgtgtaaaaatgaaaggaatgggtcctacaaaaatggttgttggtggatggttgtgtggagaggatgccatggaaagaggtggtttggcgggtggtgtaggctagcgtggcagtcatgaaaggcagccattggagctcaatgaaagcaccaattggtttgggcacaaaatcaaagaagagaaatatgctagctttaagggctangaccttcanaaagaaaggtaagaaggganattatatttatttttattatctntttcttaca

SEQ ID NO: 43931 - DNA, 471 bp, Glycine max
  unsure (1)..(471): unsure at all n locations
gaaaatgatggtatgagtcttttacccaatcttattatgttgaaaagctatatattaaagaagtttaattattttgatgcganacatgcttctactccttatgactcatccatcaagttaaagaaaaatttgagtaaaggattctcttcacataaatattctcaaagtatcagctctttattgcatttgacaaacttctctaggcttgtctgatattgcatatgcaatgggtagattataaagtaattgaaggatctagtgatacaaaattgaagttctgattttgatgaaataaaattgatgagtgattatgtctttgctttagatggttgtgtagtatcatgaancattactagacaaattattatttcacatgagagcacaaaatattgctttaaatactgctactagtgacgctgaatgtcttaacaatgtattatgttatntgtcactcttaaataagcgtatacc

SEQ ID NO: 43932 - DNA, 346 bp, Glycine max
  unsure (1)..(346): unsure at all n locations
aatatattttatcaagaaaatcaagttaaaatttataaaaaaaaatgttacataaatatgtttatttatgtaattttacattttanagttaatctaacaagaataatttatcaaacatttataattcaataagatgatgttcaatttttaactattaattatcttttttagctagttgggtaaacataggcttagtctctcatttctttataaagaaattttcatattgattntangataataagatgtttatttattcttattgagaagaaatataaaaaatgttttgttntgaagatgatggattacaaaaaattaaacacccaaaacaaaagtaatctaaatc

SEQ ID NO: 43933 - DNA, 356 bp, Glycine max
  unsure (1)..(356): unsure at all n locations
ctgtctcaggttgtgaagttacaagattatcaccactcatactatgccacttctcctccttcttgttaccaatcattgcttccttgttcttcttgctttcctcctcatatggctgcatcaatagtaatcacaagaggcaaattccaagcaaacctcanagaataattcaaggatacatctatatatctttcaagaatagatattatatatgtaacttctagacatacctttntctcaattgtagacatattcctccatgcatcgatagccaaacgtaggattntctggccttctaaggcctgaccacaagttcagtcgagcacattcatgctngatgaatatctgatatgcagtct

SEQ ID NO: 43934 - DNA, 372 bp, Glycine max
  unsure (1)..(372): unsure at all n locations
gcttctcggctcatgctgngaacgcctctagttcatcttccgtgcagcctaaggcacccacccagagggaagctcctcaagttccaactccgaacacggctcgaccggccggtatattcaacacgacaaggaacttccctccaaagccattgccggaattcaccccgctcccgatgacgtacgaagatcttctaccatccctcatcgccaatcatttggccgtggtaactcccggaagggtcttcgaaccctctttcccgaagtggtatgaccctaatgcaacttgcaagtaccatgggggtgccccggggcattccatcgaanaatgcttggcccttaaatacaaggtccaacatctaatggatgccggat

SEQ ID NO: 43935 - DNA, 345 bp, Glycine max
  unsure (1)..(345): unsure at all n locations
cattctatgtacccgtagtggtccacattgtgtttgtgctttttattctcgntntgtttactttgtataccccctgttgacgtgcttaagccattntacttaagtcgtttctcgctcaacttanaagtaaaataaatttccaccgaacgttngaattgtattatccattaacttcggttaaaataaattccgaccgttcggtcatgttgtaaccacgttggaaatcaaaaagaggtaaaaaataatataataatcaaaaagacatcttttagtaaaataaagcgganaatcaatcggacgttttctctttgggatntctcattcttaatcgaattgattaataac

SEQ ID NO: 43936 - DNA, 164 bp, Glycine max
agatgcgtacatggcactgcaagcagactgcacatgcgatatatatcacactgactatgctgccattaaagatgaccaatctaggaacgctctgcacgccctctatattatctgacgtcagctgacactagatgacaaacctgttcatctactacgcgcttcca

SEQ ID NO: 43937 - DNA, 299 bp, Glycine max
  unsure (1)..(299): unsure at all n locations
gcttgcgtctgcaggtntcattgcaatgtatgcaacattggcacgtctagatgtggtaaggcattctccctatctcagaatgtatcagtagatatgacgtatggtgaactgattctnctactagcgcaaaatctgtatttctcttactgtttcttttcgccatgtcacaaattagtctaatggaccataagctggaggacttgttaaataaacagatatttattaaaagtgtaccctatctagagctcactggtcttatcccatggcttttgacccctctccgtcatactctgccattt

SEQ ID NO: 43938 - DNA, 634 bp, Glycine max
  unsure (1)..(634): unsure at all n locations
ttctacttcttcttctccngacantnatattataaatgtataacacanncnnncnccgcgttgatcatcgtgaaccngatctctnacncacctgctgcatgnncagctctcgatgatatctctgatattctccntttgttatcgtacagcttatttatatggatgtaagaatcatgcctaaccgcacgagtatagtggaactaatcttaactaactctacccttcccatcaaccgtttacatgaatagttcccacctaaggccctttaacctagctgtaattattccaaagctataccgntgcacacacgtctcagacgacgtcgttgcatggcttcatcgtgcaagcacgtatcagtcgtngttgaattattatgaattacctanagttggtcccttccactactgcataaaatgccctgtcaatctggaagcacgactctcgcgtgtgtgagtattgttgactgaagcaagggtattatcatctgcgagctctttcactgacaaagtgcccagtctcctctgctgacttattcactccgaacacagacaaagcttcgtctgtcttattccgtatggttgagtgaccacagctccgcccgttcgaattcatcttatcgacaggcctctacttg

SEQ ID NO: 43939 - DNA, 386 bp, Glycine max
ttgtcccaacagttaagcgagactgaagggaatatgtgggccatcatcgatgagtgcaaagagaagctaaatcttgcagcgactcacgagcaaaggctagaggatgagtatgccaagatatcagcagaaagggaagcaagggaaagggtaattgattcattgcaccaagaggcaacaatgtggatggaccaatttgctcttactttgaacaggagtcaagaacttccccgattgctagccaaggccaaagcaatggcggacacctactctgcccccgaggagatccacggacttctcagctattgtcagcatatgatagacttaatggaccatatgattagaaaccgctaggaagtttgtattgtcgctcagatcttgactagtta

SEQ ID NO: 43940 - DNA, 236 bp, Glycine max
tcacacgaatccttcacgagcacacaccaatgcatacctgctccagccaagtaaaatccccgctgctgcttctcgcatcatatgatcagtatgcttactccaactcaactgcttcgtatacaccacaaagtgatgaataaacgccctcttatccaacgtcaagctcgagacttcatgaatcaccccaaccctatactgatacgtcatcaacgtccacacatcaatcttacacccat

SEQ ID NO: 43941 - DNA, 327 bp, Glycine max
  unsure (1)..(327): unsure at all n locations
taagcgactgctgcatcagcttgagtcaaaggtttcgcatatgattattagcatgaaagaatccaacatacgaactaagaagactccaaatgttgttccccgttgaatataacagttcagacttcaaagcactacatagaaatacttgtaaccatattaaatctacattaagttgattccttacatagaattgcagacattgaaatttttttatcaatgaccaccaaccgggaagcaggatattctttgagcttacagtgaataggctccacaaatgtcaactctaacactaactttctccctctcacatgaattngcatatggatt

SEQ ID NO: 43942 - DNA, 430 bp, Glycine max
  unsure (1)..(430): unsure at all n locations
ctcagcttcgtgattatttaggactaaaaagctacatagtttgatatatgatttaaacgcacaattaanaagctaacatagaatgaaacatgaaaagaaatgcacaatgtaatcatgattaatggctctttcagaaagggacgccattgttttcctgtgtttaataatgttntaagctccaaacacgaaacgaagaatattatgaaggtttgaagccgtctcttagaaagataaataaataatggtaatgattctcattgactgtgtaagaatgaacagactcacgcgtaatttaaagtctctgtaatcagggtatgatattatcttcctggtgatcaagataatgttaattaagagggactaggtcactatggctttcacttaagtaaaagactagacatgannaaaaaagatacaacatttgttcact

SEQ ID NO: 43943 - DNA, 422 bp, Glycine max
  unsure (1)..(422): unsure at all n locations
ctcagcttaacatcagaccacttccagggtgctggaactacttcacatgtacttgatggggcctatgcaagttgtaaggaaaaacaggactctgcaagaggctgctagggtcatgcttcatgccaaagaacttccctataatctctgggctgaagccatgaacacagcatgctacatccacaacagagtcatactgagaagagggactccaaccaccctgtatgaaatctggaaagggaggaagccatctgtcaagcacttccacatctttggaagtccatgttacatcttggcagatagagagcaaaggagaaagatggatcccaagagtgatgcangaatattcctgngatactctacaaacagcagagcatatagagtattcaattccagaaccagaacagtgatggaatccatcaatg

SEQ ID NO: 43944 - DNA, 432 bp, Glycine max
  unsure (1)..(432): unsure at all n locations
agcttatagttattggagggagaataaaacaatttanaatcaattgtacctttcaagtaacgaagaattctttntgcagctnttagatgaggagaggtaggagcctccgtaaagcgacacacaactcccaccgcatatagaatatcgggccttgtattggttagataccttanactccccacaagactcttgaagatcgtggagtctaccttctctccttcatcaaaatttgataacttcaagccaccttccataggtgtgttcacgggattgcaatcaagcatattaaatntcttcaacacttcttttgtgtagctntcttgtgagacaaagataccattcttcgttntcttcacttccattcccaagtaatatgacatgagtctcgtatctgtcatatcaaattcacgagacatggnactcttgaagtct

SEQ ID NO: 43945 - DNA, 399 bp, Glycine max
  unsure (1)..(399): unsure at all n locations
tcttcttcctctttcctggatgctctccacgcaccaccgccattattaaacaacaacctacaccaccaaaccacagattgcgataccatcacattgtgccctcgttcatgcgcgcaaacaaaaaaaggaataaaaacaatgtcttttcaagatggtgatggtgaactagatcaatgagatggtggttgcgagttgtaatgcaagcgcgacctccctctgctcctcgatgcgagcgacggtggaggactcatgcttcgagatggaggtctcctagcggtggagggattcgagggtttctttggagagggaattgagggtttctttggagagggaatcgagagattgngatttcttggcgacagagtgttgaagggaggagaagtgggtggagagggtgac

SEQ ID NO: 43946 - DNA, 373 bp, Glycine max
  unsure (1)..(373): unsure at all n locations
ttctggaaatcggtagtttagtataggtccttgatctttgttttatctgtaataaatgtgcactccttgtgtttgaggcttaaagcttaagtatagagtagttgctttcaagaatagtgttgctatggaaatttcctttaaatttcgcggcgacggcaaaccaaaatcctacccaatgttttgaaatccatcatactgcgcctttagaattcgaagaatggtacaatgactttaatgggtcccaccactgggttatactgtattaaatatccaataaatatacataaataatggaatcacgtcttatacagaaatgttacataacattactacanataatcacatactactatgctacgaataatcactgatc

SEQ ID NO: 43947 - DNA, 290 bp, Glycine max
tgcatacaaacttctattgcctgaaagatcccgcattcatcctgctttccatagttccttccttaaacccttccaccaaacatctgaagaatattgtgtcccactagcattgccttccaatgatgctgaaaatcaaccagttatctctcttttagccattctgggcactcattaagcctctgagtctactgatccatagctaatgtattagatcaatgggcagggttgtctcttgatgacattacatgggaagattgggaagaactcaagactgtctatcaccttgtgga

SEQ ID NO: 43948 - DNA, 220 bp, Glycine max
ttaaactgggggtccctaggctcttgaccttgacttgatagaactctttttaagataaggcatttgacttgatcccatgttttactaaagtgaacaataatcggtgcgaatcataactctgacatctatcatgggtggaatggatgaatgcatgaagaaatgcatatggcacaaatgcaatttatgaatactggagcccgggaaattgtcttcatattta

SEQ ID NO: 43949 - DNA, 343 bp, Glycine max
  unsure (1)..(343): unsure at all n locations
actctatcaagcaccatcttgatgtccgtccatttgctaatgtggagtccatggggataagcagatgcctagtctggtacatacatctgctttatgatgccttctatcatatctagatcttgcttaaaaggtcttaggttagcangatgggagggaatgaatctggtgcgatgagtctatatcttcacctccttggaccatagtgtatgaggagtgggattctcgtttgaggggtccatactaatattgttgcaagtgaagtgagcttggatgccatttcatatggatgactataagtggttgcttgcttctgctcttgctcaattggtgtaagtgatgaatg

SEQ ID NO: 43950 - DNA, 389 bp, Glycine max
  unsure (1)..(389): unsure at all n locations
agcttgtatgagtactgaganagattcaagatattgtgtgcaagctgtcctcaccaccagatttctgagcaactccttcttcaatatttcaatgagggacttagcaacatggagaggagtatgattgatgctttcaatggtggagctcttggtgatatgacccctattaaggctaggaatttgattgagaaaatggcttccaactcccaacaattcagtgcaagaaatgatgctattgttcttagaggagtgcatgaattggccacagattcatcttcatctactgaaaataaaaagcttgaagganaacttgatgccttggtcaacctagtaactcagcttgccatgaatcagaaatctacacctgctgcaagagtctgtggtctatg

SEQ ID NO: 43951 - DNA, 286 bp, Glycine max
  unsure (1)..(286): unsure at all n locations
tacatcttatatggataaagcaagcttcccgctagtgtttccttaagtttcatgggataattgcttcatttggtttcgatgaaaaccccatggctcaatgcatataccacatggtcagtgggagtaaaatatagtgtcttgttntatatgtagatgatattttacttgcagccaacgatcggggtttgctacatgaggtgaaacaatttttctctaagaattctgacatgaacgatatgggtgatgcatcttatgtcatcggcattaagattcatagagatagatc

SEQ ID NO: 43952 - DNA, 406 bp, Glycine max
agctcagctatatggagacaatatcttttcattgctggtataaatatatattagcattactaaatatttaatctataatattttatcatcaatttgaagagggagagctcataaatctaggggttctgtttgtatgtctttcatttcctcttaactcaagagtgttgtcttaaatgaccattgaagttcttctttgctttagcagagaatgtcagaactattataagatctctacgtaggaaaaaatggtcttttgcatgtacatgcgtctagattatattgatttgatctaactgtgtctcgcaactgattgatgtaccatatactaatatgatccagtcatcttcttagtcataaatgctgattcatactctactcataacttttgtgacctattatcaattta

SEQ ID NO: 43953 - DNA, 501 bp, Glycine max
  unsure (1)..(501): unsure at all n locations
atgggtcagtaagcaacactgtctgacctctattgttggctcaaaaatcctcgaggtaaggtccagttaaaataatgaaacgaacacaaaaatttatttttcttttcaagtttgtttatcttgttggggttctctcattccattaacacaaagcgaataggacaccaaattgcacgtgtcacaagctgcagtgtgcaagtgtagattatgattttatgtcacactcacgcaaagatcacagcctcatatataggtatatacaactcttcgtcccatgcctacatgcctgatttcaactagaacatgtcgggtatacatgctgcagccaaattcacccatgtcatatctccacaatgctatcatgcacgtgtactctattgcaaacaaacacttactgcgtgtntagatattatgtgacaatacattctgatgaccaaaatcttgatgtgatcatgaataaaaaatatttctgtcacaatgtcatataaagtatcaacataa

SEQ ID NO: 43954 - DNA, 163 bp, Glycine max
aaggcaccaatactgccttataaaattacgcccggcctgcactcacgcatactgtggaattcataagcatcttgcgaatggaagcatcacaacgcatgataactgaatcgcatgcatcacacttgcgcttgtatatattgccatgcaaacggggcattattcg

SEQ ID NO: 43955 - DNA, 568 bp, Glycine max
  unsure (1)..(568): unsure at all n locations
taacgctcactgctcaccgtctnntacantnanntacannnnnncccncccaagagtgatgctcgttgcgcgatcttaagccactgcngctgcaactntaaccatcccacaangaactctataattatatcagtatattatgcagcagactaatgaagtttccacccacattatgagttcgaccgggttgacaacaaattttctggtttatcaattcccatattttaaactcattcccaatatcatgaatattcataacaatcattctaaaatctaaatgtccttatctaaattattatataagataatcttcaaaatataccctatcattgtaaggaaaacaatggtttactcccttttgatgaaacccaacaagctcaaatatctcaaacattttatatcacaaacattcttcctaaacgtttctatttacattttaattcactttccccccccacccacgatttgtttgtntgttttatacattatcgctatactacttcccaccttacatatatatgttgcggccttctttcctacctaaatcaataaaacaacaaatcctctc

SEQ ID NO: 43956 - DNA, 643 bp, Glycine max
  unsure (1)..(643): unsure at all n locations
cactttcggacttantgcataangttaanngacannngntaannnanntccannncnnnnnaagagaggttgattgcatgctgtacgcgttcgatanacacgcacacnngaaagctcagcgtggactgactgtggccggggaatctagccttacatgtgtgtattatttacccaagcacacagacatatgctcgactataattgtgctactcgtgagctgccttgcgtatctggcaatcttcttttcaagttgagcactaccttgcggatgcaacttccacacatacttagctctatcctgtgcatgcgcatacttaaacatancaatgtgaagcatacgcaacaaagcttgaggagaaaaaggatgaaattcctactccatctcatatggagaacaaccagtagtgctatggacagtctcgattgaagcatactcaacatgaggcagacatgcttcccacaatttaatatttgacttctacagtcctagacaatattcctaatgtactggcactatctgagaagacaattagtgtgaagggttgngtannaatatcaaaatgtaataactatttacccacactgtcgacaatagggagaaaggattnagattcgtacactaacatgcccgcgcgatcataac

SEQ ID NO: 43957 - DNA, 241 bp, Glycine max
tctggcgctttgatctatttttgctttagtgggtcaccttagtttatcgacactattgaagccttgggataactctcacccgataagggagcatcactacttcgggctgctgcttgttaagttcctctccttagatgtggtctatatgaacagtctttatttttttacacacagctctactttatacactctcggtgatataggcattgtgttgtcatactataagatatggattcttctc

SEQ ID NO: 43958 - DNA, 374 bp, Glycine max
gctaatctatcttatatggttcaagcatgctacccgttagcgtttccttatgtttcatgggataatcgcgtcctgtggttttgatgagaaccccctggctcacatgcatatactcacatgagtacagtgggatgtaaatatatgtgttcttcgctctatatgtctgatgatattttactagcggcctacgatcggcgtttgctaaacgaggtgaaactaatttactcttagaattatgacatgaaagatcctagtgacccatcttatgtcatctggattcacattcattgagactgatcatcatggattgagtgactctattacgaaacatgtattcactcatctctagagagagctcagatgaaatattgaca

SEQ ID NO: 43959 - DNA, 308 bp, Glycine max
  unsure (1)..(308): unsure at all n locations
actcggatgtctgattgagtccggtcatatatcgagacgctcgaaattgaatgttgaagctctgaaccaattcagacgacaataactntatactccgatgtctgattgaggcccgtcatatatcgagacgctcgaaattgaatgttgaagctctgagccaattcaaacgacaataactttttactcggatgtctgattgaggcccgtaatatatcgagacgctcgatattgaatgtggaagctctgagccaattcaaacgacaataactntntactcggatgtctgattgacgcccgtaatatatcga

SEQ ID NO: 43960 - DNA, 400 bp, Glycine max
ctaagcttaacattcaattgtgagcgtctcgtaatattacgggactcaatcagacatccgagtaaaaatttattgtcgtttggattggctcagagattcaacattcaatttcgagcgtctcaatatattacgggactcattcagacatccgagtaaaaagttattgtcgtttgaattagctcacagcttcaacaatcaatttcgagcatctcgatatatcacgggactcaatcagacatccgagtcaaaagttattgtcgtttgaattggctcagagcttccacattcaatttcgagcgtctcgatatattacgggactcaatcagacatccgagtaaatagatatcgtacgttgaataggctcagagcttcaacattgaatttcgagcgtctcgatatg

SEQ ID NO: 43961 - DNA, 243 bp, Glycine max
  unsure (1)..(243): unsure at all n locations
aagagactcagcataatgatgcacaggccaaagttgattatgtgaaaagattgtatgaccaagtgaatgtgcaaattgcaaagaagaatgaaagctatgccaagcaagcctacaagaaaaggaaggaagtggtactcgaacccggtgatgatcctggacatttgagggcatatgtntctcaagaaggagggaatgatgataatcctgaaactggccanatacagcttacaggcccaagtggag

SEQ ID NO: 43962 - DNA, 497 bp, Glycine max
  unsure (1)..(497): unsure at all n locations
cttatactntatgttaatgggtatgaagtgataatatttcgtcaatttatccactattacccatactacatcttggcgagatntggtcctaggcaagccaaagacaaaattcatcaagatacaatcccatttccactcaagaattgtcaaaggttgcaattcatcangaaatttttgaagttccacattcgctttttgacacctcatacactttgccatgtactctgccacatttttcttcaagctataacaccaaaagttcttcttcacatcttggtacatntttgtgaaacctggatgaaaactcaatcgactcttatgcattnttccaagatttcttccttcaacatgctctagtgaggtatgcacanctcattccttgaatggatgagtccattcgcatccttactgaattctaaattttgccttcttctttaacttaatcntgtctatangaatngatctccttgtgaacctctcaacttgttcaaacactc

SEQ ID NO: 43963 - DNA, 625 bp, Glycine max
  unsure (1)..(625): unsure at all n locations
cgacttacaaggtntntagaaattatanttacttcntaatactncnacnnccncnnccagagagtttgatgcntcctgtggacntaccngacaccatannaaactcaagctcaccagagtatcagcatctatgtgaccgagattcccttgctgttgttattccaagaccacttcaacgcaattgcaaagacagcccagttaaaatgcttcacaaggaaggatacaacagtctcattgtcaatgttcattctactgatgcatgttccaattgggaaatcattctgtgaccagataacttctaccgaggtgttatcatagctgcactaggccgaatcacagaatctcatgataacagtacgtctacgaatctgcagtgcagcgacgacgtatcaattataatgtatatagaaagaatgcgagatctgtccatatctatcattggagaacggatcacgctgtatcaacatatagcacaaaatctcaaacatacttaacttaatgctcattcattactgcacggataattngtctgtaacaagacaatatgcccttttcatctgacacatctataatagacagatctgaatatggagtggaggtatatagaagacgaacattctactcn

SEQ ID NO: 43964 - DNA, 112 bp, Glycine max
  unsure (1)..(112): unsure at all n locations
atataattaatacaaaaatacatataactatatcgttagactcattcttgccctgacgaattaatgagatattattaacattattattatctcatagntaatctattactca

SEQ ID NO: 43965 - DNA, 271 bp, Glycine max
  unsure (1)..(271): unsure at all n locations
acttttatagnggaaaaaagcatatatagtttatcgtcttgtatccttgaagtatgttatgcttctatataaactaattaataggtaaggattactactttggagtaaagtagcaaactgactcagtgagttagtgttggttggatatctgntaagttgcgttattaagtatatatataaaggcttgtgaaaaaaatattggtgtgtgtggagacttttggaagaanataacacatgtatagtatatgttatatacaatgagaaaatccta

SEQ ID NO: 43966 - DNA, 530 bp, Glycine max
  unsure (1)..(530): unsure at all n locations
tcttatgaaggtagtcaagcacatgaactgcgagttctgcagtcggtacagacacaccaaactcaaagtatacagcaggaatagcctcatgcactacttgaaataggaactcagcacctgagcaaagactgaatccaacaaacgaccatcagatactatggcaaactcacaactgcccaaataaactaaatttcaagagatgcatttcaaagaaaattccaaatgtagaaaccaactttcctaatatcaaattctcgtcagacaatatattgaaagtcggaaaanaaaaccaaccagtagtctacatacaaacataacccttaactctgctagagttcagaatttaaagaaagcagaaacctcgataaggaattagccaatcctaacaagggtggaagtggtacaccatctgcattgctcgtggacgtttcctccttcaagggcaatatacgcaaccgctgcgtaacaacacataaacctggttaaaaagagagataatagcatgtgtaaagtgggatctatctatccta

SEQ ID NO: 43967 - DNA, 452 bp, Glycine max
  unsure (1)..(452): unsure at all n locations
agcttattatagtaagtatacaaaataaacattttttggtttaatgattcatgaataattttcacaaataaatgttggaagtgtgcattattntcaacaaccatgcaacccaccataatttggattgtttcttgtctttccttgatgctttcatccatgatatttgagtccaagtggtatttttttccaatcaaagcaaagcacaaccaagtaccaatgaccaatgttgccatatactagaatgtaatctacaatacatgcaaagcaaaanaagtatgtgtcattcaataaccttacattcaaatattgatgtcaaacacataaaagaatggatgcacatgattaatattgttgtatagccaatttaatttttcatgtanacgcaataaatcacggtcgtacaacaagttgatttggcatgtcaaacttattaatcggcgatcctacatttg

SEQ ID NO: 43968 - DNA, 288 bp, Glycine max
  unsure (1)..(288): unsure at all n locations
taatctactgcctcaattagagtttcttccttgtctatcacattangacttgtagggacatacccatataaagcctcaaaatgtgtcatttgtggtggtgtatgaaacttggtattataccataattctgccattgctaaatgatttgtccattatttgggcatatttccaatagcacatctcaaataagcttctacggatttattgagattcccaatctatccactattttgtgtatggaaaggtgtggatcttaacaatttaacaccatgtgactgcattaaacct

SEQ ID NO: 43969 - DNA, 440 bp, Glycine max
  unsure (1)..(440): unsure at all n locations
tgtgttctcccttgtagaactactatctgtattaacagtngcaacccaactatctggtagtgatgacaatagaatcaatgccttcacctcatcctcaaatntaatctgtactgactccaactgggcaagaatagtattaaattcattaatatgatcaattacagagttaccttctcccatcttgaggttgaacaactgacgcatcaagtatactttgttggctacagacggcttctcgtacatatctgataacgccttcattaagcctgcaataatcttctcgtttacaatgttgaacgcgacgttcttggctaatgtcaatctgatcatgccaagagcctgtcgatctagcaagtttcattcttcttgccttatngccgttggcttatcccctgataaaggttgatgcagcttcttctgatatagataatcctctatct

SEQ ID NO: 43970 - DNA, 361 bp, Glycine max
  unsure (1)..(361): unsure at all n locations
tgagcatctctntctccattttcacttttcttctaatatttggcaatngctatcgagtatgttgaagtgtcaacttgatcactcttcttttagggctcttttaatttccttttgtaacaccctaaaatattgctaattataaatcgatgtttaattgtatttattgtgttatttgactatatggttgacttgaatgagttgaggtatggctagaattagtcatgtgtgattttcttgatgcggatgttgagttatgtgaagttttattgagctaagttgaaattatgagaattcaaatcttaccaaaacttatcttagtaaatatgtgatcttggattcgttaaccatcggatcattttca

SEQ ID NO: 43971 - DNA, 450 bp, Glycine max
  unsure (1)..(450): unsure at all n locations
catcaattagtggaatttcaaggtttaagaagtgaaaatgagaattggataattntggggtaaactctcatttcaatcaagtctataacattgatttagacttgctcaaactggttttaaggtgaaaaccccagccttcaaaatttggcccctcaacacccaatttaccctagaaatggctctnttctttcacacttgtcattcctttttctcatttgctctacccaagcgttcctacaagtcctaattgacattctaaactaggatcaactcactntagactccaatntccactaaccncaaatgtggcttttcaaaccctcaaaatctcacactgttccactcatatcactaccattctcacatttaaccctaaagtaactctcgccatcatctctaccgagtntctaccaacaattgcagcatacaaatatcacagagcatcatcat

SEQ ID NO: 43972 - DNA, 436 bp, Glycine max
  unsure (1)..(436): unsure at all n locations
tcttgtctgattattctgagttttctattctcttgtatgattagtcatttatgtatgttttatatttcttacgcactctggctntgtgttgatgccaaagggggatagaaaatagggattaaatcaagaactcatataattaagtaatttaatttcaagtgaagcttacactgagaaacaaagggggagaatatggagaattaagtgagtgatcgactaggaaaaagaatgtgtatgtgtttcttgatttcagggttgtcatcatcaaaaagggggagattgtggaagcaatgtcttccaaggttatttngatgatgccaatgatgccaaagaatcaagagtcaagcaaattccaaagattcaagaatgaagctctcaagaatcaagattcaagaataatcaagatcaagattcaagagtcaagagaagaatcaat

SEQ ID NO: 43973 - DNA, 585 bp, Glycine max
  unsure (1)..(585): unsure at all n locations
ctctagcattaacacngntttaacgtcactctcttatgtgnnaagtacaatnnnnanacnnnnaccggggagtgttgaattcatcgtggagcncngatcgctgaacccganctgcggcatgccagcttctgggatcaataagactacatcttggagtgtctattgactttattcgaatagatcttcctcactagatctcgtgtatgaagtttatagtcgttggagctattaacgatgtcattaaacgcacgatcttcgatagcgtagagaaccacttgatgcagccttcgtgtagatcagtacaccagagaaccacttgctctatgatagaggatgatagcacaacagacgcgtcttgtggtgtatatgacaacgtcacttgaaactatatgcctataagatcagaaatccctgagaatgttctgcacacaatcttacaatataaggaagtctgatgcaatttaatacgataaatatgcatgactcatgaccgcttttacaggctctcctacatattccgagtgaagatgctgtgaataacagtatctccgtgatcaccccctggccccggtattatgcaatact

SEQ ID NO: 43974 - DNA, 408 bp, Glycine max
  unsure (1)..(408): unsure at all n locations
cgagtcttactgaaagctgtgccgggtgtttcactactattggtgatgtgtattctatgacaagaactattggagttcccatgacaaccattgaagccaggctggaatctgtgccagatatgggatatgatgccctctccaatgtaccccgtggagaaatttgtttgagaggaaataccttgttcttcggctaccacaagcgtgaagatcttaccaaagaagttatggttgatggctggtttcatacacgtaaaaccatgttgtcctgtattctaaattaacatagtgattggtngatcagcacacaattcacatacatgtaaaccattgcaggtgacattggagaatggcaatcaaatagggccatgagaattattgatcggaagaagaatctctactaattgtctc

SEQ ID NO: 43975 - DNA, 447 bp, Glycine max
  unsure (1)..(447): unsure at all n locations
tcgaccgtcaatttctcttnttgcaatattnctaccccaacgtgatgctctgccgacctaagcactgagccgcacttaagagaaatgagtaaatttctttcttctggaatccatggagagatgagatactccacacatgttaacaatttctttgccaagccacaattcaaatatatcaattcaggattatacagcttcatcattttaagataatatgactaaagtcaacaatcacgaaaaaattacctactaagttggctcaaaaagcctgacttatatatataactaaccctgcccttaaagtggggacaattaatatgggcttgaaagcggactacgagcttttctcatgggggcctgaaatggaacaacaaggacccagtaggcctttttatgatatctaatttacggacttctgatcttcctaaacctgatcttgttcatgat

SEQ ID NO: 43976 - DNA, 352 bp, Glycine max
  unsure (1)..(352): unsure at all n locations
atgctgtccctatgtatatcaaacagtcccacagtcacaatcttacaaaaccatgttcatatgtcattgaggcatttcatcgaacacttggtgggcgcatgtataggcatgaatagcaagagagtgcgggcaatgtggcatgccccattgcctcagaatgcaacataggcctaatgccatcccctgcaacctctcaattcaaacaaatcaagcatgataacaacccanaattgccccacaaatttgagcacattctcacaatttatagcaccataagatgaacaagatgcaccaatggaaagctagaatactcaacgattaaatacttacttgttggagtgagtaagagtac

SEQ ID NO: 43977 - DNA, 457 bp, Glycine max
  unsure (1)..(457): unsure at all n locations
tttgcataactttctgcgttcgacccttcnnttnnnnaccggtgtgcatctcacgtccnnaaccacgngatcacctaaagagaattaaaggtaatttttttattttaccacaacggaccgagaaagccggggtaagaacttggacgcaagggggggtttgccaaaccaactgacaatccacccaccgggatatagtaggaaacctagagtaccaaaaggcagatccgccgtcactgataaagacataaccctagcaggaacttggggggccggcaccggaccatatgtattggaatggtctggacaaaacaggtggattaaaacagctaaaaaaaaagggcaaaagttcggaatatacaaggggactataccgctcaacaggaaacaaggagtttgatcaaccagggcgttatccccttaaaggaaggagggagcccgaaaaacccctgatcaaacg

SEQ ID NO: 43978 - DNA, 329 bp, Glycine max
  unsure (1)..(329): unsure at all n locations
ggcttctatggaggctggatctntgagcttcaatgaagtcctttaatggtgattntccaccatggagatgcagcggaagacaaaggagaagaggtgagaggaggcgccatccactatggaataatccatggaagaaggagcttaaccactaagatgagccttggataagaagcttggaaggatgcttcaatggaggaaaagatagagggagagaaagagagagggggtagcacgaaattgaaggaataaaacagggagagaagtggaactttgaagtatgtctcacaagactctcattcatcatagttacaacaagtgttgcacatgct

SEQ ID NO: 43979 - DNA, 401 bp, Glycine max
  unsure (1)..(401): unsure at all n locations
ccttttctctnttcactaggtgaggatgcttctctgactaggtcttgtagtcacccatattcattgataaaaaataaatgtgatgatttcaatatatgtgatgttagtatcacccttntttcaatgtttttttgttaaacttgtgttcttacgatatgttgtttgacttattatcattactagttgtgggtaatattattttcaatcgacttatggcttatacttttctctaagctgtggagcactgacacataatgtatagtcatgcacggagaggcctcgaaagataggagcanaatagacaaacatgcatattgctcctaatgagaagaatgaaacatttgaactngattatgatgacaagcgagatcgatggtatcggtatgatatggaaacctctg

SEQ ID NO: 43980 - DNA, 374 bp, Glycine max
agtcaaggtctgagagaccatacaagtgtcctagcgatttctaattatgtgggccattaagtctatcatatgctgacaatagccttgaagcccatgaatttcttcgggggcggagtaagtgtccgccatcgccttggccttggctaacaatcggggaagttcttgactcccgttcaaggtaagagcaaatcgatccatccacatggttgcctcttggtgtaaagagtcgatcacccttcctctagcctaattttccgcgtatatttgggcacacttgtccgcgaccctatgctcgtgggccgtggctagacctaattcttcttggtacttggcgatgatagctagcatgttggtctccgtctcgcataaacgct

SEQ ID NO: 43981 - DNA, 418 bp, Glycine max
  unsure (1)..(418): unsure at all n locations
ctcaagctntttattntcactcgaatntgaaattgaattttggagacaaattntcactaattatgattagtgaactttagctatggttcagcccaccaatccaagatcaattccaagattctccactaagtgtgcttatgtgtcatgaggcatgtaaagcatgaatgacatgcacaaagtgtgactatatgatgtggcaatggggtgtagcaagcaaatgatcacctccccctctaatatttaattggattggtcttctcccaattcaattaaatntatttctcaacacacacatcanatatggacttaattaacgtganattacaaaactacccctaatacacanactatagtctaggtgccctataataccagggcttgaaaatcctacatntctanggtacnctacctacattat

SEQ ID NO: 43982 - DNA, 415 bp, Glycine max
  unsure (1)..(415): unsure at all n locations
ttctgttntagatattcgtgaatacaacctggctatgtgaaagtttatattcaatggcaaaacctccctccaagtgaaaatagttgggaatctgtggctaaattacaagaggttnttccgacttatcaccttgaggacaaggtgagtcttttatgaaggggtattgatatgcataagcataagccacacatcaccaaggtgtacactcgcaaacaacgagcaaaagaagcaataaccatggaccaccagcagcaaggcgcacaacacccaaagggtgcaaaccacccaatagttacaacccatccaaagggtgtaaaccacctaatagttacgattcacccaaagaatgcaaggtcagaagatgcgaatcaaggggacatgaccctngggaacagtcacaatcaaccgttatgat

SEQ ID NO: 43983 - DNA, 381 bp, Glycine max
  unsure (1)..(381): unsure at all n locations
gtcctaaatgacatttcaaactaggattaactcactntaacctccanataccactaaatccagatatggccttccaactctcataaactcactctttgtccactcataacaccatattctcactttctaaccctaggttaactctacccttcatccctagcagttttccataagcaatttcagcacaccaacatcaaaagcatcatcataaaaaccctaaaactgaatgggtaagcttaactcactcaaacataacaagtgtagcatgctttcgtcaaatctcttcacaaataactatcacaaagcattaaccaagcaaaaatgcccatcatatctcccaaagccccatactcacgaaaatcaagtgagaaagaagtctac

SEQ ID NO: 43984 - DNA, 386 bp, Glycine max
actcagcttgaaagtgttgttttcaccttctcgctaagccaatctgctggcttagcgagcgtctgctaagcgcaacactcatgggttaagcacaaggaagactctagaagaagatgagttgtacaggttcgctaagcacactgcttcatcccactaagcgcatcgcttcagttcattagctaagcgagaaaggcacgcgcttagccgaaattcactaatatgcgctaagcgatccataagtgcgttaagcgcacgagcacgaacaaggccacctatttaaacctgaaataagaatttagagagagagtttggactgggattcagagctctgcatgtagagggtttctagagagagaacagtccatgttctagagagttttgagaga

SEQ ID NO: 43985 - DNA, 341 bp, Glycine max
  unsure (1)..(341): unsure at all n locations
agcttgaaaagtgttgttnttcaccttctcgctaatccaatctgctggcttagcgagcgtctgctaagcacaacactcatgggctaagcatgaggaagactctggaagaagatgagctgtacaggttcgctaagcgcaccgcttcatctcactaagcgcaccgagataaccatgaacataggcgagataggcacgcgctaagccgaaattctataatgtgcgctaagcggtccataatgcgctaagcgcatgagcacgaacaaggccgcctatttaagcctgaaatcacatattagaggagagtttggactgcgatttaaagcttttatctctagagttct

SEQ ID NO: 43986 - DNA, 275 bp, Glycine max
  unsure (1)..(275): unsure at all n locations
ggcatataagtgactcgtattagattaatcgagcactacctcttattaatcaattacacagctctttctgagagaatgattgatgttcgaagagtctctgcgctaatcgattaccacgtgatataagcgagtacttgtctcttaanagatgtattggaagcgatctagaacatttcaattgattacattacggatctaatcgattacatatctgttgaaagctttacctgttttgggaagaacactttaatcgattgaaatactcatataatcga

SEQ ID NO: 43987 - DNA, 290 bp, Glycine max
aaagagatatgtgtgttggattattggtaaatgtgttccaaagtcttgcttatatagactcttcatgtctggtcaaaaaaccattggaagagttatgactcttgagaaaatcatgagaaaaaaaccattggtttttgaaaaattcttttattacttatcctatatgaagtcatgactggttccttcttaatttcgtctcttgaatcttgaatcttggattggattcttgatgctcgatattgaagtctctgaatcaatcacttgggcttttggcatcatctaaattgttt

SEQ ID NO: 43988 - DNA, 553 bp, Glycine max
  unsure (1)..(553): unsure at all n locations
cgactgcgctttggttgcanatcgattccnttgcttntancngacactatctantcctcaagctncttctccatatgtggaatcgagtgtgaagagccttatatgtgtcaatgtctctcttgtagtttgaccgatcgactataagtaatctgacagcaagagatttagtgtataatacgccatgcctaggctcttacgaggctctaacgtgactgtttcgtgggtgattgctggaggatttctaaccttacgtcatcatgattcattcgttcatcatcgtgcttctgccttaaatctggaagatctccgaattgatctgttgatctatactatgcacctcaacggacaggactgcatggcgtgcttctatattctatcattaacttccacccgcctttgatggcatacatctgattcagagatagacacctatagagatagatctttcaccacatgcgtggtacatctttatactgttaatgcatcgctgatgcatgcatatgcattgaacaatatattgctatttatatcttataaagtccttagtaaaaac

SEQ ID NO: 43989 - DNA, 388 bp, Glycine max
  unsure (1)..(388): unsure at all n locations
atatatcanactggctaatgttgtattcaatcatgttcttgcacaaccgccaaagttggaggcactgataaagaagcaggagaatcacacgcgcctcgccgccgaacgcaagatattcttgcacaactggaagatcaagttcttcgagaggaggaaaatcgaaagatgaatcagacgcctcgagaaactgcaccgtgcttaaaatgagtattcaatcatgtttcgagcgcggcgcagggtttcactttttgtgccccatcgacgattgagttcatgcaatccgaatcgcatggagcagtgacaaccgagaacgacgtggagctcgtcacggaagtgggtgatgctggtggccaatgcaagaagaatcgcaagaagctgaatgggctct

SEQ ID NO: 43990 - DNA, 166 bp, Glycine max
tgattagaacctttctttgatagattgggcctactccagttctcccataagggcctggacttcttcgccttcctacagtgccatcacttcctcccttttacacttataatactggggagccaatacaaccttgctcgtgggctataaccacttacgtaccaccgat

SEQ ID NO: 43991 - DNA, 178 bp, Glycine max
agctgtggactataccttcgaccgaacactgttgtcgttttgtctacgcccggattcaaagcgggctgcagcaccggctccgctatcctaactgtactggaggcgtgtgcgggggctatatcctctatgggtttctggagatttaacatgacatccgagatggaagccatttgatctt

SEQ ID NO: 43992 - DNA, 465 bp, Glycine max
ttctttccctataaataggggaaggagggaagaacatattatgttcaaccctcctggtatttgagaatcactaaaaattagtgagaaaaattgttttcgtgaagaatacccaagcctatgcgctttcgtaacgctttcgtgacgtttccgtgggtgatttcgcgaagattttcaaccgttcttcgtcattcttcattcgttcttcgtcgctcttcggtcttcaatcggaaagttcccgaaatcgaacttttcaattcattctatgtacccttagtggtccccacttgtttcgcgtgcttttattttcatttcatttactttccgtacccgcttctgatgtgctttagtcatgtatttaagtcatattctcacctcatcaaaaataacataaatttccaccgatcattcgtattgaacatctttaagttctgtaaaatgaaatcgactgtgcgcatgcatatcaca

SEQ ID NO: 43993 - DNA, 328 bp, Glycine max
  unsure (1)..(328): unsure at all n locations
catcccctgttgcccacctccatctgagctcacgtactcccacgtagcccatatcctcgtttctctcaacaccgggtccccatcaatcctnccaagcttccacaacatccaagcagaacaacattcaaacagcacaagctatcacagccaaagcaaacatggcaaggcagaatactctgctcaacacanccaaccaaatcacaaggtttctcacttaaagaccccagtaacaattccttcgatccaattcgttaaccgttggatcgactccaaaatnttactggaagtctatagtacataagcctacattgtgacgcgtgggatctac

SEQ ID NO: 43994 - DNA, 368 bp, Glycine max
  unsure (1)..(368): unsure at all n locations
ctcagcttgaaaaggctgtnttcaccttctcgctaagccaatatgctgtcttatcgagcatccgctaagtgcaacactcctgngctaagcgcgaggaagaatctagaagaagatgagttgtacaggttcgctaagcgcaccgcttcatctctctaagggcaccgcttcagttcatccactaagcgagaaaggcgcgctaagccaaaaatcactcacgtgcgctaagcggtccatacatgcgctaagcgcacgagcacgaacaaggctacctatttaagccttaaatcagattntgtgaacagagtttggactgggatntagagctntgcatgtctagggtttctagagagagaaaggtccaagttcta

SEQ ID NO: 43995 - DNA, 388 bp, Glycine max
  unsure (1)..(388): unsure at all n locations
agctttaaatgctcaggataattgatacatatcttctcatcatgatatgtagtnttataataactaatacataaatattcatggttacaactaatattgataattctttggatcaatgtaatggttaagtagacactaaactgatggtgttaggcttgtaaatcaacattcaatattactatttttttctagttctgtattctatacaattgatggaaacgtggaataataataatctatcataaaatacttgggatcttttctttgagaattagttcggtagtatcttgtattcctgtatggtcattgcaatccactgatcttatacaaatgacacaatcaatcattagccaacaataatatataactagcttcatatggaccttat

SEQ ID NO: 43996 - DNA, 438 bp, Glycine max
  unsure (1)..(438): unsure at all n locations
gagtgtctctaatggtctttcataaatagaaaaattgtctcttacaataagtatcttttatatcgaaacaaatgttatatggcataaagagtctcttaacaagatctatattttctgcagaaaaattattttaaataataaaaaataatatctatttaacacataacaacttcatagttaaattataactaaataacaataaaaaaaatataaaagtgaatttcttataatgctttatcattcaaacaaaattatatatgaatgttgtattatcacataatatcatagatcaaaaataatttacaacatccatttacgatatttttattaaaaatactgtgagctgctcattctcactattactggcaacttgctggactcaatgtaatgggattggncttattcatttgcttgcctaatcatacatttataatcaca

SEQ ID NO: 43997 - DNA, 426 bp, Glycine max
  unsure (1)..(426): unsure at all n locations
gtggtctatataggctgtcanatgcattattactcaatntcgataaatgttcataganaattttgcatgtggttgttttactttgcataattttcatttattaaaaaatattanatntctgctctttactttatcctccaggttggaattgctgaacttaaaacagctgttgaaagaaccggaggtcttgttgtacttgctgaaagttntggccattcagtgttcaaggattcactanagcgtgttttccaatcgggtgattatgatntgngtctatcttcanagtaagtctttaaagaatttcattnttatntnntgtatctgatatactaatattcctgangtgtgtttcttgttgatgtaataaggataactctactgcataaattattattggctagtgagctactatgttagttaaatact

SEQ ID NO: 43998 - DNA, 359 bp, Glycine max
tgattctgttgagaaagaatattcctcattcctattcccaatgcgtccatttccaccacgaatggcagggaaaagtccggcaaccgcaagactagggcgctacagatgacttccttgagcttgtcaaaagctgcttgggctttcggggaccagcaaaacttgtctctggccaggagctgagttagaggtgctgcaattgaagcataccccttaatgaatcttcgatagaaacctaataaaccgagaaagccccttaaagctctggtcgaggaaggtactggccattgttggattgcttccaccttcgtcgagactggttgaacaccaaactacgagaccaaatggcctagatactccac

SEQ ID NO: 43999 - DNA, 617 bp, Glycine max
  unsure (1)..(617): unsure at all n locations
tcctcttcactantcntcgacccgtcanttttaataactgttnagcgntnnccccccncnncnacccaagatgttgaaccatcctgtgcncnctatcananacancacctgcangcatagcagcttgnnatactagatacagaaaggagaatatatgtctttgtatttgttgcgccatgtcaaagtgccacgatgatactcttcgaatgttaagagccttgtgcagttcnaatttctgaaatggcgacacaagacattatacctaacatagtcactcatgccataactcgcttgtgctttttcttcaatgccatatgtaacagagtcattgatcctctcaaatcgtatgagctggataacaagactgctattatcttgtgtcagatggagatgtattttcctctatcatatatatgtcatcatggctcacttaattgtactnccatgatggattaaatgcatggcccgttatttgggggatgaactgtgggctaactgcaaactaaaggttacaaaatctcacctctgagcattatgtgaagggcatgagaaaactttgatttattaagcatgaaaacaaattgtggctttcagcttgctacaagagggagtaggcg

SEQ ID NO: 44000 - DNA, 351 bp, Glycine max
  unsure (1)..(351): unsure at all n locations
caagagcttcaagtaagtgctccttaaacctccatgaattgtttgctttaccttctcttccattgttgtttcttcatttnttctccatgtatctcctcacatgtcttgtgctaaatgttgctaacctgattctctatagtttccaccgattaaacttgctatagaagctagatttgattttctatggntcaaatttcttgttcttgttcttgaaccatgaattgtgttgagtttaagttcctctgagatttgtcttgttattgtttgttgctgaaacctanaccataataatcttacaaaaatattatagtanaaggagacctcatatatctagagtgacttgttcaccta

SEQ ID NO: 44001 - DNA, 158 bp, Glycine max
ctaacataactacccatcatatctcccagaaccccatacccactataatcaaaggggaaagaagtccacccaaacctgaaatttcgaagtcccactcgtaaccatgcacttcacgacccacaaaatgccctcctttcgcgatttggggcagaaatgat

SEQ ID NO: 44002 - DNA, 330 bp, Glycine max
gtctccattctataccaattctctcctttcgtctatatattagtattttgtataaattgaactaacattctatgctcttaactttggcttcttttcatactcggatataaatgtaaggtgtccctttcatacccccttttgtgttgcttgaacatgctggtgagttttgtgctttccttctctctcttcgataatacgattgaacatgctagtgagaccttagttgtccttttctctatttgataatttgattgatgtgtgagcaatgatgcgtacgaggggagaagaagtgtctgaattctgatctatggcatgcatgcacgggcccct

SEQ ID NO: 44003 - DNA, 303 bp, Glycine max
  unsure (1)..(303): unsure at all n locations
gtgactactgcgggtgatttcngcaaccccggttcgcacaccgtggcgaattggttcaagattgagaagtatgaggatgcttacaagttggtgtactgtccaagtgtgtgctacgattgcagttatccatgcagtgatattggaatataccaggatgaatatggcaaacgtcttgctctatgttctgaaccatacaaagtgaagttccagcgggcttgattattgaattgataactaaactcaataaagaataatgaatacgtgtaatgaactactctatgctcntgctgcatatattggaat

SEQ ID NO: 44004 - DNA, 359 bp, Glycine max
  unsure (1)..(359): unsure at all n locations
cacttgtgtagtaagtatgtgttttatgttcatattattctactntatgttatttgttatttaaatttatctattntattaataggcatgattagagaagatctatcaataaaagtttctttgattcaagacaagataaacaatgaatttgcctataaggtttcatacaaaaaagcatggatgacgaaacaaaaagtgattgcaattgaatatggctattgcgaagagtcatatgcgaaacttttgtcatggctaaaacacatgcaaaatcattctcctggatcctattntcaaatactacatgacgattttattgttgggaatagggtgagtcacgagcaccgtcagtttcacagagt

SEQ ID NO: 44005 - DNA, 362 bp, Glycine max
gaatcacaaatttgtacctgtcgcaagggtttgtggtttgtgctcctctgctgaccaccatacagacctttgcccttccatgcaacaacctggagcaattgagcagcctgaagcttatgctgcaaatttttacaatagacctcctcaacctcagcagcaaaatcaaccacagcagaacaattatgacctctccagcaacagatacaaccctagatggaggaatcaccctaatctcagatggtccagccctcagcaacaacaacagcagcctgctccttccttccagaatgctgctagcccaagcagaccatacattcctccaccaatccaacaacagcaacaaccgcagaaacagccaacag

SEQ ID NO: 44006 - DNA, 298 bp, Glycine max
gcttgcatttggaattgcgaaagcactactctatcattattgatagtacctgacatctcacactaacaaatcagacgtgacatgacaattatagttgctgtatgaatacctcacccactcaagtgtatcacacaattatggcttatatctaatgaaacactcttgccttataccactctaattccccttgagttcgtatgcaattcaagagattatggccacaacatagaacaattcaccaatatgtgtaacgttaggctagacaaggagaaggttaatccaaaaaaacgctaacaat

SEQ ID NO: 44007 - DNA, 570 bp, Glycine max
  unsure (1)..(570): unsure at all n locations
gacggcttgttgcatcactgccttcgcgacctataaaacctcactgggatgcgtagggtgaatgtggagacatactgctttctttgttgatctcacagatgcgcctgtagatatgttgcatgggtcgggagactctggcgaccgcatgagtagtgctcttgccacgactcactcgtgcccgttcccaactcctcgcgctcatagtgacgccctgaaatcctgtgttgcccctatccgagctagctgcgctgcaattgcagcttacccgttcatgaaccttcgatcgaggccgcttgtggcgacagagcacctgagagctctgtgcgatgagtgtactatggcctgtggtattgcattcccttgcgtggtactcggttaccacgcttctacgagaccacatgaggcttatactgctcttgcttatgcactaacgctcactgtgattatttccattcatgtttcggcgcgagaatccatgatgcttctcgcaatcactcacctgctgcgggaagtcctacccatcttaaatatgggcatgacactatgatgccttcgtaatcttgccaactn

SEQ ID NO: 44008 - DNA, 639 bp, Glycine max
  unsure (1)..(639): unsure at all n locations
ccgccgtcgtcacnatttcgtgttatngtcagattaantcatacattcannancnnccacnacnnacgcccgagtttgatttggtaactttctcgcgtctcgagatcctctaaagacgacctgcaagctngcaagcattccaccaacacaacaatgtgattactcatctcatatatatacctccttcttacccaccacccaatgatccacataggccatccataattcaccacaaaggctgtctaccgcactatcaatgacgaagaccacctttatcaccatccttttgtcacaccttctttataagaactgtattaccctctccacaaaggattatctctccaaacaccctgtgtggttcacccgaatttccggtgtcgatgctaaactagatccattattgacttgatacttcaagaggaagccataaccctagccaaggttatctacctctcttttaccaaatacactctacgcagcgtgtgctgttacggataaccccgtgcagtcattgacctggtaggtttaaactcaggggcaggttatagatgcggctgctaaatttagagatggcggtcaatcgaatgacaaacatccccctgggctcntaaactgggtaggacatagaccacctgttcc

SEQ ID NO: 44009 - DNA, 588 bp, Glycine max
  unsure (1)..(588): unsure at all n locations
tcccttgttcagaattgttttgctttcttanaatattantctatacccnnnccgtgggntgttgaggtgttgccttcggaccatanaaactcagctttgaactacatctagtgctccgatgcgagccacaatgcttatatactatttaagacgcaaattgactctatggacaccgctcatgcacttccagaacgactctaccatacatcataatctatgataacattaacactataacacaattttctgcctccgctgtggattcatattccagactactagatgtacattaactgcacccagatactggttgcctcatccacctgtcttgtctgactgaggaaccattactatggtacccttactgacgtgatatagtactgatcggaacgtattccatatgactaaaaatatcttgttgtccacttaaaccattatatataattttgcttcttaaggtcataaattactctaactatctcttcataattacgcttgagtgggtgtttagagggttaataaatggctttaacaacctctcttctttatattggaatataaaaaccttatcagagttcataccacccc

SEQ ID NO: 44010 - DNA, 384 bp, Glycine max
  unsure (1)..(384): unsure at all n locations
agcttacaangacatgcgattagatntcaaaatgttgtncaaagatcgtatggaactcgaganaacctttcaagataaagtagaggtttcattggatgagtccactcaaacatgtgaagctagtgaaacttttatagaaaaagagtccaagctatgttttgagaatgagacaattgccaaagaaaaatctacttttgtggagaactttcagaagttggaaaacatattgaaaggtctaaaaaaggatatgaaggagcccaatgaacttcatgaccatcaaagtgaaaaagaaattatctatggagagaatatgcacaagcatacaaagattatgaggaccttagaataagtaaacataatctctgtgtggaatatgaagaacat

SEQ ID NO: 44011 - DNA, 391 bp, Glycine max
  unsure (1)..(391): unsure at all n locations
tatatgcaatgatgtctaaaagtatgtgactctctctatgtatttactgaaagatatagactctcaatgttagtatctagtgtcaaaatctatgtcacccatctcgtgagaaattgcttttaatgcaaaaatattatccatgtatttattgtacaaantccgaggacaaatgtagtgcgtcatctatatctgngcattttgtctccagttataagtactcttgcgtagttattgatacttggacattttttttataatatcaaaatgtgaaatctcatctcacattattaagttcgttacctatattgagatctacattagacatgaacttagtatgtcttaggtctaatagcgcactacaatataacctcgctgatttctataaatcaag

SEQ ID NO: 44012 - DNA, 302 bp, Glycine max
  unsure (1)..(302): unsure at all n locations
tgtgatcacctgagcccttccgctcagttcatgggatgccccaagcgcttaattaaaattgaacctgaaccaactttccctaaaatttgctgcatttgaaaacattcatgcatacgcatacgcatgcatattgttgtggtaaaacaggggcaggatcatcttgagctaccttctggngtagagacaaaacatgaacagcagaaaccaatcaaggtaagacagtgatgcagtcaagattggccacaccaggttgtttcttacttgcaggtacacaggaacggatgcaagtggtgatggggtca

SEQ ID NO: 44013 - DNA, 346 bp, Glycine max
  unsure (1)..(346): unsure at all n locations
ctttctttctccattcatttgtctactgactaacaattctaattgtaagttcacattcttgttctttctttgtctaacatacacacttgctcaaactcatgataaataacacaaactccatcacaatcatgcattcaattcaaaatagagtcatatgccaattttcacaaaaagataaaagtgttttattgcaatgtcatcaaaatcaagtcaaactattccatatgcttcanaataagcaaactaactatccataaataagattagcagtgtatataaacataatagaaataatgtactanaactataattaanataataataaaccaaaaagcaaaaagtgtct

SEQ ID NO: 44014 - DNA, 333 bp, Glycine max
  unsure (1)..(333): unsure at all n locations
gacgcaaggctaagcgataagatactnttcccactaattcgatgatctgataggggccataaaaacgctttcctagttntgaaacttatcagcgatcgaagtttggcggtaaagtcttagcttcacatagacccagtccccaattttgaagttgacttcttgacggtgaggatcagtagagttcttcattcgtgcctgagatcgttcgagtntttgacgaagggcatcaaacatatcttggcgagtggtaaggaggaagtccacagcctcgactgatgatgaaccaggaaggtagtccgggatatcgggtggtggcttcccgtacattacctc

SEQ ID NO: 44015 - DNA, 397 bp, Glycine max
  unsure (1)..(397): unsure at all n locations
agatggaccatntcaagtgctngaaagaattaatgacaatacttacaaagttgagctgcccggtgagtataatgttagttccaccttcaatgtctctgatttatctcttnttgatgcagatggagaatccaatttgaggacaaatccttctcaagagggagagaatgatgaggacatgaccaagagcaagggcaaggatccacttgaaggaattggagggcctatgacaagggctagagcaaggaaagccaagcaagctcttcaacaagttntgtccatactatttgaatacaagcccaagtttcaaggagaaaagtccaaggttgtgagttgtatcatggcccaaatggaggatggactaaatgacaccactttgtctcaatttagagtggttagt

SEQ ID NO: 44016 - DNA, 356 bp, Glycine max
  unsure (1)..(356): unsure at all n locations
taacaaggtttggtggaggctcaggtgcatgctaaaggggaggttggtgttcattgtgacatggaggagaatgttcangttgatgaacaatgtttgatggaggttcaagtgcangctcaacatgatgttggtgttgaaggtgagctggatgttatggtggatggtgatgttgaggctgangaagatgatgatgtcatanttattatagtgaagtttcaaataatgactttgaagaatattggaattgggcataatccttggaccctgacacattcacacagactggtcaacccacatttgagactaatgaagcatactcaacanattttgatttggtgataagattgagattctga

SEQ ID NO: 44017 - DNA, 413 bp, Glycine max
  unsure (1)..(413): unsure at all n locations
cagttggcctataattcttcagatatcagtggcaaggctgctgaaatgttgttgttattgacctctggtgaagaatatctgcatcatgggaaacttaatgcatatgaagttgctcttggtggaagattcaataacatcaatattggggacctgaagctttttgaaaggatgaatatgggtaagaaggtgggacctcaatcatactatgaccatccttatactccaacttcaccaatcgtcgaactaaattggctttattacgaggtgttttcttttgaatcatggactcaagctntgtccataattcataagcatttgtgtaagtagaaacatgctcgaagagagtnttgtcaatgtacttacggatcatagcaacggccttccgatttagtaactcccactgagcgtcactc

SEQ ID NO: 44018 - DNA, 579 bp, Glycine max
  unsure (1)..(579): unsure at all n locations
acactctatctttaatgatccttaagataatnnnannnanaaagtgatcatcttgccgatccaaaccacgcagctgcaactctattcgagggctaaacactttggtcccttaaaccttgccatcangagcagatctaaaagcgcaaacctgacattnttcatattctttatcataacataaaccctacccaatagttctatcacacttcttatcttttctatttgagaatcgatacccactttgtgactacacacttgatgaaagtgagagatgattgtagtaaatatctatcataattcaactatatcacaggacagctgtgaggtcattgtgaacagcagaccctctctctctcttcgtactctatatacatgtgtctctgtgaccaagcatagatgacatgaggtgtagaatttaccacaaacacaaattgaactaggcactaaacggttctcccgcactgtcctaccgcttctcatattcgacaaaccggtgtggtcactttgagacgcaccaaccctcagcccgggtcgaagtctcactccatcacaccacacatcttctgctgaagccccccg

SEQ ID NO: 44019 - DNA, 381 bp, Glycine max
  unsure (1)..(381): unsure at all n locations
agtcttatttcataaggcgaggtcgattactatgcacaacgccattgagcttggattaagatcaaatacttatggatattattcaccatgagatcgcttataacaattgcctacaatggccttctagttctccctctaccccttttcaccgggttataaaacatgcaatctactatcgcttctagantcaaaccaccatgctgtatccatatatacagaagcaatnttatacatgcagtacccacattcttatgacataattgccagtgacccttatggtaaataaagataacactatgaccacactcgttatttcatgtgcaattttaatccatattaactgtcattactctgctctagttcaacccatagacatcaatg

SEQ ID NO: 44020 - DNA, 220 bp, Glycine max
cagaatatgcaatcacaaagtacctaagttgattttttttttcttttatcacttttcagcatgaagaatactaacataagaacaaaatagattattaaatatattattatatgcattagatgagactcacttgaaggcaggggaattggtgtatatctgcttccaggacactgtgaaaatggtagctgtctcatggctagtatccatcataatcaccgct

SEQ ID NO: 44021 - DNA, 366 bp, Glycine max
gatcttgtctggcttcaccttacactcgtcttacttggtcaccaggttgaaaggctcatggttaaacctttatattgcatctcttcactgctcagagtttggtagcttcttccctgatccttgccatttcttggacttcatctgttgtttcaagctctaccctcatgttttcttcattttttttgttgtcaaaatagcagtctccttgtcgatggttccccaacttcaacggggatcatggcatttatgtcatatgtgagtcagtaaggagtctcgttggttgctgtcttgtgtgaataatggtatgcctagatatacttgtgagctcttctttgcacagacccttatacttgtcgagtctagtgc

SEQ ID NO: 44022 - DNA, 232 bp, Glycine max
atataaatatatatcacgactctaacttcatgatattgatgcctatctacgccacatatgaatcattgtataatggaacaataatatatggatgtatagagatggaaaagctgaccttctcgtctattattgctttatacatagcgacttgctccttggcagcactggtagtgttttcagcttctccttgaagatgcaactttgacttcttgatgtctctctcctctgtctc

SEQ ID NO: 44023 - DNA, 567 bp, Glycine max
  unsure (1)..(567): unsure at all n locations
attctaattcanttcctaanntcctattttatttaatcttactactnctagagggttgatcatgcatttccaancacttataactaatccttgtgacatcatgaantagaaatctgagcgatagacttagatctggtgtttcactcaacaaagctatgtagtgacttatatttgtgaacatataccattggtagcctgacataaggataaacttgacctctccttgtctcggttcatgtgttacgaactatcttatataataatacattataactctaggatgaatcgtatgataaatactgatgaatacactgacacgtggctccatcgcgatgctatgaggctcatgataatatctttgtgccgacctgattattatacttcttgttgattatgacacggccttttgaagaggtcggtgacaaacacccatcatctttgctttctacccctctcacttacttagaaagatgtaagattatgattnngatggtttccttactgtaatgcagctctcattgacagttataccatgaatgggaaatctattctctgcacaacctgccc

SEQ ID NO: 44024 - DNA, 387 bp, Glycine max
ttcttgtctacaacgcgaactttgaccatagttcttccttgccgcgatgctccttttcatgtctgcctgagtgggcttatagcctaaaccatacttcccacgagtaccttgggtatttatcacactagttatgccactgttgtttattcctaaacccatcccgggctcataaccgttccacaacataactcgcgccatcattaccgctgcatcggacagactatgctgcccaaagagggagtccacggaggaaatgctgaccacctcaaaagactggaaagcagtttctaacaactcttctgcggcttgcacataacgcatggaggatgggcatcttaccaagatatcttcctcgcctgacacgatgaccaagtgcctctctactac

SEQ ID NO: 44025 - DNA, 173 bp, Glycine max
tccgtgtgaaatgttatgaccatctgaatttctcgagagcttccgatgtttaatattgagcgtatccatctatgatacgcctgaatcggacctccgtgcgaaaagctatgaccattcgaatttctcaagagcttccggtgttcagtttcgagcgtctctatatgtcatgcgcc

SEQ ID NO: 44026 - DNA, 357 bp, Glycine max
  unsure (1)..(357): unsure at all n locations
tattccctagtggatggcgcctcctctctcctcttctcctttgtcttccgctgcatctccatagtggaaaatcaccattaaaggacctcattgaagctcanagatccagcctccatagaagctccacaagcaagcttccatcaaacctttccttaagatgtgtgcttggttcaaccccataatctgaggannaagaaatttggatggcaatactntagcagcctatcatagagatgaatgactcaggcatacttatgttgtgcatggcanatgcaattatgggattgacatgagatgccttangaaccaccattttcctattaaccacgttacatgaatttaatcatttatctttct

SEQ ID NO: 44027 - DNA, 447 bp, Glycine max
  unsure (1)..(447): unsure at all n locations
actcagcttacacaatntagttttctcacacttgagtcttagaatactaattactaagtcttttctgactcgatgattgaaatgatgcatgtttatgtgtgtatccctacaatgccataatcaagaatcaccaatcttacttactaaaccactaagttcatgaaatgatgcatgtttaatgttttaacatatagatatcacctatccttttgctaatatggacaattgtcacaaagttgactaatgctcaagaggttatgctttagtccatcaacatataaaacattctttatttgtgtcttgtactgattttcaatgtttccttctcccataatattccctttattgttgtcttcaaaagtgatgtatcctctttcttttatacaaagtcagaagtttgaacttgtacccatcatgtgcctagaccaaccactatccaagtaccat

SEQ ID NO: 44028 - DNA, 144 bp, Glycine max
taaaaatacgcctcgtcctgcactcatcgcagactgttgtaatcatgcgcattctgcgaatggagccatacaacggtagatgacctgatcgcagcgcatcacacttgtcgcttggataatatgccatgagaaaccggccataag

SEQ ID NO: 44029 - DNA, 664 bp, Glycine max
  unsure (1)..(664): unsure at all n locations
atcaccgctagaccaccnantaactntgatggatttcganatatctctacanacncnnnncncnnnnnnnnnnnaagagtttggattgaatgcccgtcgcacnatcccgnganacnnnanagncganctgcnagcatgcaagcttgtatgcatagacnatcaaacatatttgttcgagcattcaacaagtcacgagcaaatgactcacaagtagctctactcatctacacccactattggtaactgaccaattgacccaagtacactgcacgtatcaatgcttacggtccatagacgcacgataatcgggcatgggtatcgatgcaagtattacatccatttacacgagtaccctgcacccagacaactgcataataacaacgataaattatagcacctctcttaaaatatatacagagccattatggctcaagccacaggtgagaccaacacagcctagtggattacaagacacagacacgcatctatatcattgattccatgtaaccacaccgtcaccaacccaaccaatccgactctcgcattagaaagtgaagcgaggaccttacatcatatgccggagctatccatcaaatatatagcaccctgaccatgttacacaacatccctcactctcccaaaagttgcgtgctagcataataag

SEQ ID NO: 44030 - DNA, 351 bp, Glycine max
  unsure (1)..(351): unsure at all n locations
attgttgcttgcaaagccaattcttaggtatggatttgatggaaatggccaagatataatcaatctgcatggaaacgctgtgtccgcagcactagctacctagctatggcaactatacatattcatgtaattatggccctgataataattgcattcctaactatgcttggaataatcntttactacntgttttaaggagacattaatgagccaattgccgcataaatagaccctatgtaatgttactctctcttcataaattgtccatgttaaatagttccgacttcttgactataacaatattctttatatcaaaatttgattaacttgtttaacgtatacaatataacc

SEQ ID NO: 44031 - DNA, 388 bp, Glycine max
  unsure (1)..(388): unsure at all n locations
agctntgactngagtcatcaagagaatataaatatgtgaccatggcatgtatttaaaataatctatcttcaatcaatctttcagatatctttcaactctttctacagaattntcttattcattntctcttcatctttctaagagtttgtgttcaaaactctctctttcaagaaaagttctttgatcataaacttgggctattcatctttttcattctcttctccctttgccaaaagaacagaaggactaaccgcctgaattcttttgtgcctctcttctccctntgccaaaagacagaaggactaactacatgaattcttttgtgtctctcttctcctttacaaaagattcaaagaactaaccgcctgagaattcttttgattcttcc

SEQ ID NO: 44032 - DNA, 396 bp, Glycine max
  unsure (1)..(396): unsure at all n locations
caacatagtgttctctaatgcaacctttaatgctaactaactatatgaagatgcaatattcactctatggacgtggctcaagcactttgagaaggattttactatccattntaatcaatggtcaagtaacattagacacggcttttgcatcagtagaggatacatatttttgactaatagatgtacatttactgtacccatatactggttccctctcacacctgtttcgtctgactttggaaccatttctatggtacccatactgctgtaatatagtacctctggtaactctntacatatctataaaataatatcttngctgatcaaaataaaaatngataccacttgttttgtgttcatatagtgactcagaatttattgttaacatatcatcat

SEQ ID NO: 44033 - DNA, 320 bp, Glycine max
  unsure (1)..(320): unsure at all n locations
attagtcaattcaattaagaatgacaaattccaagagacaacgtccaattgatgtttcgctatattttactaaaagggtatatttgattattatattattattctacctctgtttttatttccaacgtggctacggcacgaccaaacgatcgaaattcattttaaccgaaattaacggatgatacaattcanatgatcggcggaaatttattttatctctagattacgcgagaaatgacttacataaatgacttatgcacgtcagacaggggtatacacagcgaatgaatatgagaattagaatacatgaaacacaatgt

SEQ ID NO: 44034 - DNA, 414 bp, Glycine max
  unsure (1)..(414): unsure at all n locations
tcntttggaccttgaacaggcaactaactcctctntcanaactatgctatgtgctcgcgactggtccctttcttcccttcgcaacttgagttcactattgctaccccatagagctccgcgaaatntgttccggccatactcttccttgcgagccctcttggtctcttgttcaagggctcttgcggtaattgcattctcttcccgtaacccggcacactccttccgaacgtgtgtagcggccaacttgaacttctccttcgcaagtttttcctttcctaactcgcttttgagagcttggacttcttcgtcctcttccggtgcttcaaaattctcttcgctgacgactcttaacttggcgagccaatctaaacctcgtatatgaactttcagccattcgtggtacccaccaatgat

SEQ ID NO: 44035 - DNA, 461 bp, Glycine max
  unsure (1)..(461): unsure at all n locations
agctngaagaggatgctntaatggaggataagatagagagaagaggggagcacgacatngaaggaataaaagagggagagaagtggaactttgaagtgtgtctcataagactttaattcatcaaagttacaacaagtgttacacatgcttctatttatagagtaggtagcttccttgagaagctntcttgagaaaaattccttgagaagcttctttgagaaaacttccttgagaagctagagcttagctacacacacccctctaataactaagctcaccgccttgagaagcttccttgagaagattcctaaagaagctagagcttagctacacacacctctctaatagctaagctcacctccttgagatgagaagctagagcttaactacacacaccctataatagctaagctcactcccatgccacaatacatganaagtacctactacaaagactactc

SEQ ID NO: 44036 - DNA, 366 bp, Glycine max
  unsure (1)..(366): unsure at all n locations
tacctcatatgcgattacctattggtatggtgaattaaaggtcacaataattaagaaattaaatttagctcatttatgtatttgaaaagtttagtttaaatgtgtattttttagaaattttagaaaattagaaatctatcaaacccaatgttaatatatttaacgaaaagctactcatgttgataatacgtaatatatatgtttcaagtgaaagctcctaaaatcgtaatttacaatggaaattatttaaaagttgtttgtaagggtgatagaagtaagcttccagcatagcagcgtaggcccgcttcggtcgcattctatggagagggcganagatgaagaataagactagatcatatgaattct

SEQ ID NO: 44037 - DNA, 358 bp, Glycine max
  unsure (1)..(358): unsure at all n locations
ttcatatctagtcaaggtctaagagaccatacaagtttcctaacgatttctaattatgtgggccattaagtctatcatatgctgacaatagctgagaagcccatgaatctcttcggnggcggagtangtgtctgccatcgccttggccttggctaacaatcggngaagttcttgactcccgttcaaggtaagagcaaaccgatccatccacatggttgcctcttggtgtaaagagtcgatcacccttcctctagcctctttntccgcatatacttgagcatactcatccgcgaatctatgctcgtgggccgtggctagacctaactcttcttcgtacttggcgatgatagctaacatg

SEQ ID NO: 44038 - DNA, 301 bp, Glycine max
gcaatggactacctgataattcttgatgccttttgagccttgtttccctgtcctcgatttgaagctcactacatgccttaaatgaaaaaccatgatatcaccatatccttaaggaattttggagctttggaatagtcttgggaataagtgtggtggggttctgtttcattggataacttgttttgttggctatgcttcatgatgtatttcgcgccatacttgatgtacattgtgtactggttaaatgtcggacatgatgaatgaaatgttgtttctcaaaggctatagagtaaaaaataaa

SEQ ID NO: 44039 - DNA, 314 bp, Glycine max
  unsure (1)..(314): unsure at all n locations
agcttggttgactcataagtcctaagtatggtttctctcgtgttaattaccttatgtgatatgagaataccttntgaatcataacatgtcttgctgctnttaatcagccttgatcattgtagaagaagtgaacaaatctttagagattgaaaattggagtaactaactacatcaaggatgaagccaaacattatcattgaagattgataattatttgatgtgttatttaaaaatttaataaactatctatntgtattatatntattgtacttggacttgtntggatntagactttacacttcacctaatctaga

SEQ ID NO: 44040 - DNA, 346 bp, Glycine max
tgtccatatcatggaagaccctcatgacatctcagctgttattcattggatttctgatatggagctccaagagattaatgctgtgggatcaagatatacctggataaggcctaatgggtatgtgaagagtatgcttgacagatttttggtctcggaccaatggttgtctatgtggcctgagagctgccaacatgttttgcaaagggatatatctgatcattgctcaaccattctgcaaactaacatggcggactggggtcctaagccctttatggtttttgattggtggctgcagcacaaagagtatcaaacaatggtgagggagacctggactaatgatcagcat

SEQ ID NO: 44041 - DNA, 636 bp, Glycine max
  unsure (1)..(636): unsure at all n locations
tctaatcgtatttctctatacantaaaaatgtattccttatgancnncnanncaaaaaagagatgantcatcctgttcgccatccttaacncacctgcagcatgcagcttgaaggaacacttgatgcctggtccttcttttactaaacttgtcataaataagagagccgcatttgtacttgttactgtagcaggagtctgcggtctatgatcttctgctgatcaccatacaaatctctggccttctttacggcaatcaggactcaatgagcaacctgaagcctcttcttgatacattttatatagatacctctctcgacaaaatcaactcaacagattaattatgatctttcaagcaccatatacacaccaggttggaagaatcattcaaatctgagatgtgaaaattctccataacactacaggngcaacaacagcctgttcctccctatcaaaatgatgtaggccaagcacgccatatgatactccttcaatgtgcacaccgcaacatctacatagacaacaagctactgagactcatctcaagctttctagatgagtagtgacgctatgacctccaatatgcatttcactagagacatagtcttattcgagtctacaatcgagagggaacgcg

SEQ ID NO: 44042 - DNA, 308 bp, Glycine max
atttttatcatcccacggtgtctttgctcatccacacagctgctgaatctaacactctcttctttgtggcgtagccaaatagattcttacttctggcgaaacattgagttattagattacttaaagtcccctgatcattccaatcccttttaacgtgttgtaacaccctccggcacgaggacctcccttctagtacaaggctcacaatctacctcttctcatgatgaaaaattaaaaaacatatctctacctcatacccttaatgactttgatccatactgtgaactttccaatttgactctttaggt

SEQ ID NO: 44043 - DNA, 351 bp, Glycine max
  unsure (1)..(351): unsure at all n locations
atgcaagcttgagatgaggaagtgtataagggtgantctttcttgctttattcgntgaccacanagtgtgacctgtagatatgttcgcggggtcaagagaccttgaggacgttaggtggggtgctattgcccaataccaagcttgaccaatcccgacccaacccatgcatagtcagtcagtgagaacctgtgatgtacctatacaggcgagctccttgcagtcaacagataaaatgagcatagactacaaagcaaggaggcttgtgtggtggctggccanctatgaactttgattgatatatgggatatggcctctggtaattgattaccaaaggtgggtaattgattaca

SEQ ID NO: 44044 - DNA, 433 bp, Glycine max
  unsure (1)..(433): unsure at all n locations
tactcagctttacagaaactacatgaactgcctcgtagaacgctttcctccttcgtaacagatggatcttctcgaactttggtatgcaacttcacaagacactttaccatggtttaaccgttgggatctttgagaaaatatctggagtgtgctagaagctttcgttcccgagagcatctcttatttaagcatttcagcctttgctttcttgtagcttatgaaaaatgccatttcttcttctttctttcttccaaatccatttctaaagttccaagtactttctccatcacccacatccaccattagccaccacanaccatcattgatctccattgaaaacccacaccgagaggaactcttcaaccgaagcataattccaacttggcttgcggntcggtacagaacgaaaccctaatctgatctttattttctt

SEQ ID NO: 44045 - DNA, 177 bp, Glycine max
  unsure (1)..(177): unsure at all n locations
tacccccccagtgtgtctgcgccnaacactagctagctggatgttcacggatgtttcgtttaaaagcattatgtcgctagagaaaatgggcagtagagaataaacacctgtggttcatctaatggacttcataccaatgatgttacattgcttttttccacccattccaaagcatct

SEQ ID NO: 44046 - DNA, 348 bp, Glycine max
tactaagctttactttgtggagggcggcttcttaccttcttgctttacgctaactttgaccattgttcttccttcccgcgatgcttcttttcatgtctgcctgagtgggcttatagcctaaaccatacttcccacgattaccttgggtatttatcagtctagttatgccgccgttgttttttcctaaacccatcccgggctcataaccgttccccaacataactcgggccatcattaccgctgcatcggacagactatgctgcccaaagatggagtccacggaggaaatgctgaccacctcataagactggatagtagtttctaacgattcttctgcggcttccacat

SEQ ID NO: 44047 - DNA, 402 bp, Glycine max
  unsure (1)..(402): unsure at all n locations
acatccttactatcgtgatgtatcgtgcgactctctttatctcacactctncatgtttcgtcacgtacttgcgcttcaacacacatatcttaatatattgtactaatattactataacatagttctagtcatcacatatactggtgcctgagatcatgtgaaactaccacaacatcaattatcataatagttacaatttcacactacgggtgataaccaaccatattacacaaacaatcacatgcatacacaatttcaatgcccaaagttcacactcatctcgatctacaatacaattaattaatatataaatgcatcgcacacgtcaataaacaattgcacgtgactcacactccttaagtctttcatgtacttaatacacttagctagtacttctttgat

SEQ ID NO: 44048 - DNA, 618 bp, Glycine max
  unsure (1)..(618): unsure at all n locations
ctcttcatcactttaacatatattttctctcttctttttttattacnnntcncnncnccaagagagnatgattgtatcactgacgtncngaacatnnatacacatctgacaagagcttctaattgatcaaaatgtttctttaactgatctatctaggcataaattcattccatattcataaatgttaacatgacattcttctaagtcatgatgctataaaattaatcacgcacataacttgaatattaccaattgcttactgattatctaacacatcgtggcgtctcaccatatatatctatcacaaaacttgtcctctgaccttcctctctgctagcgtaacatatgatattcaacatgatatagacgttaatatataacatatcaacttatacagtaatgtctatcttgatcttacatacatacagtatagaacaaccttttgagtaccctctcccaaatctctatcatgatatatcgttttatatgcacatcatcattcttaggagaattccaacagacaagatggctccaatatctacatcttcattttacatctccacttattaatgtcataggattgctgctattgttatatgagtccttccaatcctaacc

SEQ ID NO: 44049 - DNA, 254 bp, Glycine max
  unsure (1)..(254): unsure at all n locations
tgtgtattaagctagctacgcacatgtgacatatgccaagaattatgcacctcatttatattcgtgtatcttctaagtttatgatgaatatcatctgagataatatatgtgcaactattatgttgagctcgncagttgttaccatatactttgtgtagttactgccaataacccttctgtcgccaattgaatctatttaatcatcaagtgtataattcttttttgcttcttaagacattaatatttaaatggac

SEQ ID NO: 44050 - DNA, 598 bp, Glycine max
  unsure (1)..(598): unsure at all n locations
ctactgttaattacancacctcttactattanttcngcgttcactnaccnncnnagcaatggttgattgcttcattgcgnacccggatccntanattgaactgcggcatgcatactcaagctataggctcgaggttgtcatatgttctcccatctctacacaactaccaataaagactcttccttacattatggatgggatcacatgcggggcgaggagtccatcctccatcttaatgctgactttacttgggagtcggcgatactccatgcgactaaacttgtcaataacttcctgcgaacctctgttatatgttgatgattggtgacttacgcctttttgtagaatttacatcgtgttcggtgtaaagatcccctttatgagttcagaaccttttcttgtgtttgaatccaatcaggatgcctaagcttagtattatgttattggttattcgtctatactttgcctatatcctgtgacctgaggttataccttcttcttgtgaacacttagctaattaatatcgaattcaatgctagttatatatccacttatctatgaaaactgttctaatgaattgctccctcctttgaatacg

SEQ ID NO: 44051 - DNA, 648 bp, Glycine max
  unsure (1)..(648): unsure at all n locations
cctttattcgatattaantcaaattactgtagtcgtcattctagcagaggctattttncnnnnnannnannncatgagagngttgaatganttctgtagnacntatcccaaacnatantatacncaagtttcataaaatataggcgctataagacgatgcattctctgtatggatttatataaataggcctcctattctgatcggcgatgtcatcactattgaatatcccgcatcttaaatttaatatatgcttctacatctaattatctagtgaagccatagattttgggcccttccttcctcancatttcatgtctatattagtatatgcaatctgcttttcatgtctttgatgatgatcatgaacatatgatgctatagatgtagatgtgctttcatgattaaatacaagactttatcttatagatacaatnctcatcatcaagattatttctactatattacgaacggaattcctaattgaattagcatatggtatggctaatatgttacttcaaactcctacaacggttactctctggaatcgattccagatatgtaataagtatcagaggcagatatattctaactactctaaattcaatctatcttatactggaatctacaccgataggtatggagctaan

SEQ ID NO: 44052 - DNA, 565 bp, Glycine max
  unsure (1)..(565): unsure at all n locations
ttgcttccatcttgaccgcactcgcgatactctanagncgacctgcatgcatgctagctntattcaaacataataatccanatatgtcatagaattgggtgttgaacaagcataacaagactttctgtgattggtttaatgatacaatctctgcatgtgagaatgcttcanaaacattaataaagctagcagataggcctaaaagatatgttataacttggcaaggatacgacatattcaatgtattcatttttcacaacatcccaagatgtaaaaagttcattgcagaacagggtggtcaccctcagggctgaactctaacactccgcaagtgtgaatgacaccaatccctgtgagcttccatcccttactttgggtcattgatgaacttgggagctaactatggaaatcactgatgtattctacaagtaacgggggatacaacaccgcgtgccacacatatattgattatcttggaaccttagaactggtcccactcacctttcttttgggacaagctgacaagttttctccacaccctggttgaagtgtggtgtgttcagcg

SEQ ID NO: 44053 - DNA, 325 bp, Glycine max
ttatatctacctcttcatttgattttgattctgatccttctgatgcactgtttaccatcatacagaagacggcttcttcttactcttttgtttcttcattggatgatttgtcgtctatgtttttccacgtgctcatcacaatctttttgtcctttggtatgaaatacttcttctaatagctaatttatcaagatatgaatcattttacttgtaatgccttgagttcttgcactcaaataatatgatgaagctcttctccttatcttatctttctctatgtggtttcttggatacttttcaatgagattcatatttacctccatat

SEQ ID NO: 44054 - DNA, 337 bp, Glycine max
agcttatgcgcatattctcttacgaacgttcatttgcactagacactctattaactaagaacaatgctcccatatacaatcaatgcagcttcgacacctaaattatcaacatgtacttccaaagaggatttgttacttacatcacacacatctgcatggctaaatgacatacatgcatacatcaagcattctgtggtaccgaaaattgcacatgtgcacatcttggtatttctaatacctatacatacacaaacttcatgatgaatctcgactatctacacaataaggcgctacatatcatgctctttgtaagtatttgctacctaaagccgcatgc

SEQ ID NO: 44055 - DNA, 203 bp, Glycine max
gagccttgttgccctttccttgtattgaagctcactacacgccttaagcgaaaaaccatgatatcaccatgcccttaaggaattttggagctgtggaatggattcgggaataaatgtggaggcgttaagtttcattggataatatgttttgttgctatgcttcatgattgtattttggccatactcgatgttcactgtatatt

SEQ ID NO: 44056 - DNA, 593 bp, Glycine max
  unsure (1)..(593): unsure at all n locations
cattatctcacatatgcagacaatcgtattgctaannncannnnnnacnnncnanagggcagagttganntcatcgttgatccccatcancgaaccgngannccntagangcaactgcgagcagcaaactcttgtgatatataagtcttcattttcaatgctagtgcgcaaacaaaagaagagatcacctgatctcgtggctgaagtctatagctgctggagcattctatgatgtcantatatgcacgttcttcgttacattagaaaacactctagggagcttttgtgtgatcatacataaaaaacctcttgcttatgttaaagtggaaggtacaccagaacacgtttttgttgtcgttgacactccacttgaaattattatgttctaggattcacacatccaggagaagcccctgcaaaacaatcttaataatatgaatgaggcttaacgtctatttaatatggataaatcagacctgtacttttggaccaccgatctacaagctctccctacatatctcgcgggaaagaatgtccgtggatctccagttatttcaggtgatagacccgccgtggtcaccagttgatataag

SEQ ID NO: 44057 - DNA, 603 bp, Glycine max
  unsure (1)..(603): unsure at all n locations
ccattttttcntacatctcaatttctatttattatcnncctnnnnncagtggattgttcctttgaaccatcgataccgacctttngaactcatcttcaagatagctgcgagcttactcgagattgtagccgggtgtttgtcgaccatacgagaaggcgattctatgacaagaactattggattcccattacaccattgacccccgctctgatctttgcccgacattggatatgaagccctctccatgtaccccgtggagaaatctgtctgagaggaaataccttgatcttccggtaccacaagcgtgaagatcttaccacagaagttatggttgatggctggattcatacatggtaaaccaggctggtctgtattctaaagtaacatagcgatttgtaatcacacagaattcacatactgctaaccattgcctgtgacattggagatagcaatctaatatggctcaccaatatcgatcgcaaaaaaatctctttacattgctcatagaaatatattgttgggagacattgatacgagtattngatagccctctatacatctgtatgctcggggtaacacacaatgatacagtgagaacctacn

SEQ ID NO: 44058 - DNA, 454 bp, Glycine max
  unsure (1)..(454): unsure at all n locations
gctatgcgcatatntccttacgaacgttcacttgcacaagacattctattaactaagaaaaatgcacccatatacaatcaaggcagcttcgttacctagattatttacatgtacttccaaggtgtattngttacttacatcacacacatctccttggctaaatntacatacatgcatactcaaagcattttggggtaccaaaaattgcacatgtgcacatcttggtatttctaatacctatacatacacaaacttcatgatgaatcttgactatctacacaataaggcgctacatttcatgctcttttcaagttnttgctacctaaagccgcatgcanattcaagtatattttcctttgctgactaaaantgtattncaaataaaanggatatatatatatantttnttnttgaatgggatttctntacataacatgcaacatnattatatata

SEQ ID NO: 44059 - DNA, 404 bp, Glycine max
  unsure (1)..(404): unsure at all n locations
tttaaactcagctttagccaatggactaccttgaataattcctttgatcctctttgagacctgtgtccctctccttggtgtgaagctcactacaagccttaagtgaaaaaccatgatatcaccatacccttaaggaattttggagctntggaattgtnttgggaataagtgtggggggtgtttgtttcattggataatatgttttgttggctatgcttcatgaatgtatttgggccatacttgatgtacactgtatattggttaaatgttggacatgctgaatgagatgatgtttctcaaatgctacagagtaaaaaaaaatcgaataagatcaagaaaagcaataaagttgagtgaataagatcttaaatggaaaaagaatgatgagactctcggttctactc

SEQ ID NO: 44060 - DNA, 115 bp, Glycine max
  unsure (1)..(115): unsure at all n locations
ctcatgaaccttatggtagatttctgagcccatgggccaaggttgggtccaattatctttgtacatattagactaggatgtcattatatntggtccttatatatagggctccata

SEQ ID NO: 44061 - DNA, 431 bp, Glycine max
  unsure (1)..(431): unsure at all n locations
tcntagtctcaatttgagcgtctcgatatattacccggttcattctgacatccaagtaaaaagttattgttgtttgaatttcctatgagcttcggttttcaatntggagcgtctcgatatattacaggactcaaccggacatccgtgtataaagttattgtcatttgaattttcttagagcttcggatctaaattttgagcgtctcgatatattacgggactcaatcagacatccgagtcaaaagttattgtcgtttgaatttgatacgagcttccgttgtcaatttggagcatccctcgataaattacgacactctgtcgggcatncgagtaaaaagatattgtcgtttgaatattctaagagtttcctgtttgaatttggagcgtctcgatatattacgggactcaactggacatccgtgtataaagta

SEQ ID NO: 44062 - DNA, 396 bp, Glycine max
  unsure (1)..(396): unsure at all n locations
gtcgtcctgagagcatgatatgagtctgtgagtgattgggaggttctagaggtataggagacatcctcaccgctggtatttcttcaatccttcattttctcttctttctgttgtaaaggaagcttcccagttatggaaagctaaatcctccgttggttcttccttgtaggtacttgatgtaaatacttgtatatctatttaatgatgtttcgtgtgttcactattgtcgcaacctacctttcggcgggatggcgacgcgtgactcgcgggtgcgtctatcaagaaaggaatacgcgcggagtctccaccaacgttaatgtgaagataacgtcgatanatccgaaaagacgtgatctacgtaactaaagtgaacagatcgggagttgtattatgcac

SEQ ID NO: 44063 - DNA, 336 bp, Glycine max
  unsure (1)..(336): unsure at all n locations
ctcgcccaagcgagctaagtggcttcctccagaatgtaccgtcttctggnggaacttccgggaacgtctaaatgagcctgattgctatttgcgccccctgtttactaaatacacccctaccttattattagagaccctttgtccggaatgtgattgaactttacgaatctctgaaccatacttgcattctgtgtgaaaagtcatggaaccttatggactacgtagtcatccctgattctctctttcggaatgttacagaacctcgatgattgtgcaacaatgctttctttagactttcggcctgtgacggaacctcactgattgtgcaacaatgct

SEQ ID NO: 44064 - DNA, 313 bp, Glycine max
gcttctttgagaaaactttcttgatgagctatatcatatctacacatagccctgtaataactaagctcacttccttgagaaacttccttgagaagcttctatgagaagattcctagagaagctagagcttatctacacacacccctctaataactaagctcacctccttgagaatgcttcttgatcatattcctagtaaagcttgagcttagctacacacacctctctaatagctaagctcaccccatgccacaaatacatgaaagatacaaaaagtccctactatcaagactaccaataatgccctgaaata

SEQ ID NO: 44065 - DNA, 457 bp, Glycine max
  unsure (1)..(457): unsure at all n locations
gacatatgtngatcatgaatggatcatggtcagagactaaccagcagcaacaaacaacaatcagatggaagaagaagcttagtaagagctagcttctcaataaaaccctttcgagtctcttatgattcanaagatggatgccatccttcatctccatcaagaacaccaagtcgaagttcatagctcattagaaaacattacaactaggcttgagaacatagaaactaggctatcccttagtagcttcctaaactcggatgagtatgaggcatagttatgttcgtctgtttgtttgtttgttggttaatggtctatctgttatgttaagtcttggttgtcttagttttatgatttaagtctgtttggtttttaataatgatcatgtaatgctntaatntaaagaaatatggtgttatttctctttttacttgtgtgtttacactggtgatatgcatat

SEQ ID NO: 44066 - DNA, 523 bp, Glycine max
  unsure (1)..(523): unsure at all n locations
catcttcagactgatcaacactngcacagtggccaaagatgcatgggagatcctgaaaatcactcatgaaggaacctncaaagtgaagatgtccagaatgcaactcttggctacaaattcnaanatctgaagaagaaggaggaagagtgtattcatgacttccacatgaacattcttgaaattgtcaatgcttgcactgccttgggagagatgatcacagatgaaaagcttgtgagaaagatcctcanatccttgcctaagagatttgacatganagtcacttgcatagaggaggcccaagacattngcaacatgagagtagatgaactcattggttctcttcanacctttgagctacgactctccgatanggctgaaaagaagagcaagaatctggccttcatgtccactgatgaaggagaagagatgagtagacctgactactgatgaatgtctggacaatgcagttgtgctccttggaaagcagttcatcaaagtgctgaacagaaatgacatgatgccg

SEQ ID NO: 44067 - DNA, 294 bp, Glycine max
  unsure (1)..(294): unsure at all n locations
tatatatatatatagatatatatatatatatatatatataatcacaataatgatacacacgtcatgagataaacaattatatatataacgacataaaagtaatcacacatattatagacatgagatatatatatatatatatatacacagaaacttatatatatatatatatgtggatatatataatatagacaacaaccacaagtgtatatacatatgtgttaagcgcagtctagagaaggtgtgaagatcccacagagagaaacaatatctntgatttgagcgctgcagcat

SEQ ID NO: 44068 - DNA, 156 bp, Glycine max
  unsure (1)..(156): unsure at all n locations
ctgacttaaaaaaatacgccccgccctgcactcattcaggacaggtgaattcattaacatccggcgacatgaagcctcacaactgcgtgacgaccagaacgcagcgcatagcacctgcgccagcgatatattgccctagagaacggcgcaagaacn

SEQ ID NO: 44069 - DNA, 623 bp, Glycine max
  unsure (1)..(623): unsure at all n locations
catacacgttaaaatacacttnatatagacttggactaaagataatngttncccancncnnnncagagagtttgtttccttcaatncngtacaganacnannanncanagattgtacaaacagatcttacatggcgaccaccatttatatcttatctcatgagagcaatgaccgacacctcatttatacgacatcacgacccttagaatcataatccatcatgtcactgatcgaacaagcattttgggcaagcaatccacactataatcactggaatgtatatgaccgaagtatatagcaactcaattacttataactaaatctctcatgatctgcctaaactacaacaaaacacaatttaaaaatcctgctcatactatggctgatcttcatctatattcagcacaggagcagctggtacattccgataaatgggctggtctggctccctggctggtgctactggcaaaccgtctgattaataggctgtggagaagtagcgtctcaactactgatcagcctcaaaataaatggcttagaagaaacgtctatctctacttataaaaaagtcgtggctataaggctctcctccactaagataggaatactccgacaccacactc

SEQ ID NO: 44070 - DNA, 447 bp, Glycine max
  unsure (1)..(447): unsure at all n locations
tgaatggtgacctgcgtagaagtgtgagttgattgagaggcaatcatttattcaacttcgcatttctctcgcatccactgaaccaagattcctattccanaatgaccggtaactgttccattttcatttctctcatatctcagattcattcataataatcataacaaccctttctctaatctatggagattgattgctgcagctcctacttcttccagcctgtggctggctccaatacccagcanaagatggtgcgaactcttcttccttctctacacccncttctggctcaccctttgactcggcattgttattcccttcaatctttacgaaggtttactctatccaccttttacattgtnntttgtaagcattctaatatgatctcacagtttgatctatctggccactacggaataatccgttacactaatccactaaattatt

SEQ ID NO: 44071 - DNA, 643 bp, Glycine max
  unsure (1)..(643): unsure at all n locations
ccactatattctatctgttgtgagtttgnatttgnaangtnnncaccccnnnnnaagagtgttgaatgcatgcattaccgcacgaanannaanaactcggctcgaagtcaccacaagacctaagcttcgtcgngcattacatatagggtcacccagccatcagacggagtaataacgtaattagtacgatccgcctgagccaccccataaaacacatcctacgaacaataagacagaatacaaacacacgactttcattcatataacctacaaaagtcgtaaattcatacctctcgatagatgcacgccaatataacagatagacgagtgcttcttccttgccccgctcggcaagccggaaggaaaccgatgcataacggcaccggtccgcatacggatgatcgtcgctccgctgcacgacacgacgaaacaccgttgtccggaatggcgagcgaagactaacctgaaaactatataatactgatttcgtgctactcaatgtggaaacttgagcgaatcacagagagatgtgngaggatattgaggttcggatggaaaaatgacgcatactgagcgaggttgttgngaatatctttcnttcactcggagagcatgaactgcattacgaaccacttgcgagctg

SEQ ID NO: 44072 - DNA, 643 bp, Glycine max
  unsure (1)..(643): unsure at all n locations
tactatgagtacngacagttccaaattncanacttaccnnaacannnnnanncacggatgattgatgcttcgagcatctnggaccacagagncanctgccgcatgccagcttgtcancataagcatcgcactcgcagcattattctttaatcccaaaaccaaactctgtattcggaacaatacaatacacctaccggttagaaattttccaaggggctgacaaatgataatgatgcaatgcacaacattgcaaatatggaagtagattgcgcacatactaactgtattgataatattgcctcatgattgggctgaccttaaatgattctatcaggattaacgctgactgtgagagataattctgatagaataccaatcatagtcttgatcttgaactcttgacaattgggaccactctatcgtacgactcacagcgtgcctcacacttgtgatggaacgtccttaccagacatcttagcgtggtggtgggatgaccctggctatatgtcaatcgattgtctctatcgacggcataccacaaatagaggcgacgcgaagctattgatatcgatccccacatgtcgctcataatcaggagaagtgaactaccctccgctatctactcttggacgacgcccgtacg

SEQ ID NO: 44073 - DNA, 676 bp, Glycine max
  unsure (1)..(676): unsure at all n locations
tcatgtctcatcgactagtaacacntctaatcgnganntctccatctnnttnnttannccaagaccgagttganntcatgatgatcacgatctcananccgcggatncatnaaaagcgaactgtangcatgcacacactctcactaagttgtctgatgcctgaattattnttatganggcagtgtgcctatatgcanggaagaatntctccaagaacaccctattaatgtcatcccaactgataatagacctgtgagcaaggtatgttaaccaatctttcgccctctctctatagaatgaggaaaaacctttagaaagatatgatcttcttggacgtcagggggtttcatggtggaacacacaatatggaactccttaagatgtntatgaggatctccacctacaagaccatgacacttgtgcaacagatgtattattccactctcgagaacatatggaataccctcatcatgatattgaatgcacaagctttcataagtgaaatcaagtgcagccatctccctaagagtcctctcacgaggtggaagttgagccatgctctccatatataatatagtaatggaatgcttaatatcataataatcataatcntccttcgtagaatgctcagactggctcaaatgtacagaatgacttggatgcacactatcgctag

SEQ ID NO: 44074 - DNA, 359 bp, Glycine max
  unsure (1)..(359): unsure at all n locations
tcacctggttcaagcacgactntctttctgcttttgttggcttgccttgcatagctcgcatntttcttttcaatttgagccttcacttgctcatgcaacttcttcacatacttagctttagcctgtgcatccttatgcttaaacatagcaatgttaggcataggcaacaaatcaagaggagtcaaaggattaaatccatacactatctcaaatggtgaacaattagttgtgctatggacagcctgattataagcaaactcaacatgaggcaaacaggcttcccacaatataagaattttctttataacattcctaatcantatgcctatagtcctattgactacctcagtttgaccatt

SEQ ID NO: 44075 - DNA, 359 bp, Glycine max
  unsure (1)..(359): unsure at all n locations
ntacagcagaatttantaatgacccactaacctagaattaatataacttaatgccattaacctagggaattaaaacaaactaaatggctgagtgtaactgaaattgttggcaaccaaaagtcacccccaacagccaacaagtcagccaccatttggtctcccaaaaggctgatgcctaagttgccaattgggcccttattacaacttgaactaaagcccttttagttgattaacccacaacatatttttggtcagccaactttacaaggattgtgccattatttagacaaactaaacactctaaaattgaaataaagtggtgtcatttagtcctccatttgggccatgatacaactcac

SEQ ID NO: 44076 - DNA, 406 bp, Glycine max
  unsure (1)..(406): unsure at all n locations
gtcagtgagaacctgtgatgtacctaagcaggcgagctcctggcagtcaacagataaaaggaacaaagaccacaaagcaaggaggcttgtggtggctggccagctgtgaaacttgattgatatgtgagatatggtctctggtaatcgattaccaagggtgggtaatcgattacaaggcttaaaaatgaagacaggaggctaagatggtctctggtaatcgattaccacggngtgtaatcgattaccacgcttgaaaacgaggtcaggaagctagggaagcctctggtaatcgattaccaaggggtgtaatcgattaccangcttaaaaagggaactgggagatggtagaagcctctggtaatcgattaccagcctgtgtaatcgattacacagaagaatgggtcac

SEQ ID NO: 44077 - DNA, 447 bp, Glycine max
  unsure (1)..(447): unsure at all n locations
agtcatcaagagattataaatatgtgaccatgacatgaatntcaataactatcaataatttatctttcaatcttctctcaacatcatttaatatctttcaactttntctattgaatnntttgattcattnttctcttcatctttctaaaagtttttgttcaaaactttctcttccaagaaaagttctttgttcaaaaacttgtgctattcattttcttcattcacttctccctttgccaaaagaatagaaggactaatcgcctgaattcttttgggtctcttttctctctttccaaaagattcaaaggactaaccgcctgannattttttgattcttcccttccncttaagcaaaagaattcataggactaaccgctngagaatatctttgtttccccttacaaagattcanaggactaaccgcctgagaattctttgtcccacaca

SEQ ID NO: 44078 - DNA, 441 bp, Glycine max
  unsure (1)..(441): unsure at all n locations
ctgcagcttagctntgtcccaggcttcatgtagacttgtccaanatcgcgaagtaaacctcggatccctgtcggatacaatatcggaaggaattccatgcaacctcactacttccttgatgtacaactccactagcttctccattctatacttcatattcaccggaataaaatgtgcagatntggtaagtcgatctactatgacccacacagcgtcatgtccacgactagtcttgggtaaactagatacaaaatccatagatatgctctcccatttccattccggaatttccaatggcttcaattctcttgatggtcgctggtgctcaaccttatgcctttgacatgtcaaacatcttgctacatattcagctacatctttcttcatgtcatgccaccaaanacttctcttcaaatcttggtacatcttagtcattcctgg

SEQ ID NO: 44079 - DNA, 302 bp, Glycine max
  unsure (1)..(302): unsure at all n locations
tgctggaactacttcacatggtcttgttggttcctatgcaagttgaaagccttggagganagacgtatgcctgtgtggttgtggatgatttctccagatttacctgggtcaactctatcagagaaaaatcagacacctttgaagtatctaaagagttgagtctaagactgcaaagagaaaaatattgcgtgatcaacaaaatcacgagtgaccatggcagacagttcgagaacatcgggtttactgaatactgcgcatgtgatggcatcactcatgagtactctgctaccattacaccacaa

SEQ ID NO: 44080 - DNA, 272 bp, Glycine max
agagaagtcaactttgagttgtgtctcacaagactctcattcatcatagttacaacaagtgttgcacatgcttctatttatagactatgtagcttacttgagaagctctcttgagaagacttcctcgagaagcttctttgagaatacttccttgaaaagctagagcttagctacacacacacctgtcataactaagctcacctgcttgagaatgcttcttaagaagattcctaatgaagctagagcttagctacacatacctctctaatagc

SEQ ID NO: 44081 - DNA, 618 bp, Glycine max
  unsure (1)..(618): unsure at all n locations
cgctcatctntcannccannnnntngnnnnnnnntnnnnnnnncncncnnccnaagagcgcataatgagtgcatagaagnnccnnnnnnnnaanannanaccgcnnanattagaccgtacaacagcaaagcagaagtcctttattaagaaagacactcaccctgtccgacaacttgatgtgataagaagctcacaacagtaagagtagcactcctgtatacttcacattatacacaaaataggcttaaccaatatcacatctactgcaataagtacatcatgcactgaatgaaagaactgtcacctggaccaaactggcaggagagtacatatgctgtagctgtaacatacacaacttgtcttcgctaggtgtgaaggatacaaaaccttctagttgttatgtaccacatgattcaatactaactgcacatagggctattggatgaagagcctcatcagatctacgatacaattgaacagcagctcagagagaattctcccctctcctgcgtggtgtcatagctccatgcctggtaacatacactatatgtagactttcgtataaaaactccgtactcttgttctgtagaaagctctgaatctcaatcacggcacaag

SEQ ID NO: 44082 - DNA, 259 bp, Glycine max
catataactctagatacattgccattattaggttaccgataaatgtttaaacatctatctatattatctatattatcgctaaaagccagaacaattggcaccgaaagggggctttgatgtagtggatgtaactcacataaagtagactaaaaacagtaaataaaaaactacaataataactcgaattaatcattacaaaataataataagagaaaggataatcaagctagttcatcttattgtgaactagtccatatat

SEQ ID NO: 44083 - DNA, 357 bp, Glycine max
  unsure (1)..(357): unsure at all n locations
attcttttgtgttcaattttttttccgtatgttgtggtaatttctttttacctaaataactatgttttggtcacaatattcatattanttatttttaactattatcagcccagtaagggaacaaagcgcaagcgtgttgtaaaacggggttcatcaagatctgcaacaacttcaagacgttctgtgaaggtaatagctcactcctttaactgcangaatttgaaatgtgaatttaacaaanagaataagactaccaacttcccctctattgangaaaatagtttttctatttttatcntttatgttctaacaaatctatttancccgtttggataaacttctccctaagcactcata

SEQ ID NO: 44084 - DNA, 480 bp, Glycine max
  unsure (1)..(480): unsure at all n locations
ataaatgaggaaaagntgtgacgtgatcagtggctcctaagtcgagtatccattcacttgaacctgtcttacttacactacaagtaatggataagacattacctttgtttgcattgctagaaccagtgattgtaccaatttgattcacatgtttattgttgtgaatntagctctagtgctgcaatagtgccattagcgatgcatattgttgaggagtcaccttcatttcagcattctatacatcttgagtttgttctgtagtagaaccgtctccctcttctttcaacacattcatattactgatgtttgagctntgagacttatggtactcgtccaggaggataacatgtttcgtgtagcattcatcaactttgtgtgtagagaaaccacaatatgtacaaagctttgcttctttnccattgggtacaagagtaactaacttggtactaacttaactaactaagctaactctagttacat

SEQ ID NO: 44085 - DNA, 381 bp, Glycine max
  unsure (1)..(381): unsure at all n locations
ctatttctctcccccttgggctacatcaaaaagtctaagtgcgtgggtaaaacaacacaatatcattcatataattcaatataacacggaaacacgacaaccaaatataatccaaacattgatgagtcaaaccaaatataattcaagcataaaagactatatacctantaccgaaagataatgaaagtccagataactaatagatatatcctaatacacggcttataataaatgatagataagaatctaagacttagaaagcggtggaagatcgaagcaccgacgaagataagtcacatcttcttcaagctgggtgatgagggtatccatgccttcaaagcgagcatccaaagaatagaatcgtcaccaacatatgtgtgg

SEQ ID NO: 44086 - DNA, 236 bp, Glycine max
  unsure (1)..(236): unsure at all n locations
gagcatccgctaaacacaagactcttgngctaagcgcgaggaagaatccagaagaagatgagttgtacaggttcgcttagcgcaccacttcatctctctaagcgcaccgcttcagttcatccgttaagcaagagaggcgcgctaagccaaaaatcactaatgtgcgctaagcggtccatacatgcgctaagcgcacgagcatgaacaaggccacctatttaagcctgaaatcagat

SEQ ID NO: 44087 - DNA, 527 bp, Glycine max
  unsure (1)..(527): unsure at all n locations
tgaagaggatgctntaatggagganaagacagagagaaggggttagcactaaattgaaggaataaaagagggagagaagtggaactctgaagtgtgtctcataagactctcattcatcaaagttacaacaagtgttacacatgcttctatttagagactaggtagcttccttgagaagccttcttaagaaaacttccttgagaagctttcttaagaaaacttccttgagaagtttctttgagaaaacttccttgagaagctagagtttagctacacacacccatctaaaaactaagctcacctccttgagaagcttccttgagaagctagagcttagctacacacacccatctaanaactaagctcacctccttgagaagctttcttgagaagctagagcttagctacacaccctataatagctaagctcacccncatgacananataacatgaanataccataaaatcctactacagagactactcaatatgccctanaatacaaagctataaccctatactacta

SEQ ID NO: 44088 - DNA, 381 bp, Glycine max
  unsure (1)..(381): unsure at all n locations
agtcttgtcttttacatacttatatggacatctggtgagtatgtaaacagcagtgtagactgcttcagcccagaatgtgttaggtagtcccttttccttgagcatcgatctagccatctccataactgtgcgattctttctctcggacactccattntgttgaggagaatatgcgactgtaagttgtctctcaatgccttcatcctcacaaaatctttcaaactcgtgagaggtgtactctctgccgcgatcacttcttaatacttttatccgttttccactttgattttcaacaaggaccttgatacttttgaatactccanagacttctgatttttcttttagaacatatactcatgtcattctagagaagtcatcaat

SEQ ID NO: 44089 - DNA, 438 bp, Glycine max
  unsure (1)..(438): unsure at all n locations
aagcataacaaaacattctgtgattggtttaaagatacaatctttgcagatgagaatgcttcacaaacattaataaaactaccaaatgggcctaaaagaaatgttataacctggcaaggatatgacataaacaggtattcattttacacaaaagcacaagatgacaaaagtacaatgcagaacagcggtgtcacccttaaggctgaatctcaacactttgcaagtgtcaatgacgccaatccctgtgtagcttccatcccttactntgngttcattgatgaaatttgggagcttaattatgtgaaatttacagtatgtgttctcaaatgtaaatgggttgacagcaacatctgtgtgcgcaccgatgatatangatgtaccctggtagatctanagaaacttggtaccacaatgactctttcatcatggcagaacaag

SEQ ID NO: 44090 - DNA, 352 bp, Glycine max
  unsure (1)..(352): unsure at all n locations
agcgtctctatgaaggtctctatttgcttggctaggagcttgtntttggcctagtagtgtgtcttgtgatgtgagctcanaaagactcttctttgtgggtgtgtaagctcgatcacgaaggatggcatggtcactagctgccatgttttcaatcaactccatagcttcatcaggtgtcttcaatntgatctttccaccaatagaggcatcgagaagctgcttggaatggtgtcgcaagccatcaatgaagatatttagttgaactggctcactgaacccgtgagtgggagtctttcggagtaacccatggaaatgatctaaagtttcactcaatgattcatcatggaattgg

SEQ ID NO: 44091 - DNA, 407 bp, Glycine max
  unsure (1)..(407): unsure at all n locations
atgaacaatgaatcatcattatcaggggacgcagagtatggaacagggacaaagaggaaaagctagaaaccacgatacctgatggattacgtggcaaaatgagtgagtcagcaacttgtgaatgtatgtatacatgattttgatgatgccaaagaagaatcaaacaaggctgcttcaaatgaataagcattgcttcaagaataattcaagagtgcttcaacaagcaaagccatgtttcaagattcactaaagaccaagtcttgccttataacacagtgctattaagacatgcagtgctctggtaatcgacaggaagtgtaatcgattaccacaacacacggttgagaaatanctgttgaanaacggtttgaaattgaagtttcaacatgtaatcgattaccatatgt

SEQ ID NO: 44092 - DNA, 584 bp, Glycine max
  unsure (1)..(584): unsure at all n locations
cacgcgctttganntcantgtggttnccccatgcctntaagcgactctataggaatctcgagcttcttttggaccgtgaacaagcgactaacacctctagtattaacatgctgcgtgctcgcgactggacacctatctcccttccacactcgagagcgctattgctgccccgaacagctccgacaaatttgttcactcatgctcttacttgccagccctcttggtctcttgtacaatggcatctagcggtaagctgcaatcatattcctgctacccagcacactactaacgaacgtgcgtatatgtccaccttgaactaacctttggcgagcgattgcttacacaccccactattgatagcttcaaccttcttctcccatcttgcggtgctataataattcactcactctgactacatcttactaggtgagcctatcttactccgagctgaactttcaggctgcatggccccaanatgatgccatgacaagagccttacctcttgatctcactcactgtgtggccatgtttttggatctctgttatccaccaatagactctagagcttcgaaggacagaacatc

SEQ ID NO: 44093 - DNA, 362 bp, Glycine max
gttaacctacggttagaaagtgagaatgtggcgttatgagtggaacaagagtgaggctttgagagttggaaggttaaatctggattctgtagtaaatggcagttaaaatgagttaatcctactttgaaatgtcatttacgatttatgagaaaggttatgctgagctatagagaataacaaatgaccaaagtgaacaaagagccatttctatggtatatctgggtgttgaggagtcaaattcttattcggtgaaatttaggcgaaatccagtttggacaagttatattgatgtatggactgtgtgaagtagagtttgcttcaaatacctaatctcattcacttctaacctaaaaatcattaat

SEQ ID NO: 44094 - DNA, 430 bp, Glycine max
  unsure (1)..(430): unsure at all n locations
catgatatatgacgggtctcattctgacatccgagtaanaactaatcgtcgttggaatttcctcagaggttctattttcaattctgtgagtctcaatatactacacgattcaatcggactttccagtaaaaatgtattatcgtttgaattntctcagagcttctattttcaatttcgagcacctataattattaagggactcaattggacatccgagtcaaaagttattgttctttgaatttcctcagagcttctattttcaattttgagcgtctcgaattattaaaggactcaatccgacatctgtgtcaaagttaattacgttgaatgtcctcgagcttctgtttcaatttgagtgctagatatataccggactcaatcgacatccaacaaaagtattgcatttgattttggagagctcgtatatttc

SEQ ID NO: 44095 - DNA, 351 bp, Glycine max
  unsure (1)..(351): unsure at all n locations
tcttattcccagaaggaaattcaataaataggccctcctttttttttaatggagagggttaccacttctggaaaacccgaatgctaatcttcaatgaggcaatatacttaaatatttgggaagccatagaaataggaacttatgtacccaccatggtggctggaaatacaacaacagaaaatcctatggaaattgaagtgaggaagaaagaagacaagtacaatataacttataatctattcatggaagaatctattcatgtttcatttgatgagtctaatgctattcctcgaagaaaggatattctaaatgatattgcagaatctttataacanatgcatattcatggac

SEQ ID NO: 44096 - DNA, 352 bp, Glycine max
ttctgactcaccataaaccttgtcccagggtgataatgtcgatccttaccctcggaagcgaacaaagacgggagagggagaatttcccatctaagacgaagcgaagaaggagagaacgaaaatttccaatcccatgaaaaaaagagaggagagggaattcccaatccaacagtgggagacagccataagacaagagagactatcttcaatcaaagaatgggagaaagacaaacagaacgatacgaacgaaagagagctcctgatcaatgatcgaacaaaaacagaagatatgtgcagagaggtctctggaccacacaatatctgaacaaatacagtaattgtcccaaatgaa

SEQ ID NO: 44097 - DNA, 307 bp, Glycine max
tagactcatattgctaactccaataaatgagtgatgcatctcttagcattgaagagaactagctacataacaaagattatcatcacatattcactcatataactctaaacctgtgtgtgtgaacgaccttctgttacattgaaaagaaatatgcacgtaacactggctcttcaacaagtaatcggagtgtctaaatgaccttctcgatgcatctatagcatcatctggactatctatttgctggacattaaatgttgattatatgcatgtaacttttacttaggctattatgaaaaccattctatta

SEQ ID NO: 44098 - DNA, 352 bp, Glycine max
  unsure (1)..(352): unsure at all n locations
gctagagctgattagaatggttaaggggtcatactgtttctacaaagtctcggtcctgcgcttggatattctgataggcttcaattacgcagcctatttcgcgttttgagtcccattagtgtttttagcgaataaatttctatccctgctaaaggacccaagaaattttactctctcttttgtaataaaatacgtctactattagaaaaaacacttaacatttcactctcattttaatttcatattcaggagtatgcgctctattctctgcccttatcaatttctcctcttnttcttatttggctgaatcanaatcctccgatgaatatcttcatggagggatagtcttctt

SEQ ID NO: 44099 - DNA, 396 bp, Glycine max
  unsure (1)..(396): unsure at all n locations
tacctatttatcctacacnagaacatttacataagtttatgtcaatcaacactatatntgtaacaattcttttagtgataatgatgatcataaaaaggaaatacctttttctgaaaaaggttgtacaatatgtgtcgaccaatcaatgaatgtgattatggcctacttcactaactaaacctctctagtgggtacagagatacgaatatcaacatctcaaacttcatcaatacccacattcaccagattgttgcccaaaagaatgtggtgcattaatttttacccctcataaactctatcaatggcaactatgcgggaaggattgtcatcaacttacaacccatacctatctgatgcatccgtgtctgggtcctgctcttanggatcaacacaaca

SEQ ID NO: 44100 - DNA, 165 bp, Glycine max
  unsure (1)..(165): unsure at all n locations
actctccaatctcttccttctttgacccacctatatgtgtatcaatgcacactccctcactataatgaaccatccttgctcaacttatcatctctgcaaactctccatctttccttcactcgttattcccctgccannttctttgtccccaagtggatattcaaa

SEQ ID NO: 44101 - DNA, 439 bp, Glycine max
  unsure (1)..(439): unsure at all n locations
tgtaagatttgcaagatcatcttcgttgacaactccttgagtattatggccatctataagaagcgttgacaatttatagagtgatccaagactttcaaatggatttccgctgaatttattaatagagagatagagatattttaaatctatctcccataagttgcggagattacccaaaaaagtcggaattgttccttcaagttgattacgtgataaatcaagttcaacaagagaagtcaaatttcccaaagaagttggaatggttccttcaagttgattatatgacaaatcaagttcaacaagagaagtcaaatttcccagggcatcagaaatagtcccatgcaagttgctggaacttaggtccaaagacttgagacgatganaaccgtataagcaatcacgtatagatgatgagaatgaattgaaagacaagtcaaga

SEQ ID NO: 44102 - DNA, 403 bp, Glycine max
  unsure (1)..(403): unsure at all n locations
cttagaaatattaattatgcttgttaaactaaaaaaaaggaaaaaaaaggcacaactatatttgtatatttattgtgcttttggaaaaggtgaaaatggaaggaatggatggaaacaattttgtgtcattgaattaccttacagccatatgaaaaatgtgtgtttcaattttttttggtgcacaactgtaatcttgctgtgctattaaatatgaaattattcttaatatgtaggtaccgactgctacggattggcaaaaagtacttgccaacttcagtgttactgcaacaaatactgtcatactgctcatcttcngaggtatgtatgtcattcttaaactgttgtggtaaagtattatattttgccctgatgtagtattgttattttacattctacctcatga

SEQ ID NO: 44103 - DNA, 467 bp, Glycine max
tctcaccctggatctcttcattgtccttatcgccaaagaccattcaacaacttgtaggttagcttgtatgtcagttgtcacataaggatttacgaaatatatgcaatactagtaccttctgcaagcgtactcagttcatctatcgaccattgagttgatatattagtaaacgagtcattcttgatagaggctgattctgagtatagatatattagtaacttctaatctgtcgaatgtcatattgtgattaaattcttttgcagatatccattctttctatttcatgttcgaattaaaatttataaacttaaatttgggtcaaacttaagtatgtaaactgagcttacaaaagtatctcaaatgattttccctctgaaattgagttttcagacaaaattctattcttaaacatatttttgagaaagtatcaaatatgatctcagaactcattttcctctcaaacatac

SEQ ID NO: 44104 - DNA, 399 bp, Glycine max
  unsure (1)..(399): unsure at all n locations
ttgaagtacataagcaatagggttatcattatgctgtgacgattaatggccatcccatatttaatttattccctttatgttagcctaattgtgggacacaatactcagcacttgtaatgctatatagttttataggtgttagtaatcttgtggttagattatatactatntttgctatgacaagntaaagagagaataactactttcgttgttatcaatttgtctttaattatatgtgcagattacatgaattagcaccattagtcaaatatggtcaattttgatctttgaatcagtatcaaatatgtacgtatgtatggattacgagaatatatagcttaatgcgggtactcatgtaagataaatggtttatttttactatcaacttattaacaacat

SEQ ID NO: 44105 - DNA, 481 bp, Glycine max
  unsure (1)..(481): unsure at all n locations
tcagttacggtggctctacgtccattgtcggagtcccatatctcaggtatcacttgtttctcacttgaattatgggtgtgctcagcatcatcagaattatgatactcatgcaattcctttagagctgtcaccacagcaacgtatgcctcctctcccaaatcattttttaaagataataatttaggatcattttcatcaatttcttccttgaaaaataaaatgcgagagacatcaaattntgctcatttaattgtccatgctagtgtacatttgtgacacataattgaatcccctaccctgctgataacatgccatgttttacagattatgccagtttggttgtaacaaactctaaattggagatatacataaaattttcttacatgatcatgtgtttatgggatctataataaaggaacattattacatttgaacgagccttctcttctactaattcacagctatgttaaaccaaaacatg

SEQ ID NO: 44106 - DNA, 515 bp, Glycine max
  unsure (1)..(515): unsure at all n locations
gccgctgctcttttgtgcatcatctacaccagngatctctnagtcacctgcggcntgcangcttncacantnntattttctcnaccttgtgttttgaataccaattactaagtcttttctaacttgatgatngagatgatgcatgtttatgtgtgcatccctacgatgccataaccaagaatcatcaattgtacttaccgaacaactaagctcacatccactgtgccttcatgagtgacttcaagcatattccatatttcctttgcacttttgcaccttgcagtatgaaagaattcattagaagatanaccataagtgaaaatgctnnntagtttttnttatcatctttcactgtttctttctcatcattnttcatctcatcccattctttgagctaccaatcaccattcactttcttagtanggataaaagaacctttaacantcgcattccatgcaccgaantanatngatggagtaatattttcattctcttttgccannanagtaatgttg

SEQ ID NO: 44107 - DNA, 374 bp, Glycine max
tccatcaagtggtatcagagcacaagagcttctagtaagtgctgcttacacctccattaattatttttctttaccttctcttacatagatgtttcttcatttttctccatgtatctcctcacatgtcttgatctaaatgtggctaacatgattctttagaagtttccaccaattaaacttgctatataaactagatgtgagtatctatcggccaaattccttgtacttgttcttgaaccacgaatcgtgtcgagtatacgttccttagagttgtgtcttgttattgttcgtggctgaaacctaaaccataaaattcttaacaaaatattaaattagaagaatacctcataaatctatagtgacttagtcaccta

SEQ ID NO: 44108 - DNA, 361 bp, Glycine max
  unsure (1)..(361): unsure at all n locations
agcttggtgtttttgaagtgaggggggagagttttgggtggaggaaaactcctcctccctcatttntttatttgcaggtgcaggggtgctcgcccaggcgagctaacctacccttttttttaggggagacgtaagtatggccttctacgggcagcgtttgcttactcgaacccactcagggcagatatccaatatttactttaaagacacaacagtaattaatgtaaatttataggatactaggctaccttgcagcggcgctttccattngtccagagctaggcaagggacgacgacccatcggtcggaccctacctctacttgcgcccatcctaagacctgaaagaggaaacacatttat

SEQ ID NO: 44109 - DNA, 420 bp, Glycine max
  unsure (1)..(420): unsure at all n locations
gtgctcacctatgatttataaaattgcaatttcagcattcatactttaaactgaagtaattccaattagataaatgatgggatgaatacctggaatcaatgatagtatataatcattgacctgttctactgtttcattggttgaagctaatattgcccaggatttgaagaattgaggatcattgtggtgctgatataagtttgggaatgttgatttgactatagcattgattggatcatcgtattcagttatgagcaggtggacaagaatttcaactgtagcataatcatcattntcatgaccaataattccatctccaatgtgtagaatccatntagaanatgcggcagtttcttggtcatcaattgagtgtacatntctttgtaaacacatgtttcttgttaggcttaatatttcaca

SEQ ID NO: 44110 - DNA, 454 bp, Glycine max
  unsure (1)..(454): unsure at all n locations
tgtaatggtagcagaatgctctctcaagtgatccaaatacacacaagaaattcatatcctaacacagatactgataacataagatcaatgacaatcaattatcaacaaaatagacacaagaaattcattaattaacttatacacaattaaactgttgaaagaaaatttggataagatagaccccccctatcagtaaatgtgttaatgaacttgatatacaaccatctttaagccactgttcctagccctcatctgattcttcaatggaattatcagtaaactgtactgcgaatgagtattcaacaacaatagcccttggttcatatgatcctctgtctacatcttcattcaaagcagccatcgcgccatggcaaattctgaacttgagttctttatctgaacttntttttttctggtcaaaatttatgaacctcaataattaaaaatctaacat

SEQ ID NO: 44111 - DNA, 300 bp, Glycine max
  unsure (1)..(300): unsure at all n locations
tttgttatttgataattgattattcaattgctctctgcatanaatgagttttgggatgaaaccatttcccacaattgtgtattaccaaagtgtagttcttcacaaaattccataaccatcagacttatataactcatttcatacccctaagtttaatttgactcaaaactagttcatttggtgattccgaaagcctagattttgatctgtgatgaatatcaatgtgagaccatgttctgcaatcctatttttaggtgcacaaacatcatattgaggattacaaaatttcttccctcggat

SEQ ID NO: 44112 - DNA, 385 bp, Glycine max
ggaactgaaagcatcacgctggacgccttgtttcttatggctacgactcatcatgaaacaaaaatctatttgtggaccggtactcttggacgaacaaacaaatgaataaggatccaaagataggaaacattcatctccttcgatgaactttgagaggctgaaatattgccgttacattaatccaaagacaccaaatattcattagcattcagactgactttttgtaaagagttccataacaagtagttgaatggggttacattaaatctgttctatggtagtcttagctattgatccacatagaattatatatataatggactgtttttcttttcactgcgtaggtattgatccaaagtttcttccatgtataagactaacaaac

SEQ ID NO: 44113 - DNA, 217 bp, Glycine max
  unsure (1)..(217): unsure at all n locations
tccgtcagtggtaccttaaagttcatgggataatctcttcatttggttttgatgaacaccccattgatcaatacataatcacaaggtcaatgggagtaaaatatgntttcttgtttgatatgtagatgatattttacttgtagcanatgaataanggttgctacatgagatgaaaacantttgacatgaggatatgggtgatgaatctatgtcattg

SEQ ID NO: 44114 - DNA, 442 bp, Glycine max
  unsure (1)..(442): unsure at all n locations
tgatgcaacatatggagaggttaatgaaacaacgagatgatgcgctccatgagaggttggatcaaatggagaatagagatcataatgaagaagaaaggaggagaagagggaatgatggtgttcctagacaaaaccgaattgatggtattaaactcaacattcctccatttaaaggaaagaatgatccggaggcctacttggagtgggagatgaaaatagagcatgttttctcatgccacaactatgaggaggaccagaaggtgaagcttgccgccacggagttttccgactatgctcttgtgtggtggaacaagctacaaaaggagagagcaagaaatgaagagccaatggttgatacatggacggagatgaaaaagatcatgaggaagcgatatgtgccggctagttactcaagggactngaaattcaagctccaaaaact

SEQ ID NO: 44115 - DNA, 346 bp, Glycine max
catatatcagcggctctatatgtcttgttagaatatatttctcattaaatgcttacaaaaagaagataaggtggaaaaacaaattaaacagagactacgttttaagatagcgtttacttatatatatacatatatgtttttatatttcacttcgacacgaagaggaagacttatcaaaataaaaaaaaacgaaggggaggagcttgttgtactgccccacagtaccccacccacttaaagcaaagaataatatactataattaaaaagctaaactgtaaaaggaaaaaaagaggattcactttaaatattaaattaaagaataaattacagctaaaggcgaaataa

SEQ ID NO: 44116 - DNA, 266 bp, Glycine max
atcgagagcgaaaatactttcaacaagggatacactaaacgtgggtatgtgtatgacattaacgaatgacaaacccaacactcaactccaacagatttttttagtgtgaaatttattttatttttgaatcccaagaggattatttagtaattagcagactgactcacttctttcttatatatttttccctctttgacggcacaatatacaattttgaggtcgctaggctggataaagatgatcttatgtctaacaacctaattgtt

SEQ ID NO: 44117 - DNA, 332 bp, Glycine max
actatgtgactcttataaattacaacatgccaactagcttttgtatcttacagaatattgtcatcaaactgaatgcttattattaagcagggatttgatgagtctaatattggagaaagggcatagcagagttcctgtctattacgagcagcctacaaatatttttggacttgtcctggtatgtatacagcgtcttatttttctttattccttcagtaatgaacagtcactttctgttacgtgaaaacttcttataaaaaccacaaacagtgaaacagtattacaccaatttctttgagcttcaatgtgtcaactttctttccacaagaata

SEQ ID NO: 44118 - DNA, 461 bp, Glycine max
  unsure (1)..(461): unsure at all n locations
ntaaggccgaatatattccttccacagttgcacgcgctattaccgcgtcttgtatcttctttatggaaactttaattaggataacgataacttgagtgattatttaagaatctaacaactacttaaacttgagtaattaaattagataccctttgctaggtgattatttaatctttaataatctatacacaaatttcttaattaacttattggttcgtgtctgttaagttttcacatttggggccaatgggtgggtggctataacgtgcctcaaatagccttgcctatggggaaagaaggaatcatggagtaaaaaatctatctatatacaactaatgaacaaaaaanaactattttgtacgtcgatgagtaatgaattgaggttgtggngtgcccctctttaatcagcagaatgatcatgctacccgaggaagcttagttgggcggatactatgtactat

SEQ ID NO: 44119 - DNA, 375 bp, Glycine max
  unsure (1)..(375): unsure at all n locations
tcctaaagtttggaacagtgtcctaacaacagaatttctcacttgcaaaacaaaactttcagtaccagaaagctttaacatccagcaacaacaatagtagagagaaatataagtttgatggtctattgaaatgggttttgttctattgtccaaatttccctaatcggtatacaagtagtagagagaaatggaagttngaaggtctatttaaatggttgtaagttgtaacatttatttagggagaaacattaggttatgaattatggtcttcttcgtcatgcaatgaaacccaatcttgatacacaatagacccaaggaatgaagcctagatttctggctatttatgatttctttaattttctctacaacactaac

SEQ ID NO: 44120 - DNA, 451 bp, Glycine max
  unsure (1)..(451): unsure at all n locations
actgtgtgcatgaatactgttgggatgtggcaaattgttatgcagttattgttattccggaaggaatgaattggcaacaaaagataagattcttttaagatgctgatttctatctatggcataacccgtacttattcaagttaaagggtgacaatttgtttaggagatgtcttactaaagaggaagttcaagacatcttatggcattgccataattcccccatatggtggccattataatggggaaaggacaactagtaaagttntgcaatccaaattatttcggccttcaattntcaatgatgcacacaatcatactcaaagttgtgataaatgccaaagatccagtaatacttcatagagacatganatgccattataaaacatcttataggttgaggtctttggttattggggaaattggtgcatggaaccttttcctcatcacattc

SEQ ID NO: 44121 - DNA, 315 bp, Glycine max
taacttccattattacatatcagtactactcagaagaaagggattggtcttgattatgcctatctaatctacctatttatactaattacacgaagcagagcccaaattcgtagcccaattattcaagtgcagatgttatgacttccaagcccaatttgacccttagaatggcagaattggcccaagcttatccatgacaaaattgaagatctgtttcgtagatgtccaaggactactcacatgctctttttgaagttctttagtgtcctataagccttgcacaaggcagatacgccaagtaagcacataaatatg

SEQ ID NO: 44122 - DNA, 470 bp, Glycine max
  unsure (1)..(470): unsure at all n locations
tccctgatgcttgcgaagggcgtgtgtagctaaggtctatcttctcattgagttgagcttacctattagagcagtgtgtgtagctaaactccagcttcttaaggaagcttctcaaggaagctttcatttagtgggtgacctaggctataaatagaaacatgtgtaacacttgtcataactttgatgaatgtgaaacttgtgagacacacttcaaagctcaacttctgtccctctttttctcccttcaatttgtggcccccctctctctctcattcttttcctccattgaagcttgctctctaagcttcttatccaaggcactctgttggtggtaaagctcctncttcaatggcttattccctagtggatggcgccttctctcacctcttctcctttatcttctgctacatctccatggttgaaaatcaccattgaaagacctcattgaagctcaaagatgcagccttcat

SEQ ID NO: 44123 - DNA, 351 bp, Glycine max
  unsure (1)..(351): unsure at all n locations
tacttacttgttgtgattaactaaagcgcgaaacggaatcaaaaaatgtgaaaaatgatgaccctagggctgcaaactcgtaaatcccgtgggtatggcttttgaaagggggaaaaagaagttnttgaatgcaaaaacgcgccccctttcgtcattcttataatatggtgcaggggtggctcgcccaggcgagctaacctgcatttttttttttgagaggaacattaaccatgtcccctccttccttttagcgctttgcctaacttgaacttacttaagttagaatcaggcgttgattactttattttaaaaacaaacagatagtaagataactgctaatacaaaggatac

SEQ ID NO: 44124 - DNA, 465 bp, Glycine max
  unsure (1)..(465): unsure at all n locations
tgcctcanagaggtccaggaaggacaaggcagccgaaggaactagttccgctccggagtatgacagtcaccgctttatgagcgttgtacaccagcagcgcttcgaggccatcaagggatggtcgtttctccgggagcgacgcgtccagctcagggacgacgagtatactgatttccaggaggaaatatggcgccgacggtgggcatcactggttactcccatggccaagtttgatccagaaatagtccttgagttttatgccaatgcttggccaacagaggagggcgtgcgtgacatgagatcctangtaaggggtcagtggatcccgtttgatgccgacgctatcggccaactcctaggatatccgttggtgttggaagagggccaggaatgtgagtatggccagaggaggaaccggtctgatgggttcgatgaggaggccatcgcccagctgctatgtatacc

SEQ ID NO: 44125 - DNA, 322 bp, Glycine max
aatgaagaaagttgatatatctaattaaaaaaatagcaatgcaagcattaaaagtgcaacagtggttaaaagcgttgggtctttctaataatgaattgatgcatataaagatatctctctaattaagaatgttcttgtgttctgatgtgaagactaaagtactaaacctcgatccctcataagtttagactaatttaaaccaagcttcatcctcagatccctcttgttggactaggcttaatttaaacagcattgtaatcacaacataagaaaaactaacaccgtgcactctatccttagtaatacatttagttagccctac

SEQ ID NO: 44126 - DNA, 435 bp, Glycine max
  unsure (1)..(435): unsure at all n locations
tctcnncccaatttctataaatagggggagatttgaagtttttaagggttcagccccttaggcacttctctctctctcgaaatagctgaggaaaattagttccgtggagaaaatccaagccgaggcgcttccgtaacgtttccgtgagtaattacacgaagattctcgaccgttcttcaagattcatcgttcgttcttcgttttcttcagtcttcaacgggtaagtacctcanaccaagcttttcaattcattctatgtacccgtggtggtccacattntgtttcatgtatntttattctctttttcatttactttatgtacccccttttgacgtgcttaagccatttatttaagtcatttctcgcttaatctaaaaataaaatatatatccaccgatcgtttgaattgtatcatccgttaattntggttaaaat

SEQ ID NO: 44127 - DNA, 320 bp, Glycine max
acattcaactttgagcgtctctatatattacgggactcaatcagacatccgagtaaaaagttatggtcgtttgaattggctcagaggttcaaaattcaatttcgagcgtctcgatatatttcaggacttaatcagacatccgagtaaagagttattgtctgttgagttggcttagaggttcaacattcaatttcgagcgtctcgatatattacgtcactgaatcggacatccgagtgaaaagttattggcgtttgaattggctctgagcttcaacattcaatttcgagcgtctcgatatattacggtactcaatcagaca

SEQ ID NO: 44128 - DNA, 351 bp, Glycine max
  unsure (1)..(351): unsure at all n locations
ntgagccaattctaacgagtaataacttttactcggatgtctgtatgagtctcgtaatatatcgacacgctcgaaattgaatgttgaagctctaagcctattcaaacaacaataacgttttactcggatgtccgattcagtgacgtaatatatcgggacgctcgaaattgaaagttgaacctctgagccaactcaaacgacaantaacttttacttggatgtctgattgagtaccgaaatatatcgagacgctcgaaattgaatgttgaacctatgagcctattcaaacgacaataactttttactcggatgtctgattgagtcccataatatatcgagaacgctcgaaat

SEQ ID NO: 44129 - DNA, 438 bp, Glycine max
gcttggcgcttatatctttgcatgaatatatgctattgggactcaagagtgttatgcaatagttgtggacaataaattacaaattagcttggctaagaatccagttgctcatgggaggaagcaacatattgaaactaaatatcattttcttcgtgatcaagttaataaagggagattatagttgtgtctctgcaagtttgaacaacaagttgtagataccctaactgaagaatgcaagatgtaaagaattgaggagaatgttgaatgtggtgtctttagaaactttgatttaaggaggagtgttgcagagtaattcaaagtgttaacccatgtgtgtgcgtgaactttgtaggtatatagttaaatgtgacaccctctaccctcacacataacgaataagaggaaataaaatcatgtggaaaattttataataaaaaa

SEQ ID NO: 44130 - DNA, 469 bp, Glycine max
tcatgatgatgaatcaagttgattcaagttgttttgatgatgacaaaaagcccaagagaatgatttcaagattgagtcaacaagttcaagataaaaattaatttcatgtttcctgagaagaaatcaagaagattcaagattcaagagaagtttgatttcaagattcaagagaagatgaattcaagattcaagagaagaaatcaagaagagttcacaagggaagtattgaaaatatttttcaaaaaacaaacatagcatagttttgtttttcaaaagagtttttctcaaaattttctaagttaccagagtttttactctctggtaatcgattactaattacctgtaatcgattaccagtggcaaagtttgatttcaaaagcttttaactgaatttgcaatgttccaattcatttttaaatggtgtaatcgactacaatatattggtaattgataccagtgtatctgaacg

SEQ ID NO: 44131 - DNA, 283 bp, Glycine max
ttttatccttcaagaattggctcaccaaaggccaattactaatgtagagcagttccttgagcaggtggtctggcctggagcttgaccttcgatggtcaaaaatggtggaagctttatatcccaggcactctaacagttgagaccctacgaggctgctcctcctgagcccacacctacacaggtcgaactagagccagctgatccaccatctccagtggcggatccattccttccattgagcaatttctggagagggtagcctggcctgaggcccaaccttctc

SEQ ID NO: 44132 - DNA, 435 bp, Glycine max
  unsure (1)..(435): unsure at all n locations
ctgagctcattgttgctgccccacaaagctcctcagaatttatctctgccatgttcctccttgcgggcccttttggtttcttgttcaagggctcttgcagtggccgcgttttcctctcgtaactcggtgcactctttccggatgtttgtagcggctgacttgaatttttctttggcgagtcttgccttccctagctctaattttagagcttggacttcttcatcctcctctggagcttcgaagttctcctcatcaataactttcaacttggagagcaaatctaaccctcgcgtatgaactcttagccattcatgataaccactgatgacgccattatgaatgcccctaagttctttatctttcctcaacggacttcttcatgccttgtggactttntgtacaaccttgagactttgcgcgccgaaatctctcaca

SEQ ID NO: 44133 - DNA, 409 bp, Glycine max
  unsure (1)..(409): unsure at all n locations
ctgcagcttgtacatatntgagcactgaanactctatatattcgtcgagattggcgggtgcatgaattattcgcattggccatggaaaaatcagaagaagaaaaggagggtttatattagtatcggaggcaattatttgagggatttgaggctggttgatgagtttcgtgaagatcgagatgatatacatgatgtcctggcctgggcgttttaaagatcagttaagcacttccagctcggatatacgaaatagattggaatatggtgttgagctttcgtggctggaaggtttgtgcaggacatactttttcccaaccctgcaggttgaacctgacaatgtctgtccccgtgtctcgcaatacgcacatgtangaacgtttggaacaacattntgttaatataacgtctg

SEQ ID NO: 44134 - DNA, 356 bp, Glycine max
tgatttgggccttgtctgggggtctattggatggacccccttggttgttgttgaagttatttcccgtataaaattctcattccgaaaattgattttaagaaaaatttgcaccttgatgataaccttgatttcccctctgattgtatccttgatttcctccatgattatagccttgaagagtggatcgttgataattggtatgcatacttaatttgtacatttaaattacataacaattatctaattgcttctcttttaatgcttcttttgatttaaaaagataggaatatatcttcttctaagtttttatctcacgaatgctaaagttagtgaatatacaatatcttggttctttt

SEQ ID NO: 44135 - DNA, 294 bp, Glycine max
gcttatgcatctcttttcgcaccttttttttattgatggggtgagccttctctgtggctgactaactggtctgtagtcttcttccatcattatcttgtgcatacagtaggtagggctgtatcctttcagatctgatatgtgccaccctattgcctccctgtgtctcttgaggacctccaccaacatgttctcttcctctgttggtagctcagtgctgatcaccacaggcttggtctcattctgctctaagaacacatactttaagatgttgggtaggatcttcagctccacctt

SEQ ID NO: 44136 - DNA, 432 bp, Glycine max
  unsure (1)..(432): unsure at all n locations
ctcagctgcttctcactggcagaagaaaaccttgaaggatgacatcattggtagcatgactttctaaaagattcatcaattggctatattgctgggtcgtaagctgaaactagcaacccgagtcaccagaggaaggttgtgagtgagacatatcaacagttacttgttgagcaaccttgtgtggtggttcataagaagaagaatgtttctctgcttttgaggaaaaaccagtcctcttataatttggaggataaccatgtaacttgaagcaacgatcctgagtatgacccagcataccacaatgagcacacaaggggcgattcttggaagatcctttgaagcaattntcaagatgattgcatgcaacagaagaagtcttcaaggcaaaagcatgtgaaacttcactagtataggtggaagcaccaacttcct

SEQ ID NO: 44137 - DNA, 386 bp, Glycine max
acccgatgtttgtgcaaccaagtgtcatcattcctatattacccattttgctagctgttaatgtcgaattatagtcttggtccctcatctgccatttctttcatcttctaaatttattcgatgtcctcgagatttaaaagaaacatctcttacttgatttcaaaatagatcttctatttaacttataactcactcaactctatcattacccatattcaacatgcagaactaccaacatgcaaagagatctaattccgcaaaggccaggatcaacaggaaacgtatcatgcagcagaaacgacatcctcagactcagtcaccttcacagccaactatggactgcacttcaaaatatgcagaatatgatagtaagacatatgatatac

SEQ ID NO: 44138 - DNA, 453 bp, Glycine max
  unsure (1)..(453): unsure at all n locations
tatgacattgaacagatgttgcanaaatcagtcaatgttctggacatggcttaaggcatatcaggaataaaattccttcactttccagcaatggcaagtgaacccaggaatctgtttgccgtgaaaaaagaggggtggataggttgttatcgggggtgtgcatagtaattattgtgttttgttgttgggattgtatcttcctgctcattgtatattggtatatggaaagatgcgatcttgcatttcagtaggatgttcagtatgcatgattacaaatcatgtgcaagttggatccttgttgtaagacttttgttattatgatttagcacaacttgtgcaaagtgatgaaattcaattgcagataaaaaaacgatcgagtagaagcatcttgatcacttatctcatacatctaaacatcaaatatcaaatattatgattatgtttgataaaata

SEQ ID NO: 44139 - DNA, 403 bp, Glycine max
  unsure (1)..(403): unsure at all n locations
ctcattaagaatcaaagtgccatgaagaatatgtctgtctttaatgaaagctgtttgtctttcatcaattaagacaggtatgacatgtctcaacctgtttgctaaaagcttagctattattttatacatgcagcctatcaaagatattggtctataatcatttagggactgagggtggttaactttagggattaaagccaagaaagaggcattgctgcctctagggaaactaccattgacatggaactcatccacaaatcttctgaactctggtttcagcacaccccagaattccttaataaaattgaaattaaagccgtctggcccaggggacttatctncaccacaactccacacagcttccttgagttcttggtctgagaaagctaaaatcaactcctcc

SEQ ID NO: 44140 - DNA, 463 bp, Glycine max
  unsure (1)..(463): unsure at all n locations
tgggctgaggacatatataatagcaccaaggttttagtttatagagagtttttggagaggagaataatttaagggttttgcaattctagtttttactgttcatgcacactgttcacgtagcaataaaattcgttttctgaaatttcattttctgctttaatctgcaatttcgttttctgctgattaatggaaggctaagtctctagagtttttttctcttgaggatcaagcacaactctctntgaggttttgttattactattgaattctgatcagttcttcctcttcaccaattgctctgtatttattgttattaatccatgcatgcttagtacttgattaattgtctctgcgcttaatttaccttcatgcttaataattagtttccttcatgatcaattggtgtatgtgttgcttaatcacataatgacaaccttatgttaattntcgcttagtaatttaa

SEQ ID NO: 44141 - DNA, 388 bp, Glycine max
  unsure (1)..(388): unsure at all n locations
agtcatgtctaaattcttatatcagttcggatggagaagggagtaaagagggaaaacaaatttttaattaaacctttcccttgaattagagctttctaaaatgaagaatgatcatgtaaataaaaaatcttatttatttctatgaacattttaatatttaaagttctccaaatttgaaggattaatatgtaaactacttgaatgaaacatattatttgatttcaccactcaggagatgagattgttttaattgaaattcatttcctttgtaaacgccagaaatgtgtttgtttattttccaagtaataagatataaaaatngcatttataaatntaatntattncaactttttcttgaatatttctaatcttcttgataatatgtaac

SEQ ID NO: 44142 - DNA, 452 bp, Glycine max
ttatagaatgcctgacgagagcgtctccacggagaaccctctctacaagcttctgcggcgtgtgaagacactcgcgccgcgcgtggtgacgctggtggagcatgatgccaacgccaacacggcgccgttcgtggctcgagtaaccgagttgtgcgcgtattacggcgcgctgttcgactcgctcgagtcgacgatggcacgggagaacttgaagcgagtcaggatcgaggagggactgagtcggaaggtggtgaactcggtggcgtgcgaaggaatggaccgcgtggaacggtgcgaggtgtttgggaagtggcgcgcgcgtatgagcatggctgggttcatgttgaagccactgagtcagcgagtcgctgattcgatcaaagcgcgactcggtggcgctgggaaccgagtcgcggttaaagtatagaacggtgggatttgctctgctggat

SEQ ID NO: 44143 - DNA, 320 bp, Glycine max
gcttgaaagagcccgggtagtcgaagagaagttcaagtccatagccatcaaagtctgaaaagagtatgatgaactaatggatgtcaatatggccactgatgaagccttggaatgagaaaccaagaaggcccgaaaggaagaacacgaccaaagcaaagttttgaggggctttatagggcagcaatagtgagctcaagctccgaagaggtgaaaggaatcatcacgggtcaaaggcatgatcttgaaggacgagctataggtctgccttatgtcgaaaagaaatttgtcccaacagttaagcgagactgaagggaatatgt

SEQ ID NO: 44144 - DNA, 374 bp, Glycine max
  unsure (1)..(374): unsure at all n locations
attatgccctctcccctcggcggggatttcttcttcggtgaaggcgagatagttgttggcagtgatattattgaccagccctctgaaaccttctaccgagatgtcttgggccacatgggcctcgttcaaaaccttcactagcagagcccgatgaggctcggagctcatgagtaactccaacagcgagaccctggccggngttntgttgagctgttcgataaccttgaattcgctctgttgaattatacggaggaactcactggcttcctctagtgacacctcctttttaccatcctttttctccggaagacctttcgccggaatatctttattcgaagtgaggggtgcttcgtcatcttgttcctccaccactt

SEQ ID NO: 44145 - DNA, 477 bp, Glycine max
  unsure (1)..(477): unsure at all n locations
ngttgtcattgttgcacaattgcaggagcaacgagtaaccttcctagctnttccttccgaatcaatcttgcacaactgcagggagaaagtccaccaaaattaaaacacaaaagcaatggcataaattaatccattggaaggcataaatatagaatagtcatacaacaacaacaacgccttatcccactaggtggggtcggctacatggatcaacttccgccataatgttctatcaagtaccatacttctatccaaatcattaagtttgagatccttttttataacctctcttatagtctttntgggtcttcctctgcctcgaattgtttgccttctctccatctggtctactctccttactacagagtctaccggtcttctctctacatgcccaaaccacctaagtctattttccaccatcttctctacaataagcgctactccaaccctctctctaatagcttcggttctaaattt

SEQ ID NO: 44146 - DNA, 405 bp, Glycine max
  unsure (1)..(405): unsure at all n locations
cggagatgatggtacagcgggtgaaccacaagcggaagtttcttttggtgaggtagccatggaaaagcagagcgtttggaatgatntcttaaatctcagaacgctantgggaaatgctggttaaaacactaatgccaagcagatataaatttgaatgaagaatgtagaggggcgtgtgaggcaacggtcgaattctgtttggcttaatagtgaacgtgctattaatggtaagtgattcgttcgggcacgttcagagtgctgtagttgctataattcctctagcanacacatgcccagcttgcccctcaagttttcaaactganttgcatccaaagccttngtgaanatatcttgctatttgtcctcagtgtcaacatgcttcagtgtgatctacttatcatcaac

SEQ ID NO: 44147 - DNA, 480 bp, Glycine max
  unsure (1)..(480): unsure at all n locations
cttgaattgagtatgtaattctattattatatcataaggtttatttgtttcttattgaaataaaaatttagcccacaggcaattnttatgtcacaagattcaattttctggtggtatgtttacattggtaaaagatacagttaagattagtatgcctcaaattttaacataagcctttgaattttgcagcttctcaaactatntaattttcttatattcaatgtgatattcccgaactcaaaggagataactataaaatatggaaatagagaattcttttgcaattggggtggatggacatagactatgtgtttacgccccggtgttacttgttattatggatgcgtaaatctaaccggcaagtgtatcgagtcgtgcaggtaataataaaacggtaagaaccgagtatcgatctcagggaacttgtttcatttggtgaactctcattcaatcaacagacatttgtacaaagaatcaata

SEQ ID NO: 44148 - DNA, 542 bp, Glycine max
  unsure (1)..(542): unsure at all n locations
ggcacgcacacctcgtatggttctggtatagtagctgtacgcaacccnccccccaacgcccgnccnatgtgcatcgtagacgccggattcaaagacacggcagcagcaactacaacatagaagaatttgtttgcttatcacggataagaggcgatttcttatcttttagaataggcaaacagcgtcactatctaaatatgagaaagcgatatcagttgaaatatacaataaaaactttatgccttctgttatgttatacatacaggtcagatagaagaaagagtctaagagntaagacaatattgtatcatctagatcttcacagaatactttctagaccaaaataacgtcatttcaagctctcatttctgaagcgcatggcagactagttgntttttgctgtatataatatactccgggtgagtgacatgatatctatcgatccttgaacataatcagttcacatgttactaaacagttaaacgcggtacacccggctaactgacacgtttntgaaataagtataagtctgttatgagatt

SEQ ID NO: 44149 - DNA, 304 bp, Glycine max
ataatgtcatggtgtcagcatcactagcaacacaagataaggctccctgcataaagaagaaatataattgacctgttgaaagatcatcataagcatttgcagcatccaatccctcatctaagctagttgcaggactcaaaaaatcagcatcatcattcaatgagcttcttgtccgaagctcctgaagttgtgtatgccctctccttctgacaatgtttgccacgtcatacctataagtatataaaacaagtcaaaaatcaaaggctataatagaaataaacataacctccttcagctacagcta

SEQ ID NO: 44150 - DNA, 266 bp, Glycine max
tgtggcttcaccacttttgttcaagtatgttaaaagagcaatctgatcatcatgctttgatacatgccaaaacaactatggcaatgaagaggtggaatggggagaacccatgctgggtgcattctatacagccaagttccccacccaataagttttactagcaatacaaactttcttacccccgccagtatcacaaggcatcctaataacccaagctgttatgacttcagacaacacacttacacaccaaacacaccagaatgatt

SEQ ID NO: 44151 - DNA, 367 bp, Glycine max
  unsure (1)..(367): unsure at all n locations
accaacactttattgtttctgatttttaagatttttgctgtgattntgggagctaaaatcgattgtgattgatatcagagcacgtactaaatgaatcttagtactttggataagggtattccctagttttaaaaaaaattgttttttgatcgtggattgaaaaacaaacatctttttaattatgtgtagtgatagtttatacacaaatataatgttatcttgcaggaatatctgtatcaattttcgcgttaaaatattgaccactgtccatatggtatgtacgtagtatatcttaccgtctaataaaaagggaggaaacatgcaatatgaagaaatgatgtcggtagggtcgttatcttaattaaat

SEQ ID NO: 44152 - DNA, 258 bp, Glycine max
actatcaatcatcatagcttccttatcatgaacaccaacacgatccttatgatgaagacgataatggttgccctggacatgctcaaatgcgtgtattgttttacctcccatccctaaatcgcatatcattggctcatcatgaatgaccctgttgccatgtcgctcatttgagggtgtggccgcgtgattggctttttggcccatgatgggctgcttgctcttaagctcagtgcaggagtgcattatgtcattcttctt

SEQ ID NO: 44153 - DNA, 409 bp, Glycine max
  unsure (1)..(409): unsure at all n locations
ccttttcatcttaagacagacctcctattntatttcagtttattgtttgaatctccacctgcatgcccttatccatctcgtgtgaggcagtgtatgctttggattcattcttcctttcctgcttccttcagatgaatagtttatttgggtttcattatgatgaggttgcaaacttttggtttattgatgtttctttaatacaggagaataggaattgaagccaatgaagagctaaggtccattttcaaaaagcaagtgcatctaattctccgagtcaggcataaaaaatgaatcaggcaaatagatttgatgttgaagtataccttctttgccacaccatgttatgctgtatgtgaaatgccaaagctgtggcgtgtattacccttacacttgaagtctgcaaagtaac

SEQ ID NO: 44154 - DNA, 358 bp, Glycine max
  unsure (1)..(358): unsure at all n locations
catagcaccactaattgttctacttgtgaagttgtttatggtcctaacccactaactcctcttgatcttttgcctatgcctaatgtttctgtttttaagcataaagaacgtcaagctaaggctgactatgtgaagaagcttcatgagagagtctaagatcatattgagaggaataataaaagctatgctatacaagccaacaaagggagagagaaggttatcttctaacccggagattgggtttgggtgcacatgataaaagaaaggttttcggaacacaagaaatcanatcttcaaccaaggggagatggaccatttcatgtgcttgatagaatcaatgacaatgcttacaaagttg

SEQ ID NO: 44155 - DNA, 439 bp, Glycine max
  unsure (1)..(439): unsure at all n locations
tgaagacaagactatacgaggtatcttccttgggtatagcattatctctaagggctaccgtgtctacaacttgcaaactaagaaactcgtcatcagtcgagatgttgaagttgatgaatatgcttcatggaattgggatgaagaaaaagtggagaagaacgttcttatacccgcttaactacctcaagaagaatatgaggaagaagatccaggtgaaccaccttcacctacatcacaacaacaagatcaagaactatcatcaccagagtctactccaaaacgagtaagatctttggtggacatatatgaaacttgtaacttggccatacttgaacctggaagcnttgaagaagcgtcaaagcatgaagtatgggtcaaggcaatggaagaagagatacagatgatcgagaaaagcaacacatgtggagtagtnaatcgt

SEQ ID NO: 44156 - DNA, 334 bp, Glycine max
  unsure (1)..(334): unsure at all n locations
tttgccaccatcaattttaaactttctctatatatgttgtgggcatacttcattctcattacacacattagactgaagtattaaaattatgacttttgtgcccgtttgtttcgaatatgaacactntctatatgtgagtgtgacaattttataaagtttgtattgtgaataaaaacattcttcatatgttaaatcttataccagaatgtaaattagagacatatataatctacattaaatggacctaatgcgaactagataatttttcttaaatagatagttaataatcatcttctaatgaagaaactagaatttctctaaattatctttaaac

SEQ ID NO: 44157 - DNA, 344 bp, Glycine max
cgaatctggctagcaaaaggacatgcaaaatctcatgacatgaaaataagcaggactaagtaagaacagagtgttctgtttcatcgattatcagttagtgtcttaaatatttgacgcggacatctctgaataaaattgtgttacttattaaaatgaagataaataaaatcatgcacgggaatcaattgatacataattgttatattttaactaatgatctccagtcaaatatctaattatattaaatactcacgtgagatattcgttatttttaataatcttacctgactcaaacaagtaagattagatttaatgaagtatatcaatgattcttactacagaaa

SEQ ID NO: 44158 - DNA, 401 bp, Glycine max
  unsure (1)..(401): unsure at all n locations
agcttgtagaacaccttatatgttagacaatattttgaaagaagtgtatatgttgaaacaataagagctaatatacaatcagatacctgaaagtgatatattatgttgctatgatccctaacaatgtataattagtccctgttagattacatttatctntacatgatcttgtatatattattacacaaaaacttatgattctgattgatatgtaattacctaataatcagtaattgattgatatgtaatcaatattgattctgatttctccattataaataaagatgagatgtggtcatctaagacacaaaattacagtaaaactaatacactgctatatggtatcaaagcttatgttattcttgacagaggaataacaaaattcgttcttcacaacctac

SEQ ID NO: 44159 - DNA, 429 bp, Glycine max
  unsure (1)..(429): unsure at all n locations
tgtagaattatggggtacccatcacatgtggtactatgtggtggtcgggcgatggtgcacaacaagctttccacattcacaatgcgcgcataaacccaccatcccctgttgcccacctccaactgagctcacgtactcccacgtagcccatatcctcgtttctctcaacaccgggtccccatcaatcctctcaagcttccacaacatccaagcaaaacaacattcaaacagcacaagctatcacagccaagcaaaacagagcaaaggcagaaaactctgctcaacacatcaaccaaaatcacagcttttctcacgtaaagaccacagtaacaattccttcgatccaattcgttacgccgtggatcgactccaanaatttactggaagtctatagtgtataagcctacattnttgaccgtgggatctact

SEQ ID NO: 44160 - DNA, 524 bp, Glycine max
  unsure (1)..(524): unsure at all n locations
tgctcacgctcncctttcgttgccatcgttgttttgaaaccatactgggacaccggancctntnaagtaaactgctggcgtgcaagcntaaagaaccncttactattatggntgtctatattattgcagaagaaatactggtcaaaattaatattcccacagaacgtttctataatggacatttttctgtctttggtggagatcgctgcttcatataactcatccaccaatcttaaaactccgatgcaccaaattcctgatgaaaggtaagacaatactcaccatctaattgtctctaatttgttccgttggaatttccttacaattggaatgtatgactttaaggttcactaaactattcttggacaggccaccaataaatcttcttcgccaggaattatctggtactggcatatatctggacatcttacaaaaagcaacttattgttttgaaacaaaacaagaaaaaagatcagagtctgttggacttaagatgttgactctatcaaagtaatggcttgatn

SEQ ID NO: 44161 - DNA, 429 bp, Glycine max
  unsure (1)..(429): unsure at all n locations
gcttcttagtttcagatgatgcagatgggtttgtatccacctcatgcactcctctaatgactatggcatcatttctggcgctaaactgctgggagttggaagccatcttctcaattaaatttctggcttcagcaggagtcatgtctccaagggctccaccactggcagcatctatcatacttctctccatattactgagtccttcataaaaatattggagaagaagctgttttgaaatctgatggtgggggcaactggcacatagtttcttaaatctctcccagtactcatacaggctctctccactgagttgtctaatacctgagatatccttcctgatggctgtggtcctggaagcagggaanaatttttctaagaatactctcttaaggtcatcccaactcgtgatggaccttggagcaaggaata

SEQ ID NO: 44162 - DNA, 425 bp, Glycine max
  unsure (1)..(425): unsure at all n locations
cttgtcgctggagctgaaccatcaactgtcctaactctntcagactggcgactcctaggctcttgatcttgacttgatataacctatttttaagccaagactccgacatctatcgcaggtgaaatggatgaatgcatgaagaaatgcgtatggcatagatgcattttatggatacgagagcccatgagattatctccttctttaatacaaaattcgggcagcatagcgcccgatgcatgcatttaagaaggtgacatggaccttccttcttctcgtgacaaagtgaggggatcaagacgcaacccgtgcatgatgacatgatgcgaatgggaacaaggaaatgtacacagcatggcaatatcctcaaataatcacacagcgaaggcatacatgacatatatgttatatgcatggcagtgtttaaa

SEQ ID NO: 44163 - DNA, 320 bp, Glycine max
  unsure (1)..(320): unsure at all n locations
gcccaagagaatgagttcaagattgaatcaagaacacttcaagaatcaagaggaaatttgatttcaagattcaagatttaagtttcaagaatcaagaatcaacaataatcaagttgaagattcaagaatcaagagnagactcaatcaagataagtactaaagagttnttcnaacattgagtncacatgaattttcacnaacctttaccnagagttttctctctggaatcgataccagttattatatcgataccagtagcaagatggtttcaaaanacttcactgaattacatgttcaatgattcaaatgggtatcataca

SEQ ID NO: 44164 - DNA, 270 bp, Glycine max
ggtatcatacatgattgttgaaaatctagagtactctcaatagtttgctttttaatgggtttaagttttaagcatactcttctagggtgctgacgacttgaaattttaaaaccagcttgtttgatttcataactgacactatttacaaacttaagcttgattttagaacttttttttttggccaaaacttctagattttgttttaacaaaaatggctacaactatattttttcttgcaaaaaaatcagacaacccgaactttgggttttt

SEQ ID NO: 44165 - DNA, 430 bp, Glycine max
agaggatgcttcaatggaggaaaatttatatggagagaaagagagagggggggagcacgaaattgaaggaataaaagaggtatagaagtggaactttgaagtatgtctcacaagactctcattcatcaaagttacaacaagtgttacacatgcttctatttatagactatgtagcttccttgagaagctgtcttgagaaaacttccttgagaagcttctttgagaaaacttccttgagaagctagagcttagctacacacacccctctcataactaagctcacctccttgagaagcttccttaagaagattcctaaagaagctagagcttagctacacatacctctctaatagctaagctcacctccttgagatgagaagctagagcttagctacacaccccctataatagctaagctcacccgcatgac

SEQ ID NO: 44166 - DNA, 460 bp, Glycine max
  unsure (1)..(460): unsure at all n locations
tgtcattggtttagacatgattggtacatganttgggactatgattcaatttgggcaaaattggatgagggaaagagtggttttcgaaatctgcactttatgcagaattgtgctgttgaaatgtgcagcacaattttgtataagtgcagaaaaatgcttgtgtatggctggttgtgaaagggtagtacatatggggttctagatatttactagcagatcccaacggtcaaaatgtagacttatgtactagagacttccagtaaaaattttgagtcgatccaacggttaacgaattggaacgaaggaaatgttactacggtaattgtatgtgaaaagctgtgattctgagttgtgtgttgggcagagttttctgcctttgccctgttctgctcggtttngttagtccatgatgattggatgtggaattacctggatgttgtggaagcttgngacgattgat

SEQ ID NO: 44167 - DNA, 409 bp, Glycine max
  unsure (1)..(409): unsure at all n locations
gcttctgctctagctngagcaagttcagcctttctttngtttttgctcaaactnttcttatagttggtaacaaatctatcaagctcccagagagtctcagcatccacactatcaatgtccacttcaatttcatcgtcatgttgattaagtgctgaatttctcttcttaatgatttgtacaatagcatcaagcttctctgaaggcaagctctgaaggttagtgcttagtttttgcttttcctcaaatgtcatgtctcttttatgaggatcttttgcctttggctnttttggagctggggttctacttgatggagtaatgctcatgagtcttggagtctgtgtcattgattctgatctattcaaaatccttctcatatcaagaggtggtggtgtaatgcagaaacccttct

SEQ ID NO: 44168 - DNA, 461 bp, Glycine max
  unsure (1)..(461): unsure at all n locations
tatcccacaacctctctnttcccccatggttagcacgcggtctggcctcatactcgaaacccttttccaaggctccaatcctcctccaacaaccatgatggatattgatactctccaacaactccaaaaccgcattgcagaggtggagcgatgccatgaggaggagctcagaaagctaaaggctgaccatgatcggatggaggcttgtgtagaatgcctctagggcgacgagcactcttctaacacattgcctaagcgcactcaagggggaatcataccccaacacactgtcaacacccaagatgatcctagtctctctcacatacaccatcttgaagggcaaactacttgtcgacacccctttgtcaatcacatcatggaggctgccataccattagggtggaaaccactcagcctagagcagtacgatggaacctctaatccagacaaacattnggatg

SEQ ID NO: 44169 - DNA, 433 bp, Glycine max
  unsure (1)..(433): unsure at all n locations
agtgataatcaatatcaatgtgtntggatcattcatgatgagctagattggatgctagatcaattgtagatttgttgtttcttaatagcatggcagatgggatggtaatctcaaagtgcagtagcaattgtcttagccaaattactttactagagactgaggagaaggcttgatattctgcctctgctgaagatatagacacagtgggttgctttttttatttccatgatattaaagcatctcctataaacacacaggaactagatgtcgatctgtgtgtgtccaaacatcctccccaatcagcatctgcatangtaaataagttgaatggagtacttgctggaaaatgaagaccctgacctcgagtgccctngatatatngtatgagatgatacancacatctagatgatgtgtcctttgatgtngaatgtn

SEQ ID NO: 44170 - DNA, 463 bp, Glycine max
  unsure (1)..(463): unsure at all n locations
gacatttgttatacaaataatcactctgttcanagccttataatattnttcattttcatataagtacttgtgtcattttccaacgtgacatcattaccaagtcatagagatacatgattacgtaaggtatcaactcttagagggtgggcccaaagtacctccctaaacgcgtaaagaacagtacgagagggcagtggcgatgagtgattaaccctaaagtccgcgtgtattgagattgcgatttgattgttttggtcaaagaaaaacagcacacacatgtacaccaacacacccaaaagcgataattatatatccaaaaatatttatttatataataaattttatttctagtantaattatatatttcaattacagaatttacactgaaacatctgcactatgtgatgaactaattctaggataantatatatatatatatatatatatattctcgcactact

SEQ ID NO: 44171 - DNA, 481 bp, Glycine max
  unsure (1)..(481): unsure at all n locations
cgccccccnnanattgacatcgtgtacgncaggatctataagaccaccgctgcatgcagcttggaatcgattacacatatactgtttttgtattccacancaccatttctgaggagtttctctactgtcacatctttntatgtgggtcttgaatggctatcaaaggcctatatatatgtgacttgagacacagatttgctatagagttgttcaaaacataaaagtcttatcctcttataaagcaaaatcattgatcctcttacaaattccttggccaaattacttgtgaatcaataagggaatgatttgagtgttcacattgtccatctatctctctcaagagagattcttcttgtcttcttttctttctgaaaggattatagactgaggtctcttgtgtggaaaatctaacacaaggacggtgtcttggtgttaaactgttaggatttcagataggactctatcggttgttgggaccgac

SEQ ID NO: 44172 - DNA, 326 bp, Glycine max
ggtctgggagactaaggtctatttgttctctatatgtgaagatgatgttggaagtactttggatttggtccgaccatgccctcctgatatccagctgggaaattggcgagtggaggaacgccccggcatttacacaacaagcataatattcgatgacgagtccctcgaaggtactaatacctgagacccgtctatcaacttcgagcaagaaatgaatccaacggaagatgaaggatatgaggatgtgggacttccttcggaactataaagaatggtcgtccatgatgaccaagaaatggggcctcatctagaagatacagagcttg

SEQ ID NO: 44173 - DNA, 369 bp, Glycine max
aagaatatcataagattcaaaatcctactgtagaaacaaatgatcatccacatgcccctgcatattctaatatttacacccaaccagaagatgtgagttctgattctgcagcaagagcactaagaccaccaaaagtgggatactgtaaaatttgtgaggttcatctaccctattgcaaaacattggaaatgcataaccaagaaaatagtcatcaaataatgttgaaactatatgaggaaatacagagactaataacttcaaacgtacagatttcaaattctcaaaagaatttagtagttctacctaagacagttcatatatctgggaaaaatggtcacccacaaaagaatatgagttcagaagctagta

SEQ ID NO: 44174 - DNA, 443 bp, Glycine max
  unsure (1)..(443): unsure at all n locations
tgacaggttcatgcactctgaattgttcgctttacctcaatgtgttggcactcacatntttcagattctgcatagtttgtgaaggcaatttgtcaaaattttgggactgagcttggttcaactgagtagccatttgccccatctgatttgtcagactctgaatagaggctcttgtctcttgctgaaattgcatattctggatggacatttgtctcactaactcttctaaggaaggttgaggaggagcctcagttgcttgttgtcattgttgtgactgttgttgttgttgctgcattggaggaggaacatatggcttgtttggactagcaacattctggaaaggagggacaggatgttgttgttgtggaggacttgcccatcttatatctggatgatatgtccaacctggatcgtatctgtttcttgaaagatcataattattc

SEQ ID NO: 44175 - DNA, 536 bp, Glycine max
  unsure (1)..(536): unsure at all n locations
tgattgagactnnntttgttgacatcgttcgattcgcccgccattctntanacacgacccgcaagcatgcaagcttatgcctcattgtcattgggattattattttatataaagactcaaaacacgctagaacgccaggattcttaatctccgtctgagtgccacgtggactatgatgaatactacgttggtgatactttgtgacacagggttatgatacctacctggatgcgttatagtgcctgtacgcatgcacactggagatagcatggggaatctctccctttgtctttgatagtcatgtgtctggaaacaaaatgtaaaacttcctatgagacttactgtgctgcgattaccgcgctcacagtgtttatcttaagcgtcttgactaagaagccatgcttattatctgcatgtgaagtgtggataatgatctctcgactaatacatgagaccacatagacattaattatggttgaacgataaacgaacttgcgacagcttagttagagatggattatactcaatacgtaaag

SEQ ID NO: 44176 - DNA, 504 bp, Glycine max
  unsure (1)..(504): unsure at all n locations
tgggagtgcnntttgaccccatgatagcatcgcattaccgacacatcaatactaagctctgggaataaacatgcgttatgtccctagtcttaccgcatttttctattactaaanacacaagggacctagcaaatacctattgccaagttgtaaatagtggaatcatgctaacctgtgagcagttctaccagtactggccttgagaggcatattatagccacctagatctgatatctacgaaccactctgtgtacgccacgatcctaaataaataggatactcagaccttcagggaactgttatgtactagcctattgaaccctcttgacctttaacccctaatgttggatgcactgaattagattctagtaatatttaaaaccaaagcgagtaccaaaatacatgtgctaccagagatctccttgtttaaagtcctcgaagcttacgacaaatgtctccaatcaagggtctaagatttttgaataactctgcgaactgagattc

SEQ ID NO: 44177 - DNA, 427 bp, Glycine max
agcttgtgtcgatcccacatggttggagtattcttacaaaacatcatgaccctgactagtctccctatgattttacttagtgaaagtgacctgacatacctattttgtggtgtgtcttgttatgtactcctaagcgtcccagggtgatttatcactaacatggtaccacattacatataggcttgagtcttagcataactggtgcataacgcttgctaattgtttattatgaaatcgatgtgttattatgtcttgatcggggtgtgtgattcatgtgtaatgtgattgatgattgaaaagtgaactttatatgacaaagtggtggaattacgtgagttatgttgaagtaagttgtacctcatttatatgatatgtatatctacttgtcttgttctttattagttaggaatgtgataactcactccct

SEQ ID NO: 44178 - DNA, 462 bp, Glycine max
ttaaaactaagctgccaagaatgtaacctataacggacgctcttgtgggctcatacgagaaaatctttggtattgtaggcattggatccatgagtaatacatgggatcaaacgttgccatattgttcatttaatccacgcaagaattgcatggctcgatcttcctgctttcgttgagcaatagtggtgaggactgaacaagtgcacttaatagtgcaagaacaaatgggatcaggtgtgaaattctcgatttcgtcccatatgatgcgtagcttcatgaaatattccgtaacagagagagtaccttgcttcatcgatgatgcttcttgtagaagatcagagatccccttgcgcgtatcgagacttcaaatcactctagatttcttctactttgtccattcatataatactttgtctaattgaaatggataccgaatgaacgatccaagacaccaccatgtta

SEQ ID NO: 44179 - DNA, 330 bp, Glycine max
  unsure (1)..(330): unsure at all n locations
gatggaacctctccaaatgcaagctttccgcaagacttacggaaagatcttagagttgaccttagcagaggtatccatagaagccattgcatcactcacccaatactacgaccagcctttgagatgcttcacattcggagacttccaataagtaccaaccattgaagaatttgaggaaattctatgatgtcctctcgggggaagaaaaccatatctttcatccgggtgtctcccctctntgagcagaattgcaacagtggtcaaggattcagcaagagggttggaccgcataatacagactcggaacggcatagctggcctaccacgggg

SEQ ID NO: 44180 - DNA, 416 bp, Glycine max
  unsure (1)..(416): unsure at all n locations
ntatagcagattgtagtaatgacccactaacttcgaattaatataacttaatgccattaacctagtgaattaaaagaacttaatggctgagtgtaactgaaattgtggcaaccaaaagtcaccccaacagtcactatttggtctcccaaaaggctgatgcctatgttgccaattgggcccttattacaacttgaactaaacctaactaaagcccttttagttgattaacctaaaacatattttggtcagccgactttacaaggattgggccattatttagacaaattgaacactctaaaattgagacaaagtggtgccatttagtcctcccncatttgggccatgatacaactcacaaccttggacttttctccttgaaacttgngcttgtattcaaatagtatggacaacacttg

SEQ ID NO: 44181 - DNA, 175 bp, Glycine max
tcaaatattttggtttggtggtgtgtggttttttttagaaatgggtttattatcccaacatggttggcttatggtgcctaacacatgccactaagaatgtagtgtgaagtttcacgcttccccttttttgtttttgtagaggaaaacaaaaggatgagccaacatgaaaacaaat

SEQ ID NO: 44182 - DNA, 462 bp, Glycine max
  unsure (1)..(462): unsure at all n locations
tcttatccaaggctcatcttggtggtaaagctccttcttccatggcttattccttagtggatggcgcctcctctcacctcttctcctttgtcttccactgcatctccatggtggaaaatcaccattaaaggatctcattgaagctcaaagatccagcctccatagaagccccacaagcaagcttccatcaacaaggtcatgacaaaaaaacagcaatagatacctcagagccctacactggggcaataaggggcaccatgcataaacctcaagcgaacttgggggtagatcaaaatttctcacctgttaagttgaaaacccgaaagggcggcataagccaaaatttgtgttgaaaaanaaataagaataaaaaaaaacaattaagggtgtgttgtaaggtttggtccgaaaatccaactacgaaaggatataagtcaagaattgaaatgacacatggtcatg

SEQ ID NO: 44183 - DNA, 325 bp, Glycine max
  unsure (1)..(325): unsure at all n locations
atgagcaaaagatctctaaagcgaaactctttaatattagtgctcaatacaatctgcactgaaacaggtcattatttgcttagaaaagtttatttgtaattgagcttatgtatttatcctctctttgagtgttattgaattgttgtatttattcaaaattttgtttgtgaaaatcaggagtgacttggtgtcaaacaatacttangtgtccttagattcaggggaagtctaagggtgtgccagtaatggcctggagaatacttatgtagccaagaatggcatgatagaatactttgttgtaataaagttttgattagtggaaccc

SEQ ID NO: 44184 - DNA, 464 bp, Glycine max
  unsure (1)..(464): unsure at all n locations
ctgcttgtggagcttctatggaggctggatattngagcttcaatgaggtccttcaatggtgattttccaccatggagatgcagcgaaaggcaaaggaggagaggagaggggaggcaccatccactatggaataagccatggaagaaggagcttcaccaccaaaaatgtgccttggataagaagcttgaagaggatgctttaatggaggaaaagaaagagagaagggggcgagcacgaaattgaaggaataaaagagggagagaagtggaactttgaagtgtgtctcataagactttcattcatcaaagttacaacaagtgttacacatgcttctatttatagactacgtagcttccttgagaagctntcttgagaaaacttccttgagaagcttctntgagaaaacttccttgagaagctagagcttagctacacacacccctctaataactaagctcaccttc

SEQ ID NO: 44185 - DNA, 303 bp, Glycine max
  unsure (1)..(303): unsure at all n locations
ttgacttgattttagtggcaaatttcaagttatttgaccatgatttcacatgtttgtctattatgttcaaattcttttcttttttttcttcttttaatgtatgcatgatctctactaaagtgttcacacttcacttggggggatagactanataattattagtactgaagtattgagtagtagttggtactaagtatagtacataagtatttagaagtagtgtggtactaagtagtatttctatttngataatacatcacttgatacttgatatgataatcaaactatgtattcttcatctaa

SEQ ID NO: 44186 - DNA, 446 bp, Glycine max
  unsure (1)..(446): unsure at all n locations
tggcactagatgaatcacattccagtcaaaaattattccagcctttgttactaatgatttcaatagtggtaatagctcccataagttcagctattagagagttagatatccccaaagagagagaaacacccaagaaattcccctttgaaattcctaaaaattccaccgcaacccacggtacgaggattccctttgaacgtgtcgtttgtgttacaatgagatagaagtctaataatatgtgagtaattcttgtacttggtgtttcctttcaaaaaaaattattgtacttggtgtttaatgaataaacattgcttgatgtgattcatttctaaatgaaacattagttntattttttttccccttaatttgtgatattttttagatgcttgatntgaactttggtgcatgctaagaattttggatgagatacttgactcttatgcatg

SEQ ID NO: 44187 - DNA, 464 bp, Glycine max
tactcagccctgtatggattacacatatactcgaatcgattaccagagctttttttcactatatattcgcaacagtcacatctgtttatgtggttcttgaatggctatcaaaggcctatatatatgtgacttaagacacgaattcgatgagagtttttcagaacaaaaaggtcttatcctcttataaagcaaaatcgtctaatcctcttacaaataccttggccaaattactcgtgattcaataaggaaatatctgagtgctcacattgttcaatctatctctttcaacagagatcacctcttctcttcttctatattctgaaaagggattaagagacccacggtctctcgttgtgaaacaattcttaacacaaaggaaggaattgtcttgtgtgtttagaacttgttaaaggaattctcaatatagtggaactctcaagcggctgattgggactggactttgc

SEQ ID NO: 44188 - DNA, 389 bp, Glycine max
  unsure (1)..(389): unsure at all n locations
gatgtccgattgagtctcgtaatatatcgacacgctcgaaattgaatgttgaagctctaagcctattcaaacaacaataacgttttactcggatgtccgattcagtgacgtaatatatcgggacgctcgaaattgaaagttgaacctctgagccaacccanacgacaataactntntacttggatgtctgattgagtaccgaaatatatcaagacgctcgaaattgaaagttgaacctatgagcctattcaaacgacaatagctntttactcggatgtctgatggagtcccataatatatcgagacgctcaaagatgaatgttgaagctctgagccaattcatacgacaataacgttttactcggatgactgattgagtcccgtaatat

SEQ ID NO: 44189 - DNA, 435 bp, Glycine max
taaacattcaatttcgagcgtctcgttatattacgggactctatcagacatcttagtaaaaacttattgtcgtatgaattggcttaaagcttaaacattcaactttgagcgtctcgatatattacgggactcaatcagacttccgagtaaaaagctattgccgtttgaattggctcataggttcaacattcaatttcgagcgtctcgatttatttcggtactcaatcagacatccgagtaaaaagttattgtcgtttgagttggctcagaggttcaacattcaatttcgagcgtcccgatatattacgtcactgaatcggacatccgagtgaaaagttattgtcgtttgaattggctcagagcttcaacattcaatttcgagcgtgtcgatatattacgggactcaatcagacatccgagtaaaaagttattgtc

SEQ ID NO: 44190 - DNA, 218 bp, Glycine max
ttacactgcattctacgacccaccgtgttgagttaaaaaggggccctataccctggttcatgggaatctaaggagtataggtgaatctataatcatgctaggtctccgactttgcttgatatagtgaaacctcgtctagagctctctctctttataatgacgtgtcgctcggtatgcataccgccacgatattattatcttgagtgatgatacctcta

SEQ ID NO: 44191 - DNA, 434 bp, Glycine max
  unsure (1)..(434): unsure at all n locations
tatagaaattgtctcggatctgttatcttttcttgccccttatatgttgaaaataccatctgctttgaggctcattctctagagaataaaagtcttttctaagggtttccttatcaatgctaaatttgtcagataacatcataaggttcatgcataaaggaatatgttggagattggatcggcttttggtcatcctcttgttcttgattatatgtggntctaggtatactagaagttgtatataatccttggaggtttatactatgaaactggttctgtgactcagatctagataaccttactggaattgaccgggttcttatcgagaaagaccttcttgccgattcatactcggatcttgaggcatttattctagatgaataagagtttctcctattgaacggtatttctaccttatcggaactatcttacct

SEQ ID NO: 44192 - DNA, 344 bp, Glycine max
  unsure (1)..(344): unsure at all n locations
gacacaaagtcgttaattctattcttaaaaatgtgacctaagcatttgtgccataatgctcctaagttngtattatcaattctacgcttagtaccacacaattctgcattaaaggattcaccatatgaagctacagtatcaagtaaatatagattatcattaaccaagagtgaaccagttccaacaatatctgaattaaaaggcaacctaaacacattatttctaaatgaacacaaataacccaatttgtccaaataagaaactgaaaccaaattccgtctaaatgacggtacaacaaaagtgtctttcaaattcaaataaaaaccaatacataataataatct

SEQ ID NO: 44193 - DNA, 421 bp, Glycine max
  unsure (1)..(421): unsure at all n locations
tgacatttgtcattactagaaataagaaaggagaanaacactattatattaaacaaaacttgtaaaaaaccgggcataagtagcattgcataacatccaagggcaagtaattgtgtaatccaacggtaaccaatcctgaacaatgtatcaacagaaaatcagacaagccacaaggcacaatccacaatataagcaattactcctataaaataatctgaaccaagtactcaaactacatttaagtgagcttatatttagattatttagcctaataattacaaagaatgctatacgggtatataacacagttcatataagttctcagttntgctaccttttatatattatcacatgactnttcagaagcaggttgagaactcagcaattatgtatatgagcttgtctactgtaataagcactt

SEQ ID NO: 44194 - DNA, 344 bp, Glycine max
  unsure (1)..(344): unsure at all n locations
aaaactattatccaaaatttaggtatatgttatagtgatacataacacattgccacatattagtaaatttattcccacacttgctaaagaggaatggaaataattatagaactaatgagaatgattaaaactaagaaagagtaatgtagtttttttataaaaaaaatactgttttttgtgaaaatgaaaaaaaaaagaaaaaaaacactntgtgtcaattntataattgtcataatgatttttttaactgtcancaaatgttgattttttttgcagtgatatgatggattatacaattatntttaatatattaatgaaccataaattttaaattttatttaaat

SEQ ID NO: 44195 - DNA, 463 bp, Glycine max
  unsure (1)..(463): unsure at all n locations
ggtcaaagggttagtcttctcttctttaatagtacactatattactatatatttgaaatttcccttgaatattgttcttcttcataattaatacactactagtgagtttcttgaccacaaaaagtcatggtatggacatagggtgaatctatctagcaacctaatgataacactgcagtagcaattgatgttaatccactgtgtttgaattgtcggagtaaaggaaggataagttatcagaaaggcatgtagtacgcagtggaactagaattttttatgctttcagtttggtatttgtacatgtgtagtagtataatactgcttttgatttgaatgttgtttattgatcttactttgcttatgttnttaacttctnttcctgtagaaagtgttgaccacccatgactntaacatgtactatctgtacaactagaaatctcatttgataaagttgcttacaata

SEQ ID NO: 44196 - DNA, 376 bp, Glycine max
  unsure (1)..(376): unsure at all n locations
gaagggattacctggcacatgttaacacatcaatttaacacacgcattcacaacacacctgcaggttcaaggttcttgacgacattaatacatgcatcaagttttcaagaccacttgtatcgtctaacgacttgccatgacaccctaccgcacttcacgaattatagagatggttggtctcataacttgtgactctacagtggaattattgtataatgaacattaaggaatacaaataataattcaagtgtgttcaacataagtactcatgagtaatcacacagaacgcacaccagatatggtaagcacataacacattggccaanaggttcaacctgctctgataccactaaatgtgacaccctctaccctaaca

SEQ ID NO: 44197 - DNA, 468 bp, Glycine max
tccatcaggtactcagcttactcacaattctatcagacctatctagaccctcaggagttagcggcaaaattatgcatactatggcgaggatttgtgtttaatgataagggggcgccatggaagctccttatgaaggactagaccacattattgcaaacatggaatgtcctttcctactccaacctcgctcctacttctcacacctctgaccttaatatggacagatcgaggttggtgtacggacttattatgaagatggacatggatgtgggctccatcatctcaggccagatctctcagatggcccagcccaactcctctatgttgggctttcctgctcttatcacagccctgtgcatacgcagatgagtagtatctgactcactcaccttcgagtccctcagcccgaccattaacttggcctatattatgaagaaattgtggaacccagatgatcccactattaca

SEQ ID NO: 44198 - DNA, 407 bp, Glycine max
  unsure (1)..(407): unsure at all n locations
agctntgaatgctctattcaatggagttgacattaatatcttcatacttatcaacacatgcacagtggccaaggatgcatgggagatcctgaaaaccactcatgaatgaacctccaaagtgaagatgtccagattgcaactattggctacaaaattcgaaaatctgaagatgaaggaggaagaatgtattcatgacttccacatgaacattcttgaaattgccaatgcttgcactgccttgggagaaaggatgacagacgaaaagctggtgagaaagatcctcagatccttgcctaagagatttgacatganagtcactgcaatagaggaggcccaagacatttgcaacatgagagtagatgaactcattggttcccttcanacctttgagctangactctcggata

SEQ ID NO: 44199 - DNA, 330 bp, Glycine max
ctcagctgtcctggagctacctcactgccttctctttatattggtgattcctacgctcttgaccttgacttgatataaccttttgttaaacaaaagcgccttacttgatcacatgttttactaaagtgaaacaaaacccaatgcgaatcaaaactctgacatctatcatgggtggaatggatgaatgcatgaagaaatgcctttgacatagatgctttgtatgaatacatgatcccggagattagtccccttcttatatacaacattctggcaacatggcgcccgacatatgcattttagatagcgacatggaccctccgtttgttttac

SEQ ID NO: 44200 - DNA, 139 bp, Glycine max
atagatctcagtttatgggtaacgatgtctctagaatatttccattggatgtaatgatgaaatctatgcattttcaagtgaaaaagaggctaaagtttgaattgcaaaatgtagcagttgggctaagcacatatccact

SEQ ID NO: 44201 - DNA, 171 bp, Glycine max
gtcgcctggccgataccaattttatgttgacagctattatcgacttctgccattcatcgctattatacttattacgcgtatcaccagtcgttaatggcacaatactgcctaaaacattacccccgccttgcctatcgcgtactgtgtaattataaacattctgcgacatgg

SEQ ID NO: 44202 - DNA, 258 bp, Glycine max
gattctataagctttatccaaatcccttagtaaaacaccccattccttcaattccaaataataacaacaacaataacaaaacaccccattttcaaattcatttaataaacaaaaacccagatgcacttcttcaataaaattttcttgaccaccataattggggccttcggctcctttgctgacactccgaggtataccataagtttcaagtatttgaccgactatgaaactaatcttcggttcaagactacaacacac

SEQ ID NO: 44203 - DNA, 372 bp, Glycine max
  unsure (1)..(372): unsure at all n locations
gcataagattcttcaaaccaaagcaccataatgaagcaaaggatacaaaggaaatattattattatacattaatgcatatacaaaagtcgcccttgatttaagtaaaaggaaacacaagtttgaaacttactggaacatacgaacaacaccattcatcttaaatgcatgttagaaaggaaatccgacaacctgaaagcatcatgttttaggttagtgaaatgaacaaaataaaagagaaaaggaaaggttaatgccagagataatgagaaggaatagagcaacctgatgtcttttgcaattacggtatcaccatctgcagcccctagatgtcgcanaactacctgctccagacgggcatctcgatatgcatg

SEQ ID NO: 44204 - DNA, 186 bp, Glycine max
atatttatttaattttgcatttaagaaattatttatataacaaaatatatttaactaaattacatgaagaataactcgctttaatttaaaaggaaatttaattgaagacattattcgtctttatggtgtttatttaaagatacaaaggagaaaacaatgtaacatttaaatgaataacgtattaaa

SEQ ID NO: 44205 - DNA, 478 bp, Glycine max
  unsure (1)..(478): unsure at all n locations
tactcagcttagactcactagcacctagccacctagagntaggttatctactctcttntatccatgtctcatcaaatcccaatctatgcaacatatgaaaatggaatctccaagaaaaataatcatactccttttcaaagtctaccttgaaccagagacacttcttttttatcctagcttcatccactacctcacatcttctttttcaaaggccaccaatacaataagcaataattgtctcccaccaaagacaacacattgtctattatcaattacatcacctaaagcccttctcattctattggctaacacttgtgccaaagatttatacaaacatcctactatagaaataggtctagattctcccaagctntgaggatttttacatttagcaatccaaataataaaggagggaattatatctctaggtaacaccccatgtgcatggaattgctntaactacttcaataagtctccc

SEQ ID NO: 44206 - DNA, 201 bp, Glycine max
gaggataactaatgtctccttcaagaaaggatcaatcctcctgactggaaagaactgagcctattgctgcatgctcctgagccaaaagtacacacactgatctcacttccgtgtggggatataccaaaaatgtaaagaacgcaagtatctgctgataaagggagaaaagtgctcctattaaaactcaaaactcagctgcag

SEQ ID NO: 44207 - DNA, 472 bp, Glycine max
  unsure (1)..(472): unsure at all n locations
ttgcattggaattgcgaaatgcccactccatcattaagattattacctgacatctctaacaaacaaatcaaatgttacaagacaattatatgttgctgtttgaatacctcacccactctagtgtatcacactattatggcttctctctaatgaaacactcttgcctttcaccactctaattccccttgatgtcttaagcaactcaagatattatggtcacaacaaataacaattcaccaatatgtgtaacgtatggctagagagacaaggaaaaggttaaccaagaataatgctaacaactgttttaggcacaaatgaacgatataatattcagaatttatgaatacaagtaacaatccttcatgcaaccaatatattaccttaaagagattgtttttaaagatcttcaagcatgaaccattcagccaaatctgttctttntctaattttcttaacgaaattctgctctttt

SEQ ID NO: 44208 - DNA, 214 bp, Glycine max
gctaagtgccaattaggttatgtttctttacctttgtaataaggctaagcgcgcctgtgcgctaagcctgagtgtctttatgttgaggctaagctaagcgccagcatgctacactatgctccagtcctctactatttctaaaattgtagactaaggctaagcgtagttgtgcactaagcctattctgcagaaaaaaaaatggtttatgtgtctt

SEQ ID NO: 44209 - DNA, 448 bp, Glycine max
tatccgaacaaagttcttgttctgcttcctttgcattgccttgtgagaatctgcagcattctaacattgctttcacttctatgcctgtctataggtggagtcggcatatcaaacatgatcttgaagattcaaaggaatgaatacatgggatttgataatttttgcaggaatgatacatagagcttttcaagtatctttttatttgcacacattttctgtttgttgtttgccaccaccaaaccacctgagaggggatgatatgttttgtttttatttcaaatgtcaaaaagaaagtttgtgctaattgaagcattttttggatacatatgctaatagaagcattaaatcttgtatgtccagaggagatgtatcatgccattatgcacgaattattaaatggctattacatttgtttgattcgttatacatcatttgtaataatattcat

SEQ ID NO: 44210 - DNA, 419 bp, Glycine max
gctttatcgtgagagaatgtggcaccaacttttgttataatcaatagtgcctttggctgccgctgcagtcttgtgtgttatgtttctgcctcactactctctatgtctctcttcatgttttgtatattagtgtatttcacgtgtttctttgcatctcattttgatggtctcagatgatcaagggaaccaaatgatgattctttgcaacttaatatgttgaaatttattattttatatatgtaactataaagaataatatgataaatattgttggactgaaatgactattctttgttgattttaattaacaactaattaagataatattgtaataattttaaacactctttttcataattgtacgagataatttagtcaattattccaacttgcgtgtgtgagactatactatactagta

SEQ ID NO: 44211 - DNA, 471 bp, Glycine max
  unsure (1)..(471): unsure at all n locations
tcagcttacaaagtctattggctggatacaagcaccgaggcagtttactagaagtttaatgagtttatgagcaactcatgattcaacagatgtgacatggaccattgctgctatgttaagaaatatactaatagttatgttatcgctatcgcgtatgttgatgacatgttgattgcaggatctagtatgacataaattaacattgtgaagcagtagttggtagaaaactttgaaatgaaggatcttggtccagctaaacaaatccttggtataagaattcttagaaacagatcagaaggaattttgaagttgtctcaggagaaatatatacacaatttgcttgacaggttttaccttgaagattctaagaccaggaatacccctttgggatcttatttgaagntttcaaagaagcaatctttgcagatgatgaagaanaatgttacatgtcaagagtaccatatgcatcat

SEQ ID NO: 44212 - DNA, 323 bp, Glycine max
  unsure (1)..(323): unsure at all n locations
tggttgctatctgcaccctcatgtgtactaaatacaccctctgcccttatttgctgagtttttttccataaccgtacggaactttacaaattttgtaacgatacttngtttctttccgtaatgtcacagaaccttacgaattacgtaatcatcccttttttggcttccgaaatgttatggaacctcactaattgtgcaacaatgcttccttttgacttccggcatggtacggaaccttacgaattgtgcaacaatgtttccttttgacttccggcatgttacggaacttcacggattgtgcaacaatgggtgccaagtacctc

SEQ ID NO: 44213 - DNA, 375 bp, Glycine max
cttagttgcgggagcaatattcatatacatatatcaacatttttatttatggatgatagatactaaatatttatttcatataattaaatttaaataatagataaatgtttttttaatatataaattacattataattaaatttcataataaaaataataaaaatatattttttatattttgaatttagaatgatgaacttaaattataatttaagattatttttagttattgataattaattttgaaaaaaactattgaattttatttaaaagatgacaatcgaaagaaggttgattgacattgatagacaattcataaaatgtaaatattaaatatgtgtgtaaagatgatagaaagataatttaaaatgaatg

SEQ ID NO: 44214 - DNA, 241 bp, Glycine max
atctgtttctgtcacccaatcccaagtttgcatatcggtcccaaccccatccatacaaattcccatctttagtgatttgtacactatgttcagcaccagccagcaccattttgataggtatttccttgcaaaatacaaagttcatgtctccaagtagttaagggaataataatctgtttgatacatatacttttctgttgtcaattaattatataatgcattgtcatgagcatacattaac

SEQ ID NO: 44215 - DNA, 446 bp, Glycine max
  unsure (1)..(446): unsure at all n locations
ttctctggctggcatgtgtacaaaccttatatccatggattgtctatgccctanggaagataatttgtcattcaatataataggaaaaattgcaaattaacaaaagaagacagtgatatattctagagaataaaatgtagcctgcttttgtacacagaagaaaatgtagttcatttagtgcctgtttgtttcctattcttagaaactattttctgtttttaaaaacaagaaaacaaagaaaaaaatatcatttcttttttgttgaattggaaaaagaaaaaaaaaaacagaacatttattttcagttttctgactcatgttctttcttataataccctatcttcttcccctactactatccaaaaattagtttttgaaaactgatttatgaaatagtctttaaaaactaataaacatatactgaaacaatgacatagagaacaact

SEQ ID NO: 44216 - DNA, 291 bp, Glycine max
  unsure (1)..(291): unsure at all n locations
acatcaaaaagccaaagaactctgagatcaacacagttataattatggagtagcaagatataagtatcagagtattaaatacaataagccaaactcataatcaagaaataatcaaaccagaattatataacataaaatgtcaacaaccacaaaatatccaagactgaaatttanaaacacaagataaataagcaaagtacttagcataataatgtatattctaagaaactaaaagccaaaatacacggcttataaaagataaataatcagaatctaacagctaagaagacg

SEQ ID NO: 44217 - DNA, 470 bp, Glycine max
  unsure (1)..(470): unsure at all n locations
tttgaatngagtntcttttacacattaaagctcataattgttacaaanagcaacaaggggatccttaatgttgcataagtatacttaccatcccagccagttcagagacttccatagaaaatgctaagagtgaagcaacaaggccagtaactattgtgctcttaacaggaacttggctgcacttgtttatgtcagaaaaaaatggtggcagcaacccatcccttgccatagccatcaatattcttggctgagagacattaaacaaaacacattgataattttacctacaaaacttcaagataaaggaacaaaaaaaattatgtgataactacaacaggcaatcacagtacaaatcagtaaaaggaaatgctaaatatatntggaacattacaatattaacaaaattgaatgtatcacatctaggtctactagtacatatntaaggataggcaaatgttaaatttcaagct

SEQ ID NO: 44218 - DNA, 357 bp, Glycine max
  unsure (1)..(357): unsure at all n locations
gcttcagggatttcaaattccgcctgacttttatataaatanggtttatcgctagtaaattatgaattttgactactaaacacaatcaaagaagaaaacaaacatacctgaatatcctcccatatcaaatccttctgaccagcagggactttcttataggtctcgtatgtcacgtcgaccttatcacgagtgacaatccccaagtatattcttaatttcttcttttggggacaattggccttgccagtcacaggatcgacgtggaccactggtctctttgccccacgtggtctagtggtcaaggatcgtagtcgtgtggctttgcgtgtccgcttcacggtagatggagacactgat

SEQ ID NO: 44219 - DNA, 274 bp, Glycine max
tcgagtttgtagagtgatatactatttggagtgagttacaatcttgtaatcatgtttgtgatagtgaaatatttctttgtgacagttctattaacgtaagcgggacgtgccgaaccacgttaaattctcttgaatggactatgttttactatggaggaatctttgttgagcccacacgaggcatgagaaagtgggctattgtatctgtgagagcattgattatctaacagatattaactatgtgggtgtctgacaacacatgagaatctgagta

SEQ ID NO: 44220 - DNA, 220 bp, Glycine max
  unsure (1)..(220): unsure at all n locations
aaattttaaaatgatatacatatctaatataaatttaatgttaatttcacgatgtgtcgagtaccatgtacttctttatganagctgcaggattcaccaatctgaacttagaaggactacaaagtataggaatagttatatctgagttcccagatacaacttctaactttattntattgtggagtatgtgtaattaaagtacattatactatagtattat

SEQ ID NO: 44221 - DNA, 435 bp, Glycine max
  unsure (1)..(435): unsure at all n locations
tactcagcttcgagagaaaacctacctgagagcgagaatgagagtgacttctataccataagcgagagtgagaccgaaagtgatagtgctgatactggtttcaacgccgcgagagtgacaccaatagcgagagtgacactaaaacctatacgatcatgagcaagactgacgataatggtttcagcgtcacaagagtgagagtgagagtgagagtgacacagggtttgaggttgccacaagcgtgagggagatgagtgaatctccaaaagcacgaanaatattataaataggacaatacaatgtcagttttttttttcaaaaaatgatgttaacatgagttggctaatattggtttttgtaaaaatcgatgcttaagaagtcacgaaaacattgatttttgaaaaactgatgttaacaaactaacgctcacatcga

SEQ ID NO: 44222 - DNA, 298 bp, Glycine max
  unsure (1)..(298): unsure at all n locations
gcgggaggatgactcggngcttgngggtgcatcttccaagaaaggaaaatgcacggagtcgccaccaacgtttattcgaggaaaacgttggaaaaaccagaaaaggtgtggtctacgaactttgagtgntaaaggttcgggagttgtatttacgcacggagaaggtattatcaccccacgcgcccgtcacaaaggacggtagcctttaatcaagtgtgcaatatcatgtcttcgaattgttttattttccctcttttacgtttatatgtatttttgtgccttttggattttttatctt

SEQ ID NO: 44223 - DNA, 416 bp, Glycine max
  unsure (1)..(416): unsure at all n locations
tcgaagaacagttgacacctctgctaaattcctcactgaaaacgttacggaaacgtttcggaagcgcctcagcttataatttcttcacggaaacaatttttccaagcaaattcgaaagagagagaagtgcccaaggggctgaaccttntcttcttcacttcctcccctatttatagcaaaataggggaggtggttgccgcccagctcgcccatgcgagccaggttgcttcctccagaagcaacaaccttctggaggaatattctggagggcccaagtgggcctgggtgctatttgcacacccatttttactaagtcaggtgacataaggggttaccttatggctacccgcacctttcgttaaccatgggcaaacatgcccattgacgcgcgtagaataacatcatcttctgcacct

SEQ ID NO: 44224 - DNA, 349 bp, Glycine max
  unsure (1)..(349): unsure at all n locations
ctgcagcttggaaagggtgtttcaccttctcgcttagccaatctactggcttagcgagcatccactaagcacaacactcctgagctgtacaggttcgctaagcacaccgcttcatctctctaagcacaccgcttcagttcatccgttaagcgagaaaggctcgcaaagccaaaaatactaacatgcgttaagaggtccatacgtgcgctaagcgcacgagcacaaaaaaggcctcctatttaagcctgaaataagattttgtgaaggggagttggactgggtttcaaagctntgcatgtctggtgtttctagagagagaaaggtccaagctctatagagttttgagaga

SEQ ID NO: 44225 - DNA, 436 bp, Glycine max
  unsure (1)..(436): unsure at all n locations
tcgaacagtcatcacttcattctcatggcgatagattatttcaccaaatgggtcgaagcggcttcttacaccaatgtcacgaagagtgtgatggtcagattcataaagaaggaactgatttgtcgatacggactccctaggaagatcattactgacaatggcaccaatctgaataaaaaaatgatgcatgaaatgtgcggngatttcaagatccagcatcataactccaccccctatcggccaaagataaatggggctgtggaggctgcaaataaaaatattaagaaaattattcagaagatgacggtgtcatacaaagattggcatgagatgttgccttttgccctgcatggatatcgaacctcggtacgaacttctactanggcggcaactctgtattccttggtttatgggatggaagcggtactcccatttg

SEQ ID NO: 44226 - DNA, 349 bp, Glycine max
gctttgagccaaaatcctgactcaccataaatcttgactccaggtgagaatgtcaattcttaccctcggaagcaaaaaaaaaggggagagggaaaatttccaatctaagaggaagcaaaaaaggagagaaggaaaatttccaatcaaaggaaaaaaagagaggaaagggaattcccaatcaaagagtgggagaaagcaaaaagaatagaaagaaaattcccaatcaaagaatgggagaaagaaaaaagagaagaagaaagggaagaaagttcccgatcaaaaaaaaataatatgcagaaaggtctttggaccggacaatatctgaacaatacagaattgtcaccaaatg

SEQ ID NO: 44227 - DNA, 460 bp, Glycine max
  unsure (1)..(460): unsure at all n locations
agatgaggaagtgttgaagggtgaaacttcctgctnttattgttgaccacagagtggtacctggagatatgtcgcgggggtcaggagaccttggggacgtcaggtggggtgctattgcccaaaaccaagcttgaccaatcccgacccaacccgggcatagtcggtcagtgagaacctgtgatgtacctaagcaggcgagctcctggcagtcaacagataaaaggaaaacaagaccacaaagcaaggaggcttgtggtggctggccagctgtgaattttgtgtaatatgtggattgtggcctctggtaatcgattaccaaaggtgagtaatcgattacaaggcttaaaattgaggacaggaggctaagatggtctctggtaatcgattaccaaggggtgtaatcgattaccaggcttgaaaacgaagtcaggaaacttatggagcctctggtaatcgatta

SEQ ID NO: 44228 - DNA, 349 bp, Glycine max
  unsure (1)..(349): unsure at all n locations
tgcagcttaccagttattttctcaacttgagtttttgaagaccaattactaagtatttcctaattagatgatttagatgatgcatgttaatgtgtggagtcctatgatgtcacaacctanaatcatctattttacttaccaagcaacttagctcatgaaatgatgcatgttcaacatttagcatatagatattacctattctctttccaatgaggacacctttaccggatatgacttcacttatatggcaataatttctgttgaattcaactttcaagtatttatcacaatgttgactaatgctttagtccatccacatataacacattctttaatctaattttcccta

SEQ ID NO: 44229 - DNA, 468 bp, Glycine max
  unsure (1)..(468): unsure at all n locations
actagatgcattggttaacttggtaacccagcttgccttgaatcaganatctgtaccagtcgcaagagtctgtggtttatgctcctctactgaccaccatacagacctctgcccttccatgcagcaacctggagcaattgagcagcctgaagcttatgctgcaaacatttacaatagacctccttaacctcaacaacaaaatcaaccacagcagaacaattatgacctctccagcaatagatacaaccttggatggaggaatcaccctaatctcagatggtctagccctcaacaacaacaacagcaacctgctccttccttccaaaatgttgctggcccaagcagaccatacattcctccaccaatccaacaacagcaacaaccccagaaacaacaaacagttgaggctcctccgcaaccttccctcgaagaacttgtgatgcaaatgactatgcagaacatgcagtt

SEQ ID NO: 44230 - DNA, 314 bp, Glycine max
ttttcgttaatcaagagtaaaggaactccaaatggggaggaaagggggttggttttctgcagtgaagagagtttttgtttctgattccaaaaaggaacaggtttgtgaataacatgtgttacattagtcctgacatgaatagaagataattaccttgaaatcaaataagactctcatgcaaaacaatttggttttgttcatataaaacagaaacaccatcatcatcatcatcatcataagtcaaagttaggatgttatgtgactcattactatgatgatctagaaggagcaccaattgccgttgttccttcact

SEQ ID NO: 44231 - DNA, 397 bp, Glycine max
gtagctccacattcagcaacaactcgatgacgtttgtaatgataacacatcatatgggtcgcaccggttcatttcaattatatttatatcagtgagatggtcaatgctatcaaaaagtactagaatgtttcacttgaataattaagaagaatttgatcataataggcccactattgcaacttgaatgatatatgatttgtgcccatcaactctaaatcaaccctatactgtgatattcatgtcgaactcatatttgaggatgagactctcagattaactcgcttaactcttacgaatttacaagattactttaatctgagagagttgactcgtgaagtagactttgccatgaaactctacgtagactctgtaaactctaaattaactcggtagactc

SEQ ID NO: 44232 - DNA, 352 bp, Glycine max
  unsure (1)..(352): unsure at all n locations
aattaaaataacttaatgccattaacctatggaattaaaacaaacttaatggctgagtgtaactgaaattgtggcaaccaaaagtcacccccaacagccaacaagtcagccaccatttggtctcccaaaaggctgatgcctaggttgccaattgngcccttattacaacttgaactaaagcccttttagttgattaacccaaaacatatttttggtcagccaactttacaaggattgggccattatttagacaaactaaacactctaaaattgaaacaaagtggtgtcatttagttctcctccatttgggccatgatacaactcacaacctttggacttttcttcttgaaac

SEQ ID NO: 44233 - DNA, 453 bp, Glycine max
  unsure (1)..(453): unsure at all n locations
gtagcccatcatctttatatcgtacaacactgttgatgtgtctactatcatcgacatcagtgttctctccgtcattgaggtgccacttgagctgccaagtctctccacctttgggcgtattcttttgaaagattcgtgccccctttttgcacatgttctgtagttgcatcctatccgaagacattatactgaaactgcctaacgatggcaaccactatgtccttccaagaatggactcgggaaggttccaaggtactgtaccaggtaacagctaccccagtaagactttcttggaaggaatgtattagcaattcctcatcttttgcatatgcgcccatcttccgataatacatctttagataggacttgatgcaagtagccnccttgtacttgtctaaggccaacaccttgaacttggaaagtgtgatgatattgcgtactaggaacaactct

SEQ ID NO: 44234 - DNA, 252 bp, Glycine max
  unsure (1)..(252): unsure at all n locations
ctgaccctgttaaataatgacatagcaatatcttatatcagcttcagcttaaggtaaaaaaaaatcatntttanaattaaacaaaatttgcccaaatgcccactggacaatgaaaagacatgaatgattgaaaaaaaaacttctattctggaactacagtgctaatcactgaaggtcacataaggatctcattcacactacataacagagaacacatatggccaaaatatcatgtacaaacaacaatcctct

SEQ ID NO: 44235 - DNA, 466 bp, Glycine max
  unsure (1)..(466): unsure at all n locations
tatgcatcatggagaagattctgacaacatgaataggactcttattaatttatcagccnaaagcgaaaaaaggggaaaaactatcataagaagttaaaagacgctggacttgagagatacaaatgatttccaggaggaaatattattataaatataatctctccatgcacacattgattaacaggttactaaagagatctcacatggaatatgcagtaaaaaaaattttaaacaaaaaatagtcaatataatagacactattgttcacattcaaatttttttttttatcagcaaacataatattatatattaattgagtaccagaggtactgaaaatacaactaacagtccagatttggtcccaagacatttggttttcattgaaccaatctgaaatatcatttanggtatacagaaatctgcactaatgttctatcctgctctattgagaaaccctgctctaatg

SEQ ID NO: 44236 - DNA, 310 bp, Glycine max
gaaaagataagctatggtttttggagaaagtgaaatctggaatatcttacggtttacagtagtttatgacactagaaagtcttcctctcacacctaggcttctactatacacacaacaacccttcctctcataacccaaagggcgatccatttaagctcaaacacactaaaactcactaactcacataatacacatatattcaagtccacacgcacattattaattaatttaacacctaatgaattaattatcttgtattaactaatcactatcaccaatataattatctcactttcattggatcctcta

SEQ ID NO: 44237 - DNA, 147 bp, Glycine max
cccaatggcctgataactgaagagctatgggagaaaaaggggaccaatgagaaaaggaaaatacttagggtttaattatatagaccagtaactctttattacgactctaaatttgaactctaaatttaaatctaactataccccccc

SEQ ID NO: 44238 - DNA, 335 bp, Glycine max
  unsure (1)..(335): unsure at all n locations
ttacgccaaagaaaaacaatgggaagatgtacaaagtttgagaaagatgataaaagatggcaacatgaataagttgccaggttatagttgggttgatattaaaaataaaacccatgtgtttggggttgaagactggtctcatcctcaaaagaaagaaatttatgaaaagcttgataatcttcttgatcagataaagcgaatcggttatgttcctcaaacagaatcagttctgattgacatggatgacaatttgaaggagaagcttcttcattatcacagcgagaggatggccgtggcattntcattactaacctgcccaactggtatgccgatca

SEQ ID NO: 44239 - DNA, 454 bp, Glycine max
  unsure (1)..(454): unsure at all n locations
tgacgcatggactacggccaanacgacgaatataaatntatttaattatttatatatttaaaaaaaatcatatactgcgttattaattatattttaattaaaaaaatataataattaataaacaataataaattcaaaaggtaagcatttaaaaattaaactaaatttttaaaatgaattccgcaattctaattttattatttcatgattatcatttaaatataacacatatttttataaattgttcgatattagttaatttgaaaataaaaaaaaactgtatataatttgaaaaataaatatttctttttaaaaaagagatagtgaatatatttttttaaaatttaaaaataatttataaatgtatacgcaaaagatttcatcgaatcataattaatatgaatgttaaagtatctataataaaattcaacaatnttaatatacattgtgttat

SEQ ID NO: 44240 - DNA, 296 bp, Glycine max
  unsure (1)..(296): unsure at all n locations
tacacacacccatctaanaactaagctcaccttcttgagaagcttccttgagaagctagagcttagctacacacacccatctaataactaagcccacctctntgacaaaatacatganaatacaaaataaaaagtccctactacaaagactactcaaaatgccctgaaatacaaggctaagaccctnatactactagaatggcaanatacaaggcccanaagaaggaanaacctattctaatatttacaaagaagagtgtatccaaccttgacccatatgctcanaaatctaccct

SEQ ID NO: 44241 - DNA, 471 bp, Glycine max
  unsure (1)..(471): unsure at all n locations
tgcatgatttacattctcccnctttctcatgttatattttaattcttcttgacatcatcaaaatcttcatgatttacattctccccctttttgatgatgacaaccacctgtatgttaggagcaacaacaatgaaaaaatatctatttgcatatagtttactcccccttggttttgcaatggttgcttatatgagacaattgaatatttcatatttnttatatgaaaacaaattgtctcataaacaatagataatttttcttactattttatcctttatctttctctccccctttgtcaacatcaaaaacaaatcttgaatagagaggagaaagatgttaccacttgttgcaatgtatgagaatcaagtgataccaaaaggcattaaaacaatcattcaatattaatcaagctaaaacaagtataataacacatcaatcaaacacaatcatatacaatcaatcatcatatat

SEQ ID NO: 44242 - DNA, 374 bp, Glycine max
  unsure (1)..(374): unsure at all n locations
caataataganaatacttttttctcatcgtttatttacgacattctacatcgtttttaaaaccgatgttgaaagtaccaatgttgaatgtattattgttaacatcgattttgaaaatttgatgttaacataaaaatactaacatcagttttctcaataaccgatgttatatacaaagaactaaagaaaataagtgtatgcatgatgaacattgacatctgttttctataaaaactcgatgtaatgtaatttattaacatcggttttctatataaaaccgatgtgaacgtccatcatctatacacttattttgctgtagttagttatatataacatgcggtatctataaataacagattgtaaagtttgtatatt

SEQ ID NO: 44243 - DNA, 397 bp, Glycine max
  unsure (1)..(397): unsure at all n locations
atgatggnagctgcagtaatctaagtaattagtgcagggtaaatgtattatgcttcttctggaccagcttggttcttattatatgtatgttggcattcaaaaccagttgctaatccactcccattatgtatctaccaatttttgaggagaaaaatttcattatcccacactgctcccatgttaatatgatatcctttctatttcacaaaccacttgatcctacttttgtcgaatgctaaacatcttgtttgtggttctattctcaatcttgtttataaagtaaagtaagcttctctgccaaagaaatacactcatgcaagctttttagtcagaattagaaacacataatggcacgacactgaatctatcatgtgaaacctattatgagctaatttat

SEQ ID NO: 44244 - DNA, 445 bp, Glycine max
  unsure (1)..(445): unsure at all n locations
ctgcagcttgtccacatttctattatcaacatctttatatccacgagcaaggggcgacatcaggtacaggttgggaatgacagttccagtggagattattttttggagggtgaaatagacatgactgcaaatttatgaaggatatagaaggtctgatcgtccaactgcagcgactagacacctagaattgggagcgagattcaagtgggggatatacaattgggaatgcttatatgatgcttgatagggattcgacaaatgaaaatcaggatggagagtntactacattatggaagttaaaaatcccaagtaaaggcttattctttgcttggagaataatccgggaaggactgccaacaaagagtaacttaagaagcaagaatatggaaatcaacaacgtccaatgaccattatgcagaaatcatgacanagatgcatgtcaccc

SEQ ID NO: 44245 - DNA, 467 bp, Glycine max
  unsure (1)..(467): unsure at all n locations
tctagccaaatggacttaccttgacttatttcctttgatatcccttttgagccttgtttccctttccttgttttgaagctcactacaagccttaagtgaaaaaccatgatatcaccatatccttaaggaattttggagctttggaattgttttgggaataagtgtgggggttttttgtttcattggataacatgttttgttggccatgcttcatgatatattttgagccatacttgatgcacattgcatattggttaaatgttggacatgctgaatgagatgctgtttctcaaaggctacagagtaaaaaaaattcggaaaagaaaaagaaaagcagtaaagttgagtgaataagatcttaaatgacaaaagaatgatgagactcttggttctactctttatgtttaaaatttatctttacttctttctattttcttatntnttcttaatatgcacttattccccat

SEQ ID NO: 44246 - DNA, 516 bp, Glycine max
  unsure (1)..(516): unsure at all n locations
cttattgccccatgtttggaccgttcgagacccnggatcctctgagtcacctgcngcatgcagcttgctagccacaacatgatagcaatatagtaattctaagtgtctganacacattacttgattagcgcacagtcgtgcttagcgagttcataaaccattaaatcattcatcagannaagaatgaactcgtcttagcgggacagcggccctggcttagcgagttcatttctataaatccagatattcatcangagagtganntgaactcacttagcngcattcattcgccatttccaaaaaaaattggtgttggatcaagtcgccttngaataattaagaaggcggggggggtngaataattattaatgaacctttactaattaaaaatctatccttcttaatggtactagaattaattactctcttactatattggtnagaaaagtaagaacagaaatagatacttaaccanangtataagtgataattaatgtgctcctnggacattanagt

SEQ ID NO: 44247 - DNA, 397 bp, Glycine max
cttctctatagcttgttcacttctactcctctgttcactcgcacaagtttgatcatttggaactttttcattatcattatctttctctacttcattatctttttctggggcattcaattctctactcttgacgattatttgtgtttctttctcctgactactttcacctctcgcatcatccttctttttatcaggacctttcttttcagcaactttcttcttggatataacactatactaatactacgcctccacaaacctgttactccttgtcattacaacattgtatttttacttgggatactactctgtattcgccacaaaactattggatgactcttcagctatctgcttggccaattgttccacctggacctcaacgtttctcagtgctgac

SEQ ID NO: 44248 - DNA, 217 bp, Glycine max
  unsure (1)..(217): unsure at all n locations
ttctttttgctttacaagaggctgagagaagatatgatctggctagagctgcagacctgcgatatggagcaattcaagaggtggaaactgcaatacaacaaccttgagggagcactgaagagaatctgatgttgactgaaacntgtggaccggagcaaatagctgatgttgtgagccgctggaccggtataccagttacaaggctttgccaaaatga

SEQ ID NO: 44249 - DNA, 450 bp, Glycine max
acgatttcatggatttgatcattcttggattattgagcggatttattcttgattttgttgtcttatatgttttgagtgtatctgtttgacattgttcctctttaatctattgtattgtcttccattaatggtttgagccaaacaaatgacaatagaattgctaatattggtgcaggtgcatccatatacttaccgaaatgagttcccatatttgcaattcaacttcagtcaagatccgcatatggaatatgatttctggatcaacaagataggcgttgatggtctctttacagacttcactggtagtcttcatcgttatcatgaatggacctctaaccgtaaagatgatgatgatgacaagactgaatccaatctattacataacattgctttgttagtctactcttatgaatgatcttgagaattcagatggtgtataagtgtttggat

SEQ ID NO: 44250 - DNA, 269 bp, Glycine max
  unsure (1)..(269): unsure at all n locations
aaatgacatcggcagaaatgcagttgagaagggaaacgcgccctattcttacttgtgatgacaagttntcccctagccatcgttgtcctcaatagcaacaatttgttctacagtgggaagatgaggatgatcctgcattacaaccagatccaccatacgaggttgagacagttggtgaccccattttgtcaaatcatcatgtgtcttataatgctttaagaggctcatcatgtcttggaataatgaagtttcaaggatcaataaatgga

SEQ ID NO: 44251 - DNA, 401 bp, Glycine max
gctttggagacccactgcaggaagctattctcgaactaatatgcttcagatgaaatggttcattttgtaatttctcaattcagttgtcaattctggacgatttcctgttaatttatcctttcacttttggttatagatgacttgctccacggttgaactcactgttcaatatgtggagaagttgagggaaatgattccactttatgaaattgtcaatgaacgtatcaacatcaatgacatttaatgggcacagcactgtattatttcaagctctcatatagcaatgcaagtgatgggaagctattgtgatagatctccagacgtaactgccactctagcaattgcaaattcttcgaactagctgatttattagtgatatgtatcttgaggctacattacaa

SEQ ID NO: 44252 - DNA, 342 bp, Glycine max
  unsure (1)..(342): unsure at all n locations
aataaacctagttgggttttagtatcaaaacaacctattacaattagaacaattcaaaatacttaaataaaatctaaaacaaataatattgcaagtccgtagttgactcactgttattcgccttagatcaaatgtatcttgggttcttctttctcactttaggtttgagcttgtaagtagatctttttttcaagcaacatctccttttctttcttaggtcttacccttgttattgggcctcctagcccaattatattctccctcttccatgctcttcgttcttctcttanaggatttccttgatctccatcatgaaaccaagtatccaacccaacatgagca

SEQ ID NO: 44253 - DNA, 456 bp, Glycine max
  unsure (1)..(456): unsure at all n locations
ttctaactntaattgcattaattacttattttctttcaagcttctaattgatatttcttgaccaaaatccaattattaacgtgtaggtcattaatgaattgaccattatttgaccagagaatnttctctgaattatccttattctttatagactttagcttaaaaacttaatagtttaaccatgcctatgtatcctatggtagcatctcattttttaccatgtcaatagtctaaaaacactactcaatcgtacaacaaagcaataacattgtctgtcacacacatgaaaaattgggatgttacaagagcaacctcgaacatcagaatgaaagtgggaatggctccctatgtctaccaaactagataactcaatattgngataaccttttaagaagtgtttttctgctaatgtttccaagcatgcaataatacnttcttgcaataatttctttcatt

SEQ ID NO: 44254 - DNA, 231 bp, Glycine max
  unsure (1)..(231): unsure at all n locations
aatgtcaagtggctgcatcgtgggaatgacactcttgctaagccttgtcctaatacttggaattttacccaacaacaaaattgtatcattaagaattgcaaacatattattatagcataagatctggtttccttgactgcttaatctgtcccattacaataactaattaatatcccttataagtcactaaaacanaaaagtttaattaataataacttaatccatatagtt

SEQ ID NO: 44255 - DNA, 475 bp, Glycine max
  unsure (1)..(475): unsure at all n locations
gcatgttactatagtattgggaatcctttaggtccacattacatgtatcgtggctctaaggtgatttaggttaatttcattttcatttattttcgatgtagacgttctggtatattattgagggatcagcgacttgacgctttaagattagagatgtcttattttgtgtttggcaattttaatttgagagaaaggagggacagcctagattcactattcgaatgttgcattgctacatccttttttctggctatgtttcatcgttttacaaactgttcgttgtttcttattttttggtgcttctgtacatattgtcctttgccaattttcggttctgatttgaagagatcagcgcgaaaacgaggaagggatggatggattaaaacaatacatattatgtatctaaactcaaagtgctcaaaagaacattagtttgaatttactattttccncccctcttaattatccatggata

SEQ ID NO: 44256 - DNA, 113 bp, Glycine max
gtcttattctaccatttctaactctagcatggcatttactacccggggcctggttttatacctacaaaacaccccaaacgttcattgtcagcctctaagcttttctgttattt

SEQ ID NO: 44257 - DNA, 438 bp, Glycine max
  unsure (1)..(438): unsure at all n locations
tctctcctctcaattgcacttccaatgatgttctcatttctcttttccaagcaaccaccaaagtaaagcgaaagtaccttccctttggtcccaaccactgctattattatctgatacaaagaaaaacaatgttgatgacgttcaattagcttgaaaagtttctaacagaagaataatagatatacttctttatcttttataaaaaagataaaaacacttataatcacatctgcttataatatntatctttctcaaatgcactaccgaacctccacaagcctcttgctacaaagcattagccacaattttcacatccaaccaaacgtaatcacaactgatgctgattctaaagtctattcaagtacctattgaacacacaaaaacatttaaataaataaatagaacaatgaanacacatcataataatgatagaaagca

SEQ ID NO: 44258 - DNA, 604 bp, Glycine max
  unsure (1)..(604): unsure at all n locations
cctgctcgacatctgcncnnaatctgcacatttcgtgcttagaccaacactactcttacctcgtctacctccncctcactaacgattggnnnnnntttgttgacatcgttcgaacaaccgcgatnctttanannccacccgcgggcatgccagcnntgctatgggttattaaatacngtttatatttcataattctagccctcattgtacacatcgctatgatatttcatacaagggtctgtctcaatatcgagtttaggtatgaactaactccttcaacaattcccatgaagccggctaattagaatgatccggtgttattctaagtgatcatgaattactttgtatgttatagatgaacatgtgtgctaacatgatattactgctttaatccaaataaaccttgaaatttctaccttatatggattagataactatccgtcaaacagatgcttaagtgcaagaggaggaaggcaaggattatatttcactatgcaaataaattttcaccatacatcttgtgttttgtccatgcgagccattattgattaagatgcttgttaactttaacgagataatatngctcacagatatttatacacag

SEQ ID NO: 44259 - DNA, 394 bp, Glycine max
tagctatacatttaatattaacgtcattttcagttttctaataaagttaatatatatggcgcacgaaattggcccattaagcatgacgtttgtttaaatgtttgaaagagtgtgaaaataattgttatttagcttgcttaaactttaagtgaagggctaaaattcttaagtctgttgggatggtgcagtttttattttggttacaaatgtattttaaaataaatgtgtttggcaaaaatgaattgtatgatttttaaatcatttcagaaactttacacattttaaaagcatgaaaaatgtctataatttggttatagttaaataaacatattttcatttgataatgatatttttatactttataccatgtacgtatactaactatactatacat

SEQ ID NO: 44260 - DNA, 356 bp, Glycine max
  unsure (1)..(356): unsure at all n locations
gcccccnttgtgctcatgtgacctatctaagcactgngctcactgacaaccaccaaccgttttttgcaggatacctggagcctaacggcaactctgcgtcacaataaaggaacatacccaagcaggagctgtgtggtggcactggaatttggtatatgggatgggctctgtatcataccagggggtatcatacatgttaaaataaacagagctaatgttcttgaatcataccacggtgaatcatacctcttgaaacagtagaactaagaccttgtatcataccaggggatcatacgctaaaagactggattaggaccttgtatcatacaccgtgatcaaccaagatggcatgtatg

SEQ ID NO: 44261 - DNA, 441 bp, Glycine max
  unsure (1)..(441): unsure at all n locations
actcagcttgcttgtggagcttctatggaggctggatctttgagcttcaatggtgtcctctaatggtgattttccaccatggagatgcagcggaagacaaaggaaaatatgtgagaggaggcgccatccattaaggaataagccatggaagaaggagcttcaccaccaagatgagccttggataagaagcttggagaagatgcttctatggaggaaaagaaagagggagagaaagagagaggggggagcacgaaattgaacgaataaaagaggtatagaagtggaactttgaagtatgtctcacaagactctcattcatcaaagttacaacaagtgttacacatgcttctatntatagactatgtagcttccttgagaagctntcttgagaaagcttctttgagaccaacttcttgagaagctagagcttagctacacaca

SEQ ID NO: 44262 - DNA, 248 bp, Glycine max
aaaacaaagtaaacaactggcctttttaagtgagggatcaacttactctaaccaacctatatctaactagttatgtatgcgcttgtgaacatgcactttaatgaatagggagatataattcgatttggatagaaaagaaaagtatctctatcccttctttcccatctcacgggcacgttggatatcacagcttttaatagtgaacataacataggcaatttgacactttatatatatgagtgttaata

SEQ ID NO: 44263 - DNA, 247 bp, Glycine max
aaagttattgtctgttgaattggctcagagcttcaacattcaattgtgagcgtctcgatatatgactggactcaattagacatccgagtaaaaaggtattgtcggttgaattagctcacagcttaacattcaatgtcgagcgtctcgatatatcacgagactatatcagacatccgagtaaaaagttattggctgttgaattggctcagagcgtcaacattcaatgtcgagcgtctcgatatattac

SEQ ID NO: 44264 - DNA, 446 bp, Glycine max
acactataatactcagctagagccaattcaacgacaatagctttatactctgatgtctgtatgagtcccgccatatatcgagacgctcgaaatttaatgttgaagctctcagccaattcaaacgacaataactttttactcggatgtctgattgagtcctgtaatataacgagacgctcgacattgaatgttgaagctctgagctcattcaaacgacaataactttttacacggatgtctgattgagtcccgtcatatattgagacgctcgaaattgaatgttgaatctctgagccaatccaaacgacaataacgttttactcggatgtctgattgagtcctcgaatatatcgagacgctcaaacatgaatgttgaagctctgagccatatcaaacgacaataacttcttacacggatgtctgattgagtcccgtcatatatcgag

SEQ ID NO: 44265 - DNA, 514 bp, Glycine max
  unsure (1)..(514): unsure at all n locations
tgtgagcccttgtgcttcgattgaaacatgtannacgcganctttgaatactgcggctgcagtctgttgaaatttattttatctctattatttatcaacccagctttgattataaatactctttgcatgatatgggaaagttgtggaagatgaccacaataccaagtctatcttatgatactttctccaaatactcgcactctgataggatgtaaagctcatctcggcacgcctgattctatatggaatgaataacanggttgcattccttcctatgttaattcccaaatcattgtatatcccgaagataagttacgaccttctagaacctctcaacaagatatacgctatttgtcacgtttgttggttgagagagagcaaaattactttcatcactctcatataccagatcaaagaatttcttcttagcactccctagtctaagaattcatgatacaacttgtgtatattgctataagatgttacacatagacattctgactaacaaatgaag

SEQ ID NO: 44266 - DNA, 378 bp, Glycine max
tcacagcagattttagtaatgacccactatcctagaattattttaacttaatgccattaacctatggagttaaaaaaaacttaatggctgagtgtaactgaaattgtggcaaccaaaagtcacccccaacagccaataagtcagccaccatttggtctcccaaaaggctgatgcctatgttgccaattgggcccttattacaacttgaactaaacctactaaagcctttttagttgattaacccaaaacatatttttggtcagccaactttacaaggattgggccattatttaaacaaactaaatactctaaaattaagacaaagtggtgtcatttagtcctcctccatttgggccatgatacaactcacaaccttgg

SEQ ID NO: 44267 - DNA, 296 bp, Glycine max
  unsure (1)..(296): unsure at all n locations
gcttgtaagccaccatgcctatcttctgtataacctgcaagggaccataaaaacgtctagccaatttagagtaagattctcttgtggttgaggtttgtctatgagggtgtagtttgactaaaatccaatctctaatcttgaagcttacatctcgtctatgattattcgcaaaatgcttcatggttcctatgcctcgagcaacttcttntctgaagctttgaacataacctcttgattaaccaagaaatcatcaactgcttcgaccttcgatgaccccataatgtattgagggggac

SEQ ID NO: 44268 - DNA, 281 bp, Glycine max
cctcctctcacctctattccttagtcttccgccgcatctccatggaggaaaatcaccatttaaggaccccattgaagctcatagatccatccttcatataattcctctttgttaacaaccaaaacttctcaactgattatatatctcatgttggtcgattgttgcaatactctcagttaatactacttaatgaaatacgtgtaatcctccctccattctctaattttacttttgacttgaatcctttacgaaccctattctacaaggtgttgaactatatt

SEQ ID NO: 44269 - DNA, 446 bp, Glycine max
  unsure (1)..(446): unsure at all n locations
ctatcctgcattatatatatgtggatatcactatcctggattatagacagctatgttggataggagtagctagatttggttggatttggacttctctttattggttacctaattatatctactcagattcaaactgattggagctagagttgtgtgccagtttttattatatcatgggatctataacattgttcgtgtatgctgaacaaaaatcttatatcaaaggttgcangctagaagcaaatatccagatggctnttatcagtatttaaggtagcagtcctgcaatctagtatttcatattgctaagttagcctaaaatagttccattaataagtatactattaagagtccatgtgtcatggagttcttttatctaaaaagaactaaacataacaaataggggcttaattatttattatttatattcaaggtgttcgtctctc

SEQ ID NO: 44270 - DNA, 373 bp, Glycine max
  unsure (1)..(373): unsure at all n locations
gctgcagctttccctatttgctataataggggttgatgaaaagaatngttcaccttctggccttctattctttgaatgctgaggaaaattgttccgtgaaaaatccagccaggcgcttcgtacatttcgtaacgtttatgggtattatcaagatttcaaccgtcttcgacattatcgtcgtcttcgttttttggcttcaccggaattacccaaccgacttttaattattctatgtcccgtggggtcccattgtttcggacttttattttcgttcattactttccgtccctttttgcggcttagtcattattaatcattctcgctaataaaaataaataattccccgatcttgattgtatatccgtattctata

SEQ ID NO: 44271 - DNA, 487 bp, Glycine max
cgcatagtgttggagtgacatccaccttgaatgatttgactaagagaaatattgtctaatagaaacaaacttatacaaataatcgattcccagatttctaaagatgtagaaaaaagtattaaaaataacataaaacattgtttagattttgtaacgtgtacattattttatatatcatgtggttaaaaaaatgtatatctggattatttgggtaattatttttttgtattaaataggtaaaaaatcctactcatgtataacacaaacttttgtatagtttgttagttgaaataaaaaaaattactgggtccgatatctcatttaatgtttgtctcttgatattgcaagtttcaagaaaaaaaatcatcgatgtttggataattacttgacaatttgttggtttgcttgctggatttcatttgcatggctcgcgttttgtgatttagatatgagcttgagaattggtttctttgcacaacacagtatt

SEQ ID NO: 44272 - DNA, 334 bp, Glycine max
gttgcaagagacatgtttattagatctcttgattctacaattgctgtgactattggttgtcactgtctgctcaaacatctcaacactgtgttaatgagatcttcattatgatatatttttccctatgatgcaagatgattaactatatgagtaaatctcttttgcatatctagcatggtttcgaatcgattcattctaaacatttcatattcatgtgtgagagagtttattcttgaactcttgacatcaagtgtgcctacaagggttacttgctatgtatcccacatttcttttgcatttttacaatatgagactctattatattcattcatgc

SEQ ID NO: 44273 - DNA, 416 bp, Glycine max
  unsure (1)..(416): unsure at all n locations
agctntctagcatanggattaaggttcgagagctttggacatccggtcctatggttgctgacggaggagctggagtggatgatgaagggatgtcatctgttctagccctttntctcgatgccatttgtaaataaaaagaactcataattccttagaccaaatttattcaagtttaaaaacagaaataaaggctgaaattaacgatgggcgcttagtgggatataacttgctaagcgcgtcctcagaaacataacatatcggcttagctggaaacaaggctcgcttagcccaatggttgccgcgacgaaatgtgcttaactcatgtatactcggcttagcgcacggctntcaacacaataatttctaagttacctgggcttaacgattaagcctcgcttagccacatgtatctcaat

SEQ ID NO: 44274 - DNA, 488 bp, Glycine max
  unsure (1)..(488): unsure at all n locations
actcaagccctcaggagtgacaacaacaacaacaacaacgacgccttatctatctggagtgtcatntgtccanaattttatatagaatctataacaaaaataaacaatagtactactcttttcacaagggctatatgagaattccggctcaaatcctacacctgtgcatgtttggattagcttacttagaggaaattattatttcattggcagctccctgacctggttgagctttaatgtaaataatgctaggtattcttattaattttactatcacaacactttctattgctttccttagacacgaaagactaattactagcaattcagatattacacagggtaaacagagaatattacaatgatttctctctctagaacagaaataagaacaggaaaagaacagtccttgacctctgtaatcaatattgcaaactgaagcaatctgtattaacattgctctcctgacagaaatagcaattatgtat

SEQ ID NO: 44275 - DNA, 482 bp, Glycine max
  unsure (1)..(482): unsure at all n locations
ttccaagacactagagagcttcctaataagtggcatgtcccacttgtgctttttctatctaatttgcatcctgcataatcaaaatctagaaagcctgttagatctaaagaggtacctttgggatacctcaaacccacattggttgtgcccttaagatacttaatgatcatattaacgaaaattaagtgagattccttaggattggactgacatcttgcacataagcaaacacttagcatgatatctagtctacttgtagtcaggtagagaagtgatccaatcatagctctacatcttgattcnatcaacaaattacctttttcatctaagtcaaggtaggttgaagtagccattggagtagatgcttctttgcattnttccataccgaatntcttaattagttctatatagtattttggttgactgangaaagtccatgttcatctgcttgatatagtcttaaaagagtcaatctctcatat

SEQ ID NO: 44276 - DNA, 456 bp, Glycine max
  unsure (1)..(456): unsure at all n locations
agcttccatcaagttccctccaccttgganaggatntgacctcaaatcccgaggtttttcatactctgggctccttccctcaacacctgtaaaaagaacaaaaacacatgtattagtggtgtttggtttgttgaagtaaggtaaggtctgaaaattcatttcctgngcatcttcccatgaaggaacatggtttctcatcaactcaatgagtggtgctacaagtatagaaaaatatgggacaaaccttttgtaaaagtttgttaagtcatggaagccccaaattnttcttatacttggtggagtgggccactcangagtgacctttattctcttaaggttcatgggaaccccttgaccactatttaaaaaattaagganattaatgcaatanagcgtacctttttctataattntgtgttgattattcctacaaaataatacgacaaacctaaagtg

SEQ ID NO: 44277 - DNA, 499 bp, Glycine max
  unsure (1)..(499): unsure at all n locations
ctgtcctcagatccctcttgttggactagacttataccaaacaacattattgtaatagcatacttaaaaccaaaacttaatctacagatccctcttgtaagactaagtttcaattccacttcattcaagttctaagacaacaatacatttcccaatgttaaaatcacctaattaggcacacaaatggttgatcaaaccaagagcatacatatattaagcactgaaagaagcattgaacacaagagaaacaatcaattagatattaaaataattagatcatttgttctttagaaatccccaacaaaggtgtttagtcagccattagtgaagaaaccctaacaataataatgagattacaaaacctaggtatctntacaaaagctgctcctcttgctgcctccagagctcttttcccgaaataggcactgtggtgtgctatgtgaatttgtgccctgggcattgtaccctattnttgtcanaacatgctagcaactagctc

SEQ ID NO: 44278 - DNA, 438 bp, Glycine max
  unsure (1)..(438): unsure at all n locations
agctnggaccagccacgacctatagttaacgtctatccagccactgggagaggatcaagccctcataaagagaagtttcatagttatctaggagtngtagcatgagagaaaattcctattgtccactccaattggaatgttgtaccagaaactttaaagaatcttatatgggataacattttggtaagtccttatttaagttgacatttgtatatgatttcatataataattttaaaaaaatattatatttcactaattgttacttaacaattttgttttggagggcaaatttgacatccccgagggtgacaatgtgaaaaacaaggtgatgtcaacggttgttactcgatggaggcaatttaagtcctccctaacaataaaatatgtttattctaacaatganggtcaagcaaaagatgatccttctattaagtatg

SEQ ID NO: 44279 - DNA, 508 bp, Glycine max
  unsure (1)..(508): unsure at all n locations
tactaagcccgcttgcggagcttctatggaggctggattntctatgatgtcctttaatggtgattttccaccatggagatgcagcggaagacaaatgagaagaggttagatgcggcgccatccactatggaataagccatggatgaaggagcttcaccaccaatatgagccttggataataagcttggagaggatgcttcaatggaggaaaagaaagagggagagatagagagaggggggagcacgaaattgaaggaagaaaaagggagagaagttgaactttgagttgtgtctcacaagactctcattcatcatagttacaacaagtgttacacatgcttctatttatagactaggtagcttccttgagaagctttcttgagaatacttccttgagaagcttctttgagagaacttccttgagaagctagagcttagctacacacacccctctcataactaagctcaccgtcttgagatgcttccttaagaagattcctatagatgc

SEQ ID NO: 44280 - DNA, 434 bp, Glycine max
  unsure (1)..(434): unsure at all n locations
agcttgtcgtacacatttagtggttntccaactaaatcatacgagtaacatccaagggagtttggatccgttccccatcgagacacaagatactgaacctataagttcaacatataaagatgttagggtcctcaagtaggatgcagacactagagaaagcgaacttttagtagatgatgagcaatctatgaggacaacattagaggtggacttactggcttagaagaatctggaaacatcttcttgagctgttgcattacaaaatgtgcggctgcttcatcagatagcttctcaatgtcataagcgaaccttccagctaccatgtagacaagaacaggatggcctgttgctttgtgaagattgagaaaatagccacaggtataagaggtcggagcaacagtgcccaagagttctacattaggccaaaatacttt

SEQ ID NO: 44281 - DNA, 510 bp, Glycine max
  unsure (1)..(510): unsure at all n locations
tctaaccatctagcacataccacaacttaagtcttactcccttggttgaagtagggatgctaaanaaagctagcttaaaaaaatatctataactataactagttctatataactagttatataaaagtaggtataaaattataacaaatgttatagttatgagtagttcaaataatatatttttattcatccataactagatatgtgattggttgtagatataaatnggtatataattgggtatataactattttttttacaaaaacacagttaattcatttcattcaacaccaaagagtcaatacaagaaattgcatgttaagaggtatgaagactatgtaaaaatggtgcttcccttgctagttcatgggcaacaccattggcttgtctcctagcagacataattgaataatatgtattcatagcaagtaatcttcttttggcttatagatttctctacaactcttaagatcgctctcaaatgtgatgtgatcaataactaacaacaa

SEQ ID NO: 44282 - DNA, 469 bp, Glycine max
  unsure (1)..(469): unsure at all n locations
agcttctatataagctgaaccattntatcaatctacacaagatgagttatattcagaacattagagtttatctcttttatcttagggagagcgattctcctatattcttgagtgattcaagaacaccctggctgtatcaaaggactttcacaacctttgtgtgttgccctcgctggaaagagtgattcttttcatcctttcatcttcacccttgttctttcaaaccacaattccagaaaatccacctctgcccagaattatctcgtggccataactcccattctacgcactcaaattaagtgattcttgagcctaaattgactttcaaaacgagacctttcacctcgttgtggaatcacctcatctggagccctgtagcttcagttattgccatttctatatttctgtccagccaccacttaacctacnattttaccatccattcatccattntatgccaagaaccacc

SEQ ID NO: 44283 - DNA, 376 bp, Glycine max
  unsure (1)..(376): unsure at all n locations
gagcgtctcataatcctacgggacacatttggacatccgagtgaanagttattgtcgtttgaatntgnttagagcgtatgttttcaattacgagcgttttgatatcccacgggacacaatcggaaatccgagttaaaaattattgtcgtctgatttttctaaaagctttcattttcaattacgagcgtctcanaatcctacgggacacaatcgaacatccgagtcaatagctattgtacgttgaatttgctcagagcttcatgtgtcaattacgagcgtctggatatattacaagactcaatcagacatccgagttaaaagttatagtcggttgactnttcatagagcttttgtgtcaattagagcgtctcgatat

SEQ ID NO: 44284 - DNA, 447 bp, Glycine max
  unsure (1)..(447): unsure at all n locations
gtacatattccgtagatagcccttctgagccttgattccctcttctttgttttgcagctcactacaagccgtaagtgaaaaaccatgatactaccatattcttaaggaattccggagctttgaaatagtcttatgaataagtgtgggggggtttttgtttcattggacaactcgtttggatagactatgcctcatgatgtatgttgggccataccttgacgctacattgtgatattgtgtcaattgttgtacagtgctgcataaaattgcntgtctctcacggcgccaatcgtaacaacataagtgacgtagacagatgctagcccttagttgagtgaatggatcttataggcacaaaatgatgaactcttggtatgctcttcagaagatatccatcctacttcgtgtatttcgtaattctttaacaaaactattccctctgacctc

SEQ ID NO: 44285 - DNA, 394 bp, Glycine max
atctcaagatgaagccaatacttgctatcaaacactatatttgactgactatccaataccgtttaagtccctccaaaagataataacccatattcctactactcaatttactgtgcctttaggatataacttatatctaacactaaattgattctaattcgtataccactaaaataatttagtcatttcattaaaataaatataatattatctatcatgttaataataatattgttactattaattattgctactaaatacgccactccataacacctaatagagattcttataggcatatgtcttggactatttcactcagaacgttatattgaaatacatatgtctgacatttttgctaaacgaatggagtcgagccacgccttaatcatgt

SEQ ID NO: 44286 - DNA, 391 bp, Glycine max
  unsure (1)..(391): unsure at all n locations
attgagtcttgtaatatatcgagacgctcgtacttganaacaaaagctcgtggcatatgcaaaccgcaataactnttaactcggatgtccgactgattcccgtaacatatcgagacgcttgtaattgaaaacggaagctctgagcaaattctaacgacaataactttttactcggatgtccgattgaatccagtaatatatcaagatgcttgaaattgaaaacagaagctctgagcanattcaaaagacaataacttcttactcggatgtatgattgagtcccgtagtatatcgagacgctcgaaattcagaacagaagctctaagcaaattcaaccgacgataactgtttactcggatgtctgattgagtctcgtataatatggagacac

SEQ ID NO: 44287 - DNA, 323 bp, Glycine max
  unsure (1)..(323): unsure at all n locations
taatttggagcatctcgatatattacgggactcattctgtcatccgaattataatgtatagtcgntagaattacctcagtactactgttttcaatttcgagcgtctagatatatcacaggactcattctgacattcaagtaatgaaatctgatcgtttgaatttgctacgatcatttcgttataaattgcgagcgtctatatataccaagggacacatgtctgcatccgataaaaaagtgcatgtcgtttgattttgctcagagcatttgttttcaatatcgagcgtgttgatatactaggggacgctttcggatatccgagt

SEQ ID NO: 44288 - DNA, 330 bp, Glycine max
gaccacagagcgcgacctggagatatgtcgcgggggtcaggagaccttcgggacgtcatgtgtggtgctattgcccaaaaccaagctagaccaatctcgacccaacccgggcatagtcggtcagcgagaacctgtgatgtacctaagcatgcgagctcctggcagtcaacagattaatggaagacatgaccacaaagcaaggaggcttgtggtggctggccagctgtgcattttgtgtaatatgtggattgtggctctggtaatcgattaccaggggtgagtaatcgattacaagggctaaaattgatgacaggaggctaagatggtctc

SEQ ID NO: 44289 - DNA, 459 bp, Glycine max
tgccacccatctcgcgcatgcgagcaaggttgcttcctccagaatcatcagctcttctggaggacccaagtgggcctgattgctatttgcacccccactatactaatacacccctgtcttttatgggattctttttcgataaaacggaactacaattcgtacgaacttgttcttccaaatgtacgaccttcggatactaatcatctctcttttacttacggaatgtacggaacctcactaattgtgcaacgaagcttccatttgtattacggtgtgtcacagaactctacagatagtgcatcaatatattctttagttttccggcatgtgccggagttacacaaattgcctattgatggttgtcaagcaccttacaaagaccaaacaaatatttacatgtaatcattcatacgtccccggacgaattatggtgtacactttcaatatgctataataatg

SEQ ID NO: 44290 - DNA, 407 bp, Glycine max
  unsure (1)..(407): unsure at all n locations
ctgcacgcatgcaagcttgctaacccatggaagctcctaatatcttccacattctgngatggccttgattttctcaagatccacttggaccccatttctaccaactacaaaccgtaagaaaactatattatccacacaaaaaagtacacttctctatatatgcatagagggtgtttttcctaaggactgaaataacttgcctgagatgtcctaagtgatcatctaggctcctactatacactaaaatatcatcaaaataagcaactacaaatctacttatgagatcccttaagacatgatgcataagcctcataaaggtgcttggtgcattagtgagcccaaaaggcatcactagccattcataccaaccaaacttggtcttgaaagcgggtntccattcatcaccc

SEQ ID NO: 44291 - DNA, 382 bp, Glycine max
  unsure (1)..(382): unsure at all n locations
tagaaaacataaattacagcaatgtggttcagatgatggaggggatttggagtgtntaacaatgcttatacaatcaaatactcaataagttcaagcacctattggttcttaatctgccctatcacacaaagacacttgattgtaagatattttgatgcagaggggggggtggggggcttatgtcttcttattagtactatcaatagtatttgactaatcatttatagatattctgtacatatggtatagatattcttgagatgtcctattgtagaatgattaaatcgagattactatcaaaattttattgtggtgatgtcgatattttaagtcctaataaatatttcttttttatgagtgtatgtaatgtattaggatatgt

SEQ ID NO: 44292 - DNA, 443 bp, Glycine max
gcatgcaagcttatagaatatataataaaagaactatgactattgaagaatctattcatgtttcctttgatgagtctaatgctatttctccaagaaaggatattttagatgatgttacagaatctttagaacaaatgcacattcatggacaagattctaaaggaagaagtcaaatcaaatgatgaacttccaaaagaatggaaagcttcaaaagatcatccccttgacaacattattggtgatatctcagaaggggtaacaactagacattctcttaaatatttatgcaataatatggcttttgtgtctatgattgaacctaaaaatataaatgaagccataatagatgatcattggatagtagctatgcaagaagaactaaatcagttcgaaagatacaatgtgtgggaattagtaaagaaacctcgaaactaccctatcat

SEQ ID NO: 44293 - DNA, 497 bp, Glycine max
  unsure (1)..(497): unsure at all n locations
atgataaacatntatatctaacattgattaatatttatcatttaaaatcacatacaacacatcatttatatctatgcacaatataaacattttaaaatttcaaaataagatttcacaaaaaaaaaatatcagaataggacaatgaaacaaaatctgatttggttgtaggacaacgaatagtaacaattccataagctgaaaatttaagctttaagaaaaggtctactgagagcttttacttttgtaaaagctaaaaaaaattaataagcaaacactcttaagaaataaagaaaacctctttttataagataagatgccggaaggtcttttgggttgcatccaaacggattgtagggtgcattngtgaaaagctctacttgttatgcagtgaataaaaagatacatcaatacacactcttgtttcanagcgaaggaagtattgtcacaccctctaccccacacatatatgcactaatactaanagaaataggatgtgg

SEQ ID NO: 44294 - DNA, 398 bp, Glycine max
  unsure (1)..(398): unsure at all n locations
tgcaagctggtcgaggctctcgtgaaggacatactcgtatacaagaagcttttcgaagccatgggtacaataaccgaacaaactcaccacattacggtgctgtacacgcgccaacgactntgcctcgttaacgaactgcgatcttccttgattcgatctatgcgataacttcttcaccgcattctctctcccatcatatcaatttacccttcacaaatcagtataatattggagagaacacatattagaataagtctcagattgtttgcttaccaagtaaaaccagatattagtaacatctatttatccgtgttgaactttctccaaaattataattccaattcgtcaacctttctgggtatagaaaatngcttccttaatccctaataaaattcatt

SEQ ID NO: 44295 - DNA, 516 bp, Glycine max
  unsure (1)..(516): unsure at all n locations
tcttgcgtagcccctctnggagctcagataatcccaagaacaattccctcttattactagctattntgaattctgtagttcctgaatgtacaaccttcatattgttgctcgttcccctctttgttgtctgcaagaaagataatcaatatgaaacaattcacgctgaattgttatcgttattattactcgaaccataatgaataacaactaaacaagtctctcttattcaaatggaaatggatgttgttccaccagcatcatcagctttggaaaaggattttggtctccaaatacaatggttggaggggattagatcaagggcctaaaaagcactatttttctacttggtgggctgacctaagagccatcatccaacaccagagtatgaatcctgctcttaaccaaatttgctggaaggtgggtagtggagatcagttcctcttttgggaagatccttgtgctgatgaaggggactcccttaaagaccaattccctgaactttcagaattcttccca

SEQ ID NO: 44296 - DNA, 447 bp, Glycine max
  unsure (1)..(447): unsure at all n locations
cgatgctttgcttagcgccaccctcgcgcttagcgcgaggtagtgaaagtgggcttaacgccagtctcgagcttagcctggctgaaggcacctgctgcacttagcacactgatctcgcgcttaatgcacatacttgatgctgatgctctgctagattctcctttgcgctaagcgcgctgaagctgcgcttagcggtgaatatgcgcttggcccaactgctgagcttatcccaactgctacatttntcaattcaaaacttagcctctttctcaccgtgaaatgcacagatgtcatcattaaatccaatggaaatgttctagagacaacattagccataaaacattgtgtattacaaaactcactacgaataaccatacatcgtggactatacaagctataggaaatgattctatacaaaagttagtcgtatgagacaactaacaaact

SEQ ID NO: 44297 - DNA, 414 bp, Glycine max
agcttgtcctcagatccctcttgttggactagacttagaccaaacaacattattgtaacagcatacttaaaaccaaaacttaatctgcagatccctcttgtaagactaagtttcaattttgcttcattcaagttctaaggcaacaatacatttcccaatgctaaagtcacctaattatgcacacaaatgggtgatcaggccaagagcatacaaaatttaagcactgaaagaagcattgaacacaagaaacacaaccaattagatattaaaataattacatcagttgttctttagaaatccccaacaagggtgtttagccagccattgcagaagaaaccctaacaataatgagatacaaaacctaggtatctctgcaaaagctgctcctcttgctgcctccagagctcttttcgc

SEQ ID NO: 44298 - DNA, 485 bp, Glycine max
  unsure (1)..(485): unsure at all n locations
gctgagaatatggagtatccatcacatgtggtactatgtggctgtcgggcgatggtgcacaacaagttttccacatccacaaagcgcgcataaacccaccatcccctgttgcccacctccatctgagctcacgtactcccacgtagcccatatcctcgtttctctcaacaccgggtccccatcaatcctcccaaggttccacaacatccaatcaaaacaacattcaaacagcacatactatcacagccaagcaaaacatggcaaaggcagataactctgctcaacacaccaaccaaaaatcacaacttttctcactcaaagaccccaataacaattccttcgatccaattcgttaaccgttggatcgactccaaaattntactggaagcctatagtgcataagcctacattgtgaccgttgggatctactagcatacatccagaacttattctgcactactctntccacaactagcagaaacata

SEQ ID NO: 44299 - DNA, 377 bp, Glycine max
  unsure (1)..(377): unsure at all n locations
agcttaagacagtggggaaggaatntccttatatatttgcatattccttctgtgaatacacctctggtatatatagtcatatgtctttgctacaagacaaaagctaatagcagaatctctaaggcactagtagagagcactataggactaacagaattacaagagcatagagcactactgctcataacagaatacaacactactacaaaaacccactaacgaaattggtgccaaaaccactaaacataatctttcaagtgttgagtcngtatcttcctcttcctatcatatcattccctggcccatcaaaaacacctcgtcctcaaggtgttgggcttcaaaccatggcttcaaaagttgaatcgggatcccaaatt

SEQ ID NO: 44300 - DNA, 442 bp, Glycine max
  unsure (1)..(442): unsure at all n locations
cattgatgcatcctgtctatggcatcttctatgtgtgctattaaattntgaaggctcaagttggctatcaaaggagaagatggtgataggactaccctctattaaccaccctgatcaactttgtgaaggctattcacatggcaaacaatttagaacaagttgatgagaatcccaaagtttcccaaatacaaggacctatgactaggagtangactaaacagttagaggataccctccaacaaatggtatcagccatacttgacaaggcccaattggagaaggatgaaggcccagattcactaccaagaatcttaattgttgctgaaggcctaaatatttgaaagcccaagtcaaatattttctatgtttcttgtaattttaattaaataaaattggtgccttttcaactgcacctcagctacactatatgcatngaactcat

SEQ ID NO: 44301 - DNA, 456 bp, Glycine max
cttaagcacctgggctgcagcttccataagattctatgaaacatgttattgagatctctcgattatgcaattgcagttacctttggttgtcattccctgcttaaacatcttagtaattcgttaatgagatcctcgttaggaaatatctttcctaatgatgcaagatgattaatgttagtcattttatacgactaacttttgtatagaaacctttgataattatatagaattcctccaagttacagttctttttgtaggattagatatacttttggttaataacttgatcattactcattataatcttccgctcgtaattaatgtaaatttcaattctatttcacgtgaaagaggagatcttgtgaagagttgaatctggtgtctcgcgaagcctagtgtgtgcgcttagcgagtatgtcccgctaagcgaggcacatgcatgctcagcgagacaca

SEQ ID NO: 44302 - DNA, 511 bp, Glycine max
  unsure (1)..(511): unsure at all n locations
tatgctgcanatatntataatagacctcctcagcagcaaaacctactacagcagaataataatgacctttcaagcaatagatacaatccatgttggaggaatcatccaaatctgagatggacaagtcctccataacaacaatagcttgtccctccttttcagaatgttgctggtccaaccaagccatatgttcctcctccaatacagcagcagcaacaacagcagtcacaacaaagataacaagcaactgaggctcctcctcaaccttccttagaagagttagtgaggcaaatgaccatccagaatatgcaatttcagtaagagacaagagcctccattcagagtctgacaaatcatatggnggcagatgactactcagttgaaccaagctcagtcccaaaattctgacaaattgccttcacaaactgtgcagaatccgagaaatgtgagtgccatcacctcgaggtctagcaaccaaattcaagtgcctnctccagtagcagcacctaca

SEQ ID NO: 44303 - DNA, 445 bp, Glycine max
  unsure (1)..(445): unsure at all n locations
agcttgtatcatgcaacgtaatgcatgcagggtcaccagttagttacaacggcttaggaccattattctgttattccagttaattacaggccataatggtgcaataccattgtataaaaggagatcatattcatgaataaagcagagaanaccattttccagtaatagtttagcgtagatatccttctcttacctctcgctcatatcaatcttggaatggtataattaagatcagttaggcgccggctgtgcggtgcatctcccattgataaattaagtttcttctccagggactccccccacaaaaatatagaacaaaaaacaacatacgacattgccaataaagtgagtaaaatttgtgcacgccaagcattccacagccacagtgacgacgccatatatattccgagtgaaacctgatattcaaatcgtatcgtgcttactt

SEQ ID NO: 44304 - DNA, 457 bp, Glycine max
  unsure (1)..(457): unsure at all n locations
ntccattgtcgaattccaaccacagtgcgtcacataacaccccacagaacgatgtgaaagaacttccacttgagaacaccaatttactatcttccccttctgttccaactcctccctgcagcttagctcctcttcttctttttctctactgacccacaagataggacttccacaatctaataacgcaagtgcaagttcttccatttgcttcttcgacaacacgcaaaaactaccaaatgagacataaaccaccgacatctctggctttgagtccaaccattcaccacaatcattcgaggggcggaagatgtcaccgccaaatgaagtatcagtggggtctttcccgtccaagaaggccgagggaatcaacggcccgatggggatcatgttgaaattatcaacggccctcanagcctcatgttccaacgcttcataggtgttgacaagtattctgggc

SEQ ID NO: 44305 - DNA, 376 bp, Glycine max
  unsure (1)..(376): unsure at all n locations
gcttctgtgtcttaatgacagagtatatgcatagnggccgagcaactgagaagtctgatgtgtatagctatggtgtgtcgacactcgaagtgctgagtggaaagcggccatcacacgcatcattcattgaagagggtctcaatattgctggttgggtatgtcattcacacaaatattggattatagtataagttatgatctcgctctagtgttttgttgtttaaagaactaaatactctatattctaatataaacacacattgagtatcttttgttaactgagactatactaccttatgtgttacaacgggcttccttatggctagcactaatcaccagagagagttgagtgagtgttacatggtacaataattgt

SEQ ID NO: 44306 - DNA, 445 bp, Glycine max
ggctgcgtcctagcacactatatgcagagcatcctatatcattgaatcttgatcaaagattaaatatcatgattgatattgcttatgcaatacatgatcttcatcatgaatgtgagcaatcgatcgttcatcgtgattcgaagccaataaatgtccttcttgatgatgacatgattactcatgtgagtgattttggcataccaagactcttcttattcattaatgggaccacttttaatcaaacaagtacaattggaataagatggactcttggctatgctcctccatgtgacatcctctatcccataccatacgtatatgtactaataataaaatgaaatcataatcaattacaaataatttaatacacattttataaataatcctcttacaggataatagactcacattcactttcttttatatcatattcaaacttgtccat

SEQ ID NO: 44307 - DNA, 469 bp, Glycine max
agcttacacaaacattcattagttcaacacactctcaacaaatagttatcatccgtccatagttccaatcaatcatgctaagtatgatgcatgcacctgacctaaactctcaaatgcaatatggtaccatccccaaggaaatagcctaaacatgtccacacgacactctcacttaagaaaactaggcagtaagtgttgaggtcaccctgtcatgcacaagcaactcccccctcatggtgatcaacctgagtctcaagggagttccaaaccaagtgacatgcctctaagtacaagcatttctcctcatgagaaactacaagtacttactaacaaagtttatactatttccatatcatatgaagtatgaaacatgggcaccatcaatgcattgactatggataattaaagattctaagccatccccctctgaagatgcttaatactctatatccactctatttctcccacc

SEQ ID NO: 44308 - DNA, 345 bp, Glycine max
  unsure (1)..(345): unsure at all n locations
tcttatccataaaatgcttgatggagattcagatattaagcactatntggtgcataagttaaagaagaaatgagtcacatctttctatgagagaataggtacacgagtggcgtttgcccactaatgctcctgatgaccatatagaggggttggaagctactgaaattgtagaacttgatgagtaagtctgcacatgctatttcttcaagtataacgcacatgtgggttatacatgcacaatgaagaagctgactattagcagttttagtgggactataggtatgaccaagccgtatatatatatattttatggccttacataaagtctgtaggagagtcttatct

SEQ ID NO: 44309 - DNA, 469 bp, Glycine max
  unsure (1)..(469): unsure at all n locations
ttaagataaanactctcttggccaatcatatgtgcttttcaaaatcttttctaatagtctatcttagaacctatcttaattcttttcttgagacctttgcctttgtatgaaatcttgctttcttcattcttgaatgatctttataattccttagcattatcaaaataattcttgaagttttgcttctacagccacatctatgcttccctcctgaaggttggcgaggcttttgtgtaggttacacctctccaaatttgccttanactcatcgaattcagtatgataaatctttacattccttttcggaaggatcctccggtcgagaatgttatctgtatatcccgtccaggcttccaaggataggaatctcctgggatcatactgagcttgaggcctggaagcagtgcttttccttttcctagatgtcatctatgaaaagaacccaaatttcacattagaccaaaaatta

SEQ ID NO: 44310 - DNA, 480 bp, Glycine max
  unsure (1)..(480): unsure at all n locations
tcagcttgtgaccttcanaaagactatgtcgacctatatgaagactattcatgcatttgttatctaattgtggtcattatgagatataatttgatgtaagtcattaatcaataattattaagtacttgttgcgttaagaaaataattagttggtgcaaccaaaatcaattacgcatgtatgatacaattggtgtcataaattgataacacataatgatatgcatgcgtattagagtttggacgtgacacgacattgaccgacttgaaacacattctgatcacgatacaacttgacaccatattggtttagtaggaaacataatcacgatacatgttcacgcgtgtctattttttttataaaaagtaaacctatctgtcggtgagaaccatctatatatttgagaatcngacaacgctaataaatcacacatgaacttgctttacatactcttgcaattgttacacagatgatgacatttt

SEQ ID NO: 44311 - DNA, 472 bp, Glycine max
  unsure (1)..(472): unsure at all n locations
agcttggtagttgaacccaactgtattttttctaccanaataggattctagcttgtccatgtcaaggtgttcctccatcaccatgtggctgcttgagttgtcagggtaaacaaatatcccctttntataagtcttggattccttctagaaatggtttcaccatctggtaccatgaaaaacatgcttataaaacacacaaagcaaatataacaacaccgaatttaagagatgtccatgaacaaatttcaacagaaaaggaaagcaaaaaaaatttgggcttgcctttctagttataaatcacaagagtcatctgttctgacctatcgcaactcacttgaaactagtatcttcaatctgggagatacattatacactcatacaaatccncatcaagcacacatcgtcttctctttcatgagacaagttttgtgtagaaattttaatttgngaaaaatgtgctttagtccctatg

SEQ ID NO: 44312 - DNA, 514 bp, Glycine max
  unsure (1)..(514): unsure at all n locations
ngagatgaggaagtgtagaagggtgatacttcctgcttttactcgttgaccacagagtggtacctggagatatgtcgcggtggtcaagagaccttgtggacgtcaggtggggtgctattgcccaaaaccaagctggaccaatcccgacccaacccgggcatagtcagtcagtgagaacctgtgatgtacctaaacaggcgagctcctggcagtcaacagatataaggaacaaagaccacaaagcaaggaggcttgtggtggctggccagctgtgaactttgattgatatgtgggttatggcctctggtaatcgattaccaagggtgggtaatcgaatacaaggcttaaaaatgaagacaggagactaaaatggtgtctggtgatcgattaccaaggggtgtaatcgattaccangcttgataaaaggtcaggaagctatgagggcttcttgtaatctattaccaaaggggtgaattaattaccaggcttaatataatagcgcaagttgtgtgag

SEQ ID NO: 44313 - DNA, 429 bp, Glycine max
  unsure (1)..(429): unsure at all n locations
ctgatttggactggcacggtcattatctaacgagcacaatgcanatcttacaaatcgtgtcatcacattatggtacaggtaatntatgtccataataggttttaattttgacctaagttcttttgggagggttgcatcatgaacttatgcccatacacattattgatttatttcattatattattagaccccctgagctgctgcttgggacaacaaggtatgggccacctgtagatatgtggtctgtagggtgcatttttgcagagcttcttcatgggaagcctatctttcctggaaaagatgaggttagtgataatatgtataattcttgtctgatattacgggtaaagctaaagtggttgtgaaattgtattgaggcgaggcatgcttctatccagtatgttatcactactcagtatacaagatgtc

SEQ ID NO: 44314 - DNA, 424 bp, Glycine max
cgagtgttagcatggtttggattcccaattgcttgcttctgttctagttaacatggtttgcatttcaatagatgacatttgtttcttttttgtttttaatggaaaatggaagctgattttaataaaaaatatgtataccatcaatacctaaagagtcttttggtttaagtggtacacatagggagttatacggttggttgggtagtaaaatgatgagggagggagggaaaatgtcgcatttttgattccattcgctaacaaaagaatacattgcataactaatatttgtcaataaaaaaagtgctacacatctattaccattgtgattttcagcttcatcaattattattgattatgattaattatgatatctcttggtggtgtcgacaatatagcttgcaaggaagttaaattagcatgtgca

SEQ ID NO: 44315 - DNA, 473 bp, Glycine max
  unsure (1)..(473): unsure at all n locations
agcttcgtgggaaaccaatggttggagggcattgttggatggtgaagttgatgtgtgagattcataatcatgaattggcaaagttattagttggatatccatacgctgggcgattgactaaggatgaaaagacaattattgctgatatgaccaagtcaatggtgaaacaaagaaacattctgctaacgttgaaggagcacaatgtcaatagttgtacaacaatcaaacaaatatacaatgcaagaagtgcataccgttcttccattagaggaagtgatattgaaatgcaacatgtaatgaagcttcctaaatgggatcaatatattcattggcatagattaaaggatgaagacatggtacgtgatatattntggtgtcaccctgatgcagtgaagttatgcaatgcatgtacattggtgttnttgatagacaatacctataaaacaaacaggtacagactcccactacatgac

SEQ ID NO: 44316 - DNA, 463 bp, Glycine max
  unsure (1)..(463): unsure at all n locations
tgtacctgaagatgctattaggctcatcctgtcttcattttctttattctgggaggccaaaagatggntgcattcattcaaaggaaatagtttgaagacttgggatgaggttgttgagaagtctctgataaaatatttcccagagtctaatacagcagagggaaaagctataatttcttcattgtattagtttcttgatgaatctttgagtgaggcattataaagattccatagcttgctgcggaatactcccactcatggtttttcagagcctatatagctgaacatcttcattgatgggttacggctgcagtcaaagcagctactcgacacttctgcaggaggataaattatattgaagacacctgatgaagccatgaacttatttgaatatattgctgccagtgaccacgcacttctgcatgatataattcatatgcctaccacaaagagttgattggag

SEQ ID NO: 44317 - DNA, 476 bp, Glycine max
gcgtctcgatatattatgcgcctgaatctgactttcgagttataagttatgaccatttgaatttgtcgagagcttccgttgctgaatttggagcgtctcgatatattatgtgccggaatcggacatccgagttaaaagttatgaccgtttgaatttcttataagcttccgctgttcaatttcgaccatctcgatatattatgcgcctgaatctgacatccgagttaagagttatgaccatttgaatttcacgagcgcttccattgttcaatttctagcgtctctatatattatgcgcgtgaatctgacatccgagtttaaagtatgaccattcgaatttctcgagagattctgttgttcaatttcgagcgtctctatatattatgcgcctgaatctgaccttcgtgtgataacttatgaccatttgaatttcttgagagacttccgtggttcatttcgagcagctctatatattat

SEQ ID NO: 44318 - DNA, 501 bp, Glycine max
  unsure (1)..(501): unsure at all n locations
nccttgattttagtcncttcgagacctgcgnannctcanagaaaccccgaagctgcaagcgtgctgctttgatgttatataagaactattgattatcttaagntcatgaactaaccaagaactttgctattctcaatggatggtgccattatatctttggacacttcatttgcacacacaatatactcaccactaggtgtcacggatcgcaaacatctttatacaaaggtgacatccctcatcttctcgcacggaacccctcatgaccgtactccaatgccttcctatactagaaagaaaaccatcgtcttgcttggtaccaaaacataaaacagacaagacttagccccttatccactccctattttgacctatgtctcatagactccagacgaacataaagctctttgcgaaaatatttctaaatgggcgatcgaggctcaaaaaataattttggctataatcttcacccctagctccagctgttgtctgagactgccg

SEQ ID NO: 44319 - DNA, 449 bp, Glycine max
  unsure (1)..(449): unsure at all n locations
agcttgctaaatataaagagctaaatcctctgttggttctttcttgtagctacttgatgtaaatacttgtatatctatntaatgatgtttcatgtgtcctctgtgctatcaatacgtcatttcagtgtgattttgccttgatcatgtagatgcatgctatgttaggatcattcaacagtggaaactgatctgattcttagaacttgataggatacggctactctatcgtattatcatgagggatcggngtacggtaacctagatgtttgtatgtttatcttaatgcggctcaggtcaagtttagtccaacaagaggaatctgaggacgatgcttgattangattaggctacactatcatgaggaatcagggtttgagcattcacgagacaccatantacacatgagcattgttaagtagagaatatacttatcacatcatgcacctaat

SEQ ID NO: 44320 - DNA, 474 bp, Glycine max
  unsure (1)..(474): unsure at all n locations
agacgatcctgttgagtcgagaatactntattatttatttgtacaagtttgaatatgatgtaaaagaaaaatgaatgtgaacctttntcccctttgaaagacttgtataaaaaaatgttttaaaaatacttttaattaatatttgaatattttctattccttattagtatatatgtgaggggtagagggtgtcacaagtggtacctcgacaccggcgcaagcaaccacatgtgcggcgataaaagcatgttcgtggagatcaatgaagcggcaactggcgatgtctcatttggagacgactcatagataccagtcaaaggcaaaggtaaaattctcatacgtttgaagaatgggagtcatcaattcatatccaatgtctactatgtgcctaacatgaagaataatattttgagctngngacaattattagagaaaggctatgacatccatttgaaagaacatagtcttttctta

SEQ ID NO: 44321 - DNA, 476 bp, Glycine max
  unsure (1)..(476): unsure at all n locations
tctttacccacacatgttcaggaagcgctggaacccttggttattttcactgcattcaacactaaagcagtaaagcttgcttcctcactgtactatatacatacaaacgtgttatttgttagtaataatctattatttacacaatataatttcaatccatgtcgttaacattcaacaaagttttacactggttatcaactacctaacacaaccctcctttttcaaccaagcatgggaccaacttcgtaatgattggcaacaaggcacaccaagggcaagacatnttctatttaacatgttacaaccttaaattcaaaagcttgtagacaaaaaattatgtataatataaaaccaatcatgtgtcttcatatgacaatttaagctattggcatagttggttcatgacatgatatagcaatgcctctatgaccaaatggtctaaagttgatccttgtacttcattcttctaatgaaat

SEQ ID NO: 44322 - DNA, 434 bp, Glycine max
  unsure (1)..(434): unsure at all n locations
agctngtcacgaaacagagggttattctttatcaatttcttcagtcagccagcattatgtcttgtgcagaatttgtttctccatacttgccagcaacaatatttttcccaattcaattttaactagcaacaaaataaatgactaagcaataagcaaattggaaaaaaataacacaacagccaaacaccacagataacctacttgtccaatgcttctaagtacttctactttcgtatctcaaagaagatcttcatggagtatttattgtcatccaacttcataaaaccagacaagtacttatccaccttatcccactccctatttctcaccatatcctcaaaatacctcatgttaaagaaaaatcccgattattgctccttcaagttcacaaattcacaaattcacatacataataacaaattagactanatata

SEQ ID NO: 44323 - DNA, 511 bp, Glycine max
  unsure (1)..(511): unsure at all n locations
ctcagcttgatattcatcctgacgagggatcgatggtgtagtaatttatgctacagcattgaacacaagagcancgatgatttgagatatatatttctatacatcagcttgtttgttagaaagacccaacatatctacctactgctgtcattttatttaccttgcatttgatagtttttatcatacaagtttagtttataatttgtttgaatgtatcacttatacatgttctctcaataatgcttcgattctgaacgtaattcaggctaacattagttccctgtgttcgatactcggattcattcattntaattntaaatactggacgacccggtgcactttccaatgagaaaactccccattgaaaatttccttgagacataaatgcacaataagtgactgcagtggggagccatcagttgcaatctgaaccatttgatgtagatatgggagattgcttggaggatatgattcgtgaccttggacaagagtcttttcagcaagcacatgc

SEQ ID NO: 44324 - DNA, 642 bp, Glycine max
  unsure (1)..(642): unsure at all n locations
ccgccatatctcttntccntatatctctaccttatcactnactactantttcactcggatctcgatataaccagacaaggcganagnngttgagagccatggagacccanncattgataccactcgtacaactngcgatnctctaaagangacccgcaagcgatgctgacttagatatcatgtatatcattatatcntttctcatntgtctcacgcgtacacggagtaccttaaacactatatatatcatcatcttcttaccatcacgttatcaagaccatatgctatcatgtgaggtgaaagcctactagctcttctccgcttttctgagaggaattttaattactaaatcggagaagacttctaaatgaggtctatttcgcgcacgctagctcttcttaaaaatgtcaaggtcgaaccaaaagtaaacgacttagataggctataagcccgactcaggcctcaaaaaattatcgtaggctatgctcaaaccattaaaaccaggcctgctctgacctatacccacccctagttgagatatgaagcgttataaaaattcatctggacacatatattgtaaaatataaagtttgtcaatttcatcttctactaacaacatacagtgtggtaatattaatgact

SEQ ID NO: 44325 - DNA, 358 bp, Glycine max
actccatcattaagaggagtacctgacatctcaaacaaacaaatcaaacgtaacaagacaattattggtgctgtttgaatacctcacccactcaagtgtatcacacaattatggcttttctctaatgaaacactctttccttttaccactctaattccccttgagttcttacgcaattcaagagattatggccacaacaaagaacaattcaccattatgtgtaaggtaaggctagagagacaaggaataggttaaccaagaataacgctaatcaatgttttaggcacaaatgacagatataacatccacaatttaggaattcaagtaacaatccttcatgcgaccaatatattacctt

SEQ ID NO: 44326 - DNA, 275 bp, Glycine max
aatgaataaaaaatctgcacctatctccagactttgtgtgatatgctcctatgccgaccaccacacagacctatgtccttcatggcaacaatctgaagcaattgaacagcctatatcttatgtcgcaaacatctacaacagacctctcttacctcagcatcaaaatcagccacaacataataactatgacctcttcagcaataggtacaatcccgaatggaggaatcatcccaaccttatatggtcgaatgcttcacaacaacagcaacaacaac

SEQ ID NO: 44327 - DNA, 596 bp, Glycine max
  unsure (1)..(596): unsure at all n locations
ctctcgctcacncncttacngcatcncattancttcattctctttaaatanncnactctctgaggtgggnnggnntttgatacatgagtacgngcntttaaacctagcgcncgcatcaacttatgagagtataggaagaacttatttatctacatagtttgatgatgaagaatcccttagcctcaatgtcatatcatcacatgtattcatctgcatctgatgccgttgcagaggatgttggagatacggattatgctactgtcaagcctaataaagagcctcgcaatccatcttcataagatatatttaggtgattcacatggtattcctaaccggcaccaagatccatcaatagtgacgaattatgcttatgctgtggtattcacaatgagagttgtcaatgccaacataattcacatcctctaactcaacaacgattctggtttaaacgtattcttgatatcatgttaattagtctcttgtataatgtaattttaaaacatgtatgacccttgtgggcaggcatataaatttcctttttttagtatgtgccgagagatatgatgtctatgatcctaaacctcataggctccatn

SEQ ID NO: 44328 - DNA, 364 bp, Glycine max
  unsure (1)..(364): unsure at all n locations
atcaaaaactcctctaccttttggcaagtcagacataaagaataagactagtatgataaagagcttgattagggaactattatctcagtaattgattaagcaggtgattacattttgagccacaattctctctctgtcttctaactccttaatgtagagtttgttttcttcaatttctttggcctagttctctgtgagacactggatgcgctccgtgtctgacctgtcatggggttcatgataaataatccaaaaccaaggaatatgatatcagtaaccttatcaattgtagaagcaagccacaatncaattataaacttaaatattcttatcaatattagccgagagagaacgaatcactcgt

SEQ ID NO: 44329 - DNA, 503 bp, Glycine max
  unsure (1)..(503): unsure at all n locations
tatatatatcttcaagctttaaataatatgtagatttaacctattttctataataattcatcatgtgttttacagttaaaatggtttaaatctacatattttttaatgtttaaagttaaattcatgaatgtagaagaattaaaacacatttttccttattcttttaagttgtaacacactcagtcatctattccaacctgcttccaattctgactttgtcttttaacctccgccattaaagctttctggtctatgcctaaggcagtaaggcacagacctgaaactgaccaaatgagcagataaatcacattcatccatacaagagaagtacttgtagttntgtacgaaaagaataaatttaaatcatacaatcctatataaatagttatgattaaaaattactaagcttttgtcttttaatcttgacttatgtgatttgatcttgtgaaaaagtgtagtaataatatatcctcctaagtctgaagatcttggagtcctactgg

SEQ ID NO: 44330 - DNA, 491 bp, Glycine max
agcttaggttcttggtcttggaactgcattatatattctcttctctgttgatggtcaagaaaactcgagtcatacagtaagtacattttgcttgagatttttgtgtcttcctctctttactgctgtctttatgcatgtgccataaatcagattgcttctgcagtgatctttaaataataaattcttcttccatgttaaatcctgaactaaaacatgtatatcttcctaagttgtaatctagtaagtattttgctcctacatttgaaaacattatggttctttcatgcagataatggctagtatctgcatcatataatgttaaactttcttgttaaatgtaaattaaatcatacaactagtcatggacgatcaaagattataaggtagtttatagctacatgaccacttatcaaaaagttgtgtttttttctagacttgactatctcaatatgatctaatgattatacttacatagtatagtataagaattg

SEQ ID NO: 44331 - DNA, 386 bp, Glycine max
acactctgagcaggaagctctttatcttggaagaccacacgagctcatattatcagagaggcggtgagccattgatgatacatccccttggtaataatgtcgaatattgcgtcttgctgccatcattgaagacgccttgtgtggcttgcatcacaatagaaagacattacttccacggtcataatgaggtaccttctagcttcatccttacatccattacatttagaaagacctaatcataactacttattggagtatatgatatcacataaattcttctttaaacgtgtgggagagtattgtacgagacgtacataggaattgacttaatagttaaatacacttggttgaatatcgtggaatatgatatatatgagagaaagaaa

SEQ ID NO: 44332 - DNA, 484 bp, Glycine max
  unsure (1)..(484): unsure at all n locations
taagtcacctgaggcatgcaagctggcttgtgaggcttatatggaagctgtgagcttcaatgtggtcctttaatggtgaatttccaccatggagatgcagcggatgacaaatgaaaagaggtgagaggaggcgccatccattaaggaataagccatggaagaaggagcttcaccaccaagatgagccttggataagaagcttggagaggatgcttcaatggaggaaaagaatgagagaaagaaagagagaggggggagcacataattgaaggaagaaaaaagagagagaaattgaactttgagttgtgtctcacaagactctcattcatcanagttgcaacaagtgttacacatgcttctatttatagactangtagcttccttgagaagctntcttaagaaaacttccttgagaagcttctttgagaaaacttccttgagaagctagagttagctacacacacccatctaagaactaagctca

SEQ ID NO: 44333 - DNA, 508 bp, Glycine max
  unsure (1)..(508): unsure at all n locations
tcttatccaaggctcatcttggtggtgaagctccttcttccatggcttattccctagtggatggcgcctcctctcacctattctcctttgtcttccgttgcatctccatggtggaaaaccaccattaaaggacctcattgaagctcaaagatccagcctccatagaagccccacaagcaagcttccatcacatatggaactataaaaaaaatcattagtaaaaaaaacataaagttattgtgatagtaatttgttgaataatgaaatagttatttgttagaaataaaaaccaaaattgtagttntattctggtcattacattaaatntttattagaattagtgttgtcaactntatatatttcaaaaaaaatctatatgcatntatcaatatatttaagtaataaaaaaagttaatgaaaaaataataagaaatcgtttatgaattattaaatcgcgatcgatngaagtattngttgaacgcnntacannatatatgattcctttaat

SEQ ID NO: 44334 - DNA, 363 bp, Glycine max
  unsure (1)..(363): unsure at all n locations
gcttgatcanattcaacgacaatagtttttctcggatgtccaataaagttccgtaatatatcgagacgctccagattgaaattggaagctcgtatcaaaatcatacgacattaacgtttgactcggatgtccgattgactcccgtaatatatcgtgacgctccaaattgaaaacagaagctctaagacaattcaaacgacaataactctgtattcggatgttcgattgagtcccgtaatatatcgagatgctccatattgaaaacggaagctcgtatcaaaagcaaaccacaataactttttactcggatgtccgattgagtcccataatatatcgagacgctcgaaattgaatacggatgct

SEQ ID NO: 44335 - DNA, 344 bp, Glycine max
actattcttttcatgaacttttatctatatctcttcgaccattatgtgttttcccccctctgactcattgcatctgttacctcattcttgtttttaatagtaatgtcctttacagcaacttggtccttcaaaacaacaacatcctcatcctcaaccgcacaagcattctgcttcttgtacaacaactttacactcttctttgtgattcttctcaatatttgcaccaaagtagttggatgacatctcacctaactgcttggccagcagacccacctgaatctcatagtgtttcatggctaactcaatattcttatggttagacattgatgcaatcctacccccca

SEQ ID NO: 44336 - DNA, 493 bp, Glycine max
  unsure (1)..(493): unsure at all n locations
ttatgagactgctaattttttttatattctaggatcacatcaatcttaaaattttctacatgtttttattttaataatagatctcattttagaattttaaataatntttttattaatcctagaagggacttactttctaatattgattttagaaaatcatgtattttttaattgttaaaaaaatttataacagagatataaaatttattaataattaagatatttatttatcaatataatttaaacctacaatattacatgatattgatcggagaaaaatagaaacatcgatattgatcaacatatattaaatctcatcattgtgatcgaaactctatcaaatatgtntcatcaagtttgttttaagctgttgatgaactcctcttgtatgcatataatgtcttgtttacatgtatgccacagatgcaggatgaataccatgagatacattattatttcaaatatcttcgtcaatatgatctgtatctacatc

SEQ ID NO: 44337 - DNA, 386 bp, Glycine max
  unsure (1)..(386): unsure at all n locations
gcttctatggaagctggatctttgagcttcattgatgtcctntaatggcgactttccaccatggagatgcagcggaagacaaacgatataaggcgagaggaggcgccatccactaaggaataagccatgaaagaatgagctgcaccaccaagatgagccttggataagaagcttggaacgatgcttcaatggacgaaaataattagggatagaaagagagaggggggagcactatatcgaacgaatcaaagatggagaaaagtggaactctgtagtatgtctcacaagactctcactcatcaaagttacaacaagtgttacacatgctcttatatatagactacgtagctccctcgagaagctttcttgacaaaacttccttgata

SEQ ID NO: 44338 - DNA, 357 bp, Glycine max
  unsure (1)..(357): unsure at all n locations
agcttgttgcanatgcaaaccgcaataactgttatctcggatgtccgaatgaatctcgtgatatatctggacggtcgttattgataacggacgctcgtaacaaattcaaacgacaataagttattactcggatgtccgattgagtcccgtaatatatgagcgatgctcccaataggagattgtagctcgtagcatattcaaaccataataacttttttctcggatgtccgatggaatgacgtactatatcgagacgctcgagatggagaacagattctctgagctgatccttcgagctgtgactttctactctaatgttcgattcagtgtctgtacatattaagatgcttgaatttg

SEQ ID NO: 44339 - DNA, 433 bp, Glycine max
  unsure (1)..(433): unsure at all n locations
ctcagcctctatttcatntcaagcgtctcgatatattacgggacttattcgtacattcgtgttaaaagttattgaggtttgcaattgctctatgcttctgttgtcatcctcaagcatctcgatatattacaggattcattcggacctccgagtaacaagacatatgctcctgaatatgatcacacctaacgtgctcaatatcgagcgtgtcgatatattacgggacttaatcgtaaatccgaattaaaagttattgtggtttgcaattgctacgaagttctgtttcaatttctagcatctcgatatattacgggtattatttagacatccgaatgataagttatagtcattggaagttgctcagatcttntgaatcaatctcaacgccttatatattactggacttaatagacatgcgagtgaaaagtataat

SEQ ID NO: 44340 - DNA, 322 bp, Glycine max
  unsure (1)..(322): unsure at all n locations
agcttgattntatgttgattctgctgtcattatgttaattgttggaaagcatgttcttangggtttcgtttcgcacataatgtangttatattgctttgatttgattaaggtttgaggctgtcgcaacgtgccctcttgcgggcgagcgaggcgaggctcacgagtgcgcttcccataggaggaaagatgcgcggagtcgccaccaacgtttatttgtggaaaacgtcggagaaatcaaaggataccggtcaaaatgaaaattctaagttcgggagttgtatttacgtntgaggaaggtattagcacctctcacgtttgtct

SEQ ID NO: 44341 - DNA, 471 bp, Glycine max
  unsure (1)..(471): unsure at all n locations
gctcttcaacatgctntactntatgagtntgttggtttctccttgtcagttcatttatttatttttttgttcctagattgcttataaaattgattagtagtcccaaattatttgttggggcagcaaagaactttaagtttctttttttaaatgatgtcatttcttaatatacacaataatatgaacatagaatttaacatcattaaatctaaaaattagaaatgtntttaaaaatacatgcctagctttgggcacacaataattcatggaaataattgtttcatttagcagttcaagtagttgaaagaattgtctataatacatgatcaatcctgcacacaaattgttttgttttgttatgttntgtgtgtgtgtgtgtgtaaagattgcacgaaagcaacttggaattatgagtctagagcatgccatggagcacanaaatntcactaatgatgttagtttatgctctaa

SEQ ID NO: 44342 - DNA, 470 bp, Glycine max
  unsure (1)..(470): unsure at all n locations
agcttatagctcgtccttcatgatcatgcctttgacccatgatgattcctttcacctcttcagagcttgagctcactattgttgccctataaaacccctcaaaactttgctttggtcgtgttcttcttatcgggccttcttggtttctcgttccaaggcttcagcggtggccatattgacgtcccttanttcatcatactcttttcagactttgatggctatggacttgaacttctcttcgactacccgggctctntcaagccttgcctttagggcttgtacctcatcactttcttccgaagctttaacctcatcatctctcatagtctttagatttgggagccaatccaatccttgtgttcggactctcagccacttatgatagccgccgatgatcccattactgcttccnctaagctctctgtcctttcttcacgccgcatcccatgccttgcgaactccttggagta

SEQ ID NO: 44343 - DNA, 461 bp, Glycine max
  unsure (1)..(461): unsure at all n locations
taagctcatcttagatagttcataaagaatgcagcgacatttgtatattgttcagaatcttccttatctcatcctcttacaatcctccccaagcacattntgcctaaccgcttcactcggggtcatcaaatctcgattaccagccctttggtggtcgtggaggtttcaatagaagccgtagtggccacattgcatggcattctgtagcccgtggtgggagaatgtatgttcagtgtgatgtgtagcatatatttggccacaatgtgtcgatttgctttcattgtttcgagtgtgacttcattccacatgttcttgtgaattcgcaaccttaatacagggactaactgttagtctggtaaccagtttgctagtttttttgccagatagctcctggcaacatttcgtatatatatcagatacctattagagagctcctggccatataattgatatcacaatat

SEQ ID NO: 44344 - DNA, 428 bp, Glycine max
  unsure (1)..(428): unsure at all n locations
agcttgtcaaaggatggacagttccattagtttctacagtctatgtagcatctttctcaactgattcttcaaaatctccaaaggtctcctgagctgtttgtgcaagttgtattgccaaacccattacaacttctcttattttagtgcaagctcttcctttaaagagtatttcaatctgcaaattatccagagcaaaagttgataataagttacatccattgaaatatgcctcctattttctaattaaccanatgcaaaacagccacaacaacctataatgcatgacctgaacacaatatatcagacatcttgtacttgtgacatcattattgccatggctttggtataattctatcacatgctgactgaaaaattgttgggagtataactagtaagagacctactttaacgaggagaaaagaaagtat

SEQ ID NO: 44345 - DNA, 510 bp, Glycine max
  unsure (1)..(510): unsure at all n locations
taagctgggcctaagataanaggttcagtcattagtgtctctcataatctaagttctaattaanagtataaagaagtattcagaactgcagtctcatacacaccagaagaggaaagtaaactccaaaatttgacatattacaatttacattagccagaaattttcaagatatagattaagcactcaaaacttatctgaacctcatgacaactagcaatgtgactgataagaatcaacaacttgagctcttatgaccctaacattcatatcacacacataaatgccctcataaattgagcatccctactttctagaaggtattatagagaacaggacagctttaaagaatataataggcagggaccttataagctggtgttagtgcatttcactgtaaactcataagtaaaagctaataagacttaggggtgtgcaagtccatatgtagntcttctatattcaactccatatagatatgacaaagcatcacccanattatgagactgaaaa

SEQ ID NO: 44346 - DNA, 500 bp, Glycine max
  unsure (1)..(500): unsure at all n locations
agtcacctgangcatcaagcttggcccaaacttcttgataattggctgtcacacaacccagctnttagaactcacccctactggaattccaagataagagaaaggaatttccaactggctacaattaagaaatagagctgcatccctacaccaacccactgatttgcccacacaaccgaaatggcttttggcataatttatcttgagcctagaaaccatctgaaaacacctcaggataatttttaggactctaacattatccttggtggcagccccaaaaaatagagtatcatctgcatattagagtatgttaacttcctccttttgacttcccacttggtagctgctgaacaggatcttagatatggctgtgttcatcanacctgtaaggccttccactactatatngaaaagcagaggtggtagggaatcaccctgccttaagcctctcttaggggatcacccttcctagtgngacttccatttaataaaatggatat

SEQ ID NO: 44347 - DNA, 407 bp, Glycine max
  unsure (1)..(407): unsure at all n locations
ctgagccaanatcctgactcaccatanaccttgactccaggtgagaatgccaatccttaccctcggaagcaaaaaaaaaaaggagaagagaaggaatatttccaatcaaagaggaagcataacaaggagagaaggaaaatttccaatcaaagagaaagaaaagaagaggaaagataactcccaatcaaagaatgggagaagaaaaaaaaataaataaagaagttaaaaagaagaaagctcctggtcaaagatactagaagaaatgtgcagataggtcttttgaccggacgatatctgaacaatacagaattgtcaccaaatgaacaaaaaaagaaggaaaggaaatcacgacctaaaatggtcttctccctttaattaccaaccaaaatcccgtgcgctagcgaccc

SEQ ID NO: 44348 - DNA, 429 bp, Glycine max
  unsure (1)..(429): unsure at all n locations
agcttgctcacaagattctccttgcctggcacttcaaaaccttctggttgggtcatatcgatgcaagctccattggagcttgtangcctangatcttcttcatcaatggattcctttgcttcttggaagataaaaggcagcggaatggagaaagaagagagagaggagactccacttcaaggagaagataagtctagaagaagctcaccaccataggaggccatggataagagcttggaggaagaaggagatgaatgaagggagggggagagaagagcacgatattntgtgctcaaaaagagctctganatctgaagttaatattcaaatgatcaatagtngaaaaaatgcacacacatgacctctattatagcctaagtgtacacaaaattggaaggaattcaaattcacttgaattgaaatgaattg

SEQ ID NO: 44349 - DNA, 497 bp, Glycine max
  unsure (1)..(497): unsure at all n locations
tatctntgtaagaggtagaagtgacagtgaagaatacttgtatctnttgataagttagtgaaatcttggtaggctgctaagaactgaacgtagtctcggagtagaaagtataacttcatgtgtgttattctttattgtttttctttgtgtgttgattgacgaaggatttgaatttgctttttatatcttatatttgtttttgatctgttaagacaattgttttctcattgtctgataaagtctttcttaaatatatcttttcttttattctagttaaatttgcatgagacgataaaagtgtttttagtctaagacaaattntaaaatctctaacattacaattaaaccccttttggtgtgttattagcttctacaactattaagctaattgngttatattttcaaanattataacaattaaatctataatatgtattgtgtgggtgcgtatatattattaaaaaatgtaatggtggtgggttctgtatgtggagtta

SEQ ID NO: 44350 - DNA, 436 bp, Glycine max
  unsure (1)..(436): unsure at all n locations
agcttctcccacanagacagtatcatctgcatattgcagaatgtttactggcaccttctgctntcctactaaataactgctgtacagacctttggatagagctgtcctcatcatgccagtcaagccttcagccacaatattgaaaaggaaaggggctaaggggtccccttgcctcaaacctctagtgggggaaaattcatttgaggggctgccatttatgagaatggatatagaagctgattgattgcaagcattgatccatttcctccatataggacagaaccccattctgaccatcatataatccagaaagttccatganacagagtcataagcctttgcaaagtccactttaaacaccaaagctggtttcttacttcttttagcttcctctattgcttcattgagaatcanagttccatgaaagatgtgtcta

SEQ ID NO: 44351 - DNA, 343 bp, Glycine max
  unsure (1)..(343): unsure at all n locations
tgttccacctacatagcataagttcttcataggtaatcagcctatgctatggttgctaatttgttaatctctcccacacccaagtctggaccaagtagtaaaagggtgaccaaagagttaactacaattccaattcattaccagtcaaacgaattattgttntctttgatagacctaaatcatnttatatgttggataaaactattggtcacaaagttgattctctccagcaagatgaacaacaataaggaaaacaaactctctcaccaagccgcatagagagaaaccaatcattgcctagtaagttgcaagggatgtttcatgcttnntttcactcccacta

SEQ ID NO: 44352 - DNA, 335 bp, Glycine max
  unsure (1)..(335): unsure at all n locations
acacccggagagtgacagcatgcttacgcgcagactaatgctgtcatactgacactggagtgacgtgacatgcgatgatacctcagtggatcttcgtaagaactgtcttttgctatctctaagactcaaagcatgatagcaagctgagtgtgtaaactcgcagaagcaaattctacgccctttatcattcaagcacagcaacctgagtgggtaaacgtgcagaaacagattctgcgcgctttatcattcangaacaatgagctgagtgagtaatatgcagagcagatttacaccctttatcatttaagaacaacaagctgagttggtaaacgcgt

SEQ ID NO: 44353 - DNA, 375 bp, Glycine max
  unsure (1)..(375): unsure at all n locations
gcttctggaggaactntgtggaaggcccaagtgtgcctggttgctatttgcacccccatgtttactaaatacaccctctgccattttttgctgaaattttttccataacgttacggaactttacaaattttgtaacgatacttgttttctttccgtaatgtcacggaaccttacgaattacgtaatcatcccttttttggcttccgaaatgttatggaacctcactaattgtgcaacaatgcttccttttgacttccggcatgttacggaaccttacgaattgtgcaacaatgtttccttttgacttccggcatgttacggaacttcacggattgcgcaacaatgggtgccaagtacctctaagcggacaagcaa

SEQ ID NO: 44354 - DNA, 441 bp, Glycine max
  unsure (1)..(441): unsure at all n locations
ttcatatacataaatcaacattgtattttatgtgatgatagatactaaatatgtatttcatataattaaatgtaaataatagataaatgtttttttaatatataaattacattataattaaatctcataataaagataataaaaatatattttttatattttgaatttagaatgatgaacttaaattataatttaagattatttgtaattattgatatattattttgaaaaaaactattgaaatttagttaaaagatgaagatagaaagaaggtagattgacattgatagacaattcacaaaatgtaaatattaaatatgtgtgtaaagatgaaagagagataatttaaaatgaatgagagatntttttattaattacaaatataataggttaaatacacataaaatatgaagacgaataataatataaatgtntaattga

SEQ ID NO: 44355 - DNA, 423 bp, Glycine max
  unsure (1)..(423): unsure at all n locations
atccggtccaaccttcaccgtattatcccatcaacatccaacaatagtcttcctatgaggcaaagaaactatctctcaagttccactagcatgtaaagcagccatttcatccatccaacattgtgtgttgccaatggggatcagtcatggcatcacctgttgacttaggaatggacagaatcccaaaagaagataaatgagaaatataatggggataaacggtgacactgaatagtgcaagcatactaagggtctatattgcaagaagattgaatacctttgcgtaatgcaataatgggaagctcatgtgcaagagacgtttgtggcataagatgaagttagaggatcagcangtacaaccgtcggttgtcatggtcgccgctgatagatgataataggtggtggagtaaagccattgacaac

SEQ ID NO: 44356 - DNA, 317 bp, Glycine max
caagcacaaatagatccaaaagagttgtgtgagctcacaattgaatggtgcattgactaactatagaacactattaactacgttatgatgattataatcttgtgctgatacaacagcattattcttttgactttttgtatgtgacatgaatcaacttgtcatatgcatggtatattatatgtactagcttgtaaaaacatcagattgttgttacgtatcagacatcaaagttatgcaatctctgtttaatattcatgataactgtagatttgatagagcattgatacacatgactgagaagacagaatttatattct

SEQ ID NO: 44357 - DNA, 383 bp, Glycine max
  unsure (1)..(383): unsure at all n locations
aatagacatatgactgatgtctgatctgcataagagagagatatctttctttgtttcttttttttgcttgaactatgagtatcctacaagcttgtgacaatcatgcaactacattttggctcatcaatctttaatcttgagccttttcacaatcctttgacactgattaaccttttggatgctacttttcatccaacctatgggaatgtgacctatatatgtatgcattggaggtttccaactttttaagatagaaatgtatctgaaatctctaaatacatgagctgcagaagaggaaataatatgctgaaaatcttgtaattgtgaatacctgactntgtgagaaaaatagcatggcagagtctgagtctatgatttatcat

SEQ ID NO: 44358 - DNA, 520 bp, Glycine max
  unsure (1)..(520): unsure at all n locations
gctttagaacaaccaaatcgatatcacagagcatatacagattaggactgcatacttggatgacattattaggactcatgtacagataatacaggtcaagatgatgataatgcctgngatcaagatggcaaacaagaatggcctttggaaacacttctaaactcaactctttcccatcttggttctcttcaaagaatagatatctccaatgcctaaaaccaaatatcacttcaactttcggcagtgtaaagatactacctggtagctgaatcagccttttgcattgctccagggacaagagttcaagtccaacaagatttccaattgaaaatggcaatgtgcctatggctgtgttgtctaaacatatttctcttattttctccatcttaaccaatacttctgggaagccctcaagacacaagcaatccccaagatccaaaatttcgagagaagtcaacatgatgcagtgtgctagaatttcagcttggagcatctttacactcatgggaggagctatcaa

SEQ ID NO: 44359 - DNA, 370 bp, Glycine max
  unsure (1)..(370): unsure at all n locations
agcgtgaagagtgctaagtgttatgtcctatattaactannaaatataannnaaaatactcaatataagacttcccttgagtataattcaataccaaagattcagtaacgagagctcataacatattatttaacacgttgttgtaacacatttctttattaattaagatctattaaaaacaataaaattatggtgaaactcattaaataaaaaagaaagacttataaacattagctaatacaaaaatcgtgtaaaacaatgtgtgtgtaacctctctcatatttcaattatcatggattaggaagaataccagtacgagacataccaacacttaatcagtatcaacgacattaacgaaattgaatagcga

SEQ ID NO: 44360 - DNA, 438 bp, Glycine max
  unsure (1)..(438): unsure at all n locations
tgagataaattgatagatattgtgatataatgtaattggcaggaacagacctagacaatggacatcgatgatggtgctgctctgctcattttgactcttttgatcccgttttcatttgaacacgaaggtgaatgctatagatggcccacatgctaaaagtgactttaatttgattctgttatttatatatgatggatgttcgtataaggctggtcatcatcaatggtactctattggtaccgttggattcaatgatgtagagtgtgctcggatacatgttaaacatgaaagttacaatnttcaaagcaaatatgcaaaagccgttatgtgtgtggagaaataacaatttgttgtttctcatataaaaggtacatcataatgcgtgctgacgggttaatacggttaaagaaacacaccttattgtatagctttcatttg

SEQ ID NO: 44361 - DNA, 440 bp, Glycine max
  unsure (1)..(440): unsure at all n locations
agcgtgtagaatggctagacatgatacatgtcatggtttggtttgcttcaaagataaaagggatgccccacattatttccatgacacaaatgcaaaaatgatgatttggaaactttatgcaaaactggtcatgcatgtacctatgcggacactcaagtgtcaaattnttatggtcatgtgatgctagggctcangattcatttcctctattttaaatcaacccaatgtttccaaaatatgttcttttatcaatttgtgcgttcatccgagtccatttcgggcgtccggaaaaatttcacagcattcacctttcaggtgtagacacattntccaaaaattggttatgatcagtgaactttttcaaagaaaaagttggaaatcatctcttttcataagcatgtcggtttttcagctagacaacttatgtttgcttttccatc

SEQ ID NO: 44362 - DNA, 472 bp, Glycine max
agcccgcctcgaagatgtccaggatggacaaagcagccgatagaactatttccgctccggagtatgatagtcaccgctttatgagtgctgtacaccagcagcgcttcgaggccatcaagggatggtcgtttctccgggagcgacgcgtccagctcatggacgacgagtatactgatttccatgaggaaatatggcgccggcggtgggcatcactggttactcccatggccaagtttgatccagaaatagtccttgagttttatgccaatgcttggccaacagaggagggcgtgcgtgacatgagatcctgtgtaaggggtcagtggatcccgtttgatgccgacgctatcggccaactcctaagatatccgttggtgttggaagagggccaggaatgtgagtatggccagaggaggaaccggtctgacgggttcgatgaggaggccatctgccagctactatgtataccgag

SEQ ID NO: 44363 - DNA, 632 bp, Glycine max
  unsure (1)..(632): unsure at all n locations
ctctctgtctctcnctctntcntatactctcctcntancgcaatctntngtcgactcccgtataacggaagccagcgngcgngagaatggaaccncgcatttgacacccatcgagncacctgngacctctanancaacctgcagcatgcaagctggaaacgacgaagtgtgtaatggtgatatcttctacttttattcantgaccacagagtggtacctgtatatatgtcgcgggatcatgataccttgaggatgtctacgtgggtgctattgcccagaaccaagctagaccaatcctcacccatcccctgcctaatcggtctntgagaaccatgcatgtacctactcacgctatctcaaggcagtcaactgataaaagaacaaagaccacaaatcaaggatgcttgtgtggcggccggccacatgtgaatctcgagtgatatatgggatatggcctctaggatatcaattaccagaggtgggtaatatataacaggcctatacactataccatgaagctaatagtgcttctggttatctattacataagggcgtatctattacctcgactacatatgcgactacttgttaaaccggacccttacacatacatcatcaatgcgtaagatacg

SEQ ID NO: 44364 - DNA, 263 bp, Glycine max
  unsure (1)..(263): unsure at all n locations
catcctattaactaagacaaatgcacacatatacaatcgacgtatcttcattacctagattatttacatgtacttacaatgtgtatttgttatttacatcacacacgcctccttggctaaacctacatacatgcatactcgaagcatttctgggtaccaaaaattgcacatgcgctcatcttggtattgctaatacctatacatatacaaacttcatgatgaatactgactacctacgcaataaggtgctacatntcatgctc

SEQ ID NO: 44365 - DNA, 518 bp, Glycine max
  unsure (1)..(518): unsure at all n locations
tctatataagctgaaccatttaatcaataaacacatgttgagntttattcataanattagagtctatctcttctatcttagtgagagtgattctcctaaattcttgagtgattcaagaacaccctggctgtatcaaaggactttcacaacctttgtgtgttgccctcgccggaaagagtgattctttccttcctttcatcttcaaccttgttctttcagaccacaattccatataatccacttctgcccagaattatctcgtggccataactaccattntacacactcaaattaagtgattcttgaacctaaattgaatttcaaaacgagacctttcacctcgttatggaatcacctcattcggagccctgtagctggagttattgccatttctatatttctgtcangccaccacttaacctacattgtaccatcccattaatccattttatgccaagaaccaccttattaagacccacgaaattaaccaccttatntttcatccctaatcaatatct

SEQ ID NO: 44366 - DNA, 393 bp, Glycine max
  unsure (1)..(393): unsure at all n locations
agctngaatcttganactagattcttganttttgaaatcaaatttcctcttgaaccttgaagtgttcttgattcaatcttgaactgattctttgattcttgagatcatcatctttgttatcattaattgttcttgatctttgagctttntgtcatcacctttgtcatcatcagaacttctttgaatcaatcttgattcatcatgaagcttgcttctacaattatatccttactcactctagaaccatcaaacaccatagttttatcaaagcagcttaacaagacatggttggaagataaccagtccatacccagaataacatcaatttggctcagaggccaacanattagatcaatcactaatggtctaccagaaatttccacaggacaattc

SEQ ID NO: 44367 - DNA, 465 bp, Glycine max
  unsure (1)..(465): unsure at all n locations
ngagatgaagaagtgtagaatggtgaaacttcctgcttttattcgttgaccacagagtggtacctggagatatgtcacggnggttaggagaccttgnggacgtcaggtggggtgctattgcccaataccaagcttgaccaatcccgacccaacccgggcatagtcagttagtgagaacctgtgatgtacctaaacaggcgagctcctatcagtcaacagataagatgaacatagaccacaaagcaaggaggcttgtgtggtggctggccagctgtgaatcttgtgtgatatatgggttgtggcctctggtaatcgattaccaagggtgggtaatcgattacaaggctaaaaaatgaagacaggagactaagatggtctctggtaatcgattaccaaggggtgtaatcgattaccaggctcgaaaacgaagtcaggaagctaggagagcttctggtaatcgattac

SEQ ID NO: 44368 - DNA, 421 bp, Glycine max
  unsure (1)..(421): unsure at all n locations
agcttgtatagttcccccaattatggntattttgtgagtaaatttgtaaataaatctttctttatggttaacattgtctctagaacatttccattggatttattgatgaaatctatacattttcaggtgaaaaagaggctaagttttgaattgcaaaaagtaaaagttgggctaagcgcatgtccaccgctaagcgcaacttcagcgtgcttcacgcaaaggagaatttggcagagcattagcatcaaagtcacgcgctaagcacgagattagtgtgctaagcgcagcaggtgcgttcagccaggctaagcgcaagactggcgctaaacccaatctcacttacccgcactaagcgtgaaggtggcgctaagcgcagcgtcgcgaattcagacactatntaaagcctgtcttgtgcataatt

SEQ ID NO: 44369 - DNA, 486 bp, Glycine max
  unsure (1)..(486): unsure at all n locations
atttgaattaatacgttcagattctgttggtaatcgattaccatatatgtgtaatcgattacacagggcagattttgaattcaaattttaatagctggtgtaaatcagttttggccactggtaatcgattacatcctctggttatcaattactatagagtaaattcttggccaaactttttgctacttcaattggaattcccttcctatttaatataccctttctaagactctatagactgtcttgatcatccatcttgaatatctctaattgctttgtcttgaataaagctttgagacgcatgtgatattttggcatcatcaaaacatcggcttgatcctttgtctacacctttatcatttangaacaacgacctgagtgggtaaacgcacagagacagattctgcaccctttatcattcatgaaccacaacctgagtgggtaacgccgagagatagattctgccnccttatcattcggaacaac

SEQ ID NO: 44370 - DNA, 127 bp, Glycine max
gggaccaatactgtcttaaaaaattacccccgccctgcactcatgcagtacttgtgtattatttaacattctgccgactagaaccatcacaacggctgataatctattttctctggttaacactttt

SEQ ID NO: 44371 - DNA, 465 bp, Glycine max
  unsure (1)..(465): unsure at all n locations
aagagtggatcctacaactntgctttaccttggtccaactctaagctattgtctagtttgatgtcaattttggaagcttttggcttccatgcatctctatctcgaaatccatccacctatcaacacaactcttcagggtatagtacgtacaaccatcttgttattcaaatttggctctaatttaataaccccaagcatttatttgtgcagttagttaggtcaatgcatatatagttttatacataaatgtgaacgacactgccatgagtatctgtctttcaaaattaacaatttggaaggcatggctagagttgaccatattcgctattgcactgaanaagacgaatatttaattcttagtgatatatatatatatatatatatatatatatatatatatacatatatatatatatctatatatatttatcattgtcggacaccacgactctcgcatcgcttcgn

SEQ ID NO: 44372 - DNA, 462 bp, Glycine max
tttgtccacagcacaggatctaaaggctaatattaatatatattaaaatgaaatagctaaccctttccaaggtcatcctcaagctcatggaccaccaatgctcttccaactactgaattaaggccagagagtggtatctgcatgtttgatgccatacaatacaacatgattagctactttcaaaaaggaattatagttcaaacttcaaaatgattcggaattaagacccacaggcttaatacccatgatttgataaatgcgtatcaaaagaacaactactactattatgtaaaaaacaaattataaagagcacctgattatccacaattgtagcctctgcaacccctgtgttaaacaattgacaaaatgatacataagcaggtccaggatccagatagaagtacatagtagaggaagacaaatgagaaaggatagaagtataccctctgcttagcaactatg

SEQ ID NO: 44373 - DNA, 123 bp, Glycine max
gtcctcaccaacttatatgcctatatatagccacttgaacacaacccccaaagggtaatccctctgctcaaagatctgcattctctggcagcgaatggaagagcgatcctacgctcccgacat

SEQ ID NO: 44374 - DNA, 546 bp, Glycine max
  unsure (1)..(546): unsure at all n locations
aggtagcggannnaagttttgaagccattgaaattgcgagccatcgtagaaccnanccgcngcatgctaactcggaagattccactctgattnaacggcttttctctgtgcgttgtctcaacagagaaccatggcaccttgacgagtctatacggggcagtgggtggtgacaataagcatggcgcattgatgatgggttttcgcacaaataaagataaaggaatggttggtttccaatgccacacgaataattatacttgatcactcaagtgtttatactttcatgaaaaaaaacttttctcacacaccaaatgacatattgtggattgtaactattacgtcgtagaaatctgtcctatgaacctccagactcattttcgagaagatctaaccactgaacctattgcgtaaaggcgctattaccttggtagctatatgtatcttctttagaagctttctccagaggcttcaagtaagcttcctcgaacgctttctgaaaagctaaagttaactatccaccctatacaacaaattcctcttgtatct

SEQ ID NO: 44375 - DNA, 493 bp, Glycine max
gcttgtcctacatccctctatgggactagactcagaccaagctatcattttataacagtatatctagaaccacaacttaatccgtagatcccttatattagactaagtttcaatcctacttccatcaaggtctaaagcagcagtactagagcatgcgatctttaagcattgatagaagcattgtacacagataacacaatcagttagatataaagtaatcacatcagttgttccttagaaatccgcaataagggtatgtatccagccattacagaaaaaccctaacaatattgagatgaagagtagagaataactgctccttacacaataagggggatccttcctcctcttctcaacgattcacaatcactctacaactcactaatctctctctaattacaaatactaggtcttctctgcaaaagctgctcctattgctgacttaagagctctgttcttgaaataggcactgtggtgttctgtggcattcttt

SEQ ID NO: 44376 - DNA, 63 bp, Glycine max
gtggtcactaatttcaatccgggtatatactgctttcgactgaatattaactgtcaatgggat

SEQ ID NO: 44377 - DNA, 366 bp, Glycine max
  unsure (1)..(366): unsure at all n locations
agcttgcttctacatataatagatatagaaggtgtggngtgtatatgtattatctattgtaagatgttacattgctacttaaaagaaagtcctctaagaccacaccacatgccttgactctcatttggtgtcatgactcctatctcaaactcctccaccaataattctagtaaccaattaatggtttcttacatatccttctatctatatatattcaaaattctcaagagttttcttaaaccactcgcttctcaaatcaataccacaacgggtatttgtttacttggtattagagaggcattattgcagcanatcaagcattttcaaaagctaatgatgcaccanagggctatcttgccatatatg

SEQ ID NO: 44378 - DNA, 509 bp, Glycine max
  unsure (1)..(509): unsure at all n locations
tccattcatttgtatgtaacaggatgtttgtgatgacattgctgagaggttggagcgtcatctgagtctatgggtggtcacgcttggctcatcgacacattatgtgatcgaagaatgtctcagattggttagaagtgtgacacaggaccatctattatacgttatgtgtagacgcatgcggcgcactgatcagacgtagtttatgtacatantttacattgatattccttgtatatacagatattgtacatgaactcatttcatgagtattgttggttttatttattntcattactaatgttagttntatttatttagattgtgtatttcatttgtgtctatatatacgcgtgttattaaaatngtctagttaacttagtttaccaactaatanaaaataatntaaaatataactttanatataatngaaataaagaagttgaaaagggtgtaaaanaataatttaaccaaaaatggacattattcggtatctaagatcttatataacg

SEQ ID NO: 44379 - DNA, 455 bp, Glycine max
  unsure (1)..(455): unsure at all n locations
agcttggttntgggctatagcaccccacctgacgtccccaatgtctcctgaccctcgcgacatatctccaggtaccactctgtggtcaacaataaaagcaggaagtttcacccttcaacacttcctcatctcaagcttgtaggattatggggtacccatcacatgtggtactaggtggcggtcgggcgatggtgcacaacaagttttccacatccacaatgcgcgcataaacccaccatcccctgttgcccacctccatctaagctcacgtactcccatgtagcccatatcctcatttctctcaacaccgggtccccatcaatcctctcaagcttccacaacatccaagcaaaacaacattcaaactgcacaagctatcacaggcaagcaaaacagagcatatgcagataactttgccaaaacaccaaccaaatcacagcttttctcacttaaag

SEQ ID NO: 44380 - DNA, 524 bp, Glycine max
  unsure (1)..(524): unsure at all n locations
gacactatgaaactaagctntaacatcaaggttggagcagcaaggacatgaatgtatccattctattccaattctctccttttgtctttntattagtattttttntaaattgaactaacattctatgctcttaagtttggcttcttttcatacttgtatataaatgtaaggtgtccctttcatacccccttttgtgttgcttggacatgcttgtgagttttttgttttccttttctctctttgataatttgattggacatgcttgtgagtnttttgttttccttttctctttttgataatttgattgatgtgtgagcaatgatggttatgaggggagaagaagtgtctgaattctgagctatggcatgcatgcacgggccccttggtgtccctaccaactgcagggactcatgtggtttacttccctcaaggtcataatgagcangtttntttgtttttgttttactacttactctactctagatngtgtcaactngcataatacagaagatactggatggttc

SEQ ID NO: 44381 - DNA, 413 bp, Glycine max
  unsure (1)..(413): unsure at all n locations
agcttgtagagcaacgtctatgcttaccaaggacgggccttggtatttgtgaacctgtgaggatcatcaagtgcaaagcttggatttgacgagtcttatgtacgacgtgtgtactatgtcactcaccgtggttggcatgtactggagacatagtagcatgctcttgcatacatatcacttgtcacaggtggtatgtaatggagacgtagtgcatactcttgcatacatttcactcagtgtgggtggcatgtattggagacttagtgctttggaggagggctcaacaagggtagtccttgggttttaagagccttggaactacgactatggatgctcttctcttgataagagaaatatganaaggaagggatgtagtatttttattcaatgtatatgattcattacaaattccc

SEQ ID NO: 44382 - DNA, 459 bp, Glycine max
  unsure (1)..(459): unsure at all n locations
gagaagtgaagtgatatagggttcaaacccttatgcacttctctctctttcgaatntgcttggaaaagttgtttccgtgaagaaaatccaagccgaggcgcttccgaaacgtttccgtaacgtttctgtgaggaatttcgcgaaggtttcgaccgttcttcgacgttcttcattcgttcttcatcgttcttcgatcttcaatgggtaagtacctcgaaccaagctttntgattcattctatgtacccgtggtggtccacattgtgtttcgtgtatttttattctcgtttcatttactttntatacccccttttgacgtgcttaagccatnttatttaagtcatttctcgcttaacctataaataaaataaatttccaccgatcgtttgaatngtattatctgttaacttcgggtaaaatgaattccgaaccgtcggtcgtgccgtaaccacgttggaaa

SEQ ID NO: 44383 - DNA, 463 bp, Glycine max
  unsure (1)..(463): unsure at all n locations
agctntatacttcacaaagatgtcagcaacatcagatntaaacttcatagaataaatccaacacattcttgaataatcatcaatgaatgcaatataatacttactgtcattcaatgatggtgttttcatgggtcctcccacatctgtgtgtactaactgcagcttttgtgaagcccttgaagtcttgttttgttaggaagtctggtttgctttccatattggcaagcaacacattntggaggtaaattgtctaattctggcatatctttcactatattgttctttctcatgaaaagtagtgcagcatgatgaaagtgccccaatctcttgtgccaaagcattgtattatcatcctctatgtgtacagctgctngctgctcctcattcatcaagtccaagacaaaactcttgcctttcatttgaactntgatcatttctattagtgttgcatctttaatcacac

SEQ ID NO: 44384 - DNA, 397 bp, Glycine max
  unsure (1)..(397): unsure at all n locations
actcagcttctatccaggcacattcttggtgacgaagctccttcttccatggcttattccctagtggatggcgcctcctctcacctcttctcctgtatcttccattgcatcttcatggtgtaaaatcaccattgaagcacctcattgaagctcaaagatccagcctccatagaagcttcacaagcaagcttccatcaagtggtatcagagcataagagcttcaagtaggtgctctttaaacctccactaattttcagctttaccttctcctccattgttgtttcttcattnttctccatgtatctcctcacatgtcttgtgctaaatgttgttaacatgattctttagattttccacctattaatcttgctatagaagctagaaattgatntctatg

SEQ ID NO: 44385 - DNA, 166 bp, Glycine max
gcttcaacaagagtcttcacagataactatcttgaagcagaaaactaacaaagctgcccatcatatctcccaaaaccccatacccacgaaaatcaagggagaaagaagtccacccaaacctgaaatatctaaattccactcgtagacacgcacttcacgaccccga

SEQ ID NO: 44386 - DNA, 497 bp, Glycine max
  unsure (1)..(497): unsure at all n locations
aagctccttcaactgcacaaagctctntaatattgaagagtatccttgtggaaccttcacccgacgaagacactgacaaaaacttatcttctccttcttggacaaagtatggcaggctgggggcaagtaaattntcttcccatcagaccttggatgcaactgtgatcttatacccatatcagctagatcttgacgggtattcaagccatccttcgtcttgccttgaatgttaaagagcgtcccaatcacactgtcacaaacatttttctccacatgcataacatcaatacaatgtctaacgtcaagatcacaccagtacggaagatcaaagataatggacctcttcttcatatgcaactctgacttttatccttcttttgggtcttcccaaatacagtgttcaagtgttgaacccgctgatatacctgctcactagtgaacggtatcggcgcaatatcatgctcttgacttncattaaaagctnttctcagtcgtct

SEQ ID NO: 44387 - DNA, 226 bp, Glycine max
  unsure (1)..(226): unsure at all n locations
tgcacgctgcagcttaacatcataccactttcagggtgctggaactacttcacatggatttgatggtgcctatgncagttgaaagccttggaggaaagatgtatgcctatgttgctgtggatgatttctccagatttacctgcgtcaactttatcagagagaaatcagaaacctttgaagtattctcagagttgagtctaagacttcttagagagaaagactgtgt

SEQ ID NO: 44388 - DNA, 382 bp, Glycine max
ctcagcttatcattcaatttctatgctctcgatatatgacgggagttaatcaagcattcaagattaaatttatgggcgtgtgaatatgctcacagattcaacatctcaatttcgagcgtctcgacatattacgggactcaatcggacatccgattaaaatactattgacgcttgaatcggctccgagcttctacatccatattctagcgtctttatgtgattcgagactcactcagacttgcgattaaagagctttggtgagttgaatttgctgagacattcaacattctacttcgagggtctcgatatcttacgggactcaatcagacatccgagtgaatagttattgtcgattgaattggctcacatccttaacattcaa

SEQ ID NO: 44389 - DNA, 311 bp, Glycine max
  unsure (1)..(311): unsure at all n locations
agcttcgatgatcagttaggatggtgaagtggtgccctagtangtactgccaccacttcttgacggcggcggtgatggctgctaactcacaaacatatgttgacgaatccattaacttgcggcaaaactatntgctaaagaatgagatggggtggcctccccgcgtcaacactgccctcatgccggaccccgacgcgttcgtcaccacaacataaggaactttgaaattatgtaaggcgagaacacgcgttgccgagatagcgtccttgaggttctgattagccattcatactttgaagaccactaaactg

SEQ ID NO: 44390 - DNA, 497 bp, Glycine max
  unsure (1)..(497): unsure at all n locations
gcttgtcgattctgatttatagatcacatgtgagtgtatatgttgtatgaacattctgatgatgccaaaagcttgaagcaattcaaagtttactacaacattcaagtcaagatcaagagatatgattcacaatagcccattatttgtcaaaagaatctcttaaaagatttcaaaggtttggccttaagacttaaatattcagaacctcttatcaagcttttaagtggttttacatctatggaaaatatatacttctctctagtaatcgattaccaaaggctgtaattgattaccataagcaaatatgattttgcacagctttcataaagttaaatctgaattgtaaggctatatttgttaccacctttgtgtttcgataccagtacgatatgttttgaattcnacaagacaacatggctctcataataactgtgtattgatgccacaatctgaatcttaccagtaggatattcaaaatactctgaaagtctatcctt

SEQ ID NO: 44391 - DNA, 411 bp, Glycine max
  unsure (1)..(411): unsure at all n locations
ttgagaagctagatgctagctatacacacccctctcataactaagctcacctacttgagaagcttctttaagaagattcctaaagaagctagagcttagctacacatacctctctaatagctaagctcacctccttgagatgagaagctagagcttatctacacacccctataatagctaagctcacccccatgacaagtaaaaacatgataaatcataaaaaaaagtctttactacgaagactactcataatgccccgaaatacaaggcgtaaaccctatactattagaatggccaaaatacaaggcctcaacgaagaganaacctattctaatattacaaagatatgcgggcatgcttacccatgggctcgaatctaccctaaggctatgagaccttatggcttccttg

SEQ ID NO: 44392 - DNA, 486 bp, Glycine max
gctttatgtgataggatgtgactcttcacattggaatttgaatatcatcattcataggcactggtaatcgattaccaaaacattgtaatcgattacagattctcgaaattaattggaacgttgtacattcaatttgaaaaaattttctaaacacttgtgctactggtaatcgattacaccagtctggtgattgactaccacagagcatcatctctttggtaaacatgttgtgagaaaaatcatgtgctactcactccttgatacaaactgttcatacttatcttgattaagccttctctagattcttgaatcttgattcttgactctaaaatttcttattgagtcttgaattgttcttgattcttatgtttaactcttgaattcgtctcgattaactcgagtcagtctttgattgatctttgattcacttgagtgaggctttgattgatctcagggctatttgtcatcatcttcttgtatcatcat

SEQ ID NO: 44393 - DNA, 449 bp, Glycine max
atgcatgtgatatatgacgcatcaacaaaaatcaagaccaggctattgtgccagcaatcaatggggcaaaacacaccaaatgattatgatgatggatggctcaaattctcacaaaggtaaactgatcactttcaaatagagctttcaaaactatcatgacttgtagagaagaatcaaggatttcaagtcacaaaatgtcaagaacttatattttcaaaacagttacccatttctcaaacatatcctataattcaaagaaaaacatgcaaattcgtacgtgcacactatattgacccataatattaaactgaacatcctacgatactaacaacatttacatattaccacagctaactaattatcatagcctacataactagcataaccaaagaacactccgccccatactgagacaacacatatgtctcaatgtatcacaataaaagaat

SEQ ID NO: 44394 - DNA, 510 bp, Glycine max
  unsure (1)..(510): unsure at all n locations
ctcagcttctaaaaaaactgtgttacgtgctctattacataatatgaaataactcatcttatntattatatggtattgactttataaagcaactaatggaaagttcttataaaaattcactaaaattccaattcatagttttcttatttctacatgatcgtgaaaattaaatggattaatgcactgtataaaataaaggaatgaaataatttatgtataattaaagttctcaaaattacggtgttacagatgcattgtggaaagaaagtcgcatttccccatcaatccaaacacaccactatgttaaaagagatatagaaattccccattnttctaacaaccatgtactaatacaactcttcaataaaacatccatctcaagtcatatcaatgcacatgtttacctatcatgttatgttatgctgactctctactctcagaagagatcacgctttgagtaattaacccaagtgtatcccttaacatggtcgcactctatgatcttatcat

SEQ ID NO: 44395 - DNA, 333 bp, Glycine max
  unsure (1)..(333): unsure at all n locations
agcttcttactttanagcatagttgagacatccattatgagcatggtctatactaatcaacacacttcctatgttctattcttcacatatctttcattgtatcatttctagatcttgcatagctntcctgcatatttgatgtgatccttactaggaccgacttgcttgatacagggcacaaagtttggatgatgccactttcagagagggaagataagccagggtagatgccacaaggattaccttgataagtccgagattggttcagcgaggaacccaaagagaagttctcacaaaattttatcaaatgcccaaagttccctttattgaaaa

SEQ ID NO: 44396 - DNA, 348 bp, Glycine max
  unsure (1)..(348): unsure at all n locations
atgcaagctagcatgatntacattctcccnctttctcttgcaaattcataattcttcttgacatcatcaaaatcttcatgattnacattctccccctctctcaagcaaattcttaattcttcttgacatcatgaaagtcttcatgaattacattctccccctctttgatgatgacaaccacctgtaggttaggagcaacaacaaagaaaaaatctatttgcatatagtttactcccccttggttctacaatgattgcttatatgagacaattgaagatttcatattntttatatatacaaagttgtctcataaaaaatagataatattttcttaatagtttatctttt

SEQ ID NO: 44397 - DNA, 320 bp, Glycine max
ttctagtagcgctccatactactgcggattcggtcaagctatcttgaataaagtgtattgatagctgctcatgctcagagagtgcgcacatcttgcggcacttcattcgttgtgatggtggttgtgacacagtcgtccctttatattatgtcgaagtccgggactttgaacttaggcgggataacaacatctggtgctaagcaaatatccgccatatcagcgaacagatacgtgccaaatccttctacggcccgtaatctctcctcaatgagatctagcttcctactttcctcagttgccgagggccgtccttacatgga

SEQ ID NO: 44398 - DNA, 484 bp, Glycine max
  unsure (1)..(484): unsure at all n locations
agcttctagactntatacaagaatgaagttctgataccacttgttaaacaagtggcctcagatatcttaagaaggcgggttgaattaagatattgcaaactatttccccaattaaaaattctatttcaatttcaatgcaagttgcaagttcccttaaaaatgaacttttaaataataattcacatagaaaaatctgaatataaatataaatcaataataaatgaaattctgataccgatgacagatgtcgtaccggatgtcacgacatcacacttcagaacatgcagattatatttgacagtatgaacagattanacaagttaataacacaagagaattgttaacccagttcggtgcaacgtcacctacatctgggggctaccaagccagggaggagatccactaaaatagtgttagttcaaagatctaacagccactgtttacaaccttctcacctaaccactacccatgcaacctctaccta

SEQ ID NO: 44399 - DNA, 428 bp, Glycine max
  unsure (1)..(428): unsure at all n locations
tcctcggtgccattcctgcgaaagcaaacatttggaaagttagttntagtgggacattactcttaaagcaaaaaatggcatataacctcctcccataaatacaaacatcaatgtaaatttagagcaagcttatgcgcatgtttccttacgaacgttcacttgcggaagacatcctattaaccgaaaaaatgcacccatatacaatcaaggcagctgtgttacctagattatntacacgtacttccaaggtgtatttgttacttacatcacacacatctccttggctaaattcacatacatgcatactccaagcattttggggtaccaaaaattgcacatgtgcatatcttggtatttctaatacctatacatacacaaacttcatgatgaaatctgactatctacacaataaggtgctacatttcatg

SEQ ID NO: 44400 - DNA, 470 bp, Glycine max
  unsure (1)..(470): unsure at all n locations
agcttcctcggggccatttcctgcgaaggcaaacatntggaaagttagttttaccaagaaatgctactcttaaaacaaaaatggcatacaacatacaaacatcaacgtaagtttagagtaaacttatgcacatacttctttacgaatgttcacttgcacaagacattcttataactaagaaaaatgcacccatgtacaatccaggcacttccgttacctagatcatttatatgtacttccaaggtgtatttgctacctacatcacatgcacttccttggctaaatttacatacatgcatactcaaagcatttggggtaccaagaattgcacatgtgcacattccggtatttctaatatttatgcatacacaaactttgtgatgaatcttggctatctacacaataaggtgatacatttcatgctntattcaagtggttttgctacctanagccgcatgcgaattcaagta

SEQ ID NO: 44401 - DNA, 458 bp, Glycine max
  unsure (1)..(458): unsure at all n locations
tctcggctcatgctgngaacgcctctagttcaacacccgtgcatcctaaagcacccacccagagggaagctccccaagttccaactccgaacacgactcgaccggccggtaattccaacacgacaaggaacttccctccgaggccattgccggaattcaccccgctcccaatgacgtacgaagatcttctaccatccctcatcgccaatcatttggccgtggtaactcccggaagggtcctcgaaccccctttcccgaagtggtatgaccctaacgcaacctgcaagtaccatgggggtgtcccggggcattccgtcgagaaatgctcggcccttaaatacaaggtccaacatttaatggatgccggatggctgactttccaagaggatcggcccaatgtgagaaccaacccgctcgccaatcatggagggggagcagttaatgcagttgagtctgat

SEQ ID NO: 44402 - DNA, 402 bp, Glycine max
  unsure (1)..(402): unsure at all n locations
agcttgtaagtgtgggatctgctgtttatggaaagctctggtgcagtaagcacacactatacccaaaaggtatgccagtaggatcttttctgggtttatattatattagattatctatttcttggaacttacttgtccagtttttggtatacttttgaaggattcaagactcgagttaatttctctagcattcttgatccaacaagaatctgtacctatattgctgaagtcattgatgctggttgtcttggacctcttttcaaggtatcatgcctaaccatgtttctgtcttacgtctgaaaacgaaacaatattgacaagtcactggttcttgataatactggaatccatgtagtcaacccaccacaatatggtgtntgttgcttgttgtgacattttcag

SEQ ID NO: 44403 - DNA, 447 bp, Glycine max
  unsure (1)..(447): unsure at all n locations
caccccacctgacgtccacaatgtctcctgacccccgcgacatatcctcatgtaccactctgtggtcaactgataaaagttggaagactgactcttccacgctttctcacaccgggcttattgtgttatggggcacccgtcatatgtagtactatgtggcgatcgggagatggcgcataacatatatcccatcttcacaagcccaagcataagcacaccatccccagttgcccacctttaaatttagctcatgtacacatacgtagcccttctcctcgttcctctcagcaccgggtccncatcaacccctccaagccttcacattgtcaaatcaattcaattccatttgacatgatactacctcgaaaaagaaaacagagtcgaggcagagatctttacacaagattcattcgaattccacagagttgttcctaccaacatacctta

SEQ ID NO: 44404 - DNA, 374 bp, Glycine max
  unsure (1)..(374): unsure at all n locations
gtgcgagctactgaactagtgaagcttttgactctggaaaaatcaatgagaggtgcaataaaacttgttactgctatgaagcttccaaacctggccgaaaggttcagctgcatattagaggtagtctcttacatcctaacaaaatttcagtgtaaacaattcattgccatatttaccttgtaattcctgcatgtctaaaataggaaaggctacttgaagaagccaaaaaagctatggaaaccaacatcaaagaaaatagtgttgcacccgttactgctgatgctattcctggcagaagcaaggccccaactcacactgaaacatntaaatgctgtaccatgtcatcatctcgcaaaatatctgctacatcattc

SEQ ID NO: 44405 - DNA, 448 bp, Glycine max
  unsure (1)..(448): unsure at all n locations
tcttccgcgctcacaatatctgtcatattgacattatattcacgctgacgggcggaaatacccaaatggttatctgtataaatattcttttttggatatctgtaaaacgacaagcctgatagcacgcagagactaacctcgtcttctgcgccctttgtcaatcgcggccgacaagcccatttacacgccgagatttacgtcatcatccgcgctcacaagatctatcatactgacatttgagtcacgttgacgggcggaaatacccgagtggttatccgtataaacattcctctttgctatctgtaagacgaaaagcttgataggacgcagagactaaagtcgtcttctgcgcccttcgtcaatcgcgaccgacaagcccgtngacacgcacagatttacgtcatcttncacgctcacaaaatctagcatactgacatttgagtcatgc

SEQ ID NO: 44406 - DNA, 332 bp, Glycine max
  unsure (1)..(332): unsure at all n locations
ctctatgggaggtgactatttatcagacacaagtctattatgagacattcctatgagagttnttaatgttggtctataagcccaaagtgcattatctagtttaattgcccaatctttcctagatgcactaactggtttttcaagaattatttataactcgctattggacaattctatttggcccctagtttgtgggtgatatggggttgcaagcttttgagtcacccatatttagccaagaggccattaaacaacttattacagaagtcagcgcctttgtcactaatgattgctcgaggtgtgctaaatctggtgaaaaatattttctttga

SEQ ID NO: 44407 - DNA, 373 bp, Glycine max
  unsure (1)..(373): unsure at all n locations
tacactcacccatctaagaactaagctcacctcctttgacaaatacatgaaaatacaaaaaaaaagttcttactacaaagactactcaaaatgccttaaatgcatggctaaaaccctatactactagaatggccaaaatacaaggcccaaaagaaggaaaaacctattctaatatttacaaagaagagtggatccaaccttgacccatgggctcaaaaatctaccctaagggtcatgagaaccctanggccttctttagtagctctagcgcaagcctattggagtcttctatccaatacccttggggggtaggatngcatcaccacatgttttcttttttagaagatgcatctttgtcttttcgctcgcactc

SEQ ID NO: 44408 - DNA, 243 bp, Glycine max
  unsure (1)..(243): unsure at all n locations
gtgcaagaccctctgaatgacttgctggctattgagagcaccagttctatagccacactggttctagtatctatactaacacctgtacacatgaaaatngaaagagatactgagactatggatatgctgatgacaatcgacaatcatatgtgacacaaccttcctatgaacacgcctattgaacatataaactggccacagaggcatgaggcatatgtctatgaggctacccacccttaactc

SEQ ID NO: 44409 - DNA, 421 bp, Glycine max
  unsure (1)..(421): unsure at all n locations
caacttggtgaaattgattatgactactttgtaatcaattaaaacagagagtttttgcctctgaagaannatttctaacatagaaacttttcttcacataaaccatgataatgcatgatgcaatacaaatattaaatgtactaagatgcaacaaccaagttaacaactaatacaaatgccacttaagggaatngtgcatgtaaaagccaaacttcttaaactattccttgagcttcaactttactcttgatattaccatgttgctcccctatcttaacattcccctttttggctggataggacaacttactatacatgaggcattggaagtttgagatggatggaacttaatcttagcttatctgaattctacacttagagaataatcatcatcttatctatattcattatcacaattata

SEQ ID NO: 44410 - DNA, 416 bp, Glycine max
  unsure (1)..(416): unsure at all n locations
gcgttagagagttatagacaggattggagcctcagtttcactatctgcgtgtgagggtcatttctctttccacatacattatttcacaaatcccaatggtgaggatgtgcaaaaatgagttccgaacctgatgttcaaatttcaagatgtagttttacgaaatggntaacaaatccagaaacatagttntactaggacaggtttggatgtatgcgggaaaaagatagtgttntatgagaggaagaaaggaaaacgaatttaagaggaagagagaacatagagacgtatcatacatgtaagaactgacctaatatatctctatgtatagctagggtactttcagtctattatttactctatttttccttatcttaatagtttattaagaaggaactctattttaccttctatcaaat

SEQ ID NO: 44411 - DNA, 294 bp, Glycine max
tggtcataacttatcacacggaggtccatatgaggcgcataatatatcgagacgctcgaaattaaacaacgtatactctcaagagattcatatggtcgtaacttatcacacggaagtccgattcaggtgcataatacaccgagacgctcgaaattgaaccacgaatgttctcgagaaattcaaatggtcataaattttcaaacggcagtccgatttaagcgcattatacatcgagaatcttgaaattgaacaactgaagctatccagaaattcggatggtcgttacttgtcaca

SEQ ID NO: 44412 - DNA, 429 bp, Glycine max
  unsure (1)..(429): unsure at all n locations
tgcttgaccttctntatgcttaatttcataaacattangcatatgcaaaaaatcaagatgagttagtgggttaaaaccattaacaacttcaaaaggagaacaattagtggtgctatgaacagctctattgttagcaaattcaacatggggtaaacaagctttccaagtttttaagttcttcctccaaactgtcctaagcaaagttcccaaagtcctattaacaacttccgtttgcccatctgtttgtgggtgacaagttggtgaaaantaacaattagtgcccaacttgctccacaaagtcctccaaaaatggcttaagaacttagagtccctatcactaacaatgctccttggcaaaccaatgagtctcacaatcttcttgaaaacaaattagccacatgggaagcatcatctactcttttacatgga

SEQ ID NO: 44413 - DNA, 386 bp, Glycine max
  unsure (1)..(386): unsure at all n locations
agcttgtatatgtggattaaggatccatcatattttttcataaattttggttcttgtatttatttgggtgcaattttggtctcaatctttggatttataaaattggatgtaaagtggccaacacaaatcttattntagcacctatttcccctaaaggggtgaaatcatggttccataaaatagaacacttatattagcatctcttttcccttgactaagtaaatggtgataattatagttccaagaaccactccataattggcaagtaaatctagagaagaagtcgatactcccttttgaaattaagcaacaattctgaanagctcataattntttatacaaataggtaaaaattggagctgagttgtgttggaccactgggagta

SEQ ID NO: 44414 - DNA, 314 bp, Glycine max
  unsure (1)..(314): unsure at all n locations
cactctntcttttgttagtcaaaacttctaatgctcttaatctctcctcatctaaatcaactaactcatctgacatcattttccaataatggtcgattggaatgtccatttgttattgtaccctggctgattgcaaatgtatttcgaccggaagtacagcatcatgcccataagtcagtcgaaatggggtagtattagttgattccttangagaatntctacatgcncatagaacttgatctaacgttttattccaatttcttggctttagggcaattgtgtttttaatcaagttaattacaatcttattggct

SEQ ID NO: 44415 - DNA, 322 bp, Glycine max
  unsure (1)..(322): unsure at all n locations
aagattgtcaagggtagaccttgtgtacattgagttcccatggngatggaacttaataatggaaaaggcttcaccaagggtgaaccttangtttctcgagccttggaccaaggacatgtttgcccttggttttgttaagcctacggagctgtgtcgaggcttaccaaggacgagccttacattttctagacctgtaaggattggcaagcgcgaagctnttgatgagtcttgtgtgcaacataagtgttgtgctctggcatacgtgcctcttacaaagtggcaagaaatggaggcatggtggtgtgaaccaatatgacttatg

SEQ ID NO: 44416 - DNA, 409 bp, Glycine max
  unsure (1)..(409): unsure at all n locations
cttagacacttggtctggatacatctagattagaatgcactctatagacgaggagaaaatgagattcatcactgaagaagccaacttctgctacagggtcatgcgccttggcctaaaaaatgcagacactacataccagagattgatggaccgagttttcaagcagcatattggataaaatgtcaaggtctatgtcgacgacatgggtgtcaagtctcatagcatggcctaacacgtggcatacctagaagaagtcattggaaagctctgcaaatatgacatgtgcctcaacccggaaaaatgtactttcggggtcgacggaggcaacttcctaagcttcatgatcatgcatcggggaatagaagccaaccccaaanaatgcactgttatcatggagatgcatactcct

SEQ ID NO: 44417 - DNA, 597 bp, Glycine max
  unsure (1)..(597): unsure at all n locations
cataacatgctctgagtcgattcatatcgtctgacagatngtttatattnatatatacaagatgtctgttagancccgtgtgagtactcnnattgagacctcgatgtaccctgaccttatacgcactgcagctgcaaccttttccaatcctgatcccattttcttgccatgtgagaagcatccttccctggaagcgtaagaatttagggaaatttcccatcaatgataaggaaagaaggaatactttcaatcatagagatagcaaacaagaaaagaaggataattcccacttcaagagtgggagaaagcacatagaaaagagagacaattccccattctagaatgggagaaagttataattgaagaggaaggaggaaagaaagcccttgatcgtggatctaaagaaaaacagaaagaatatgcacagaggtctttggatcggacaatatctgaacaatacagaattgtcacccaatgaaccaataaagaatgaatgggaccacgacctaatatagtcttctgccttcgataccaaccaaataccgtgcgctacgacatttgttctgcccgcactaacaaaaacgaagagaaaaaacg

SEQ ID NO: 44418 - DNA, 399 bp, Glycine max
cgcttgcacccatccagagggagaccccccagctactgtttcaccccaactcgctcggccggcaatgcccactatggcaccggttccaacgtgataaggaactttcccccgaggacaacatttaccctgatcccaatgacatatgatgacctcttggcatccctcattgccaaccagatggttgtgatatctcccggaaagatctactatcctcctttcccaaagtggtacaatcctgacgcaacctgcgtataccttgcgaaaaccccgggccactccaccaaacagtgcctgtcctttaaacataaggtccaaagtttgatataagccggatggctgacgtttcaagaggaccagcccaaccgtaaaacaaactcgcttgcccatcatggaggggga

SEQ ID NO: 44419 - DNA, 569 bp, Glycine max
  unsure (1)..(569): unsure at all n locations
ctgtacncgattgagaccatcgcagacccgcgatctgataaccttgtctgacgcgngattctctaaagacaacctgcatgcgtgctagcttgtctcatataggtgcaggaatgacatttctgtcgaatgaactatttccactccggagtacgacagttaccgctttatgagcgctgtacaccaacatcgcttctaagccatcaagggatggtcgtntctccgggagcgacccgttcagctcataggacgactagtattcttgatttcaagaagaaatatggcgcctgcggtgggcatcactggttactcccatggtcaagttcgacccagaaatagtacctgagtgttatgcctatgcttagcaacagacgagggcgtgcgtgacattagatactgtgtagggggtagtggatcccttttgatgccgacactatcggccaactacatgtgatatctcgtggtgttggaagaggcgcagaatttgtatatgtcataaggagaacctgtctgaaggttatgatatgaagcattttcatatgttttcacaccgcccgcgccccctcgcaccc

SEQ ID NO: 44420 - DNA, 265 bp, Glycine max
  unsure (1)..(265): unsure at all n locations
tcactttatttattactcaattcgattaagaatgagaaatgccaaagagaanacgtccgattgattttgcgctttattttactaaaaaaaagatgttttttgattattatattatctgtcatctctttttgttttcccacgtggttacggcacgaccgaacggtcgatattcattttaaccgaagtttacggatcatacaattcacacgttcggtggaaatttattntatttntaagttaagcgagaaatgacttaagtaaaatg

SEQ ID NO: 44421 - DNA, 342 bp, Glycine max
  unsure (1)..(342): unsure at all n locations
gtgaaattctgggaacaacaagtcatttgcatgtggagatattatggtcacccgcgactctcgtcgaatcgagaggaacgaaattaatgtcttatctttactttccttgtatctccaataaaagacaagtaaagaggggcaactgtcatacactaatttcgtccggngacctttgcgtgatgacatgcgacctttctatggtacttgcgaggtgcttggcacccatcattaagcaatttgtgaaattccaggacatgccggaaaaccaaaaaaatattgatgcacaatccgtaagtttccgtgatacaccggaaaccaaatggacgcatcgttgcgtaatta

SEQ ID NO: 44422 - DNA, 265 bp, Glycine max
ctcttgttgatcctcatggtattctagattattgggatggggatgcagttgatccatgcagctggaacatggtcacatgttcccctgagaatcatgttattagcctgcgagtctctcttcaatcttctgctgcattttcaaattggaatgtttgcaatacaaacagcttataatgttgaacattccacaacaaatatcaaggttgtgttgtaaaatgtttttaacagtttgatgaacctggtcctgcttttctaggggcattccc

SEQ ID NO: 44423 - DNA, 381 bp, Glycine max
  unsure (1)..(381): unsure at all n locations
gcttctgcatgtgagaaaaccatgcanaatatacaaataatttgcaacgtatgcgcagccgtggacggagttgatccaaaacttgcaganttttattttctaacttggtcaaataaacttctttaggagaaggttccttccangcgtcagtgttgaacatgaccgcgtgaaatatccctgttaatcctttacgatggatcataaactattagttctcttcgaaatattattgcacattatataacaaataaaaaggagattccacgcgccaaaatgcacacgattacataacctaagacccttaatgcacttggatatatagttggttaatttcatgatcaactactagtggaagcgtctatcactataacaagcattgaa

SEQ ID NO: 44424 - DNA, 387 bp, Glycine max
  unsure (1)..(387): unsure at all n locations
acttanaataaataattatgagatatnttctctataataatcttttactattttatagtcaattatcgagtgtgtgaattaattaatataaaattatcttaatttaatcggtgatttcagattgaagttttaagcatgaattttaaatattttgaaaatatttctgttcagagttttttcttacttgaacatcttgaacatgacttcttctaaattatgataaaagaaatctatggtttgtataaaaaaaattgaacatgattgcttctaaattatgataaaagaaatctatggtttgtataaaaaaaaattgtggcaagttaagaatgtgtgtgaaactngatcataaatacatctgagttgattttgcaagatgtattcataatt

SEQ ID NO: 44425 - DNA, 422 bp, Glycine max
  unsure (1)..(422): unsure at all n locations
agctntcttgctctctntgttctccatctaccttgaagttgtatgttctccatctgaccatcattttgtctaaggtcgagcatcgtgttcgtcgcactcgagcatcgtcagaagtctgtgcttcttctccttcgccacctcacgtaagtatgtttggtctaatcctgtataaatatttgattgcattcatgtatcgcacacttagtgaactaaacatggctagggtttctcatatttaactcgagcatcatgacaactttgtgcttcttctccttagtgaagtttcccttacccttattggtgtcttctaacagtttaagagttaacgcctattattggagtttaacagcttcccttacccttattgtgttctgtgtaagagtaacgcctattattggagttaacagttcccttacccttat

SEQ ID NO: 44426 - DNA, 322 bp, Glycine max
  unsure (1)..(322): unsure at all n locations
tggactttgaccttctgttcaccatcgagacttacgcctcangggtgggtatgggggcagttctttcccaaaagaatcaccccatagccctctttagtaagccttttcctccgaagttactccgagcattagcatacatccgcgtgccattatggcggccgtgaaaaagtggcggcaatattttcttggccactgtttcaccatcatcacagaccacagaagcctcaaggaattgttgacccangtcatacaaatgtcggaacagcacatgtacctggcgtggttaatggggtacgactatcatattcaatatcgttccagt

SEQ ID NO: 44427 - DNA, 515 bp, Glycine max
  unsure (1)..(515): unsure at all n locations
atagcatttgatctcgtgacggatttactcattgcgcttcactcgaagatgtgggtgatcttgtcttttttaacaatggcccgatcttatcaatataccctgatgttatgcgaaatggttttggctccatgagtgattaagaacataagagactgtaatgcacgtttccgaagaactatctgaaattaaaaatatgaagaacatgtatatcgtactaactctaacagcactgcatacccttggagcacatcaggggtagaggctcaactctaagcatgtttccatcttctcccacaactatgaattgcaatngctagatgattgaaagaaaaaaatatattgcactagagagagcaacctagtagatactgagaataacatggatgctctcgtgtttttatatggtaatatatagagacaatgcagcctccaatagttactcgaatattcacacatgaggtgtgaactccatcncagtttcctgtggcctcttgtgtgagaccacttatagatgg

SEQ ID NO: 44428 - DNA, 441 bp, Glycine max
  unsure (1)..(441): unsure at all n locations
gcttatacctatattttccttaacccctttatctntcactttatcccattttctgtgttgtagtaagagaattggttccagacaaactctntttaggttatttcttcacttcttttattttaatttcaatataattgttcacttttatatgtaattgttcatgcatatcttcataaaaaaaacaagaaccctaacaaccttattaggttcacccacacccactctagggttcttccttttcaaactctattagcttgaccctctcactccatactcaacattcttcaaagcccccaaaagagtctcataaattatggtgcccatgggcattaaacttgccctcgaaaatggccatcattgtccttgagcttcttctccttctgcaagtccctacaatggttgatggtangagaaatcttcttggttcatgcccttcatgtg

SEQ ID NO: 44429 - DNA, 385 bp, Glycine max
  unsure (1)..(385): unsure at all n locations
ggtgcccatctctgctccaaatcgcgaaaggatgtcattttcggagtcgtgtatcgcgtctctatgtgtgggacttcgaaatttcaggtttgggtggacttctttccctcttgattttcgtgggtatggggttttgggaaatatgatgggtagttttgctaagtttctgcttcatgatagttatttgtgaaggaatttgtggaaagcatgtngaacttgccatgtttggatgagttaaacatacccattctgttttanggtttttatgatgatgcttgtgatgtttatgtgctgaaattgcttatggaaaactgttagagatgaagggtagaattaacctanggttagaaagtgagaatgtggtgttatgagtggaaaaagagtg

SEQ ID NO: 44430 - DNA, 87 bp, Glycine max
ggaaagagtgaggtctgataccacctccaaagtagctcgacgatacgattgtggaacaataccgtcgtgaactagtgttatacctac

SEQ ID NO: 44431 - DNA, 417 bp, Glycine max
tattgcatgcctctatcttatataacgcagtcatatattcactgcttagtggtacatgcaggtggtgacaactgccctaacggtcttaacaacttgtaacgatattacacatgtgcctattagtaaccattcgcacgtgctgcatgtgcctttagctgacgtaatcgcgtaagtgtttgggcctggtgattgtcctcgtgggtctgtccattgaagttcctgatatggaagaccctggttctgctgctggtccttcgtgaagactgcgactgctaacaatactctcatcctctatcaccaccttgtcctctaggtggtaggcttcgcggatatcagcccatggatcccaagtggtgtcctccggtggttgaccgttccattgtacgagaaccatcggagtatgtggtgatgtcacgc

SEQ ID NO: 44432 - DNA, 494 bp, Glycine max
  unsure (1)..(494): unsure at all n locations
tgagcgacanattgataccatcgagnncccngnatgagagccttgtatgtaccngccgatactctataacaacctgcatgcgtgcnagcatctatcttcatgtactaagccgagtttaattctattgttacatccgtacttacgtcgttaacgtttaacacccgtattttaaaaaccgatgttgtgataggtatcttcttttgttattgtctatcttaccgaattccaaaataacctgtaattttaggctactcacagcatactattgtatgtgaatatatttgaacagttttaatagaaatctcctgacacattattatatactttgatacaaagttcacgttaaagagactggattgaaatactaaagcagctgttactcagtaaccaatttcagattgctacatccaatttctttctacttcgaataactgggatagttttcccgctacaaatgagttgtgaataataatcgtgtccaattctgaaactct

SEQ ID NO: 44433 - DNA, 428 bp, Glycine max
  unsure (1)..(428): unsure at all n locations
tttctggattttattagtctaggatctcacattaagtcttggaagcaataaagatcaattgccattcaacatggaaggttntgtaatagaaaaaatacatcagaatactaaaaaatcattaaattcttactcgttactttttttgaaaaaagaaacctaagcatacaaaaagcacatcatcctagccactaggtgtggcttatgtgaatgagctaccggntaccacttagaactctctgtcgttctttagacaccaaaataaaaatgtattatgtatagcccctttatattaaacaaaaataccacaccacaactaaggttagtgtctggtcttagttgaaaattgtaaaaaacacactattaaattgtcaagggtgggagacatncatatttatacaaaataatcaatccaccataagtctattacc

SEQ ID NO: 44434 - DNA, 82 bp, Glycine max
ataattgaaaggacttaatggtataacttcataatcaaggttcctgcttatacagactttgaaatttaaaatcttaaactct

SEQ ID NO: 44435 - DNA, 314 bp, Glycine max
  unsure (1)..(314): unsure at all n locations
nttcgcaaggcttacagtaaaatctgggacctagccatggcttatgtctccacagaggccattgcctccctcgcccagtattatgaccagccgctgaggtgcttcacctttggggacttccagctatcacccatggtggaagaatttgaagagatcctatgatgccctctatggggatggaaaccatacctcttctcaggagtttatccctttntagctagaatttctaagatagtccaaatcttggcngaggaattagaccaccagaagcaagtaaaaaatggtgtggttggagtaccgagaaattgtttgga

SEQ ID NO: 44436 - DNA, 328 bp, Glycine max
  unsure (1)..(328): unsure at all n locations
gtattgactgtatattgatgtattctttttttttaagtacttatctttctgtcaggggagtttcactaggtcccatgtcaaccctctaacatggcaactaaaaaatatgagttacgtaaggataagtcattcaagtcntttttctaattgaatccagctagtatcactttcgtacagtatccttcttatcacggtaatgcgaagtgatgaataaattaagaggttttttgtttcttacaagggtgattaaattgaatgagtttataataaactaaatattattatcttaattntgttttgtgagttgtacttcatatatgcaacttaa

SEQ ID NO: 44437 - DNA, 480 bp, Glycine max
  unsure (1)..(480): unsure at all n locations
actaagcttatccctccattactaagatctgaccagcctccatatnttgtcattaaaattctggcccacaactggttgtgattagaggataaagcccatacccatctacccatcaaagctgtgttgaatntagaaatatctttgaccccaaggcccccatctccttggggagacatatgacatcccacttcacccaagggattttcttatgcccttgatcacccccccacaggaagttcctttgcaaggaaacaagtttgagagctattcttcgtggaagcttgaaaaaagataaagtatatatgggtagagcagtcaggacaattgattagagtaacctttccagccatagataaaattttctgattccatttagatagcttaagcttcatattgctgatcagagggttccacaccaagctgctggtagaacttgccccaatgggaatgcccagataatggaaaggagtctncatatgt

SEQ ID NO: 44438 - DNA, 395 bp, Glycine max
acacgcagcagaactatttaacaaagaaggaatattttttttttacaagcttaataatctaaattcccttaacttatattccttgaccattttttatcttattatttattaagattttttgttcaaagactgcctataacttaacaaaatcatcacttaatatactgctctcattgataaattcaaagaaaatcttattttaaaaaaaaattagtaccacattactctaacaaattggatgtctttgtcaatatcactttggctaaatacacataaatagtcaatgataaattaaaacttgaatataaaataatatttgaacaacaaatacttggataaagtcgcttagaatattaaaaataaaagtgattttttcttaaacattcatatataaa

SEQ ID NO: 44439 - DNA, 412 bp, Glycine max
  unsure (1)..(412): unsure at all n locations
atctgtgcgactatgtactatngnntttatttatttatttattagtaatgataaggttcctaacatgcagattgaggtgatgcacattgcacaagatctcgtcgacataagacactaattcttttcctttatttatagaaaagtcgaatttgaggatctaacgaatatgtgatatgcttttttttttcttctaaatatacataaataaaaatcgaagttatttatatatgtagattccaattagtagttatactagctacttaacaccgaaagatatgaaaaaaatataaaataaaaggaaatagctagaagacaattcaatattgggtagccgaatttgtatccctatattgttgcttgctggttcactcaacatgttgttctccagctggactactattggcattatttg

SEQ ID NO: 44440 - DNA, 228 bp, Glycine max
agcttcataattcaatttcgagcgtctcaatatattacgggactcaatcagacatccgagcaaaacgttattgtcgtttggattagttcagagcttcagaattcaatttcgatcgtctcgatatattacgggactcaatcagacatctgaggaaaaaagttattgtcgtttgaatttgctgagagctccacattcaattttgagcgtgctcgaaggattaccggactt

SEQ ID NO: 44441 - DNA, 229 bp, Glycine max
cttgagctaattcatacgacaatattgttttgctcggatgtatgattgagtcccgtaatctattgagacgcttgaaattgaatattgaagctgagagctaattcaaacgacaataactttttactcggatgtctgattgagtcccgtaattcatcgagacgctcgaaattgaatgttgaagctctcagcaaattcaaacaacaataactttttacctcggatggctgat

SEQ ID NO: 44442 - DNA, 385 bp, Glycine max
  unsure (1)..(385): unsure at all n locations
gcttgagctcattactgctgccacacatattccttctaaacttgttcctgctccattcttcctttcaagccctatttgtttcccactctaacgcttcaaccatggtcatgttgatatcttttaactcatcacactctttcctgaccctagtgactgccgtcttcagcttctctttcaccactcttgtcttttcaagctctcctttaaaagcttgcacttctttactttccttaagaatatcagcctttttcccacttagactntttagctttgggagccaagttatcccttatgttctagacttcaaccacttgtgatagccaccaataacgccattgctacttccgctaagctccttaatctttcttcccactctattccatgc

SEQ ID NO: 44443 - DNA, 400 bp, Glycine max
  unsure (1)..(400): unsure at all n locations
tcttcaacggcgaaatgatcatagtgggtctgtacagaggcacatctgatcatctggcttcgataaacgcaaaaaaatgaactgcggcatatgaagagggtgaggatgaaggacacacccctgctgtgactgccattcctatacaaccaagttttccaccaacccaacaatgtcattactcagccaataacatagcttctccttacccaccgcccagttatgcacaaaggcgatccctagatcagccacagagtctgtctaccgcgcttccaatgatgaacaccacctttagcacaaaccaagagcaccaaccaagatatgaatantgagcgagacagcctatagaattaccccattacaatgtcccatgctgactgctcccatatctacttgataattc

SEQ ID NO: 44444 - DNA, 418 bp, Glycine max
  unsure (1)..(418): unsure at all n locations
gttcaaatgttatgtctggggatttaattagtgttttgttaaattgaaatcaacggacgtcaatatgtaatgctctttgttagcttgcataaatgacataattctaagaccttacttcaactcttttatgttttgtgttgattgtaactgacaaaatctatgaacattatacatctgattggggataattgtttgttcaacctgacacatgtatgttatacctattggatatttatcattgattgtataaaacaacacaagggcaagtagcttctgaaaatagaattgaaactcttacaacaacttgggggcctatttttcctacacagaatgctataaatactttaccaaattacataaaacactattatgtttgatctatacttcatanaaagatttagaatgctaccgcgccacn

SEQ ID NO: 44445 - DNA, 431 bp, Glycine max
  unsure (1)..(431): unsure at all n locations
ctgtgggtatgtgtggactnttttatagtgcaaaaaacaaatttctccccctctctntntttccccactgtttctaccttctggggttattgattatccatcaaaatctcttctttntaagtgtgtgggggagtttcacttggcttctttctcatggagtgtaatgaatttgtgtatggtgaaattctttgattccacagtcaacagtacaagagtggtaagcatcataagcataggctttgtttngtcagttattgcttcaaatgtgatgaatgatgatgacctttggttgctgaaaaaatgaatcagcgagaaaaataggactttgacttttgggttggttctnttattctgaatttctgaatgagcaaagtgtaatatttgtgggaattggttcttcattttatagagttgacttgttattttcttgg

SEQ ID NO: 44446 - DNA, 442 bp, Glycine max
  unsure (1)..(442): unsure at all n locations
gcttatgcgcctatntccttacaaacgttctcttgcacaagacatttaaccgataaacatgcgcccatntacaatcaaggcagcttcgttacctagattatttacacgtacctccaaggtgtatttgttacttacatcacacacatctccttggctaaactcacatacatgcatactcaagcattttggggcaccaaaaattgcacatgtgcacatcttggcatttctaatacctacatacgcaaacttcatgatgaatcttgactatctacacaataaggtgctacatatttaagcatatttttctttgctgactaaaattgcattcaaatataaaaggtattattttttgcaatatgtnttcttcatgcaacatannttatatatatttttgtgagacattntgactaccanaaaatatatatacatacatttcagtatt

SEQ ID NO: 44447 - DNA, 355 bp, Glycine max
  unsure (1)..(355): unsure at all n locations
tattgatggttacatcttagtctctatatttctatatgtacatcatgcatcatcatgtagagataggaagattgtttttaaagttagaaacttcttttgtgcataaaattctttattttaatcgattaccagactgttcgtaatagattacacaactttgtttgtagttgcagaaagattcntagttcggtttaattgattaccggttatccccaatcaattacatagctcagttgagaccatatctagtttttcatgagtctcttgctttaatcgattactcggtgatcgtaatcgattacttcgttctttgaagtgtttacagaagtgatcgagaaccaattaatcaaataca

SEQ ID NO: 44448 - DNA, 551 bp, Glycine max
  unsure (1)..(551): unsure at all n locations
agatggacgtttgatacatcgagaccgngattgataccttgaacagcccgcatgcatcttgaaagatcatggggttcccatcacatgttggtctaggtggcggtcgttttatggtgcacatcaagatatacacatgcactatagcgcgcataaacccaccattctctgttgcccacctccaactgagctcacgtagctccatgtagcacatatacttgtatctctcaacaccaggtccccatacattctcccaagcgttcccaacattcaggtaaaacaacatgtcaacagcacaaactatcacttccaagaaaaacatggcaaaggctaaagctcatgccgaaacacaactcagaatcacagtgttttccacttatagaccgcagaagctatttttcgttccatatgttaaccgtagggtcgactcataattgttactggaagtctttagtcataagcttactctctgatcgtaggaattgtatcaaactttcgaaccgatctgctcactcttgcacaccaacaaaatgcattttttgcctatgcagacg

SEQ ID NO: 44449 - DNA, 434 bp, Glycine max
  unsure (1)..(434): unsure at all n locations
gagctatatcacgtggtatcaagagcaacttcatcttgtaatgtncntttgctttctctatcatttggtcagtcaattcactttcattccttgttcttcatcttattctccatgtatctcttccattttcttatggtttggtgttttttaaagtggatccaaaaaaataaatcgattaaatcttagatctacacttgttcttgcatttctatggntcaanatttataaatctactcttgaatcatgtttttgtgttgattntaagttctataatttttcagtcataatcttcttgtactaaacctttaaatttcaatcttcttgcanaatattgattagaaaagaaaacacacaaatctaagtggtaatcacttaatccatgttgtcttagagtcatgtatagtcataataattgtcacattatgttctaagtt

SEQ ID NO: 44450 - DNA, 593 bp, Glycine max
  unsure (1)..(593): unsure at all n locations
aattaganaggcctatcgcaganacccgcgnngaatttgatanccccctcgnnactagtactgacanttgctanaccntccccatacacgattttttcgtcacactacacatagatatcttnctacacgctgtgtgatttctcatctcttgtgtcttctcactaaatacgttcccgcgaagccccattctcgctctttttcacttctctatcactgccaccgatcgaaatccagataatctttatgcaatggcagagccatcaaagaagagagtgggatcatccttcaccggtgccgctgtttgcccatcatcgcacagaccttctggaacaccctacacacctatttctccttttttgtcatctacaagatcatgctcactgtattcatccgatgattcaacgtgctacggatcctcttctcacgtcttttctagaattatcttagaccctcataccctaacgtacagtttctaatgatgaagcggttgattgcatccagcgttacagaatttgtgtctggtgattactgacatctaacgacctattttctgaatggtaagggttctacgtctatacaattcggatggattn

SEQ ID NO: 44451 - DNA, 396 bp, Glycine max
  unsure (1)..(396): unsure at all n locations
gcagcttgatggctattgatgtcaatgttntttctatttcactttgacaagacgcgatggaccgtgttgttttaatgaaaatctaaattgattcaaccccatgtcctgtctaaaatcgcaatacttcaaccgtgcatcattcgcatacatccatgctattcatggttgcattgctcattgcattctttccttgaaaaaaatgaacttaatcattgttatcaaaaagaaaagaacacgctttacgacgcccttaccgaactcgtgctagagctagagtaatgggtgaactataagaggtgcaagagcagatgaaggccgacatggaggccatgaaagagaatatgaccacaatgatggaggccctgatgaacatgaagaagataatggaaggcaatg

SEQ ID NO: 44452 - DNA, 106 bp, Glycine max
tgcttgtgaggcttctatcgaggctggatctttgagcttcaatgaggtcctttaatggtgtctctccaccatggagatgcagcggaagaataaggagaagagggga

SEQ ID NO: 44453 - DNA, 560 bp, Glycine max
  unsure (1)..(560): unsure at all n locations
tggaggcncattgagccttgaganccgnnnatgatacctcgttgtcgcattgcanctcngcgnnatctattacgacttatttgttattgattaccaangactcgttctaataaaatttatgatgaaacgtttcaaaaggctctgagtttttataatgtggattaagatatatacaaaagtcatacactcttctaaatgtgtcttcttgaccacactatgaatagtctataacagcacggctttgtattgcatttcaatcatctagaatacttttccaatcattacgttaccctccctcacaagccatagaatctctctgaacttcttcttatcctctggaccaaaagctgtctgaagttatcaggtttgtgaacctagaaaacttgtctgtacatgatatagtcttctactgccttatcgaataatattagctactgaccaccacctgaattcttatgtgtcctcctctcctgttccaaagactaaagactaacagtctgaatactctgtttttgcttttcttgacaataatcagtatatctgtccgagatattttatcg

SEQ ID NO: 44454 - DNA, 387 bp, Glycine max
  unsure (1)..(387): unsure at all n locations
agttgaaatccaccaatgatgtaagatcacgtttcagtnctttttcatatgagttacaatagatcgcgacatttagtatgtcaagattcatcatctaattgctagtattgtatatgaatgggaacatgtggaatattcgagtttattgctgtcagaatcatagcagggagaataagtttgttaaaaaaacaaaaatagtgctatttagtgaccacttatattttatgttgtgactagtgaccacttactagtgacttcagggttgattacatgacttactggttttcttggagtgttcaaaattatactaatatgtagagctggcacaatgacctgacccgatgggttgggctgggccagaaggctgcanataaggtcaagatgggc

SEQ ID NO: 44455 - DNA, 362 bp, Glycine max
tcgatgtagtcccaaaagaagcagatttgatcattctactaggacgactgataaaactggggcaaatgaagatggtgagacagatggagaaacccatgctgtgactgccattcctatacggccaagttttccaccaacccaacaatgtcattacttagccaataacaaaccttctccttactcaccacccagatattcacaaaggccattcctataacaaccacaaagtctgtctatcgcactttcaatgacgaagaccacctgtagcacaaaccaaaacataaaacaccatacaaaatgaattttgggccaataacctatatggttcaccccaacatccgttgacatatgctaaacttgat

SEQ ID NO: 44456 - DNA, 468 bp, Glycine max
ttgagccaaaatcctgactcaccatatatccttgacccaggttataatgtcaatccttaccctcggaagcaaaaaaagaatagaggggaaatttccaatcaaagaataagagaaggaaaatttccaatgaaagcaaaaaaagaaaagaaggaaaattccccaatcaaagagtgggagaaagcaaaaagaaaagaaaggaaaattcccaatcaaagaatgggagaaagtaaaaaaaggaagaagaagaaggaaagaaagctcctgatcaaggatcgaaagataacagaagatatgtgcagagaggtctttggaccggacaatatctgaacaatacagaattgccaccaaatgaacgataaaagaatgaaagggaaccacgacctaaaatagtcttctccctttgattaccaaccaaaatcccgtgcgctagcgaccctttttttctcgccccgcactaaacaaaaaaaa

SEQ ID NO: 44457 - DNA, 385 bp, Glycine max
  unsure (1)..(385): unsure at all n locations
agcttatcatatgtttgaatgaattatcccttgcaactagtttgatccaaatgaattgattgattgattgaacctgaagcctattcagttgtatcttctgctaccttattttaggttgtaggagagcatcatccacaaaagctgggttcaaagcaaatatgtcccaaatttgggggaggcactgggtaaggatggaaacggtcaaagaaaatactatacacactctgttaaaaaaaactataagtacaaatggaattaataagtgtgtatgctgcaaaataatgaatgaaagctaagtgcctatataaagggcaagtatatggtaggaatgatatgaaaagtgaaggttattctatggatgaatgctctcttanaacctatgctt

SEQ ID NO: 44458 - DNA, 405 bp, Glycine max
  unsure (1)..(405): unsure at all n locations
aaagtagaaccacattgaataggttatatgatgcacaattaatataagtttccaactaaagagttgcatagaaaaccttatgaaggaaagaaaaatattgatcaaattgctcatacttaccaatgcaatcttcctcaagtgtcatttttaagagcctcttaaatgtcagtacgcagtttaagaagatttttgtgtgataatcgatgtgttttttttatcattntattgcacctaaaatattagaagcgttcagaagaaccaattgtatattgaactacaattgcatattatgacaaaagaaaaacagagtatacttactctctaatntataatactaacaattgcaaatatattgatgtaatgaattgattttcanaagaaaataanaactaaattgtcatgtca

SEQ ID NO: 44459 - DNA, 370 bp, Glycine max
  unsure (1)..(370): unsure at all n locations
atagataaaaaacatgaagttctaattcaagatgttttctttgttgcatgggcataatgcaatcactctatgtctagcaatgatgttattaagatgtccctacctttgagttctactaaaaattatcctctctcgagcgactaatctctaaaactgatgcatataaaaccttcaatgtatttctactaaggattaccctctttcaagcgccaaacccctaaagatgatgcaaggatgaagcatataatacatttgttggcattttaagcctgccaagccctaactaaaggggtgtagcctttcattgtcatgagagacttttacactntaaggggttgatattgattgaagaagatggatggatagagga

SEQ ID NO: 44460 - DNA, 473 bp, Glycine max
  unsure (1)..(473): unsure at all n locations
ngtagctgaagttcttgagaggtgctgaaattggttaggcattatcaaaagacatattcccctgctttcatttactggaagttcaaaggtacttcatctctctcttatnttgattaaacattgtaatctttatttttttttatgtgtttacaatgtacattacattttcatgatagtatttttatgttacgacctctattagttagctaacaagtgtaatttattataattntttgtaattcattntttttgttggttccattggtttttattctaaatacctattcttattttataacatatatggtagtagctgtaacatanaaattggtattgaatcttaagttatgcttcttcccctaccaattattcttttagttagaataattattatnagtnttcttcttaattatattataatttatattattcttaatttaatagttttttaatacacattatactatgttata

SEQ ID NO: 44461 - DNA, 411 bp, Glycine max
ctcgtaccgcgatcctttagtcacctgcggcatgcaagcttgtcattgagcatgttaacgaggtcttccaagctagaaagacacatatgtagaagtactaccactaggtcaaactcttggagcatttcaaaaagaaagaactggtccatgttgataaggaataaaacgaccaagctgatgctttagcccacctagtgtgctgtaaaagaccaagttagcaccagacatttatccaagatgccctaacctcccctaccaccgatgttattgagggttgctcaagtcggattgctcccagcagatggatgtctcccatatggaccttcttggtcacctacgccttactccatgaagtggtaggagccgaaaaagtaagacaccaagcttcacactatgttatcattaacaatg

SEQ ID NO: 44462 - DNA, 411 bp, Glycine max
  unsure (1)..(411): unsure at all n locations
tccacacatcatntttctggaattgtctttgaatagccatttatcacctactgctgtctttccttgaggttctagagttgtaaactctatatgccttagatattttaaagtatccaagtattattccattatcacacttagagtcaaactttcccaagttgtctttaatatttagaatgaaacattgacatctgaaaggatggaaatatgaaatgttgggctttcatcctttccacagttcatgtggagtccttttcaaaataggccttatataaattatgttttgtaaataacatggagtattcacggctttagcttgtaagtgtaaggtcattaaacatggntctggccatttcttgcaatgatatattctntctctcaatcacaccaatattgttgaggtggtctatg

SEQ ID NO: 44463 - DNA, 264 bp, Glycine max
cctttaatggtgattttccaccatggagatacagcgaaagacaaaggagaagatgtaagaggcggcgccttccactaaggaataagccatggaagaaggagcttcaccaccaagatgatccttggataagaagcttggagaggattcttcaatggaggaatagaaagatggagagaaatagagacgggggagcactaaattgaatgaagataaagagagagaagtcgaactttgagttgtgtctcacaagactctcattcatca

SEQ ID NO: 44464 - DNA, 383 bp, Glycine max
  unsure (1)..(383): unsure at all n locations
aatagggggagaagtgaagaagataagggttcatccccttatgcacttctctctctctcgaaattgctgaggaacattatttccgtgaagaagatctaagccgatgcgcgttcgtaacggttccgtaacgtttctgtgagtaattacgcgaagattctcgaccggtcttcaagattcatcgttcgttctttcgttttcttcagtcttcaacgggtaagtacctcaaaccgagcttntaattcattctatgtacacgtggtggtcccattttggttcatgttttttaatctcgtatcatttgcttttatcccccttttgacggcttatgccattatgtagtcattgtcgctaatctaaaattaagtaattttcaccgtcgtttg

SEQ ID NO: 44465 - DNA, 631 bp, Glycine max
  unsure (1)..(631): unsure at all n locations
atctctttagaatnttaacactcgactatctaactcgtattcgtacttactngtcacggtaancnncactaaggatgtggcnanattggataccttcngaagatcccccngnnnnttnnnnnnnantttgagtaccgttgctagnaccggcgatccttagaatcacctgcngtcttctagctattaagatgtgctcagtcgngtaaacattatctatatattggtagtagttcatgcttacgtaaccacaagctgcaataatgtgtgaacatggatagtgaagtgctaaatactatccgcattgacaataatggtcattcaagttcactgcccacttttgtctgccacgttgcgtgatatgattgaaggtcctctctacttcaaaccttgtcgagtgaatatcatacacgcgaacgatgtgtgaacaagcttgttcttgattttatctaagttcataacaagcttagaataatatacttggccttcattaattgtcggtgggttggcgaccttgatcaactagtacttncacacctatatatgatgattgctaacgtgttatggtttgtgcgacactcctcaaaacttaatatacatttgacggatggtgtatgtgtcatataacctcttg

SEQ ID NO: 44466 - DNA, 446 bp, Glycine max
  unsure (1)..(446): unsure at all n locations
tctctgccntagccagctcaaggagatagccctcatcagatgttaccaaattcctaacaccctctgagcccaagatctcattcctcagctttgagatctcagactctgacagtgacctgtggaggtgcacagatattgacatcacatttgctacctcaaaagaaagaatacctatggtttctttagtatctgacctcttgtggctctgttttctctttgtcaaagtttcaagaagaanggcatgcttgagattggaacttacctggttacccatctntacaatccaagcttctgcaaccatagctgcagccacacacacactnttttctaaatggggtgtcccaaaaactctgaaatttccaattctacaaccccaaatgtgtagcctgtgggaacatatgataaccacagtgaaattcagacaccagaatagatatgctttgtga

SEQ ID NO: 44467 - DNA, 489 bp, Glycine max
  unsure (1)..(489): unsure at all n locations
gcttcctcggggccattcctgcgaaggctatacattggaaagttagtttacaatatatataacaatcattacaaacaagggccaaacaacacttctcatggcacgagtgtcaacatgcactatataaaataatcatattggggtcgtgctattttatgacacatacgtatttgcacacataaaaattttgtgtgaagcattttacgacacctatccatgtacatattntttgacaaaccttttcatgctacatcctatatatatacacacatttnttggaaggcttcttttgttacctactcacaaatacacatatnttgagaaacacttttacgctacccatccaacactttgtaaggcacttcatgctatatatattcatattatgcaaggcattntcatgctatatatattcatatgttgcaaggcatnttattcaacatattgcaaggcatttccatgctatatatattcacatatatacatacc

SEQ ID NO: 44468 - DNA, 428 bp, Glycine max
  unsure (1)..(428): unsure at all n locations
atgacaactgtccctattttatttttttattttttggctaaataataagtttataacctaaatgtagcctttctgtangtaaggctgcttacagttaccctcccctaacccactaggtcacccattttatggggaagtcatgtttcaccattctaatgttatgacatgtcacaagattgactgagtactaaggacttataaagacttcctaatgaaggaccaccagtatgatttgagccaagacactttttgttgatgctgtttgatcttagcagttgagccaacctccttggcaaacagattattttgacatgacagagagtggtggtgaaatggttggtgtaactgggaatctcttcctcatgtatgcaaanggggaaaatgtgaaccttgtttgcaatatgcattcgactatatgaatggtgggt

SEQ ID NO: 44469 - DNA, 370 bp, Glycine max
  unsure (1)..(370): unsure at all n locations
ctgtgctagagagaaaaacatattatctaagtgaataaagagccttttctatggcaaaattgggtgttgaggggtcaaattttgattcggtggaattttatgtgtaaattcagtttgagcaagtttagcttgaggttatgggcttgtgtgaggtgagagattgctttgaatttacctcattctaaatttcacctttcaaacctagaaaagccattgaatggaggggtgttggacacctagattctgtgttgctgtgctttannagcttgaattggtttagacatgatagatacatgatttgggacttgtaggaattgatttgggcaagattggatgggaggaagtgtgattntcgaaatctgcacttatg

SEQ ID NO: 44470 - DNA, 472 bp, Glycine max
  unsure (1)..(472): unsure at all n locations
tgagccaaatcccaacttatcataaaaccttgacccaggtgataatgtcaatccttgttctcggaagagaacaaaataagagaaaaggaaaattcccaatcaaagagtgggagaaagtaaaaaacagaaagtccccgatcaaagatcgaaagaaaacataagaaacatgcagaaaggtctttggaccagacaatatctgaacaatacagaatngtcaccaaataaacaagaaaaaaggaaaccacgacctaaagtggccctctccctttgattgccaaccaaaatcctttgcgctagcgactntctcgccccgcactatacaaaaacagaaaaggaagaggcaaaaacactcaaagccaaattccccacctaanaatcattctcaagaaagtcctattgatccatgatcacgcatgtaatctttgatttgataggaaatgatttgcanaatcaagtcatggcatatctatga

SEQ ID NO: 44471 - DNA, 260 bp, Glycine max
  unsure (1)..(260): unsure at all n locations
cccatcaatttaatgaattttcaatgttcgagaagtgataatgagaattgggttattttggggtaaactctcatctcaatcaagtctataacattgatttagactcgctcaaacttggtgtaatgagaaaactccaccgattcaaatattgacctttcaacacccaattcacccaagagatgactcttttctttcacattngtcactcaattttttcttatatgctctgcccaagcttanctataagtcctaattgatat

SEQ ID NO: 44472 - DNA, 369 bp, Glycine max
  unsure (1)..(369): unsure at all n locations
tgaagctttaagtgtgattcctttctttntcttatcattctcctcatgttgattcagtctcattagttccatttcgtgttcctataactttccaaataaagttgcaagagacatgttagaaagatcccttgattctgtaatagttgttacctttggttgtcattccctacttaaacatcttagaactntattaataagatcctcattgggaaatatctttcctaatgatgcaagatgatttactatgtgtgtgaatctcctttgcatatcatgtatagtttcatttggattcattctaaacaattcatattcatgggttaaggtatttattctagaccttttacatctattgttcttcatgggtacttg

SEQ ID NO: 44473 - DNA, 453 bp, Glycine max
  unsure (1)..(453): unsure at all n locations
ttgagccanaatcctgactcaccatataccttgacccanggtgagaatgccaatccttactctcggaagcaaaataagaatagaggggatatttccgatcaaagaataagagaaggaaaatttccaatgaaagcaaaaaagaaatgaaggaaaattccccaatcaaagagtgggagaaagcaaaaaaaggaaaagaaggaaaattccccaatcaaagagtgggagaaagcaaaaagaaaagaaaggaaaattcccaatcaaagaatgggagaaagtaaaaaaggaagaagaagaaggaaagaaagctcctgatcaaggatcgaaagaaaccagaagaaatgtgcagagaggtctttggaccagacaatatctgaacagtacagaattgtcaccaaatgaacgaaaaaagaaggaaagggagaccacgacctaaatagtcttctccctttgatt

SEQ ID NO: 44474 - DNA, 330 bp, Glycine max
attgatggacagttagcttagctataatgaagcaacttacaagtgttgtctgcatatataaatactagtgaaatgaaatgatactactagagcatataatgaaaggtatgataactttagcttcaatgaaactgatagttacttttcattatgagcatgcataaacgaatcaggatccgagaaggttatcaaaccaaatatctgaatgagagagatggatgattctggtactctgccaacactattatttatctaccacaatggatgtcatgattaacatgtcgagccatggagatattaaatgtgataacattatatcacctgatgttt

SEQ ID NO: 44475 - DNA, 476 bp, Glycine max
  unsure (1)..(476): unsure at all n locations
atactaagctcttaccctttctgagtacattgtatatctaaacattataatctaccaacagacttgtgattntgcatgaatataaattacttagctacaaaaatgaaaattgnggctctattatgctaatatcccattgttaacaaaggatcaaactaataagttcaacattcttttttttttttattacaaacaacactttatgttgtatatactttattctataacctaaaatggttgttacacccacgttcaatcttattccattttgtatgaaatagaaagagtggcatagtaaccatcaagaggctcataaggttgccccaacaattataaggcgagaaaatatcttcaaaaattcattcaatatcatatttgactctacattttgtttggaggaagatnttccaacagcgcgtcatgatcattgagggagaaaaatctcatgaatccggcaaataataaaagaatgagtg

SEQ ID NO: 44476 - DNA, 357 bp, Glycine max
  unsure (1)..(357): unsure at all n locations
aatcatcaagatatgacttagtgccatcatagaaagggaatgtcaaataaacaacctaacaccgaaacacaacagcaccatcagacaacatataagaaaatgaatacattagttcttcaaggggtgtataaaagtatatgtttaaactctctagttaaaaggttcactgtctaacagtagacctacagtangctagattttcttctataactgattcgtgtctcaagttagttattgagtctagtcagtgctgagtagcttctctagtaccctgtgtagcctataaatatctgtatgatcctccccacttaagaaataaatacactccaagctagtcttagtttactgtattctgtt

SEQ ID NO: 44477 - DNA, 468 bp, Glycine max
  unsure (1)..(468): unsure at all n locations
tgaaacatcagccacccntttgctgccgcttctcaacgtgatgacagtgctgctgctgctgctgctagcaccctcctcctgactgacatcaacaaaagaagtcttaatccttttgaaagtaggtagtttctctatagcagcccacttggactgaagctccttatcttcctccacaaaggaatctgcatctctctcataggtcaacacatggccttgggttcttcctcttggagttaactccattggaattgaacttagttttgcttgaagcagctactactactggagctgttaagccttaagcttctcacaatcactgatatgatcttagaagttgccagtgattgttacagattgtgagaagggagaaagaaaagtcttcacacagaaaacaacaatagtgtgtcttatattctttctcctttacaacaacgaaagcagtacttgctgaagaagatcctatagcag

SEQ ID NO: 44478 - DNA, 353 bp, Glycine max
  unsure (1)..(353): unsure at all n locations
aaatatacagatttgcggtattacgtaatctaatattgagttcatcagattcagagcctgtttccaaagaacatgttataataatccttgggttcattaaattaatcatttgattcctataagtagtacttaagatttaatccatatacattcttattagtacacatcggnaccttggattactatgttccttaagttttatccttatatcgatgtataaggaccaaatcttaactttgctttcatacaagactaattcttaatgaatatcccgataggactaactaatttaaactctgatttgtaactccttctattgtatgggacatgtcttcaatgtcttctcaaatatc

SEQ ID NO: 44479 - DNA, 354 bp, Glycine max
  unsure (1)..(354): unsure at all n locations
tctatagagttctacactactctatagttctctaggacgttctataatattctacacttttctagaaagctctagaattttctagaacctctccaattaaggagggatcccaacaaatctccccctcccgacttaattggggggtagtagcaaaccggcaccttggataccttatgtcaatgtgctttggtcatcatgcaaggatngcttctcttcttgcatgactcttctccactccaccaattcataggtgttattctcatgcaaggattccatctcttcttgcatgactattctccactccaccaattcataagtgttanttctcatgcaggattgcatatcatcttgcat

SEQ ID NO: 44480 - DNA, 282 bp, Glycine max
  unsure (1)..(282): unsure at all n locations
ccacatattcataacccatcaacaaatataaactacattataatccccaaaatgagttatttcatgaaccccacagatgctctatgaaggaaaacacaaatatagtcaaagggatgaagaagaggtgcttaattacccctttatggcttagccaaacaacatcanaaggagaggagaatggtctcctttgataaccatcaccaaacctcaagcttctatgatttctcttggagaaacagaagaaaagaaacagagactcacttacaaatgcaaatttaaatt

SEQ ID NO: 44481 - DNA, 482 bp, Glycine max
  unsure (1)..(482): unsure at all n locations
tcataataaaaggagctntccagtccctcctcataattgtaatgtatgaaataaacaacataaaaacaccctccataaaacatcctcctcgaaccaaatatgccaaagggaattatccccttggatttaatgagtattcaacagaaaagtagccatggctgggtcgtattcaatggaaaatccaaccaggaaccaaacaacataggttataaaacaaggtaattaaaaaaatgatgacaattagcttagctgctctgaaattaaagatgatattctactttcttcaccttagaagttcttacataacacaagccatgaaagccgcactggttaaggcaacaatcagcaatccctaanactctacattccaaatttatatttaatttcccaaaatcaaaaagcatacatacccaactttgaacgatcagataattactaagctgcttctagcctcctacaacacataacatgttaacttgaag

SEQ ID NO: 44482 - DNA, 418 bp, Glycine max
  unsure (1)..(418): unsure at all n locations
tttgccggcttaaggatcgaagtgggttttatataaggcaaatttaattatcctgcttttgtgaatatgaagcctatggcaaatggtaataataataaggagggatgaacccatgttgtgactgtcgctcctacatggccaaatttcccaccacctcaacaatatcaatactcatgccatatcagcctttctcattactcaccaccgcttcagccaagaacacccaattatccacaaaggccacccctaaatcagcctctaaacccgcttgctacacatcccataccaaacacctcccttaacacgaaccaantcacctactcaatgaatgaattttccaaacaagaagcttgtagagttcaccccaattccaggtgtggtatgctgactatcttccatatctactcgattatgcaat

SEQ ID NO: 44483 - DNA, 417 bp, Glycine max
  unsure (1)..(417): unsure at all n locations
agcttattactntgagaactaattaaaattgtatagtgttatttgtaagacaactcatacaagcactataagaccaacaatagttaacacaagtgttaatgatttatgtcttttaatcaagtaattcaggatttgaatcatgattgacaattgggtatgaaataaattgtgttgagagaaaaatactcaccttgtgtgtgcttatggttcctaacaaagatttgtcactactcttgacgaaacaatnttatactaataccatgataaaaaaaaatacaagcactaaaagaaaaaaaaacaacttgcaacaaattctaattatttgcatttgattcatataatgtgcaatcactaaaagaagttaatggttatacaccgatagataaatagtttacattgtattcaatacaatcacca

SEQ ID NO: 44484 - DNA, 353 bp, Glycine max
  unsure (1)..(353): unsure at all n locations
catctacctcactattacaatgccagatatttcctttgcatttggagtggtgagtcaattcatgcagtcttctcataatgatcattgggatgcagtaattcgaattntgagatacattaaaaggaccccaggacaaggactactctatgaagacaaaggaaacactcaaatagttggattttgcgatgcagattgggtatgatcacctattgatangcgttctatttcaggatatagtgtgtctattggaagaaatcttgtctcatggaagagtaagaagcaaaatgttgttgcaaggtctagttcaaaggctgaatatagagctatggctgtagccacatgtgagctgattt

SEQ ID NO: 44485 - DNA, 305 bp, Glycine max
gatattatttcatttattatgactaggaatgaatgtcatttttgaaaaggatgaaactcatattcaacaagttatgtgtttgtggtggtattctctacacaaaattgaaatttcaccttagtaacctatttaatctttactgtaaacatttcttattgttgagttgaaattatgattctgattatggaaggaaatctaaagtacttgacaaactacatttgtgtttttttaggttacaaaggtgatattctaattctgattggagaacaacatcaatagtactcaagacactgcatcctatgttt

SEQ ID NO: 44486 - DNA, 456 bp, Glycine max
  unsure (1)..(456): unsure at all n locations
tatgcgcatacttctttacgaacgttcacttgcacaagacattcttataactaagaaaaatgcacccctgtacaatcaatgcaccttcgttacctagattatttatatgtacttccaaggtgtatttgttacctacatctcatgcacttccttggctaaatttacatacatgcgtactcaaagcatttggggtaccaaaaattgcacatgtgcacatctccgtatttctaatacttatgcatatacaaactttgtgatgaatcttggatatctacacaataaggtgatacatttcatgctttattcaagtgtttttgctacctacagccgcatgcaaattcaagtatattatcctttgctgactaanattgtattcaaattataaggtatttttgtaaggtattttctttacataacatgcaacatatatatanntttttgtgagacgttttgact

SEQ ID NO: 44487 - DNA, 427 bp, Glycine max
  unsure (1)..(427): unsure at all n locations
cttgacagtgcctgatttattgaccagctattntgcaccctttatatctctacagaaccaaatcaactctaccattntaacatacttcaaacagcaatgccgaacagattttattagcaagatagaatggttgctttcattaaacatccttgtcacctgtggatggttttgttactatgtaagtaagctaatcccgagagaatatgccttgtaaaattgcaaaccacagattctgtcatagctccacaatggtcacgcataaatttactgattgatcccgggtagacatactccatatatatgtacatatgatcgccaacctgaaaatacaaatgcttcaaaacgtcaatctaatttactatgacaaatatccttaacttccattggtgtatcgatatacttgaacaaaactaacaacaaaaataac

SEQ ID NO: 44488 - DNA, 297 bp, Glycine max
caaagctcgcttcgagaatcatcaaactcaagttcgattcgattatctgttgagatatctactagcgttcatttagctggttccatcttatctagtgtcatgtcacacttagtctctgattatggtattcttgagcgatctttattttttctcattcgcaacagcaccagcccatcaagcaagtcatttggaggccgccgagagccaactttatttaatacaacacgaatggtgcagtgcatggctgctccggtatggctggtagcggttagagttttataatcagagggaacttct

SEQ ID NO: 44489 - DNA, 430 bp, Glycine max
ctttgctttttctatcccttatttcatttatgattttgggatgctaagagatgcattatatcaactaatttcaaaggaattcgtccgttgggtaaaacaattgttcaatttctgggataaatcttactgaactataactctggaagacaaattgaaagaccgaaattcctacgtctattaataatttcttagtataaataatttcgtggcaaacaaacctgtttagattataattgctgcatttagctccataaactgtgaacacaagaaaaattctcttgaatctgttccaatgataactaaaatgtgatggctgagctaattatttacccttctaaattcaatctattttctctgaattcgcctcgtgacgtgttctgcaatttacatgataagtccttcaaatggaattccgcattattggataaaa

SEQ ID NO: 44490 - DNA, 341 bp, Glycine max
atgaagaccttcttaattattatgctatcatggaacatcctggtgtgttctttgtagaacctgacattctcatacactattaggcggatcctcatctaactcactcagtcgctactatctttcctcaccagcttgatccataaagaagttgcaactcttcactgcccaatatgctttggctcatttcaactagaagatgacatgcctttccaaacacaacccgataatgagacattcttatgggtgctttgtatgaagtcctatgacccaaagaacatcttctagcctggtactccaatctttcctgctaggctgcacaattctcgctaaaattctcttta

SEQ ID NO: 44491 - DNA, 478 bp, Glycine max
cttctacaattatatgtaattctcatgctgcttatccatattgatctatgacattgagtgtattgatgtagtggtcatcagggcttattcacatatgtggtagtgacaaaagcagcggtagacccattattgatacataagatggactataatgttaaactaaaagtctaaagataaatgatatacggatgtgcacctaaagacatatggtataaatggtataatatgtagcccaagtgggagattggtggaattttatattccgataattaatatgggctaatattataaaacaattatattattcatttatcattagtggatattattatatgtgatcaaattaagtgagtctgttagactatcaaataagatgatatgggctctaacaagcagatgttaatgtatctcattatggattaatggagactctattatggtaacacattataagaccgatatggtgtccaatataccg

SEQ ID NO: 44492 - DNA, 275 bp, Glycine max
  unsure (1)..(275): unsure at all n locations
gcaatcttgaaattgaacaacggaagctcttgagttactcaaatggtaataacttgttacacggaagtccgattcaagcgcataatatatcgagatgctcganattgaacaacgaatgctctcgtgaaattcaaaatggtcataacttgtcacacggaagttccattcaggtgcataacatattcgagacgctcgaaattgaacaaccacagctctagagaaattcaaatggtcatatcttgtcaaacggaggtccgattcagccacataatata

SEQ ID NO: 44493 - DNA, 375 bp, Glycine max
acttccgtgtgacatgttatgaccatttgaatttctcgagagcattcgttgttcaatttcgagcgtctcgatatattatgcgcctgaatcgaacttccgtgtgacaagttatgacaatttgaatttctctagagcttccggttttccattcagagcatctctaaagtgatgcgccataatcggacttccgtgtgaaaaggtttgaccataggaatttctcgagtgcttccgatgttcaatttcgagcgtctcgatatattatgcacctgaatcggactttcgtgtgacaagttatgaccatttgaatatctctagagcattctttattcaatttcgagcatcttaatatattatgcgcctgaatctgacttccgt

SEQ ID NO: 44494 - DNA, 384 bp, Glycine max
  unsure (1)..(384): unsure at all n locations
gaagtcaatatttctgccaatgactatgatcatttctaccttacctattntccattatggccttggtttgtgtgtctagattgacaccagagtcctaaatagacaatatctttcattgcaagcttagcaacagtcccaaaacccaatttttcccgaaaccaagtgtcatgatttctatattaccaattttactagctgttaatgttgcatcatagttttgctatgtcatctacctttggtctcatctctttaccttacaatttagtcaattctatcattaccctttttcaatatacgagaatagcaacatgcaaacatatctatatccagaaagttcaccactaatagtcagcctataatccataaccaatgagatgcctcata

SEQ ID NO: 44495 - DNA, 457 bp, Glycine max
  unsure (1)..(457): unsure at all n locations
cattcaataactgctggtaatcgattaccatatatgtgtaatcgattacacagtgcaatatttgaattcaaattttaatagctgttgtaaatcagttttggccactggtaatcgattacatcctctggtaatcgattaccagagagtaaatttctttgaaaaagactttntaagttaaaattcttggccaaaccttttgctacttcaattggaattcccttcctatttaatataccctttctaagactctagagactgtcttgatcatccatcttgaatatctttaatttctttgtcttgaataaagctttgagacgcatgtgaacctttggcatcatcaaaacattcagcttgatcctttgntctacaatctcccccttttgatgatgacnatccctganatcaagacaagctatatacaagatgatagcacgttcacacaacccttacttcccct

SEQ ID NO: 44496 - DNA, 542 bp, Glycine max
  unsure (1)..(542): unsure at all n locations
tgcgcnnaattggaacatcgagacccgcgaatgataacatgtatgaccgcgattnttanatnnatctgcgcgcatgcgaccatgttttttatatattgtcctaagaatgtcttattggcaaacataagagatacgataagagctgcataacaggtctgatcatacttataaatcactcgaatacacttatgttgcctttgagaaccacttcaacgatatagaaaggaacaatgtgaattaagtttaattttaccatcaggtaccggaaaactatttaactggtaatattgtttgacatataaagatgatgaatacatcatttcataatgggtctggtgcatttgttaccagcgcattcgagaaagatatgaatataactatatttgcgtctgttatttattagatcaggaaaagatttggaatgacctgtgaacaattccactgtaaattaaaggaccttacaagtcgaatctgatcactaaggtatcacattgcatctgcaaacaatatgctgctaaaaatatgggcacggtcacggtgcg

SEQ ID NO: 44497 - DNA, 445 bp, Glycine max
  unsure (1)..(445): unsure at all n locations
tcttactggttgttcaacctatgtcatcgtatagtgtgtcttaaatnaaatctaatatatacttactacattttacataattaagaagtacttaactgttgattntaccttaagttacatcagattctggtgcagataatcttattaatagatgcttagattattatgcaaccattttttacaattagcttacgaacgattctgaatggtttaacttttaaataggataggataggatacgatacggtgaaataatagatacatagatatatagatatagaatgtaggttttggtaactactattttgtaaaggtgactttcattttataatcagttctaataggtctgtcgcatctccatatnggtatcgattattatgaaatgatttgcaagttagtggatgcatgtgtgtgtaatagactatgttgcttagctaatgcgtaa

SEQ ID NO: 44498 - DNA, 582 bp, Glycine max
  unsure (1)..(582): unsure at all n locations
cctctccactcttactatatttattatgttanattataattactttcacaagtggagtctttagccttcanacccctttgaacactgttgaccctatctacaacaactgcagatgcaactctttattatacaaaatgatctctctatacccctgtttacaagtggctcaatatcttagaaggggggtgtgaataaatattcacactatttccctaataaaagagtattgcttcttttacccaagtaatgatatcccttaatgacaatcttcttaaatattaatactacatgaaacaaatttgaatatgtatataaagcgttacttaatacaggagattaaaggaagagaaaaatgcacactccagtttattactggtatggccacacccttgtacctacagtcagaccccaaactacccgctagagagtatcaatatcttggtaattccttttaccagttctatacacacnangaacaatcctcctttgttgttagaattcctttacaccagagactcactatctcttaattcctagatattggatgaagagacgaacactctctcttaagagatgatttcg

SEQ ID NO: 44499 - DNA, 354 bp, Glycine max
  unsure (1)..(354): unsure at all n locations
gttggtacgatgatgggaaagcagtactccttgggcctgtattgctacaacaaattaccgaacaagtgaaattgattcgagagaaaatagaagcatcccatgataggcagaagagctattatgaccgaatgacaaagccattagattttctagaaggagaacatngtgtttttaaaggttcttctgtaactggagtcggaagagctctcaaatctatgaagctgacgcccaagtatctgggtccgtatcaaattttgaagaaggttgggcctgtagcttatcatatcgctttacctccgagcttatcgaatttgcaccctaatgttcatgtctctcaactgaacgatacaaccc

SEQ ID NO: 44500 - DNA, 436 bp, Glycine max
  unsure (1)..(436): unsure at all n locations
cttcttgcatgaatcanactggtggtctttagaactggatagtatcaanattagagatagtgcataagaatcctatgttaattacagatatatatataaccactagatagcgatagtcaatatatgtattacaattagaaccaatagaattcaggttacagttgcaacaaagtaaatatcctcatccttcacaagtaattcgngaatgaagaaataagtaaattaaacaatttcatttcttaatgactaattttatcaatttaatgtcaaacttcaaatccccaacatgacatcatggaaaacatgtagatcacagaaaatcactggtaatctacctagcactaatttggtggagaacttggactggttggtgacttgttcttttgagttgaaatacataaggtgtgttttgctcaaatgacaaatatttcatatt

SEQ ID NO: 44501 - DNA, 441 bp, Glycine max
gtgacttgagtcatcaagagattatgaatatatgaccacggtttgagtctcaaaaatcatcaatcatactggaatcatctatcttttacatcatcttctttcaacatccttgaatcaatctttaacatctctcaatatcttctttcatctctttcaacactttcaacaaaacattctaattcatttctcttcatctttctaagagtgtttgctcaacactttctcttacaagaacagttatttgttcaaaaacttgtgctattcatctttttcattctcttctccctttgcccaaagaacgaaagactaaccgcctgaattggtttgtgtctctcttctccctcacaaaatattcaaaggactaaccgcccgagaattactttgattcttcccttccccttaagcataagacttcataggactaaccgcctaagatatctt

SEQ ID NO: 44502 - DNA, 425 bp, Glycine max
tgtatctttgagcgttcatgagatccgttcatggcgattttacaccatgtggatgccgcggaacacaaatgacacgatgtgagaggaggcgccatccacttaggaattatccatggacaaatgaacttcgccaccaagatgatccttggataagaaacttggagagaatgcttcagtggaggatatgcctgacggagagaaagagagacggtggggggggcgactcttttatatgcttctaacccgttaacaagggatcacttgatttccgtccgcactgatttaagatataaaaatacaacatgttaatctcttcaagggaaattcatgtaaattctttaatatcttcagaacacattcttataagcgcttgtgatatttactagaagctataactttctaacatcctctttatgaaagttttt

SEQ ID NO: 44503 - DNA, 283 bp, Glycine max
tcaagaacacttcatgattacaaagatgatgatctctagaatcaaagaatgagttcaagattgaatcaacgtcacgttcaagactcagatggaaggtgcattctagaatcacgaatcgagtttcctgattcacgttcccagaatcaagatcaatagttacgactccagcttctagacatctgatcatgactcgatcatgacttagttttactagtcttttcaacaactgagtagcacagtgaatttatctcacaaccttataccacaaagtttttactctttg

SEQ ID NO: 44504 - DNA, 449 bp, Glycine max
  unsure (1)..(449): unsure at all n locations
agcttaacagttaatntactaattaaatatttctaatctaataagtcagttaacataaaaaataataattntgtaacttttaattaatttttcaattttgatcaaaataatttatcaattattttgatcaanagttactatagaaaatagataaattaaaattaaacacatttaaatactgtcataaaatatatcctatnttttcttcaatttatttttaattacgaggaatttatattgattagttntttccttccatgttcttctttatttcccaaataaggcaacatgacaccacaaagcacgtaaattaaatgataaagaattattatggtttaaccccgataattcannatccgaaaattagctatgactactacaaagttgggtggaataatattatttatccttaaatttactaaatttacttattaaaaaagcattcattt

SEQ ID NO: 44505 - DNA, 472 bp, Glycine max
  unsure (1)..(472): unsure at all n locations
ataattcgatcaatgcatggaagctgtgaaatggaatatgattaggttgtgatggataagttgcaatttcctctattatnttaatntgaagaacaaattactttcttaacctgtttcttttttggaatatctgttgtgacaatattatgttttgtaacatcccaattttctcaggttgggaagtttgatgtagaaaatgtctatngttgttgatatgcaatgtagtagtattattcttagtgtaatcatacatataagacatagaaccatcatcattagatagtcatgtgacctagattaagtcttgagtctaaggagtagtggtttagatacatagagcccttagtcaaattgtaacgccctgcctcgtaccataattattcctcatgaagaaccacaggtacttactaacaaatttatactattttcacgccagtatgtagtatgaaacattggctccaacaatacactg

SEQ ID NO: 44506 - DNA, 106 bp, Glycine max
attcgcaggggaactattcatagatgaactgaactcccatgaataactagtgtttctttcggtggaaagtcccgtggacgctgagaaacccatgttgacccactcc

SEQ ID NO: 44507 - DNA, 220 bp, Glycine max
catgttcaaatttgagcatctcgatatattatgcacctgaatcgggcatctgagtgaaaaggtatgccatatgagttagccgagagcttcgctgttggatttcgagcgtctcgacatattattggcctgaatcggacattcgagtcaaaaggtatggcgcgttataacttccatgcgcctccatgtttaattttgagcctctcgatgtattatgcacctg

SEQ ID NO: 44508 - DNA, 430 bp, Glycine max
cattatcttcatgattagataatacacatttcataccagtgcatgacttcaagtcatcaaagtaacgatctttagttaaaatcactaatatgatactcatgcatacgcacaagtaatacaactgcctacgcgtttaagagagaatgtgtgacagggatgaaagaaaagatatagtggatatttaagattttaaaaggaagatggtgtacttatcaaaagggtgatacaattagcaagtttatgtaaaaagactaaacttaccatcttgtaacagctggcaaataaataaagaagcttattgaaataatttttattatatagaatttattatatagaattcacttctaagtcatttaagtccttcagaaatatagacggatacacatgcatatagtatttaacaacatttactattaaaaatcaacaagac

SEQ ID NO: 44509 - DNA, 398 bp, Glycine max
ctcacccgcatgacatttacatatgagcatacattatagaagatcatactacacagactactattaatgccctagaatacaaggctaaaaccctatactactaggatggccaaaatacaaggcccaaaaaaagaaaacaacctattctactatttacaaagaagagtggacccatccttggaccatgggctcaaaaatctaccctaaggttcatgagaaacctaaggccttctttatcaactctagcccaatcctcttggagcctcttgctcatggatctggtaactagtcctttcctagggaggattgcatcaatacagttctgaggaccgtccaccaaagcaatccagagtcagaggtcatttggtgaagatcgatgctgacagtctcaacgcatt

SEQ ID NO: 44510 - DNA, 385 bp, Glycine max
  unsure (1)..(385): unsure at all n locations
aagacattcattttgtgaagttagtttcttcatgaaatgctaccttcaaagcataaacggcatgcaacctcctacaataaacacaaacatcaatgtatatttaaagcaaactcatgcacatatttcctcacgaacatacatttgcacaagatattctgctaactataaatggcactcatgcacaatcaaggcatcttctttacctaaatcatgtatatgcacttccaaggcgtatttgctacctaaacacatgcatttcctttgctaaattacatacatgcatactcaatgtgatttgtgctacataaattgcacacatgcacattcnggtatttgtaatacctatacatacaaaatatcgtgaggaaatctgggctaccacaca

SEQ ID NO: 44511 - DNA, 461 bp, Glycine max
cttctatctcttcttaatagtaatatgaccgatatgccgatctgcaggtgaagcaatcttctgaaactgtgctccccttgcaggagttatagtgccattaagtttgatgctctttctagacatggctctctggaagttcttggatgaactcttctcgcgttttcttggccaattgtcaagctcctcactactactaaactctccttgaaagcatcttctctttggtgtaaacctccagctcttgctccaatattgattctttgagttctctatgagctatttttgtttccatcagtatttccttctcgctggccttgagagcttcaatccatgcctcagctgctgctacttttttatcaagaatttcttctgctgacgctgcatgattcgtatatactcatactcaaattctgagatagtgatcatggaactatgctgtgctggtaaagctctatctctca

SEQ ID NO: 44512 - DNA, 381 bp, Glycine max
ctaagtattcgtgttgatatgtctaaacttagatttattactgttgaataaaagctgtaagcatttctttaagaagtagatacgatctacctaaaatagacaaagattacatatttcaagctgagacaatttatataaatacattaaataatggagaatggtttataaatatatatgtcaataaataagaataaaaagactgacctgtgtatctctggtcgatgcgagagatactatatagaagagataccttataatggcttccgaatatgatgtgcaattgcaagtgtggccattgagaaacaaagtaagagacttaatggagggtgatgtgcatggaatatgtttactattgatgagcattctcacgcatacgccata

SEQ ID NO: 44513 - DNA, 393 bp, Glycine max
ttctctctagatctccttctctctctctctccctgaactcgcgttgtcttcttacccacgagcttggagctctctcgcggccgcgcgcaatgtggaggtttcttaaccctcaaacgctaagtatcatgttttaacaagagaggtcctttttataaatctcaataattcattatgcataaattaccggaagactataatattttatacaatgaacacgtgaaaatatttttgttagtaagggtggtattcgagtattaaattagaaggagttttgtattttaacattttaagccattgtcaattaatccaatttattttaaatatcccaagtacgagtaggagtacacgaaactgcaacactgggattcgctccattcatgccatcgatcacac

SEQ ID NO: 44514 - DNA, 403 bp, Glycine max
  unsure (1)..(403): unsure at all n locations
tcttcgccagtgaaaggatcgatgtgggtcttaatagaggcaaatntgatcatcctactatgacgactgagaaaactggggcaaatgaagagggtgagaaagagggagaaacccatgctgtgactgccattcctatacggccaagtttcccaccaaacccaacaatgtcattactcagtcaataacaaacctcctccttacccaccacccaattatccacaaaggccatccctaaatcaaccacaaagcctgtctaccgcacttccaatgacgaagaccacctttagcacaaaccataaaaacaccaacaaaaaggaatnttgcagcaaaaagcctgtagggttcaccccaaattccgttgtcatatgctaaacttgatcccatatccactcaataattcaat

SEQ ID NO: 44515 - DNA, 368 bp, Glycine max
  unsure (1)..(368): unsure at all n locations
gtgtatattaaggatgctattgaagttgtcttattgatgattgtaggttcccatatccaatctttttatacaactttatatattttaagttctgattntctgattgtagaatttcatctttaaactattactcttgttggatggttcaactaaatgtgaacgataatttttaacaagaaaatcccgccagggccaatggacatatttntaatgtgggatacccaaacaatgaggttatagntaggcagcttgctgaaatgatgactcacgttataggattaacgttgattgtttgatcctattagaatttcaacatggtatctgggaccattcaacanttattntcgttcaattctgcaagtttattc

SEQ ID NO: 44516 - DNA, 432 bp, Glycine max
  unsure (1)..(432): unsure at all n locations
tcttatccaagggctcatctggtttgaagctccttcttccatggcttattccctagtggatggcgcctcctctcacctcttctcctttgtcttccgctgcatctncatggtggaaaatcaccattaaaggacctcaatgaagctcatagatccagcctccacagaagccccacaagcaagcttccatcaactatggagtagttaacatcggttntggaaaaaccgatgttagtatcttgttgttaacatcggttttggaaaaaccgatgttatcgaattgatgttaacataagttttaagacaaccaatgttacctagttgatgttaacatcggttattcttaaanaaccgatgttgttatcattatatattacagatatgaaattgcacaacccacgcgcttgaaccctgtcgttcttcttctttctcctt

SEQ ID NO: 44517 - DNA, 281 bp, Glycine max
  unsure (1)..(281): unsure at all n locations
aaatgttatctatataaatnttaaatgtaanaaaagatgttattaacaaaatgtcatctaattctgatcggaattgaaggaaaaaataaattatttgaatttatacttgataatttgattaatttcagattaaattattctcaaaatataattctaaatatatttgcatcatgatatccttccttctacttgaagttattcgaanaatatattatataatttacctgcataattttcatttttagctttattacagctaattctatttaaattaaatttgt

SEQ ID NO: 44518 - DNA, 449 bp, Glycine max
  unsure (1)..(449): unsure at all n locations
taatcaacatataaataacaaaatataactaaacagcacaaattgatacttaattaacttggttaaaccttagcaggaaaaaccattgaagcaacaaaataataaagcataaattgtctgataccgtacggtatttgagtaacaacattaataaaaacattaaagaaataaacaaaaaagaggttgtgtccatggtgtctgcacattatcttcagcgggaaaggtcctcatcatcccatataacttcctttctaaatacaacttcccatacatgtttgccaaatctgaagaagaatattacatcatctctaggcattaaattattttcagagagatattggaaccatggctgggcaacagatgggacaccatcatgcatggtgattttccatttgtggcgttngccatagcctctctgaacaggaataatnttttgtgatctaaacaaa

SEQ ID NO: 44519 - DNA, 361 bp, Glycine max
  unsure (1)..(361): unsure at all n locations
atactaatcattctttacaacaatggcccgagctcatcaataagccatgattttatgcaacatggttgttgctccatgagtgattaagaaaataaagagactgttatgcatgttccccaagaactatctgaaataaanaatatgaaaaacattgttatctgactaactctaacagcactgcataccctggagcaaatcatgggtagaagctcaactctaagcatgttcccatcttctccacacaactatgatttgcaattgctagatgatngaaagataaaaagaattgactatagagagcaacctatatatactgagaataacatggatcttctcgtgttatatattgttaatattatag

SEQ ID NO: 44520 - DNA, 429 bp, Glycine max
  unsure (1)..(429): unsure at all n locations
ctttcaactntggaagacaaattcttatttctaccaaactcaattgcatttacactgtcatgcatcaacccttgtaagtccactttcatactctcttgccttggcttctctatatctccttcaaacatatcaaggtttttctcaagacaaagcctatattcaacattccgtagtgtatacctacaatataggaaaaatggttttcatgttccctctgtattaacattactaggtcatgcataaaaagttaaaaactgaaaaaagtaaaattctttagaagtttcagaaaaattgggacatttatcaacatggattcattcaaataaacaatagtgacatattctctccttctcaaaccgtttatccattntacacaagtntgtgaatcagaagaaactaatacangtttcaagatagcanaattgaatg

SEQ ID NO: 44521 - DNA, 381 bp, Glycine max
  unsure (1)..(381): unsure at all n locations
taccctgatgaggatgttccatatgttcttaaaactggactgattcatttgcttccaaagtttcatggccttgcaggtgaagacccgcacaaacatttgaaagaatttcacattgtctgctccaccatgaaacccccagatgtccaagaggatcacatatttatgaaggcttttcctcactcattagagggagtggcaaaggactggctgtattaccttgctccaaggtccatcacgagctgggatgaccttaagagagtattcttagaaaanattttccctgcttccaggaccacagccatcaggaaggatatctcatgtattagacaacttagtggagagagcttgtatgagtactgggagagatttaagaaactatgt

SEQ ID NO: 44522 - DNA, 447 bp, Glycine max
  unsure (1)..(447): unsure at all n locations
cttgtggagcttgtatgcgtgtctggatcttgagcttcaatgaagtcctttaatggtgattttccaccatggagatgcagcggatgactaaggagaagaggtaagaggcggcaccatccactatggaataagccatggaagaatgagcttcaccaccaagatgagccttggataaaaagcttggagaggatgcttccatggaggaaaagaaagatggagagatagaaagaggggggagcacgaaattgaaggaagaaaaagggagagaagttgaactttgagttgtgtctcacaagactctcattcatcaaagttacaacaagtgttacacatgcttctatntatagactangtagcttccttgagaagctttcttgagaaaacttccttgagaagcttctttgagagaacatccttgagaagctagagcttatcgtcacatacccc

SEQ ID NO: 44523 - DNA, 384 bp, Glycine max
  unsure (1)..(384): unsure at all n locations
ctgtgtgctagtgttgctccatctacttcctgtgtcnaattttaatccccactgagtccagacactgtttgaactttattgttggaagagcttttgtcatcatatcagcaggattatctgaagtagaaatcttttctattaacacatcaccttgtgttaccacatcacgaataaaatgcatccttatatctatgtgctttatcctttcgtggtacatttggtttttggttaagtgaattgtgctttgactatcacaatgcacaacaacttcctttttacttacaccaagatcaccaacaagacctttaagccataaagcttctttcaccgcttcagtagctgccatatattctgcttctgtagtcgacaatgcaacagtggact

SEQ ID NO: 44524 - DNA, 270 bp, Glycine max
gaggtaattggtgttattacctaatcacacacggttctagccattttatacttagcgactatggaccatatgactgccattctaatcttaatatttctccatcggaaatttaatggttggtgggcattgcttggaaatatttgcaacacaattctggttttacccatataaatgttgttgtctcctgcctcatgacctactataacaacactaactggccgacttgatacaccctgcataacaacgattacacggttgagagttgtcttt

SEQ ID NO: 44525 - DNA, 399 bp, Glycine max
  unsure (1)..(399): unsure at all n locations
tatagttagtgtataattattgctaggtaaaattaactcagactcaatctccatttgactataatttaaaaagaatgttgagttaaaaaaaataacactaaattctataacaaacttgctttccataggaaaaaaatatcattcaagtattaatctcttcacttgaaaatcaattttaaacaaaattaatttcatttaaaatcaattttaactcacaataaggttttctggtttcacttgtaatcacaaaaatcccacgtttccatttgaaaacaatgttatctttgttcctatacaatatttccanataataataaataagtaaaataggaagcactttgaataaagtgaaacagaaatgaaaaatattttgtaacattcattctaataatctatgta

SEQ ID NO: 44526 - DNA, 320 bp, Glycine max
cttgttcatttagttaaactaacccaactaaaagcttgggtttgacttgtttaaaaaaactaaagcttgaacttgacttatttagtcatttataacttaattattttttattgtgtaaaaaaatttcttataaagtttttaactttattaatttagtatttaacaaaacattttaatactatgtgtaataatctaattataaaaatatggttaaacaagtagtatgatattatggaatctatgtaaacgagttgctcaagagctattaatgttgagcttgtaaaacttgggtttggttattaaataattgagtccaatct

SEQ ID NO: 44527 - DNA, 456 bp, Glycine max
  unsure (1)..(456): unsure at all n locations
ctgtgataaacaaacccttttgagttacggaatatgattatcaagctgctcttatttggaattgctatctgcaacccgctttatactattctcaatcccacgtgttttttttaatattattattaaatgtgattaaaggattgaaaatttatgtcctataattaaattaacatgaatgctttgaaattgtcggtagcaataaatatgtatatgttacatattntctcagataaatgtgaatattatcttatggtctggaatgaaattaataaaatggctatgaattgttactagcaataagtatatgtaggccatatacttgggtggaattaagtgtatgatagatatgttagtcaccaaagaggccgagtctataaggttatttaattcccaattaatgattatgtcaattactcatagaataatagatgctacattatctgattattggtttat

SEQ ID NO: 44528 - DNA, 479 bp, Glycine max
  unsure (1)..(479): unsure at all n locations
ggtcttcgctggcgaaatgatcgaagtgggtcttataagaggcaaatctgtatcatcatgctttgataaatgcaaaaaatacaagagcaagtgaagaaggtgagaatgagggagaaacccatgttgtgactgccattcctatacagccaagtttcccaccaacccaacaatggcattactcagccaataacaaaaccttcttactacccaccacccagtcatccacaaaggccatctctaaatcaaccacaaagcctgtctaccccacaaccaatgctaaacaccacctttatcatgaaccaaaacaccaaccaataaggaatattgcagcaaaaatcatgtagaattcaccccanattctggtgtcatatgctaaacatgctctcatatctactcgataattcaatggtagccataacccctgctnggttcctcacctccattttccgaggatcgacttgacgcacatgtgcatatat

SEQ ID NO: 44529 - DNA, 541 bp, Glycine max
  unsure (1)..(541): unsure at all n locations
agctgaggacagaattgaaagccatcgtagnacccgggaattgagatccttgtaacaccggcganctntanancaacccgcagcatgcagcttatttatatgatgatgtcgtcagtttattcacaaacattgcatctgtattaaaggctggatagaggtatggtttgactgcatcaattaaatcaatgtctcaaatattctcttggtaagcggaataattcactctataatgttgatgattaattaataatatgggtgaatgcttatgcataccaattgcattctaccgtctgagtggtgtgaactgtatggaggaaaaacatcacacttgctaaccgttgcctattaaatctaaggttgatttgagctcatcacgatgtgagcgtattaggagtccttttagcatgtagtaactacattcatgtttcttaaatatgaacttaaaaactgaattgaaacctatactactttatggttttatattatattgagcactctataaagaatgtggtgagcactaagacttatattggatatgtat

SEQ ID NO: 44530 - DNA, 420 bp, Glycine max
  unsure (1)..(420): unsure at all n locations
ctatgataacatcggagtgcanatatccgactctaaaagattctattgaanacaaaagattcatgtgttgaaggcatgcctccagatacaacagacggaaaacgttgcctaaaatgagaacgatattaagacactagagaaatgaagttatcatacaaaggagttcgccagagagaagaagaccaactagtgataataatgttgttgggtctatcctcttataagtaatgcggcacctgacaatccaaagggtacaaccctatggatcatatgattgtgtctccttaagcggcacatcaacgattatggagagacacaccctctagttaacttgagacacactcattatgagaaatcctagtgagtatgccaccctctatngaaatatgtgatctttaatattttgaattgacttacact

SEQ ID NO: 44531 - DNA, 222 bp, Glycine max
aatattcttaacagattggacactcataacgataaaatattatgttacctgaaagtgtcttgacagatgaagtgcgaccccatctctcgagtcccaatgatggactattaaagcaaaactcgaatatgaatgggggagtgtagtatcattttattgttcatattctaagatccaaccaagacttggatgaatcaatacaggccttcgaattcactttcttct

SEQ ID NO: 44532 - DNA, 468 bp, Glycine max
  unsure (1)..(468): unsure at all n locations
taatgcatatagagttaacatgctagttccacacaccaaataccagcccaaacccaatgcttatgcattcactttaagactatatagtgtaattagagagacataaaatataaaagatatttacggaactataagagcataaaagagttaccttattgcaagctgaagaaaaaacaagaacaactntatcaatatatttccaaagatnttgagaagttgcctgaatcatagagggactgagctgtttctagagcactttgagcctgcaatagttgagagagctccttttctgcagctgaatctccaggttttaactccagaaactatttgtagctcctctcagatggctcatatctacattagccaaaaagcacctgaatgatataacttccctattaggaattngagagacttgngatgaangggaagataaggatgggatgtgacaaaaggaaagaatcatgatgg

SEQ ID NO: 44533 - DNA, 347 bp, Glycine max
  unsure (1)..(347): unsure at all n locations
catcctacttggacgaatgagaaaactgcggcaaatgaagagggtgagaaagagggagaaacccatgctgtgactgctattcctatacggccaagtttcccaccaacccaaaaatgtcattactcagcctataacaaacctccttactccccacccagttattcacaaaggccatccctatatcaaccacaaagcctgtctaccgcactttctatgacgaagaccacctttagcacataccanaataaacaccaaccaagatatgaattgtgctgcgaaaagcctgtaagattcacccctaattgcagtgtcatatgccaccttgctcccatatctacttgataacg

SEQ ID NO: 44534 - DNA, 467 bp, Glycine max
  unsure (1)..(467): unsure at all n locations
tgctcaccattgttagaggacaagccttcattctgtttcatataaacctcctcctttaaatcataattaataaatgttgttttcacatccacttgttgcaactcaatgtcaaaatgagcaactaatgccaagataatatgaagagattctttcataaatataggagaaaagttctttgtgtaatcaattccttctttttgagtanatcccctagcaataagttttcccttgtatctctcaatattgcctaatgaatcccttttggtcttaagacccatttatagccaacagcctttgccccattaggcaactctacaaggttctaaactctattactctgcatggaattcatctcatccttcatggcatcataccatatattngaagttttagaactcatggtttgatcaaaagtttcgagatcattctcaactcccatattatagtcagattcttgcaaatataca

SEQ ID NO: 44535 - DNA, 452 bp, Glycine max
  unsure (1)..(452): unsure at all n locations
atctttggtttanagctaagtacaacggttttatcaaaaaccatcgttgtgtttacaacaataccaataagatttccactctcccgtcgtcactctctatgaatcctcagttcttaatatatttatatctaactttatatatatatatatatatatatatatatatatatatatatatatatatatatataatgagaggaaacatcttatatgtggagtattaaggtttaatctanaacattcacatgatatattaaaaaaataacatgaatatttaagtggttaatgggtcacatgacnataaatcttgatcattcatgttcgattagacagaccacatatatcctctaaccctctataagatacatcctcatatatctatctatatatggggaatggtgacatacacccacttaaaaataaaaggtctatatagcctctaattcctttcg

SEQ ID NO: 44536 - DNA, 276 bp, Glycine max
  unsure (1)..(276): unsure at all n locations
gaactctaagttagtcaacatagttagtggtaggttgaatttctgttaatacttagttctgttaagttagttggtagttagagtagagttatggttttatcctagttgcaatgtgcctgtgttgattanggttagatggcctaataagggcctangtgagaggctgagaaagctcctgttttcttgaaatcgcaatgagcgcgctaagcgccttgctgcgctaagcgagttcatcatttctgatgaacatctagaattctagatgaacatgctaag

SEQ ID NO: 44537 - DNA, 426 bp, Glycine max
  unsure (1)..(426): unsure at all n locations
ntacngatttggtcttcaccggcgaaaggatcgaagtgggtctgaaaagagggcaaattgatcatcctgctttgatgaatgcaaaaaatggggcaaatgaagaggatgagaatgagggagaaacccttgccatgactgcctttcctacacggcaaaatttctgagtagcccaacaatgtcattactcagctaataacaacccctctcattacccaccacccaatcatccacaaaggccatccctaaatcagccgcaaggcctacctgccgcacgaccaatgccaaacaccacctttagcacataccaaaacaccaaccatggaaggaatttagcaacaaaaagcctgtaggattcaccccaaattctggtgtcatatgctaacttgctcccatatctacttgataatgcaatggtagctataaccc

SEQ ID NO: 44538 - DNA, 276 bp, Glycine max
  unsure (1)..(276): unsure at all n locations
gttgagttgtattaagaaaattagagtntatctcttttatcttagtgagagtgattctcctaaattcttgagtgattcaagaacaccttggctgtatcaaaggactttcacaacctttgtgtgttgccctcgctggaaagagagattcttttcttcctttcatcttcacccttggtttttcaaaccacaatttcagaaaatccaccacctctgcccagaattatctcgtggccataactcccattttacgcactcaaattaagtgattcttgagcc

SEQ ID NO: 44539 - DNA, 394 bp, Glycine max
  unsure (1)..(394): unsure at all n locations
gcttacagcatattctgtaatgacccactaacatagagttaatataacttaatgccattaacctatggaattaaataaacttaatggctgagtgtaactgaaattgtggcaaccaaaagtcacccccaacagccaacatgtcaaccaccatttggtctcccaaaaggctgatgcctangttgctcaatgggcccttattacaacttgaactaaacctaactagatcccttttagttgattaaacccaaacatatttttggtcaaccaactttacaaggattgggccattatttagacaaactaaacactctataattgaaaccaagtggtgtcatttagtactcctccattgggccatgatacaactcacaaccttggactgttctacttgaat

SEQ ID NO: 44540 - DNA, 454 bp, Glycine max
  unsure (1)..(454): unsure at all n locations
tcgtggcttctttgagaagctttctcaagaagcttctntgagaagataacgctntaactactaacacccttctaataactaaacttacctccgtgaaaataattacggataaaataacacaacaaatataatcaaacatcaaatataattactaatatatatatatatatatatatatatatatatatatatatatatatatcagggtgttacagtagataccgaaatagctaatatatccttagcaattgcttggagtgttggacacttgacaccattaaacttccaccacattaaaatatcaaagtcaacaacttttggtaaaacctcttcttctatatagcattccaactctgatcaacataagaactctacccttnttccttatatangattgcatacttagatatgcatcacaacaacttactaccagtacatcaccacatactaccaa

SEQ ID NO: 44541 - DNA, 306 bp, Glycine max
  unsure (1)..(306): unsure at all n locations
tgcttttattgttgaccacagagtggtacctggagatatgtcgcggnggtcangagaccttgtggacgtcaagtggggtgctattgcccaaaaccaagcttgaccaatcccgacccaacccgggcatagtcggtcagtgagaacctgtgatgtacctaagcaggcgagctcctggcagtcaacagataaaaggaaaacaagaccacaaagcaaggaggcttgtggtggctggccagctgtgaattttgtgtaatatgtggattgtggtctctggtaatcgattaccaaaggtgagtaatcgattac

SEQ ID NO: 44542 - DNA, 328 bp, Glycine max
aaggatttcccacattattccatgatcacaaggcggagatgatgatttggaatattctatgcaaaactggacatgcatgcacctatgcggacactcaaatgtcaaaattttaaggtcatgtgatgctagggctcaggatacatttcctttattttaaatcaacccaatgtttccaaaatatgttcttttatccaattgtgcattcatccgagatcattttgggtactcgggaaaaattcaccagcatcacccttcaggtggatacacatattttctaaaactaggtatgatcagtgaatttttctcaagacatattggaagtcatctc

SEQ ID NO: 44543 - DNA, 204 bp, Glycine max
ataaaaaacctaactctaacatataggacatttatacagtcagagccctcactatcttaaacttaataaatattgccaacaactttcaggaaaaagccacagactaatatgggaagatgagcctcaacatgttaagagaaaaaagaaagatggcctacactagttaacttaaaagtactataacaaaccttctaaaacagcatc

SEQ ID NO: 44544 - DNA, 422 bp, Glycine max
  unsure (1)..(422): unsure at all n locations
ttgcttctaccaatttaatctccatattctatntgattggatcccattttcatgtggtcacgcatatagcgcatcctactctatcgagaggtcaaaagatataactcctattatgtaggagggatgaatcatatctatatcactcacatctcttaatatgattattgtaagcctagctactacttttatgataactntgttacagatggtgtatgatagcattaaagcctataactctacatgtaggaatgtagtaacttcaaatcaaggacaactattaccttatgattgctatgagaagcgcttatgatagttaaatgactattatgaagcattctcatattggatctatctagtataaatatttactcctaatatttatacttgngtggtgacttgatatctcgtatccatgacctatg

SEQ ID NO: 44545 - DNA, 260 bp, Glycine max
  unsure (1)..(260): unsure at all n locations
gcagactagcctctntatcaagaattttgctctagaatcgccaaaatggtcagaccaatcatgaataatctcgagaaaccaaaaaactntgtttgagattgtcacaacctacctcacgacaggacgacgaaggcaaaatagataagccaaaagcattcttctcctatggaaaaaatgcgtggagtcgtcaccaacctttattcnagggaaacattagaaaaataaaaaagaggtttgcaaaaaaagacgtttattcggga

SEQ ID NO: 44546 - DNA, 487 bp, Glycine max
  unsure (1)..(487): unsure at all n locations
agcgtattgctgattagcacttntcttacntctnatttgtttanaacacnnntnnaaagtggttcntttgaatccttgaggaccnggancgagacctcgtgagacataccgacccggaccttaagtcacgcagcttgcactatagtaaattttatattatttaatgggtttttttctttttttattaaaaaaagctatatcggtcacccaagctagcgaaaaaaataaaacaaatgctacaaaattcaactttttacctaaaaagtcgacatatctcccttgaaatgaacactcttgcaccaatttaacaaaaactcttatttttttcccaattgaaaaaatgatcccaactccattcgataaaacttccgtcaagagaagagaagacctgaggtgaggcaaaaaatgagagaggaaaatctgatgagacatgctgattagatactggaaagggaaaaaatttaaaggattatcaggcagggtttcn

SEQ ID NO: 44547 - DNA, 430 bp, Glycine max
  unsure (1)..(430): unsure at all n locations
tgatagacctgtaattcttacacttgctgtgttaccactctttacattgggcaatgcttgtccgtacttaggggctcgacaaaattatcaccccctacctgtcaaggctaccaccccggacattagacaatcttcaacgcaggacaatctcttttgcctgcaagtcggctcagagcttggtgttagacaagtggcctcagaaatcttaagaaaggggggttgaattaagattatgctaactattcccccaattaaaacctactcagatttttatgcaagttctaagtttcctttataacaaattacttagatgatgaatcanatgagcaaactgaaatgagactaataaacaacagttaatataagagataaagggaagagagaatgcataaccaaatttatgctgcttctgtcacacacttgtgcctac

SEQ ID NO: 44548 - DNA, 278 bp, Glycine max
  unsure (1)..(278): unsure at all n locations
caacggaagctcttgttatactcanatggtaataacttgtcacacgggagttcgattcaagcgcataatatatctagatgctcgaaattgaacaacgaatgctctcgtgaaagtcaaaatggtcataagcttgtcacacggaagtccgatttaggagcataacatatcgaaacgctcgaaattgaacacccaaagctcttaagaaattcaaatgggcatatctttcctaacggaagtccgattcagccacataatatatcgagaagctcgaattgaac

SEQ ID NO: 44549 - DNA, 474 bp, Glycine max
  unsure (1)..(474): unsure at all n locations
ctcgataagtgatgtgctanaatctgacttccgtgtgacatgttatgaccatttgaatttctcgagagcattcgttgttcaatatcgagcgtctcgatatattatgcgcctgaatcgaacttccgtgtgacaagttatgacaatttgaatttctctagagctttcggttttccattcagagcatctctatagtgatgcgccaaaatcggactttcgggtgaaaaggtatgaccatatgaatatctcgagtgcttccgatgttcaatttcgagcgtctcgatatattatgcacctgaatcggacattcgtgtgacaagttatgaccatatgaatatctcgagagcatctcttattcaatttcgagcatctctatatattatgcgcctgaatcggacttccgtgtgactagttatgaccatatgaatttcctagagctttcgttgtcaatttcaacttctcgaaatatattaaccc

SEQ ID NO: 44550 - DNA, 267 bp, Glycine max
  unsure (1)..(267): unsure at all n locations
tagtaatgcctaatgtcatcatgttgatggcttcaataagcatgattcttaacttgatgaaaantttcatttccattnttaaaaatgaaaccttgcctcatgtaaaaatatcttaatctgtgtttaaatttctaatatcttacttttttcatgagtttaatctttcattgaaattntagtaggcagacaagtaaatttatgttttgagaataatcacgagtgatgatggtgcttacttgtgtgaaaacctaagatgtttcataatta

SEQ ID NO: 44551 - DNA, 391 bp, Glycine max
  unsure (1)..(391): unsure at all n locations
ctttattacagatttgctttattttacccntattttattaccttcttnctcacggatggtctccctccatatataaactggacaattacaataccttccagtcatttctttttggttcacatctaaaggtataaatcaaattcaagatntaagatgcataatccaaactctagtgatctagtccaaccaaaccattaaatggctgtagcaattccaccctaacaacgactatttcactttcaagaagccagtatgaagcaacaaaaagattacataggtngcaagtttataattgaaatattaataatgcagccttacaatttcgcattctatcaatcaattactagggcagatatcccaagattctgacagtgagcttgaattaatgtaa

SEQ ID NO: 44552 - DNA, 378 bp, Glycine max
  unsure (1)..(378): unsure at all n locations
atcgatgtgggtctaaaaaaaggcaaatttattcattctgcttggacgaatgagaaaattgnggcaaatgaagagggtgaggatgaaggagaagcccgtgctgtgactgccattccaatacagccaagtttcccaccaacccaacaatgtcattactcagccaataacaaaccttctccttacccaccgcccagttatccacaaaggccatccctaaaatcaaccacaaagcctacctaccgcactttcaatgacaaacaccacctttagcttataccnaacaccaaccaagagatgaatnttgcagcgagaaagccttagaattcaccccaattccagtgcctatgctgacttgctccatatctatttgataattca

SEQ ID NO: 44553 - DNA, 463 bp, Glycine max
  unsure (1)..(463): unsure at all n locations
tgggcttctatggaggctggatcttgagcttaattgggtcctttaatggtgattttccaccatggagatgcagcggaagacaaaggaaaggaggtgagaggaggcgccatccattaaggaataagccatggaagaaggagcttcaccaccaagatgagccttggataagaagcttggagaggatacttcaatggaggacaagaaagagggagagaaagagggaggggggagcacgaaattgaaggaagataaaggaagagaagttgaactttgagttgtgtctcacaagactctcattcatcaaagttacaacaagtgttacacatgcttctatatatagactangtagcttccttgagaagcattctttgagaaacatccttgagaagcttctatgagaaaaccttcttgagaagctagagcctagctacacacacccctctcataactaagctcaccttct

SEQ ID NO: 44554 - DNA, 306 bp, Glycine max
ctcactcgagtcatctttaacaatggtttagggttactcaaagaatcctagaacaatttcttggttcaaatactacttaagggtgtctattcttaatcttagggtccctctcatcccaaagcaacttctacccaagaaggatctatagctacctctcttctagacgtaacatactctatatcatcatctaactaaaatgcatactaagatgcctatcacaaaaggtgatccccatgaatttacaacatcttttagatactccacatacttcaacctaactcgaaacacactacgacacgtaacaca

SEQ ID NO: 44555 - DNA, 355 bp, Glycine max
  unsure (1)..(355): unsure at all n locations
tctatccattccaatccattcaaatcatacaattgctcattcaaatcattctcaaactctcacttcatacccaacaatccactgcatatcattttcaatcaatntactgttcatacacgcctttggtacaagcaaacagctcagagtgctaaaaatataaataactgaaatttaaaatagctgaaacatagaaactaaaattaaaataactgaacataaatcataaaatgactganaataaactaaaatgttcgagatgcacaaatttaaatgtcttgctcatcatgtggctgatcttcattaagattcaatgctggagctgctgatgaatcctggataagctgctctggctccg

SEQ ID NO: 44556 - DNA, 408 bp, Glycine max
  unsure (1)..(408): unsure at all n locations
agcttgcaccaacattcattattccaatactcactcaacaaatagtcatcatccatccgcaattccaatcattcatgctcaatatgatgcatgcacctgacctcaactctcatatgcaatgtggtaccatccccaaggaaatagcctaagcgtgtccacacaacactctcacttaggaaaactaggcagtaaatgtcgaggtcactcctgtcgtgcacaggaaactcccccccccctccacggtgatcagcctgagtcttaagggagttccaaactaagtgacatgccctcaagtacaagtattcctcctcatgagaaactacaagtacttactgacaaagtntatactatttccatgtcatatgaagtatgaaacatgggcaccatcaaatgcactgactgtggata

SEQ ID NO: 44557 - DNA, 403 bp, Glycine max
  unsure (1)..(403): unsure at all n locations
tcnatatngatcttctgtagttgatcgagcaatagaggactgtcttctttaccaccaagaaacacaattaggaccaaagaatatacattccctttgaatgatcctctgtcaactatatccattccccaatcagcatcacagagagcttctagagtatagagttctccatgaggagcaagatttaaagacaacccatagtctatagtaccccttagatatcttaagatacgcttgacagccttccaatgttcctccataggttctgacataaactgacagacattgtttacattgtagctcacttctggcctagttacattaatgtatgaagtgccccaacaaccgaccgatagagggtagcatcatcaacaacatgtactgaaacaagcttagttgtaccatg

SEQ ID NO: 44558 - DNA, 421 bp, Glycine max
agcttagtaaagctaggcactaacaatctccctctttggctatatttgtctaaaacatacttagacactttctgagcaggtacgagcagttatgcaagtgggatcagcaactttcattatcagagtaatcaagcacagcggaaattctgcaagttgcaagtcgtttccaggatgtcaagacatctcacatgacatcagctttctgcttctgctccccctgtctccatgctcttactgcagcatcttctatcagctactagtctttttcaggatgtcaagacatctcatgtgacatcagctttcccttgtctccatgctcttactgcagcatcttctatcagctactagtagcttacatcagtcatcatcagcagcagcagtctccccctaaaatcatgtacatacaactccccctcaaaat

SEQ ID NO: 44559 - DNA, 287 bp, Glycine max
tcttttactcggatgactgattgagtcccgtcatatatcgagacgctcgaaattgaatgttgatgctctgagccaattcaaacgacaataatattttactcggatgtttgattgagtcccgtaatatatcgagacgctcgaaattgaatgttgatgctctgagcaaattcaaacgacaataactttttactcggatgtctgattcagtcccgtcacatattgagatgctcgaaattgaatgttgaagctctcagccacttcaaacgacaacaacattttactcggat

SEQ ID NO: 44560 - DNA, 446 bp, Glycine max
  unsure (1)..(446): unsure at all n locations
gatccttaagtcacctgcggcatgcaagcttagtgacatccgtgacttgatcttgagcgatgatgttcgcaagagagattcaggagaatcttccagtcatgtttccaattcagcattgaatactgaaggcaggggaaggactacccagaagggtcagaatggtcgaggcagatcaaagtcaagagggaaaggtcagagaaaatttcaaagtgacgttacttgttggaattgtgacaagagaggtcactttagcaatcagtgcaaggcaccaaagaagaacaagtcgcacaaaaacaagaagcgcgatgatgatgaatccgcaaatgcagcaactgatgaacttgatgatgcattaatttgcagtttggatagtcctgttgattcatggatcatggactcangtgcgtcgttccacactactccctctaaagatttattgtctaact

SEQ ID NO: 44561 - DNA, 271 bp, Glycine max
  unsure (1)..(271): unsure at all n locations
tcttttcatagtagaatactggttatgtgtctactatcatcgtcatcatttttttctccgtcattgaggtgccacttgagctgccaggtctctccacctttgggcgtattcttttgaaagattcgtgccccctttttgcacatgttctgtaattgcatcctatctgaagacattatactgacactgcctaacgaaggcaaccactaggtccttccaagaatggactcgggaaggttccaagttagtgtaccangtaacaactaccccaata

SEQ ID NO: 44562 - DNA, 264 bp, Glycine max
agcttgctctaaatttacattgatgttggtatttattgtaggaggttgtatgccatttttgttttaagggtagcatttcttggtaaaactaactttccaaatgtttgccttcgcaggaaatggccccgaggaagcttgtctcaaagaggtccaagaaggacaaggcggccgaaggaactagttccgctcctgagtatgacagtcaccgctttaggagcgctgtacaccaacagcgcttcgaggccatcaaggggtggtcgtttc

SEQ ID NO: 44563 - DNA, 379 bp, Glycine max
tgcgcgcagaaacccaccatcccctggtgtccacctccaactgagctcacgtactcccacgtagcccatatactcgtttctctcaacaccgggtccccatcaatcctctcaagcttccacaacatccaagcaaaacaacattcaaacagcataagctatcacaaccaagaaaaacagagcaaaggcagaaaactctgctcaacacatcaaccaatatcacagcttttctcacgtaaagaccacagtaacaattccttcgatccaattcgttaaccgttggatcgactccaaaattttactggaagtctatagtgcataagcctacattttgaccgttgggatctactagcaaacatccagaactcattctacattactc

SEQ ID NO: 44564 - DNA, 384 bp, Glycine max
agcttggagtttgcagttcctaagttaagatgtgactgttgaaactgtctaacaaactatagtagataagatttttatgctattttttaggaaaaataaaaattatgttgactgataggataaagcagttttgatcttattttttaggcatgatctgtaagtggtgttatctttatgttagcatttactatcctttcatgtctttaaatatgtcgcttcatatcagaataaagcaagcttttacaggctcaatttctttctttatgctccctttcattgttaatattcttgcctactggtattaagaaaaaaaaaaacagaagctagtcgcataatattgggatatctagggatgcttaagtaaagaatctccaatatcctatg

SEQ ID NO: 44565 - DNA, 337 bp, Glycine max
tattctttaacggaataggggcagtgaacttggccttcttacactttaataataaagatagaagttagaaatgttttcctttgccttatacactttgaagagatggaattcactatgaagtttctatatctaaatgaggtttgagaactcacctgaggaagtttatgttggacattttactgtaattgatctctttattatgttaaaataagagtgcacgcttgttttaatgtaataacgagatgttcggtttaggaaaaatttggaagttacatggaagttactaaaaccttcatcaacggttggaagttacatggaagttactaaaacttccatc

SEQ ID NO: 44566 - DNA, 389 bp, Glycine max
agcttaacaaaaggcatgcgaagtgggtggaattcctatagcaattcccttatgttatcaaacataaaaagggaaaaggtaatattgtagccgatgctctttctcggcgtcatgcattactttctatgcttgaaacaaaattgattggtcttgaatgtttgaaaagcatgtatgaaaatgatgaaacttttggagaaatttttaaaaattgtgaaaaattttcagaaaatggtttctttagacatgaaggctttcttttcaaagaaaacaaattgtgtgtgcctaaatgttctactagaaattttcttgttcgtgaagcacatgaaggaggtttaatggggcattttggggtccaaaagactctataaacattacaagaacatttttat

SEQ ID NO: 44567 - DNA, 379 bp, Glycine max
  unsure (1)..(379): unsure at all n locations
tactcggatgtctgattgagtcctgtaatatatcgacacgctcgaaattgaatgcttatgctctgagcaaattcatacgacaataactttttactcggatgtctgattgagtcccgtaatatatcgagaccctcgaaattgaatgctgatgctctgagcaaattcaaacgacaataactttttacacggatgtctgattgagtcatgtaatatatcgagacgctcgaaattgaatactgaagctctgagcaaattcaaacgacaataactttttactcggatgtctgantgaatcccataatatatcgacacgctcgaaatagaatcttgatgctctgagcaaattcaaacgaccataactctttactcggatgtctga

SEQ ID NO: 44568 - DNA, 308 bp, Glycine max
  unsure (1)..(308): unsure at all n locations
tagcttatgntgcaaacatgtatatacattttttttagcaaaaccaacaacgacaaaattattatgatgtttctagcatcacattcaatactggatggagaaatcatcctaatttgagatgggcaagtcctccacagacaacaacagtctgtacctacttttcagaatgttgctggtccaagcaagccatatgttcctccttcaatacaagcgctacattcacaacaatgacgacgagccactgatgctcctcctcactcttcttagaagagttagagaggcatatgaccatctacaatatgaaattt

SEQ ID NO: 44569 - DNA, 375 bp, Glycine max
agcttgaagatgatgctttaatggaggatattatttagagaaggggggggggggcacgaaattgaatgattaaaagagggagagaagtggaactttgaggtgtgtatagaaaactttcattcatcaaagttagaacaaatgttacacatgcttctgtttatagcctaagtagcttccttgagaagctttcttgagaaaacttcattgagaagcttctttgagaaaacttccttgagaagcttctttgagaaaacttccttgagaagctagagcttagctacatacatccctctaaaagctaagttcacctctgtgagaagcttccttgagaagctagagcttagctacacacacctctctaatatctaagctcac

SEQ ID NO: 44570 - DNA, 343 bp, Glycine max
aaataccagctgggactctctgggattgcctacttgccagctgttgttctctatatgcatccttttcatgctccgttcatgaacatatgacaattgtgaacttgagaattggcctatgaagtttttggaatgtatgcatttatctcatgtattgtgatcgaataactctaaactttatcttaatgtaattagtcgaggacaagcaaagtattaaatttgacggagtgtgataacggctatgtatatgtatattttgggattaaattaactaggaattgttaatctttctcttaattcttcctttttgtatgaataattggagtttaacatcatttaaattttg

SEQ ID NO: 44571 - DNA, 356 bp, Glycine max
agcttgtcccttaatgcatagtgacttgtatagtgtagtgctgcaacatcaacatcataatgcaatttaaatgaatagcatgggatccacatatatttgatgtgtctcaatctcatttacctatgaaaaacaaaaattaacacacaactgtgggaaattggactgtgaaaatctaccctcttgtatgtcttccgtcatcaaatatatatgaagatgtgtggaagttgctcttggctatttgtaaaccatattctaaacagttattcttggacattataacaccactgtaaacaatttttccttgttcttttaattggcccaccaaaaagtaaaggaagataatgaaagctttaata

SEQ ID NO: 44572 - DNA, 400 bp, Glycine max
agcttgaaacaaatagttagggagaaaaataaaatttaatgtataaattaaatatagttttatattatatataaattttaatttttcgtgtaaatacaaaaggccatatagggcatgataacaaaaagcataatgtcataatacaccttatataacaaaaaaataatatatatcagtcaatagtttacctcgtacctctttcgacttcaatcaaaagttgttataaaccattatgtgcatcttcaaatcataccaaaatgcactcaccacatcaatcaatatattcacggtgagaataccataaaaggaggtatcaaactttttagacaggttgggccggttggtttaacttaattattaaaaaaaaatatctgttttaataaaataagtagtttttgtt

SEQ ID NO: 44573 - DNA, 430 bp, Glycine max
gctgaattgaaaatgttattagggactgattgatttggtcttctttcatgtgggcgtcggcatgctaattaatttcaaattcatgaatactcatctgaatttaagttgaaattgaaccaaaaaactagttttggtttagtttagatttaaatttacttcttttgtttatttgtaaaagtggagataagtcgaacttatttgaaaatgcaaagaatattttaatattaaaaaattattatgagaataaatttttcttatatttagtataggagaataaactattttttgaaaataaaataaaaattaatttttatgtactattaatatattattttccatcgtatactaacaaaaagccattttaagtaattttttacagtactataacattaattaacttatcatacatgatcattcttattggataata

SEQ ID NO: 44574 - DNA, 319 bp, Glycine max
agcttctagacaatgcatcaacagagatattttccctacctgggttatactgtatggtaaaatcataaccaaggaattttggtgaccattgttgttgttctagagtctgcaatgtttgctccaacaattctttaaggcttttctgatcagtttctaataatgaacttatggcctaacaaataatgcctgaatttggccatggcttcaatcatagcataaaattccctattataagtagattgcttctgcattctatgggacaacttcttagagaaataagcaatatgatgttgagaatgactcagtattgctctaatac

SEQ ID NO: 44575 - DNA, 312 bp, Glycine max
ctatattctaatgtcacattctatcagaacgttgtgttcccgtgtcctctaacatgagaatcttcatagtcatccacctattttctgcctccccaaacacaagttcaagatcatcacaagatccaaacacaacaacacacagggagtgacttatcacattcctagctaatagagaaacaagaaaattaaatatacatattatataaatgagataccacttgcttaaacatagctcacgtaacttcaccacttcgtcatttaaattcacttttcaatcatcaatcacattacacaagaatcccacactccgat

SEQ ID NO: 44576 - DNA, 301 bp, Glycine max
agctttccgcaagacttacggaaagatcttagagttgaccttagcagatgtatccatagaagccattgcatcactcacccaatactacgaccagcctttgagatgcttcacattcggagacttccaattagtaccaaccattgaagaatttgaggaaattctatgatgtcctctcgggggaagaaaaccatatctttcatccgggtgtctcccctctttgagcagaattgcaactgtggtcaaggattcagcaagaggtttggaccgcataaaacagactcggaatggcatagcgggccta

SEQ ID NO: 44577 - DNA, 319 bp, Glycine max
  unsure (1)..(319): unsure at all n locations
tgctctatcttgccacagaattttgtgttggaataaaactagtcgactatttgaaccacttaaatgaaccacttaaatgatttccatgcacattacttgcaaaaaaaactaatgattggccaatgctctaaggtatggtattgataactatagaattgtcaataacattccacatactcttagactatagtttataaaccttacaacttattcaaggcaatgcatgagctaatntaagtggaatggatccttccagatgattattggcaagattcctggatgacagtaattgaagcaagttacaccactaaaaaacaaa

SEQ ID NO: 44578 - DNA, 424 bp, Glycine max
agcttgaggaatgcaatggcttgtgttatttgtgttgactgaagaccaagaattgtgtatatatatagtttgtaagattctgtggaaacccaattcccagagaaagtgactgtcaatggatggagggcatacgcatgagatatcacatggtgttgtcttccgtccaactatgaaggataagttgtgaagacttgcgtaaccccaccttatcatacattaattggccagcataaagcctccacatgtaaccaaatgagacgtgcctcagtgaaacgtaacgtctattcaagcattatttggtattccatatttttgtaaacatgctctgggcatgttctggaaggtaatttctggctgatgaattataaggcagcggatagcgagaggtcatatatcattttaattatttctgatgcctgacatc

SEQ ID NO: 44579 - DNA, 328 bp, Glycine max
  unsure (1)..(328): unsure at all n locations
ngtgctgcattcttcttagctctttaaatgtctaatacctcacctattatgatgctgtgtccatctatatgttcaaaagtgaaaatgagaaactcaaaattttaaacaatgaatgaaatctaacattgtttacttctactgacatcagaattcataaatcaaactataagcacaactaagttggattgataatatcaagttcctctcgccccctttttatgaaagaaaactcaaattgaatccttggcaatcaaagcaacaaatcaactactaccaactagcatagttacattcaaaaatttcaagtacccaacacttcattaataca

SEQ ID NO: 44580 - DNA, 415 bp, Glycine max
  unsure (1)..(415): unsure at all n locations
agcnttgatgatttagttttcaccgacgaaaggatcaatgtgggtctaaaaagaggcaaatttaatcatcttgtttgaatgaatgagaaaaaactggggcaaatgaagagggtgagaatgaaggagaaacccatgctgcaattgtcattcctacatggctaaacttcccaccaaaccaacaatgtcattactcaaccaataacaaaccttctccttacccaccacccaattatccacaaaggccatccctaaatcaaccacaaagcctgtctaccgcacttccaatgacgaacaccacctttagcacaaaccaaaacaccaaccaagatatgaattttgcagcgaanaaacctgtagaattcaccccaattctggtgtcctatgctgacttgctcccatatctacttgataactc

SEQ ID NO: 44581 - DNA, 295 bp, Glycine max
caatgtgggtctgttttatatgcaatttagtcatcctgcttggacgaatgataaaactggggcaaatgaagagggtgagaaagagggagaaacccatgctgtgactgccattcctatacgaccaagtttcccaccaacccaacaatgtcattactcagccaataacaaaccttcaccttacccaccgcccagttattcacaaaggccatccctaaattaaccacatagcctgtttaccgcactttcaatgacgaagaccacctttagcacaaaccaaataacaccaacaaaaagg

SEQ ID NO: 44582 - DNA, 309 bp, Glycine max
  unsure (1)..(309): unsure at all n locations
agctntattatgccctctcccctcggcggggatttcttcttcaacgaatgcaagatagttgttggcagtgatattattgaccagccctccgaaaccttctatcgagatgtcttgggccacgtgggcctcgttcaaaacctttactagcagagcccgatgaggctcggaactcatgagtaactccaacagcgagaccctggccggagttttgttgagctgtttgatcaccttgaattcgctctgctgaattatacggaggaactcgctggcttcctctaacgacacctcttttttaccatcctttttctc

SEQ ID NO: 44583 - DNA, 380 bp, Glycine max
ccttaatcatttccaaatatgcatgtgtattatgacgcatcaacaagaatcaagccaaggctattgtgcaagctatcaatggggcacaacacaccacatgattataatgatggatggctcaaattctcacaaaggtaaaatcatcactttcaaattgagctttcgaaactatcatgacatgtagagaagaatcaaggatttcaagtcacaaaatgtcaagaacatttattttcaaaataattacacatttctcgaacatatcctataattcaaagaaaaacatgcaaagtcttacgtgcacacaatattgacccaaaatattacactgaatattccacgaaactaaccacattaacaaattaacacaactaaccaattaa

SEQ ID NO: 44584 - DNA, 416 bp, Glycine max
agcttagaacaataaacttggccttctcttaattttctttgggcttggcgaccacgatcaacaaagtactttcggcacctactatatgttgacttcaccaacgttgttattggaatgctgcgacaatctttcaacaccttattcacacattctgataggttggttgtcatgtgaccatatcgtcgtccagatgtatcgtaagccatgttccttttttcctttgaaatgcgatcaatccatcttgctatggctggactcagttgacgaaatttttctaagttttgatcaaacacatgcttgcaaggagtgtacgctgcatcaaatttgttatcatcaaaagttgtacgtagacatcaaactcaaattatattaatgtataaaataaaccttacccaatttcttgaacatctcttttt

SEQ ID NO: 44585 - DNA, 422 bp, Glycine max
tctagtagtgtttggaggctcaaagaaaaaaaagaaattatttaaaagctggttccatttacacaaactcataatcaaattcattaaacttaaaataaattggactcttcgtggaataaacatcgatcatggtctacactagctagaatccaatccacaaactatgcactgaaaacacagttatcatcaagatccaccaccttccagacaacgatttcaacccttgtgatccactacaatgaagcttgttattatgataagagcatacatgttgtttcctgaagtccaaaaatacaagactttttgtcaatactattaccgaaaactatcatattaacaaaatcataacctccaaggctaccatagatcattgataaattcacaccaccccatgttatgatctcactagtctctactaacac

SEQ ID NO: 44586 - DNA, 295 bp, Glycine max
agctagtagtgtgtaaaatgcaatgctcttttatttataattcaactgttatttagcagaaagcatacagcaaagatcaaacatgccaccacttggtcataggggatctaatattctaatatcatgtagaatagacacggaatggttttatttctatcatactatatcgtacgttatgtatgcagttcagaacgacagttagttcatatgccaatcaaacacttatacttcgatccatgagagtcatttctaagctgcctcatgctctcagttccatatagctcacaccttcatc

SEQ ID NO: 44587 - DNA, 588 bp, Glycine max
  unsure (1)..(588): unsure at all n locations
atatctgactcacctantntgnttctnccattcntngcgttcaatcgttggcgtgctcanganannnnnnnnnnnnnnnttgatagtagccccggttcgacanaccncacncnatananacncaagcctgacgcgcatatacccgncgtatgatagatatccatggtattctttcttggctcttcttaaatttccatggcatacctaccaacaagcctagcactcattaaccttggtggagtcagcccagatcctttatcaaaatggtgacaaaaatcctccttgacttgaccgaaaccacccatcactacatgtaatgacaatgctgtccacactccacatagataatgaagagaatgcccccaataccgacgtggcgatttaaaactaggtatttaacctcactctgactcctaccaaaccatcgacacatggggctaaatctacaaatacttgcgctagagattgtgtaagaccacctaacatcttactctgtgaagactacccataaactttgaagaccataattacccaagttacattaataccttaatgacattttctcaaccagactaacatatcactacg

SEQ ID NO: 44588 - DNA, 285 bp, Glycine max
accgcggtggaagtatatactgaagctgtcgttttcctcgcccaatactatgacaagcccgctgaggagtttcacagttcgggacttccaaaaggtatctactatagaagagtttgaggaaaatttcagatgccctcttggggggagaaaatactatattttctccgggtttcttccctccttgagcaaaatcgcagctgtgtgtggagatttagaaaagacgtggatcgcatgagcaatctcggaatggcgtagtgacgctggctcgaaatacttggatcgaag

SEQ ID NO: 44589 - DNA, 198 bp, Glycine max
acacattctcacataccatgcttattgggcactaacaacataggcacagcacatgcgcttatgctctcttggacccaacccttctccaacaattctttaacctgagactctatctccttagtctcctgaggggtagtcctataggctggcctattaagaaggcttgcttctgggactaaatctatatggtgttctatt

SEQ ID NO: 44590 - DNA, 304 bp, Glycine max
agctaggtaataatcacttttcagcttctatttttttctgggaatccacaatcacactcgcattttacagataccaaataaagtttcaaacttggggctttgcatgtttccatttcttcccctcccctcctttatcgaatttcactatatttctttgaattctaaacggaatcagatggtagggtgtaaaagttattttcttttagtttaacggcctagttcacattttgtccaatgataaagctttcattttatgttagctacccgaatatcttcactgattaaatattcacacatgggctgt

SEQ ID NO: 44591 - DNA, 129 bp, Glycine max
cacgctttcaatgtatccaataaactatgagcacaaaaagatgtaccatactctccttcattctttcctcttgctataaacatatagaaggcacgagtagtgcctctacatacatgttgaatacgtatg

SEQ ID NO: 44592 - DNA, 320 bp, Glycine max
agctttgatgcaacatttggagaggttaatgaatcaacgagatgatgcgctccatgagaggttggatcaaatggagaatagagatcataatgaagaagaaaggagtataagagggaatgatggtgttcctagacaaaactgaattgatgatattaaactcaacattcctccatttaaaggaaagaatgatccagaggcctacttggagtgggagatgaatatagagcatgttttctcatgcaacaactatgaggaggaacaaaaggtgaagcttgccgtcacggagttttccgactatgttcttgggtggtggaacaagc

SEQ ID NO: 44593 - DNA, 359 bp, Glycine max
agaggatgcttcaatggaggaaaagaaagagggagagaattagatatgcgagagcacaaaactgaaggaagaaaaagggagagaagttgaactttgagttgtgtctcacaagactctcattcatcaaagttacaacaagtaaaagaatgtttatacggataaccacttgggtattttcgcctgccccctaacctcacgggttattgcttgacacaggtagtctgcgcggaaaatgacataaatctccatgcgtcaatgggctcgctttcctctggttgacaaaaggtgcggataaccataaggtaccctcgcatgttatttgaacccgccgtctctggatgacaaaggtgcagatgaca

SEQ ID NO: 44594 - DNA, 405 bp, Glycine max
agcttagtgttacaatgttaggggcttggttaatctagtcaaatgaaagattattaagaagcttattgttacgaatagggaagaagggttgcaggaagtaagaaaacagcagcgcgaagagaggcccaaaaggaaaacgaaggctccaacgtacatggaggactacgtgtgaagtgtgagaagcatgaagatgcatgcatggaagtagggaacgagttaccacttctgttagaggatctggaatattctagattcagttagaatgtgattgtagttagctaattctgttagatctcaactgcaggaagtataaaaccttgttaatgttcatacatgaaataacaagccactagacacgagttcttttctctccttccctttttctctctactaaccgaagccctt

SEQ ID NO: 44595 - DNA, 388 bp, Glycine max
  unsure (1)..(388): unsure at all n locations
ctaagcttaccaataaaattactctttaaggctgttacttttgttgttaagagaatatggagtagaagagaaacttaacagaaagtaaaaacgaaaattaaatgcacagcggaaagtaaatgagtagggaagaaggaaacaaacacacaagagtttttatactggttcggcaacaacccgtgcctacatccagtccccaagcgacctacggtccttgagatttctttcaaccttgtaaaaatccttttacaagcaaagatccacaagggatgtaccctcccttgttctcagtcaaacccaagtagatgcaccctctacttgtaccacaaaggatgtaccctctaatgtgttcagacanagatctcaggctgttacacctttgatactt

SEQ ID NO: 44596 - DNA, 407 bp, Glycine max
  unsure (1)..(407): unsure at all n locations
agctngtgatatttttactatatatgtgtgtgtcttccgttatctctacctgtttaaaaatgtgataattcactcctcatgtgttgcttatgtttggatcatgtgatgatcttaaaccttgtgtttgtgagagcaaatggctaggtgaattactttaacaaaccttgtgatggatgactccgagacacaatattttgataggatgtaacattggaacaagagtttttattttatttgcatgacgtatcaaacatgtcattttactttatttgatanacttgaacagtcttgtgttatgtcataaatatttctaagaaattttattttggtacagtgaagcgaatgtgacatttcccacgtccactgatttccattctattgataaaattgatttactagattcccct

SEQ ID NO: 44597 - DNA, 347 bp, Glycine max
  unsure (1)..(347): unsure at all n locations
tattatgacacgttatgaaaattaaagcattcacttagtttttaaatttcaactttttagaatttcacttgcaaaataatgatttggaatggaaacaataaatggcatcaattcccataatgggaaaggcttttcttattgttctagtctgccaacccatagctttacagatcttaattacattccatttaattacgttacttcacctctatgatttagacttgtataaatctataatttcctttntcttcttggatccaaaggagatctaaaacctgttgcggngaggctataaggagagagcaagccaaagtggtgccaggtgatctatgcacaaactactcaca

SEQ ID NO: 44598 - DNA, 402 bp, Glycine max
agcttatcaaggacatgtttggataatttatacattccataaaatttaattattgattgaataaaaatatattcttgttataattactttaattattattatatatatcgtgtaatcgagcccgcactattaaggtttgtctacaatttacaaaaattaagtatttttagtgtaaattttctttttttaagtagattttagatagattaaggattatgtagattttatgcaaactcaataaactctcaatttataactgtattatgttttgtcgctttaattattttcaattgatgtgttattcttaaataaaagaaattttattcttaataacatcaaatccttaataataatattattgaaatatttaatcgatacaatatttatatacttgagtctgat

SEQ ID NO: 44599 - DNA, 254 bp, Glycine max
tgaatttgtaaccgtgactgcaatttaaaatcttggtcatagtttcaatcataatcagtgttgacctgtaccgcttggaattggtaatacaaacagatatggccatcaaaagttacttaatatcacagtttgcacatgttttctgacactattagcggtttaaaaaatttcttgataaaaaattattgctttataaatcctctatctctctcttgtgattgtcaattcttttcctgctttcagaaatatgtata

SEQ ID NO: 44600 - DNA, 371 bp, Glycine max
agcttgaacattatctccttttgggttcgcaggttcttccatgcacggaatccagtgatcatctcgattacaatgcacccaagagaccatatatctaacgctggttcaatctgaccaacgaccgattctggtgacatgtaaaaaggtgtccctctaaacttgaccttcccatactcagcatttgcatcttctctagtcttggacaacccaaaatcagcaatcttcagttgataccttgcatgatcatcagatgaaggaaagagaaggatgttgtccggtttgagatcacaatggacgactccttttcgatgaatgcaagaaagccctttgagaagcatacgagtgtagactcttacttcactatccgatat

SEQ ID NO: 44601 - DNA, 335 bp, Glycine max
gcgtatcgatatattacgagactcaatttttcattcgtgtaaaaagttattgttgtttgatttttcccagagcttcagttttcaatttcgagcgtctcgatatactactggacacaatcagacatccgagtcaaaagttattgtcgtttgaatttgctcacagcatctgttttcaattacgagcgtatcgatatattacgggactcaatcgtagatccgtgtaaaaaggtattgtcggttgaaatttcttagaagcttcatttttcaattcgagcgtctcgaatactactggacacaatcggacatccgagtagaaagtattgtccttgaatttg

SEQ ID NO: 44602 - DNA, 333 bp, Glycine max
  unsure (1)..(333): unsure at all n locations
agcttagtttaagttagtctaaacctaagagggctgtctaaatcggtcctagtcttacatcagggatctacggacgaagcttggattaattcggcctgacgaaggatcgaaggtttagtaatttaggctacagcatagaacaaaagaacacaattgattagagaaatatatttctatgcatcggcttgtttgttagtgatgtgtcatcattttctcctatttcttaaccctttttgtcaccattttaaatactgattagccttaattggcaaattaattatgcagttttatcatttgggcctactggattaattntgtgtttttaatttaatt

SEQ ID NO: 44603 - DNA, 325 bp, Glycine max
  unsure (1)..(325): unsure at all n locations
ttattccctagnggatggagcctcccctctcctcttctcctttgccttccgctgcatctccatggtgtaaaatcaccattgaaggatctcattgaagctcaaagatccaacctccatataagccccacaagccagcttccatcaagtggtaatcagaacacaagaacttcatgtaggtgctccttaaacctccattaatttnttgctttaccttctcttccattgatgtttcttcattttttctccatgtatcttctaacatgtcttgtgctaaatgttgttaactttattctgtagagtttacaccgattaaacttgctatata

SEQ ID NO: 44604 - DNA, 406 bp, Glycine max
agcttcttatccaagacactctcttggtggcgaatctccttcttccatggcttattccctagtggatgacgcctcccctcacctcttctcctttatcttccactgcatctccatgatgggaaatcaccattgaaggacctcattgaagctcaaagatccagtctccatagaagctccacaagcaagcttacataaaaaagaaataataaatcacaattaattaaaagtttttaaaatacatttaaataaaagcccctttcaaaagggtaaatggctcacattcacttttctaacatcataataaaacttttccaaataaataataaatcatctcggctcaaaacaaggttgtgcaagacttcatgcaattaatatagaaacatataccctaatgtcacatcctatc

SEQ ID NO: 44605 - DNA, 311 bp, Glycine max
  unsure (1)..(311): unsure at all n locations
gggacgaaagaaaagttgaagggagtagttatcanggtaaggaaagaatgccatatactaaaggatatcaacatgtcaacaattgatgcattggagccagaaatgaaaaaggcttaaggggaagagacgaatataaaaaggttcccaggagcttcgtcagacaatagtaatgaactcaagctgagaatgacaaagagagaccaagccaaaacgtgacactgagagataagtngaaagatttgctggtgtcaaaggaaagctttgaggagcagttttgcttgatggaaaaaatatactaataattgtcaatc

SEQ ID NO: 44606 - DNA, 360 bp, Glycine max
agcttgccacccagctcgcccaggcgagcagggttgcttcctccataagcaacagccttctggaggaatcttctggagggcccaagtgggcctggttgctatttgcaccccgatttttactaaatacacccccctgccttttttttggtaattcttttttcgtaaagttacggaaacttacgaattttgtaacgatacttgttttctttccgtaatgttacggaaccttgtggattacataatcatccccttcttgacttaccgaatattacggaacctcactaattgtgcaacgatgcttccatttgaatttcggtgtgtcacggaaccttacggattgtgcatcaatattttcttttg

SEQ ID NO: 44607 - DNA, 384 bp, Glycine max
ctccccaattttctataatagggggagaagtgatagtaattagggttcagcccttatgcacttctctctctctcgaaatactgaggaaaatagttcctgaaaaaatcaaccgagggcttccgaacgtttcggagtaattccccaagaccttgccggtctttcagatcatcgtggtcttcgttttttacgctcacggggaggacctttaccaacttttaattattcttgtcccgcgggggccatttgttcctggttttttttccgtccttactttttacccccttgaacggtaaaccttttttaacttttcgctttataaaaaaaaaatttccccgcgcgggaaggtatcccgatttgggaaaaaatccaccgttgtgggcgcac

SEQ ID NO: 44608 - DNA, 291 bp, Glycine max
ggatccttaagtcacctgcggctgcagctttagttgtgctggttgaaattttgcttgttcgcaggtatatattatatttgattctcctaagttagcagctcgataaaatgtctaaactgatgtatttaccacatcttagctcttcatgagcgtgtcttgatctatcaagctctatgacctcgtgctaagctcggatatatcatttgcatcatgagttatctcatcggatccataaaaatgcatacgctattgagtaactcctttgtgtttaagcatggggatctattcatg

SEQ ID NO: 44609 - DNA, 283 bp, Glycine max
ccactgtaaatgagtaatccatgagatttctctctgagagagaaaaaaaatagcttgagaagtctttatcctcaagcttgagtgagccaccatagagtgagtcaatttctgaacacatccctgttaccctactatcactttgtatagtggaagaatcttcatattggagaattataatccgttgcccccattactacctttaattactaagtggctatcttaaacttcacgaagcgggaaagtatgaagtttcccaacacaaataaaggcgtatgtcatactc

SEQ ID NO: 44610 - DNA, 404 bp, Glycine max
agcttaatgtatttgacgcagggtctaagatccattggtttcatttccctaaaacaatgttcaaccaatcaaaatgatatataataccattgaccacctctacacgaaacaagtacacgacatagaatgaatacgtgctaattcacaaaaaaattgtcctcagttcacattcatctcattacagtacaagttacaacatcctagcattaagttatggatagaaacttccccggcatagtcagcacaatccaaaaatagagcagtaatccaataaaagctgaaacactacttgcatcaatcatcattcccaaaaacatatatacatatagatacaccgtaacttgaaaatgcatattggttcaattaatgcctaatgaatgcacttgctttcaagtttaaaaaat

SEQ ID NO: 44611 - DNA, 554 bp, Glycine max
  unsure (1)..(554): unsure at all n locations
aattcacttcgtactctcacctattggttatgaattgtatatctaanctcnnnnnnnnnnnnnnccgctgtaganttcgtcgacatacgcacacnanananacncaagcccccncgttgaaacaggaagagagagcgcnagcncctttattatctatccaaangggtgagtcaatgtagtatctttcttaccaggtaatatatctttgaatgtgttaactggtaatatctatctgatctccatccttagtacacaactttcttaaaggcaaataggatgaccgataagcatggcttacataattgcccgattgaccaatgtgcacgaaaattatatgagtgtacacccactgatctattgaagagattattcaggaatactctcatcaatatggcatgttgaaaaagaaattatggttttgactaaaacatttatgctcaaataattttagacataacgactcttataaaatcagcatataaggcggctgttaatcaactgctattacaaagaactaaatgagatatttttttattatcatactatatgaaacg

SEQ ID NO: 44612 - DNA, 355 bp, Glycine max
  unsure (1)..(355): unsure at all n locations
agcttgaaccaattctattaggatctgtataatattctagatgttgttaggatattcgatgtaagagaactaattctgttaggaatgttggatttgattctcagttcatataaaagctttgtaataatttgttgaaggcaatgaaaaagttcactagttccatctccctctctctctctgcattctggaggcttcttggtcctcgaataccaatagtaacattatatttccatcaaaattataacttgtccgaacaatttttctgctcaaaatgatccctgtcacgttatgaaactccttccataagaccacagggattntccctgtttgttcaatgacgagtatgagacttggg

SEQ ID NO: 44613 - DNA, 201 bp, Glycine max
atcttaacatggtagtcaaagatttcgattctcttcttctgcagtaaattcacccttttttagatctggtctcaaatgatttgcccatcgtagacggcagcttttcccacaacgggcaagtcctgaatatttatgtactgcattccaattgccttgtccgtgttgtttggcatattctaaccaaattgcatcctctgctgc

SEQ ID NO: 44614 - DNA, 304 bp, Glycine max
agcttgtggctggctgtcgagacttagacagacaatggcaatggcgacacaatttgaagctcactgtggagtaaaggaggtatgaccaagcttgtggctgcattcagaggtttccagaatatgtcaagagaagctgatcgaacgtacgtaggctagtaacaacgaaagtgaaaaatcgtgaattaaaatatgataatttcaacgacggggatgggtataaaccgtagtagtcttgttacaaacaaacacggttcttataaaatcgcctttgtagcattcacattaaagggcgatttataaaaac

SEQ ID NO: 44615 - DNA, 268 bp, Glycine max
atcgagttcacatagcttttttggctacttccaacacatgattgagctaaataatttacaaaattagagactgttgatgtccatgttttatttccaattgcactttaactctaacaagatgtaatgaacaatgctattttaatgaaaatctgaattgattcgaccctatgttctactgaatgtcttgtgtaaaatttgtaatacttcaacaatgtatcattcacatacatccatgcttatttttcttttcacactggttgcattgctc

SEQ ID NO: 44616 - DNA, 231 bp, Glycine max
  unsure (1)..(231): unsure at all n locations
agcttactttgaaatntgtgatttaatatgatgtatgctaatttatatatatagagggaggtatttatattaataatttatgtaaataatattgtagagtgttatagtatgattccaaaatttattaagtgttggagtttgagaatattattgttaaatttcatgaacatgtgtatggtgtccttatgaatatcattgggaatgttatgagatgggtgatgtgatgttatt

SEQ ID NO: 44617 - DNA, 276 bp, Glycine max
tcatattttgagaaaggaagataactctacaaaacatatgagctcaaactcattatagcaatcaatcaagacaaacaaataaaaaaaaaattagtcatcatataaacaagttaaataaaagagaaatttcaaccaacttaatttaaaagttaatggttttgatgttaccttcttcatgattcaagtgcttagatctttaaagatggaagtcagacttttgtttttcttacttaaacttcttgagagatgttctcatcactttcatagtccttggat

SEQ ID NO: 44618 - DNA, 299 bp, Glycine max
agcttgtagaattcaccccaattctaatgccatatgctgacttactcccctatctgctcaataattcaatggcagtcataagcccagtaaagacttctcaacctccatttcccataggatacaaccccaacatgacatgtgcttatcatgggggagttccggggcattccattgaccattgtatgaccctaaaacataaggtgcaaagtctgattgatgcacgctggctgagattcgaagaggggaatcactcgtgagttctgatgttgtcaagcaatactatgtatgatgcctggggc

SEQ ID NO: 44619 - DNA, 389 bp, Glycine max
  unsure (1)..(389): unsure at all n locations
ttcatagctatactcgattaccaaaactatgtaatccattaccaatgctntaaaacggttaaaaatgaatttgtaagtgtgcaattgattacacatcatatgtaatcgattacgccaatgctgtaatcgattaccagagaggattttcgagaaaatctgccaacagtcacaacttttcattggatttttgaatggccatcaaaggcatttaaataggtgacttgggcacgaattttcttcagagttttcactgttcacaaaaggcataatcctctcaaacaaaaatctcttatcttcaaaaattccttggccaacacttgtgtattcaataagtaatgaggcttcattgaacatttgctctttaagagatataatnctcttcttctctc

SEQ ID NO: 44620 - DNA, 320 bp, Glycine max
agcttcggaagaaagtgatgatgttctatccctaaaggcagagcttgaaagagcccgagtagtcgaagagaagttcaagtccatagccatcaaagtctgaaaagagtatgatgaacaaagggacgtcaatatggccaccgctgatgccttggaacgagaaaccaaggaagcccacaaggaagaacacgtgccagcaaagttttgaggggctttatagggcagctatagtaagctcaagctccgaagaggtgaaaggaatcatcacgggtcaaaggcatgatcttgaaggacgagctatacgcttaccttaagtcgaaaag

SEQ ID NO: 44621 - DNA, 226 bp, Glycine max
  unsure (1)..(226): unsure at all n locations
ccatatttttctatacttgtatcaccactcattgagntggagaggaaccatgttccttcatgggaagatgcccacgaaatgaggtttcagaccttaccttgcttcaacatactaaacaccactaatacatatgnttttgttctttttacaggtgttgaggaaaanagcccaacggttcaagaaacctcggatttgaggtcaaatccttttcaagggggagggaatg

SEQ ID NO: 44622 - DNA, 336 bp, Glycine max
  unsure (1)..(336): unsure at all n locations
agcttatacaaaaatttaaggttataagttaattttaatttataagagaagttcaattcattttgccttctgtaagtgcttcgggaaaagaatacccaaacagggcctaaagccctaaaccttgacctgattagcatttcaacaaaaatctgtcaccgaaatcaagagaaccaaatttcccatgacatcaaaaaccacttcaaaacgacacgaatcaaatataatacgacaaaacacatttcaacacagtttatgaacatgaagaataggagaaaaagggaaattanccgtttcccctcaattccaaattgaaaaaggcgaatattctgcgaacga

SEQ ID NO: 44623 - DNA, 398 bp, Glycine max
  unsure (1)..(398): unsure at all n locations
acttaagttccttgttgacatcattgtttatatggtgatatacttgattgattaaattcattttagtcttctaagattcttttattctttttttgtttctgacctggataattgttcacgtatgaacactcaagcatgtctgaggaccatatatcatagcttgtcacggaaaccttggctgcagttggattgaaggtatgcacatggttcaaaaccattaacattatgcagcagatactgcattaaagggtagcagtagtagtatacattttctttctgccattgagaaagttgcttcatactcatattgctggactgctattcacactcttttttcttccattctangtgcatagccattatgttttactcacagactaactactcacccccttttt

SEQ ID NO: 44624 - DNA, 408 bp, Glycine max
agcttgcttctatagttgcaatagttgctttcatttaaaatttctatttacatgtttccattatatgtgtatgtgcatgcatgtgatttcttatatagcacacacatccatcttgcaagccccaaaactatttagatctccatgctgctgaagtgcctgattttgctcttttgcagttgccaattattgttattattcttaagaacaactaaacttatacaaaattcaaattaccatttcagacatttttttaaagttatgactgaaatttctaacaattaatttattcctttcaaaaaaattaacaaaaactaattttaatagattcatgagactaaaccaaattttgtcacaccatttaaccttatcaaatttcaataaatattaatgatgttttacatctgcagt

SEQ ID NO: 44625 - DNA, 184 bp, Glycine max
  unsure (1)..(184): unsure at all n locations
aagtttgaggtanggctacaattcattaataagaaagaaattctagaggctatcaaaacctttgctacaatctctaagtagaatctgcaggttaaaaatatgataataagatagtctttgaaatctgtaaaaaaaaacaaaaggggttgtccgttctacttacatgttaacaaatccattcaag

SEQ ID NO: 44626 - DNA, 354 bp, Glycine max
agctttcagcaggaaagctaagtgtgaagtatgttattctgcacaggattggagctgcaaactgggttcccaccaatcatacttccactgttgccacaggtttgggtaaatttctgtatgctgttggaaccaaatccaaatttaattttggaaactatatctttgatcaaactgttaagcattcagaatcatttgctgtcaaattacccattgccttccctactgtattatgtggcattatgttgagtcagcatcccaatatgttaaactacactgactttgtgatgaagagagaatctcctctatccctgcactataaactgtttgaggggacacatgtcccagacattgtct

SEQ ID NO: 44627 - DNA, 311 bp, Glycine max
  unsure (1)..(311): unsure at all n locations
gctagcttataggaagcagcaacaccgttggcattcttgtcttatgcaacatnttaggatgcgccttccacaattgcgagatctatggtctttctgatacttggcttgaagtattattcactagtgaccgaagaaaagcatattctgataagttgcaagtatgacttataataggcacttaaaattctctatcactgcatgtgtctccatggaagaaagcaaacttaatactgctattttttctactgaggaaactgaacccacccttttactccttcaccttattatgcataattccttcctctaccatg

SEQ ID NO: 44628 - DNA, 409 bp, Glycine max
  unsure (1)..(409): unsure at all n locations
agcttgtaatatatatatatatatatagataaaagttggcatgctaaggcgtcacaacattagctataatttcaattatgttgccacttcagtctatgcctatcagcagcagtacacaaatatatttgtgaaatgacaaaatttagatacagtttcctaggtgcttttaaatattatttttcgatcaaagttaaaatttcactttataacctacatgataaaagtttgcatcaaatgtaagcatatattacttaggtgaacctctaatnttgattagagaataaaaagactttctaaattttgttcttttaagtaaagtcatntgttatactanttaaatactcgtccaagcaacacttttcgtgaaacgaaccaaaacatgccataaaaaatggcgattaattctcat

SEQ ID NO: 44629 - DNA, 285 bp, Glycine max
  unsure (1)..(285): unsure at all n locations
ttatttgatgctttgcatggtgttatcttttttggaattatatcaaatttctttggatcaacttggttataatgtcatgtacgacatttggcgccgtgcctgtngtggaattgaactgattaattcatttcgatagaaaaaacaactaacaaatatatgtctaagttcacaaaattcagcatgcataaataagaatatgtagaagaatattctatttcccaatacaaatagaaaagtaagcaattaaggtgggcttttcctcatgcctatttgaaaaacaaaatt

SEQ ID NO: 44630 - DNA, 308 bp, Glycine max
agcttcacaagcaagcttacatcatatgtttcaatagaatatcaaaggagacatatagaagaagagagaataagaagagctaatgagagagatgaaaggttatgttggaggaccaaacaaaagagggaaggtatctctactagtgcaaaactcactacatctattcatcctactagaagtatggaacttgaatgtctcatgtgttcaagaaaagggcatatgacctcccaatgcccaagatggaagacattgacaaatgagctaaaagaaaaaagatgatagagaatgagttaagaaaaaatgagttg

SEQ ID NO: 44631 - DNA, 401 bp, Glycine max
  unsure (1)..(401): unsure at all n locations
agctnttatatttatttttattaatagttattatttagtttattatttatcgtatgttttgttttaaacaaaagtgattaaaagtagttgggctcaaaaagagtcccaaaattaaaaaaaaaaattgaagataaaggttattaaatagtatatagttgaagggtaagagtataactttagtaaaggtgatatgaagtgctaatgatgaggtgacgctacatgggagcttgaggacaaggtgaacaagttacatccacatcttgtccaaggttagtgaatttcggggacaaaattcctaaaaaggtcagagagatgtaacnatcctaaattctaacactcaatttcttatctttgtgtgatctatataatgcctcgaacaaattcacaccaaatgagatgga

SEQ ID NO: 44632 - DNA, 347 bp, Glycine max
  unsure (1)..(347): unsure at all n locations
ctatgatctcaatagatttatttgagggattttcttatttaatcctccttttatttcatgtttgtttttcttaaagttacttactttaatgataattgttactagttcttttatcattcatgtttttgccttaatcttgatgttacttgtaatttaatttgtatgaatatttatttattctataatataatattaaaatgaaaaatagtatgaaaataaaaatatatgtaacattaataacaattagattggttgcattataaaaaagctagattactcattgaccaagggcatgttagtaaacaaaacaagcaacatanacttaatttatcactatcactatcatt

SEQ ID NO: 44633 - DNA, 359 bp, Glycine max
agcttgaatgctcatttgagcttatatgcatgttatttacacacaaagggaaagggagagataactgaccaaatcttttcatggctattcttccagaagaacgctcccctgatgtagtttcgtttatagcttggaccatctcatttttgctgacatatccatccttgttcttgtctaagaatacaaatgtatcaaccaaagtctcaaatgtgccctccagctttggcatcccaattcgtgatttctagggaagtcatggaaaaaaatttgaagatgtagccaaacatggaaattcaagggttattgttatcaatgcaagcatgatggaaatctatgcttgcctgaagaaatgcctgaaa

SEQ ID NO: 44634 - DNA, 343 bp, Glycine max
agcttctctattagctgcacttgactactatgtttgcttgcatagagacatcttcatctctgcttccccaggaaatatgcacaatgcattggtgagttgtgctatatgcatttttagatgtctctaattgaaggttaaattattaactaggtctgtactatttgggaattttcaaatagttctttatacttttatttttaattgagtccctaaactaaaaaggtattccctatagttttttggcagtttcaaatcgccagaaaatgacaatttatggcgtcttaaaaagactattgactcaataaaaaaaattcaagatcaagatctaattttaaaaaaaaaa

SEQ ID NO: 44635 - DNA, 281 bp, Glycine max
aactgataatggcaatagtggtttcctttacctgataacggtgaataccatgttgaattcttattgcaaactggggaacatggctgtggcgaggcttttcttcgttaggatactgaaatgtgagcctggacctgatttgtttacgtacacttccttggttttgggttattgtataaacgatgatgttgaaagagcttgtggaatttttgtgttatgccgcggaagaatgcggcttcctatactaatcttatacaccggctctgtgaggctgggaaacttca

SEQ ID NO: 44636 - DNA, 409 bp, Glycine max
  unsure (1)..(409): unsure at all n locations
agctntataagcgcgggtctgggagacgaaggtttagtggttgcgatatacgaagatgatgttctgagtacattggatttggtacgaccatgccctcctgatttccagctgggaaattggcgattggaggaacgccccggcatttacgcaacgagcataatgtaaacctttacggttttaaaagctctatagttgggcctaggctttagagttttttccttttgttaaggctttgtgtcttttgtttttgaatttataatacaaggatctttcttcatctgttcctacgtctctacccattctcattcatttgcatgttcacttctttttctgaaatggcagatccgatgacgagtcccccgaaggtactaatacctgggacccacctatcgacttcgagcaagaaatg

SEQ ID NO: 44637 - DNA, 371 bp, Glycine max
  unsure (1)..(371): unsure at all n locations
agctntgatttccattgttccggaaacctttcttttctcatgtgcacccaaacccaatcttcgggttcgaagacaccttctttctccctttgttggcttgtttagcatagcttttatttttcctctcaatttgatctttgactctctcatgaagcttcttcacatagtccgcctttgcttgaccttctttatgcttaaaaacagaaacattatgcataggcaaaagatcaagaggagttagtgggttaaaaccataaacaacttcaaaaggagaacaattagtggtgctatgaacagctctattgtaagcaaattccacatggggtaaacaagttttccaagtttttaagttcttcctcaaaactgtccta

SEQ ID NO: 44638 - DNA, 306 bp, Glycine max
  unsure (1)..(306): unsure at all n locations
atgaatggaagcggaatggaaaaggaagagataaaggagaccccactcttggagaagatgagtctagaagaagctcaccaccatatgaggccattgttaatagcttggaggattaacaagatgaatgactggagggggagagaatagcacganattatgtgctctaaccgagctcctaaatatgaaggttaatattcaaatgatcaaagttccagacaatgcacacacatggaccctatttatatcctatttgtacacaatatgttatggaatttgaatgcaattaaatttccttgatttgaattg

SEQ ID NO: 44639 - DNA, 415 bp, Glycine max
agcttggggggaagccattgaacctccttgatgttagaagctatcggagggtgaaactccagagagttgatctcataatgtagagttctaagcaaagctagatttgttttacactatttaattattcaattatgcttaattatatcgtatagggtccttcaaaaaaaaaaaattatatcgcatatggtaacatacatagttttctgtatgaagggacatgctctcgctagctcctacgatagcaaatttttttttcttttgctgaatattaagatagctaattattacagattagatctgtttactctgggtaaatgtttaaataaggttataagttaatttcaagtgcttttcataattattagcttttgaaactaaatcccattattagaaactgccctgatttatgtgatat

SEQ ID NO: 44640 - DNA, 284 bp, Glycine max
  unsure (1)..(284): unsure at all n locations
tactcagcctgtttactgaaaaaatcaatttaaggttcaacttcatgtcttgctatatntgtatgtaactaacttggataagtcatttcattggtgctaataatacacgatgataataaaagccagcagggtcttgcagaaatttacgacgtcagtatttcttaaatatatgtgttggaacattggaaacctattattaatttcctcaaggaggtgtacatttttccctttgcttgtgatattccccaaaggttttttttaatggttgacaacaagaatatgtt

SEQ ID NO: 44641 - DNA, 301 bp, Glycine max
agcttcttgttacaactagaggaagagaagttggtgcctgcttcacaagcacctttccaacgagagggtactttggacaaacctgtgtcttggaaactgatgtgttcaggccatattcctgtatcaaggactcctatgatcacatctgaggccaagttagaagcactccaaagtccttttccattctgtaagccaagaaaatgggagctgtattgtgtgtgaaggcttattagttcatcatgtatggctgaaaggaaaccatctatttggttcaagtactcaagctgcttatatgaaagtt

SEQ ID NO: 44642 - DNA, 562 bp, Glycine max
  unsure (1)..(562): unsure at all n locations
tcatatcggtccttcggttatcttatctgtgagtgatggatttatatttanganannanannnaaaagagtgaggccaccgtctacagacactctnnaaactcaagccttaaatgaaaatctcaatagaaggttttgtgtatttcatacgatttattatgtttaatctgtattacacactatatgttggactggcagctgagacaccttaaagaaagaattttggatgacattacttaaatttcattttcattgcagacacaaattttgattgaacaaatggaagagcttcgcataagggggagatatgtatcttgcacacttaattttggccttataattttacctttggctatactctatatataggcaaatcaacttttaacaagtcaattactgtccaagtttgtctttgtaagacaaactgagatcttagtatacattatggatccgggttccgtaatttactcaattttgatatttttcaaccatcttgcaggaacggcctttttgagacatgaattgtccactgaactcatgttttacatgtacccctaacattn

SEQ ID NO: 44643 - DNA, 205 bp, Glycine max
agcttggcactatgttaagcagagagaagtacttggtctctgtgtgtccgaacatctattatgcattcattgtggcgctaatcgtgactcttgcaacctgatcaaccacgacaccaggaaaattaagctttaagcttaatcactttctggcggatacaatggtagttaatatctcaatttcttcagcatgtgtattaaaatctca

SEQ ID NO: 44644 - DNA, 252 bp, Glycine max
caaaaaaactctataaccgaaaaaagaggaaatagccacatttttccaaaccaaaattaggagtgattaacccaggcaccatacccacacaatgggaacacctttaaaagggatgctggtccaaattggaacatactaatgaaatatagagcaccctcgctacagggaaacaaaccctaacataatccacctccttatgagggaggaaggcctaaggcggtctaaaatcaaaaacactctgaagcatcgacc

SEQ ID NO: 44645 - DNA, 305 bp, Glycine max
agctttccatctagtgcagagctgccgttagtgtcttccagtgtgtcccaactctcaggtaaagaattaacgagtataagagtttgtaattcatcatctatattcatatctaccttcttcaagagattaacaatcatgttctgaatgttcatatactccagcttgaccaagcgtttgacaagatgagctctattccttggtgtcttctttcgaatcaaagattcaagctttgtccataactcatacacattggtataagttgatacatgctcgaacaggctgtggtcaatatatttatgaatcat

SEQ ID NO: 44646 - DNA, 548 bp, Glycine max
  unsure (1)..(548): unsure at all n locations
tttaactcatcgctaaacctgtttcgctatataaacattactactcttctcacttantnnnnnnnnnaacgaagattgtgcgattgtacgacnacgcgacanananaanactcaagcttacattccattcctggaatctggatggagctttattctggctcccaccagtctgacttgatcatgaatggctcttcactccttagagtgacgataatggatccatttatggtcactctcaatggcagcggggtcttagacaagggagacctactttcccgtatatgatagtgctctgtttggagtacttttccagagatatgaatagcctcaatgatgatgccaaatcttaaatttcatcccaaccgtgcaggtattcaactatctcattctgcttttgcacacgaaattattgcttctatctaaaggagatatcctctctgtgtaaactattgtttgccaaccttaacactcgtgtaggtgtcaaggctcttcatcaacttctataaatctgcattacttagccggatatagctcataaccttccatan

SEQ ID NO: 44647 - DNA, 408 bp, Glycine max
agcttataacaattccaaaactgacatttgatcttgttgttgaaaactttcgagcatggtttcaacattttcgtcatcacaaatttgcaacgcaacatattttccagacattaaaaatctaaaactgatagcacaaataatttcattattttctaactttaccttatcttcaatttttttcttcaaagcattgaaactaattccacgtttaatctaaatcgcttttttactgccttcaaatattacaccatcattctcttcatataccctttcattgaaatacaccactgttataactgaattcatgatgtacctacaaaaaaaatattttaaataactaatcatagtaattcaaaaaataaaatgtatcacaaaagtccctttaacccacttgacctgaaactgtat

SEQ ID NO: 44648 - DNA, 571 bp, Glycine max
  unsure (1)..(571): unsure at all n locations
tctaccttacacgatcaacaactgtcctcggaacgacgtggatgacgtgctgtatgatgattacntntnnngnnnnnnnccgctgatgcgcccgtacacatgcgncacnccannnaanactnaagcctgcataagagaaatcaggtgtaaccatctcccaagagtcctcttactatgtgaaggatgagtcatgttctcaatgtgaaaatcaccaacggcatgctcaaaataataatattcagaaacacccccacacgaggcgcagattgaccaagatgcacactatgcctaacatatctatgagaggttctatctatttcaagatcaaagggttggaaatcacctggattgcccctaatcatgcactaaatgcacccaaataatgtgtatctcaacgagcacccaacaagggaggaaaaccatagctatactcaaatgaattcaacatgagctgaaaatttggaggaacaccctaaatcatgaaagatagcacaaaactttcaacaaaaatctaagtctactattaaacaactatgcaagtttagaaattagacataatacctgaaaaaan

SEQ ID NO: 44649 - DNA, 379 bp, Glycine max
  unsure (1)..(379): unsure at all n locations
agcttccacaacatccaagcaaaacaacattcatacagcacaagctatcacagccaagcaaaacagagcaaaggcagaaaactctgccaaaacaccaaccaaaatcacagcttttctcacttaaagacccccagtaacaattccttcgttccaattcgttaaccgttggatcgactcgaaaattttactggaagtctctagtacataagcctacattgtgaccgttgggatctactagcaaacgtccagaactcattctgtactactctttccacagcctaccacacacaagcatttttctgcacaagccaaaattctgctgcacctattatgacagcaaaattctgcataagtgcagatnttcaaaatcacactttcc

SEQ ID NO: 44650 - DNA, 336 bp, Glycine max
gatattataggacttcttcttacatccgagaaaaagttattgacggttgaatttgctcagaacttcaacatttaatttcgagcgtgtcgctatattacgggactatatcagacatccgagtaaaaagttattgtcgtttgaatttgctcagagcttcaacattcaatttcgagcgtgtcgatatattacgggactcaatcagacattcgagtaaaatggtattggtcgtttgaatttgctcagagcttcaacatttaagttcgagcgtctcggtatattatacgactcaattagacattcgagtaaaaggtattgtcgtttgaatttgctctgagc

SEQ ID NO: 44651 - DNA, 294 bp, Glycine max
  unsure (1)..(294): unsure at all n locations
agctntattcaagacaaagaaattaaagatattctagatggatgatcaagacagtctctagagtcttaggaaggatatattaaataggaaggaaatttctaattgaagtagcaaaaggtttggccaagaaatttaagttaaaaagtctttttcaagagatttactctctggtaatcgattaccagaggatgtgtcataccctaatttcgtccggggattattatttgatgatatacaacctttgagtggccgcttcgagatacttggcaccctttgttgcacaatatgtgaagt

SEQ ID NO: 44652 - DNA, 378 bp, Glycine max
agcttatgagaacaaaattgcctcaatcatttccaaatatgcatgtgaattaggaagcatcaacaagaatcaagccaaggctattgtgcaagcaatcaatggggcaaaacacaccaaatgattatgatgatggatggctcaaattctcacaaaggtaaactcatcactttcaaattgagctttcaaaactatcatgacatgtagaggcgaatcaaggatttcaagtcacaaaatgtcaagaacttttattttcaaaacaattacccatttcttgaacatatcctataattcaaagaaaaacatgcaaagtcgtacatgcacacagaattgacccaaaatattaaattagaaattcgacgaaactaacaacattaacaa

SEQ ID NO: 44653 - DNA, 345 bp, Glycine max
  unsure (1)..(345): unsure at all n locations
ggagtagaaacatgggaccaacattntatttcaaaaaagatgtcgtatccagtcaaggtctgagagaccatacaagtttcctaacgatttctaattatgtgggccattaagtctatcatatgctgacaataaccgagaagcccatgaatctcttcgggggcggagtaggtgtctgccatcgccttggccttggctaacaatcanggaagttcttgactcccgttcaaggtaagagcaaaccgatccatccacatggttgcctcttggtgtaaagagtcgatcacccttcctctagcctctttttccgcatacacttgagcatactcatccgcgattctatgctcg

SEQ ID NO: 44654 - DNA, 396 bp, Glycine max
  unsure (1)..(396): unsure at all n locations
agcttcagaactaaaatcactagctggaatcactctcaactaaaaaggatttgaagcccctactccaagctatggagatcacaatacacatggcccataattcagctattaaaactaaaaagaccaatattagcagcaaaagtgaaaatcatcaaacacgaaagtccaggctaatagaggcctcacagttcaatttcaacttatcaataggaggaggtagccatttaatatccagagacatcatcaaacatctctcaaaagtttattaaaactagagatacaaattaaagcttccaactcctttgaagtaacatttttttaatgctagtttctatcttttaaatttntatatttttttaatctttattcctaatatatttatcaaaaacatttatt

SEQ ID NO: 44655 - DNA, 259 bp, Glycine max
  unsure (1)..(259): unsure at all n locations
tactcagcttcatgttatgtccatcaatatgtcaaaacccatatcttattatggagatcgtggtatggtattgtaagtgacatccttggccagagtggatntgattgggatggcactaagcacgtgatcacagttgagaatgaaaatgcttggaatgaatattgcactgtaagtattctttaatatgttgctatttgttattcaaagtagattgaatttgactttttttttcagtcgcataaatcggcttaaccgtttc

SEQ ID NO: 44656 - DNA, 326 bp, Glycine max
  unsure (1)..(326): unsure at all n locations
agcttcggagagaggaaagagactcaatcacgagtacatagcatggtcttaaaggaggagttagctgcttgctcaagatccaagaagagtttggcccaacacttagaagccacggagcaaagcattctagctataatagggcggtacaaagaagagttaaaccagtctttgacccatgagcaaaagctagtagaggacttcgcacaagcatatgccgagaaagaagcaagaaggagggtgattgatgcattgcatcnagaagcgaccatgtggatggataggttcgccttgaccttaaatggaagtcaagacctcccgcgactact

SEQ ID NO: 44657 - DNA, 458 bp, Glycine max
  unsure (1)..(458): unsure at all n locations
cttctcaagatgtacttgacgcggtccatcttggatatacaccttgtggtatggcccaacatgttactgtcttataccggtgtggaatgcccaacactataagacacanacaatggtcctcttccacgcaggggaagtatgttctatcttcacagggtcatcgatactttctctacttcaagtaagtagacggcttcgatctttttttccagactcgtcatgttgccccagcatgcacccccattgactcgtcccaaatcgtcatgtacaagatgagaggtctcctgtgcaccggcggcataatcacgggagggttcatgaggcactgtttgatctttccaacgcctcttgaagtcctcgttccatggatggatggtncttgcgtaaaacttgaacatgctccacatagcgtgagcgtgatataatcttccatgtattcaacgccccagaaactcaac

SEQ ID NO: 44658 - DNA, 379 bp, Glycine max
agcttgtagtgtgtaaaatgcactgctcatttattccattatttaacttttatttagcagaaagcagacagcaaagatccaacatgcaaccacttggtcataggggatctaatattctaatatcatgttgaatacacacggaatggttatatatctatcatactatatcgtacgttatgtatgcagatcagaacgacagttagtccaaaggccaagcaaacacttatacttctatccatgagagtcattttctaagctgcctcaagctctcagttccatatagctcacagctacatcaagcttcctttcaatcaatattctacaccattcctttgcaaatataatttttaacttacaccaaccacaaccacaacatatt

SEQ ID NO: 44659 - DNA, 425 bp, Glycine max
cgctcattaaccttgtcttttcttaaatatccatggcattctttcttgtttattcttaaaattccatggcatacctaccaacaagcttagcactcattaaccttggtggagtcagccaagatctttttataaaaatggtgacaaaaaatcctccttgacttgagtgaagccaccgatcactacatgtaatgacaatgttgtcgacactcaacatagataatgaagtaaatgcacccaatagcgaggtggcgatttacaattatgtaataacctcactctgagtcataccaaactattgaacaatggcgctaaatctacaaatacatgctctagagattgttttagaacacttaacatataaacctgtgaagactaccataaagttttgagaacataataccctatctacatattactttattaca

SEQ ID NO: 44660 - DNA, 367 bp, Glycine max
agcttcgcatgttcatttaattgtgccaacaaatgaattttagccccatgacttagaacaagatcacgacatctatgcgaatccccagcgacatttcctaatgcccacactgcctgtgagtacccaaaataccaagggtaaaatgttaaagcttttaataaatgatagcatggaacagtacaacaaggtattgttgtcttctgttgtcggctgcaaattaataaatggttaaatacaaccaccccacgcacaaacatacagataccccaccacccccctaccccaaaatttctttcttaacatgcaatacctgctcatacaactttacaccacaataagcaaccccaattctaaaattatacataac

SEQ ID NO: 44661 - DNA, 332 bp, Glycine max
catatgtactttgtaatgtctacctttttgattttatcatagattattggggctaaaatatgcgcctggtaataggtattttcttaaacgagaataggtatggtagagaatagttcaacatcagcctacacagtatccaacatcagaggagttgagtattgggaggatcaagtctaaagcttgtgatcttcggggtcaccatattgcacgaagagtctggaaagattactatgctaaggtctttctctattgtacctctcctaacacatacacacattagtgctatgttatacctgttggcccccaacattgattctcaatctgtttaacca

SEQ ID NO: 44662 - DNA, 366 bp, Glycine max
agcttgccttgccccttgatatatttgagggactcatggtcactatgaatgacaaattccttgggataaaggtagtgttgccatgttttcaaagcccgtactaaggcatacaactccttatcataagttgaatagttaagggtaggaccacttaacttttcactaaaataagcaattggatggccttcttgcatcaacacagccccaatcccaacatttgaagcatcacactcaatttcaaaagatttttgaaagtttggcaacgcaagtatgggggcattaattagcttttgcttaagaacattgaaagcttcttcttgtttctctccccatatgaaaccaacatttttcttgaacacttcattg

SEQ ID NO: 44663 - DNA, 552 bp, Glycine max
  unsure (1)..(552): unsure at all n locations
agcgccaagtgcgcgccagacattgttgcattcggtgcttttaaatattnngttatgnnnnnnnnnnnnnnccgattgatcgttggaacactctgccaacaaacccannacataaccttgacttggaataacctcttgcccggatgatctgtttccatgcgtagttaagtgagacaaaagctggtgctatcaaactccatatcttagggtggaaaggatgaatgcttgaaggaatgcatttaacactcatagtttttaagaatgcaggggtcctgggaattagtgcccttctttgacacaatgtctaagggtaccaaaagtgcccaacgtacgtttttaagaaagcgacacggaccctccgttggtttgtatacagaagggatcaagacataaccctgagtcaaagctctgtctaagacacatggcgcgaagtaactcgtcagataattttctcgaactaagcacaaggttatgaaactctccaggtactctaaaaagggcacacacctgtttgtctcttgccctcattaaggaaccattaggagagaaccn

SEQ ID NO: 44664 - DNA, 351 bp, Glycine max
agctttggaaaagactgttttcaccttctcgctatgcctttctgctggcttagcgagcatccgttaagcgcaacactcctgggctaagcgcgaggaagaatctataagaagatgagctgtataggtttgctaagcgcacggcttcatctctctaagcgcaccgcttcagttcatccgctaagcgagaaaggcacgctaagccaaaaatcactaacgtgcgctaagcggtccatacgtgcgctaagcgcacgagcacgaacaaggccacctatttaaacttgaaataagatcttgtgaagggagtttggaatgggattcacagctttgcatgtctaggggttctaaagagag

SEQ ID NO: 44665 - DNA, 334 bp, Glycine max
tatcctgtctatactaacaatatgcaataactagccctccaacttgattcccactacaacacacccatttttgtccttttcaaagccattcacaacatactcaaagaaaaagaataaaatactcaaattcaagaaaattgttggatgcctgatatctttagtttctagaaaagaatatattaagttatctttgtaaaattttattttgtttaaaccatatcaaaatttacatcaagtgaataatccatgttaacaacaaacatcatcgattcacaaaactagaagttcacctctcactctctcagtcactgtataataacatagaaagaaagat

SEQ ID NO: 44666 - DNA, 414 bp, Glycine max
agcttcattctctataggtcttcgcataacaaaatttctcaaaaatctctggattcagacccttctctctctagaatctttcacatgcagaagctcttcaagaaaatggccaaaatcctctcctatttctgattttaggcttaaataagtggctttatttgtgctagcgcgcttagcgcgactatggaccgctcatcgcgtattagtggatttctgcttaatgtgtgcgtttctcgctcagcggatagattgaagtggtgcacctagcgggatgaccctttgctccatgaacatgcacaactcatccttcttccggattattcctcgtgctctgccaagggaatggtgcgctcagcggatggctcgctaagccagtaaattggcttagcgaacagatgaaaatcagcacttcac

SEQ ID NO: 44667 - DNA, 274 bp, Glycine max
tactcgtgaataaaactaacagtgtgtttggatgaggaaatctaaaattctaaagaattttaaattctgagaatttcaaatgcttcaatttaaattccttcatttctaaaattttgtggttggataaaaaatcagatatcttcatttttaaaattttgcgtttggataaagaaattaaatttcttcatttctcaaaatttgcgcttgataaagaaatcgatttcttctttttaaaattccttattgataaataatcaatgcttctctttaaaat

SEQ ID NO: 44668 - DNA, 355 bp, Glycine max
agcttcataactgatattggagtacccaatcatttctcatatactttctgagcacccaatccattgaccttggccatgtattctgatttgatcacgatgggtgctttaatatataaaggtatgataagaatactctgcccttcaattgtctcacgccgccaaactactcaaaagagttttatcctatcaataatgaacatgtgaagatatttgtgtccgtgagctacgtttttatgtcaaactactcagaagagtgtatgttcttcaatcgtcttatgccgacaaaccagaagagtgtatgctatcttaatgaatatgcgaagatataaggtgacttgcattattactatattaa

SEQ ID NO: 44669 - DNA, 504 bp, Glycine max
  unsure (1)..(504): unsure at all n locations
acacttgttttcacgagagcgagngcanaaactaatctctganactantatttanngtatgnnnnnnnnnnnnnnnnagnaagatggtgcagtccgtacgcannacgcnacacnananaatacncaagctcattattagtgataaaagataatataaaggggctgatttttttttaaaaatatttcaagaaaatgagccatgacctattttgcctcccctaggtccttatattaccttaaattacctacctcataagcctcttcccttactctgggtaaacattattcttgccagtttgaacctacgacatcctgtctgctgcatattatatttaagggaggcctcctatccttctccctcttgtaactgggaacaataaataaagtgaaacagatcatagtatgaagaaccccaacataccacctgaaaaatcatataacagctgagaaaagcatgcaacaccatacaccaataatattagttcaatctgcataagtctgacg

SEQ ID NO: 44670 - DNA, 338 bp, Glycine max
agctttaaacaacttgtgtaatcgattactattatgctataatcgattaaaacagagaattcttgcctcttgaagaaaattttctaacctagaaactgttcttcacactaaccatgatgatgaatgatgcaatacatatatcatatgtactaagatgcaacatataagataacaaccaatacaaatgcctcttaagggagtgaggcatgtaatagtcaacacatattcgagcttttccttgagctcaagctttggcatttatgttgtcaccatgttgttatgttgctcccctactataaaatctccccttttggctttgggatgcaaacttaatatca

SEQ ID NO: 44671 - DNA, 239 bp, Glycine max
gatgttacaatttaatgatcctttggtagcctgcaatgagacacacacggatgcacaaacacgcactcatagagacaaacacgcgcagcacaaacacaaacacaaacacacacacacacataatgatgcacacgcatacacacgcacacacacatagagtcacacacacgtttagagacagataagtacccaacacactgagcgcacagacgcacgcagagacccacacacaaagacac

SEQ ID NO: 44672 - DNA, 375 bp, Glycine max
tagcttgagggggggaaccttgcaatggatatgtttatgctctatgggatcgaggtgagggtcattcgcggagtgcggtatgagggtgctgcctctgctactgggaggttgtatgtgtatgatgggttgtatataattcatgaatgctggtttgatgtggggaaatcgggttttggggtttttaagtataagctgtgtatgattgatgggcattctaatatggggactgtggtgttgaatgaggctcttttgcttaggaacgatcccttgagtttcaaaccctcgttttgttagtcgcttgatgttttaaattaggaagataacgcggctgttccgcttttaattacattgatcctatctttgacctctgtaata

SEQ ID NO: 44673 - DNA, 509 bp, Glycine max
  unsure (1)..(509): unsure at all n locations
tctgcgccacaactgcgcggtaatatttgttgtgtaattannnnnnnnaagagatgtgctcgtggccacggaanaanaaancaactccggaacggaataatagagagctgagtcttttttattgtgtaaaaaatggaacaggttttatatggcaatcaacgccttgctctcatagaccctttatgtttgcgcaagaaatccatcggaagagttataatcctgagaaaaacctgaaaaccatttgaagaagtacatctcttgactttgtattcaaaacctggcactggtaatcgattacccaaaccatgttatcgattacccacagattctcttgaatggatatgactatactcaattgactttgaatgtcaacatctcagatacctgggcattcgataccatatttcgtatgcataacacctctgaaatacaaggaatgtggaaatgcattaaaaactttgaaaacaatctttcttcgggagtcattacattaacgacaatgattaccc

SEQ ID NO: 44674 - DNA, 339 bp, Glycine max
agcttgatgaattttcttgaaaaaaagctagtgttattgtaaaatatccagaggagtggttgaggcatgtctgaacttattctttaaacacacacacacaatgtgagtgaaaatcactattacaccattaagtagcttcttactggatcattctatcccaaaatccaccattggataaaaaagtcttgacataaacatcatgtgtataaatctttccattaatccagatttatgtggtaccttattaatatacgattaaatatcaagattaacatagtatactagaatcattttattatttttattgtgcaatttccttgagaatctgacacaaataaa

SEQ ID NO: 44675 - DNA, 498 bp, Glycine max
  unsure (1)..(498): unsure at all n locations
cttattgacttacgacaatccantccattataagtttccaattattctcnnncnccnnnccgctgtgctcctcgctaccgacacttnaaactcaacctcggggatgggaacatcttcgactggggatggactatggtttataggagggccttctacgcatatcaaaatgtctacaaacacgacggatgtcacgggttaaaaaaaatgtgtcaatagccatcccttcttcgcctttcgtttccttcccacctcttaatttatttatattcttaagttcaatagtctaaacaaacagacagaagctacccatggcacataggagatccccacgaccatttacaactcctactgttgataacaaaaagaaaaaaacaaccgtcatcctgctgcaatgtggctacagtattcagataccctagcaaccccccgtgaaccttaatcggacatgaacacatcggacaaaggctcttgtctttgaaccttgaaactcatccaacg

SEQ ID NO: 44676 - DNA, 269 bp, Glycine max
  unsure (1)..(269): unsure at all n locations
agcttgtaggattatggggtacccatcacatgtggtactangtggcggtcgggcgatggtgcacaacaagttttccacatccacaatgtgcgcataaacccaccatcccctgttgcccacctccaactgagctcacgtactcccacgtagcccatatcctcgtttctctcaacaccgggtccccatcaatcctcccaagcttccacaacatccaagcaaaacaacattcaaacagcacaagctatcacagccaagcaaaacagagcaaa

SEQ ID NO: 44677 - DNA, 359 bp, Glycine max
  unsure (1)..(359): unsure at all n locations
tatgcagctgataaccctntattgttgcaacaacctattgtctccatcgtagatagtattcatatgtgtttgtttgtagtcggcacacgttttgatgcatgcttagatcaatccaagaatcttgtgacattggattgaactagcgtttgagacttgttaatactaaaacaaacacaccattcctcgtctaattttaggtttgggatgtaatagatacgatactatgcagagttatgtttgatcattcaagttctgataccatanagatatgtaagcagtaactaataaatgagagaaggaatatggataaattatacgctataatattcatgggttaatgatatccatagttcaaagac

SEQ ID NO: 44678 - DNA, 335 bp, Glycine max
agcttccagttccacaaatttttatgatgaacaatttaatactatctactgtagagctactactatacatcaagtctattcaagacatgccagcacaaccacaacaaaatgtacatgcttggttgactaaattcaacttccttttcagcataacttttgacacatcttccaccctccatatattgagctaaaggttcctccaccaatgcatttggcaattggcataatcaaggattgcttctctggcacagcgttcccatagcattgctatatcccggagtgacctgggttgattcaagcattggtgaaaatgtctcaactttgatcttgctatt

SEQ ID NO: 44679 - DNA, 369 bp, Glycine max
tattatttgcatcgactgaaatgaataaatagggcaataaaattcaaaatacatatcattctcaaattgacaagtacagaaaagagaaagaattttttagagaggtctcatgaaatttcaatggcctattatttagaaatttgacacaagttgagtaatttaattgctctacaagaagcctatcggaagcaaagggccaaaatttattggctcaaggatggtgacattaactcaatttttccactcctgtgctacggacatgaaaaaaatgaattaaattcccgtacttgtgatgatgatggtacgattcctttttatcataaggacatttgtgaagttgcaataattgtttgatgattattctgtgac

SEQ ID NO: 44680 - DNA, 337 bp, Glycine max
  unsure (1)..(337): unsure at all n locations
agcttaggaacccaaactttntattcttaatgcttgaaaacatactcatgactaggaacccaaaatttggttttagaattagaaaagcatgaaaatagggacttgcttgtaagaatttgggctgccccatgattggtactttgcacctaagtaacgtgggaaatgcttttcaatggtgtgtagatatatgtgtaaatataagtgtcgcaacctacccttcggcgggaaggcgacgcgtgactcgcgggatgcgtgttccacgaaaggaatacgcgcggagtcgccaccaacgtttatttgatgaaaatgtctgaaaaaccggaaaagacgcgatcta

SEQ ID NO: 44681 - DNA, 293 bp, Glycine max
tgatcaaaacaattatctaatcattccaatccactcaaatcatacaattgttcattcaaatcattctcaaacactcatttcatacaaaacaatccattgcatatcattttcaatcatttcattgttcaaacaagctttttggtacaagcaaacaactcaaagtgttgaaatttaaataactggaatttaaagaattgaaatgtaaaaactgaaattaaaatgactgaacataaatcataaaataattgaaaataaaataaactaaaaatgttcaaaatgcactaatttatatg

SEQ ID NO: 44682 - DNA, 382 bp, Glycine max
  unsure (1)..(382): unsure at all n locations
agcttggattgngggtcaattattaggcgttgttgatatatgaggccaaagttgctgagttgttaccaaaagattctgcttctaagaatggaactctaagggaggaatgcataatgtttgcaatggcccatgcaaatcaatttgattcactgctaacatttcttgatgagctatctgacttttccagattcaagacacttgaaataaatttgcagtcatgtctgctaaatcatctagcagaccttgtaaaagtatattcaaactccaggcttgagaaactatttggagatgtgagtaatcacttgtcttcctttacttcatacaaagagtctagcacctaccccaaaagcttgttatgtatttcgtgctggaaaggtctcta

SEQ ID NO: 44683 - DNA, 344 bp, Glycine max
  unsure (1)..(344): unsure at all n locations
atgttgtgacgagcttaanattccttacctggaacggaggtcgatggttgtcattgagtgagttctacccatggggagacctaacttaaaaatccattctaacacatctttaccatcaaatcgtggaaactcaagcttaaaattccttatctggaacggaggttgggggttgtcattgngtgagttctacccatggggagacctaacagaaaaatgggtggttgacaacagtttctcaatagcatcttcaattctatcaatcctggagccatgattccccaccatctgctcaatgtgaaggtccacagaccgcaacagtttgcctattccatgactctattttt

SEQ ID NO: 44684 - DNA, 403 bp, Glycine max
  unsure (1)..(403): unsure at all n locations
agcttgcttctatagttgcaatagttgctttcatttattatttctatttacatgtttccattatatgtgtatgtgcatgcatgtgatttcttatatagcacacacatccatcttgcaagccccaaaactatttagatctccatgctgctgaagtgcctgattttgctcttttgcagttgccaattattgttattattcttaagaacaactaaacttatacaaaattcaaattaccatttcagacatttttttaaagttatgactgaaatttctaacaattaatttattcctttcaaaaaaattaacaaaaactaattttaatagattcatgagactaaaccatattttgtcacaccatgtaaccttatcagatntcaataaatattaatgatgtttttacatc

SEQ ID NO: 44685 - DNA, 389 bp, Glycine max
cctgaaaatgttgtttatgtaaagtttgaagtaaggctaccattcatttttaagaaagaaattctagaggctatcaaaacctttgctacaatctctaagtagaatctgaaggttaaaaaatatgataataagatagtcattgaaatctcgaaaataaaaaaaaaggagtgttccgtctacttacaggtcacaaatccattcaagcgacttattgacaagtagtgacattcaaagatcaacattcttgctttataactgccacaaacaaccaggctacacctgaatgggtggcaaaaagttgatgtcttattaatgcacaccctcgatatgaaactcaaagccttacttgctgatgggataaaaaaaagggaatcatgttgacctttgat

SEQ ID NO: 44686 - DNA, 390 bp, Glycine max
  unsure (1)..(390): unsure at all n locations
agcttgggtgatgttgcgcgtactgatgggtactatgaggtgtttgctgggttttgacccacgcaggtgttgaagagacggcatgggcatctccctccttcctttttgcccctgttgccccgattcttttggcattcgcgtttgtggaggaaacgtaatcaaactttcctcttttcaatccaacctcgattctttccctggcaaacaccagatccgcaaagctggatggcatgtaacctactagcttctcatagtagaacactggcagagtgtccaccatcatggtgatcatctctctctcaaccatgggaggagctacttgtgccgccaaatccctccatcgctgcgcatattctttaaaggttncaccctctnttttgaacatattct

SEQ ID NO: 44687 - DNA, 347 bp, Glycine max
  unsure (1)..(347): unsure at all n locations
tgcctcaaagagatccaagaaggattaagcagctgaaggaaccatttccgctcctgaatatgacagccatcgttttaggagtgctgagcaccatcagcgcttcgaggccattaagggatggtcatttctccgggagcgacgcgtccagatcatggacgacgagtataccgacttccaggaggagatagttcgccggcggtgggcatcgctggttacccccatggccaagttcgacccagacatagtccttgagttntatgnccatgcttggcctacagtgganggtgtatgagatatgcgatcctgggtgagggggttagtggatcccattctatgccgatgctctc

SEQ ID NO: 44688 - DNA, 354 bp, Glycine max
atagtcaagaaggctattatcttatatacataaaactaatatgttctactagcttaattggcttatgccatactagtatctaggaaaagcatgaccaaaaattaagttaaaatatcacacatccctggacaagctatatatcagtaatcaataataataatgtttaaaaatcagggaagcttgtcaaacctttaagcctttgctaccctttttgactaggctagcaggaatagctaatgtccgagatggtaatctgcacaaagtaatgtgatagtttcaagatattaatattctttaatatcagagaaagcccataaaattgtatcccaccttaaaaatttgagaataagattt

SEQ ID NO: 44689 - DNA, 326 bp, Glycine max
acatttaaattgaattgtgagttgaagaagtgactttttggaggaatgaaaggaacaacgacggcttgaagagaaaaattcttgagcttgattttgtagaagcatgggtaagaacaaggatgaacaacaaagcatgtgggtttggaagcaacgggaattttgagggaaggcacaatgcaaatgatgaggtggtgcgggtagtggcgtaacatagaggagatgtggtagtactatggtcaccaagtcaggactcatacccaatcgaaaccaccgcaaatccaaaacacctcattgtcatgcaaaactcctttgtaggtctatattat

SEQ ID NO: 44690 - DNA, 388 bp, Glycine max
tgcacgcatgcaagctagtcgtatgagatgatgatgacttgtgctctctggcacaactctaaggtccaaaaagctttgtgtaacttctgatgctatccggaatcgatcctacaataaaaattacattacaattaacaactatttttttagtgacaatgcaaaaaaaataaatcaacaaaatccaatttgcaatacctgtcaagagtattcttcacctaatacatattctgttagtggttgcccaggctatggttgttctttgacaggtggtaaacatacaagaccatgtgttacttgttgaacaatagtttatggcaaaccgaaaaaattactgactgagtcacggacaatgtcactttctttaagacgtttcgtggcactgcaaaaa

SEQ ID NO: 44691 - DNA, 127 bp, Glycine max
cgctctggggcttcatggaggctggatctttgaccacctatgtgtgtctctttatggtgattttccactcaggacatgcaacggtagacaaatgtaaagacttttcatgaggcgccattcattaatg

SEQ ID NO: 44692 - DNA, 336 bp, Glycine max
agcttgggcaattaaagatgtcgctgcattttctctatctttatgcgttttctagatttcccccccagggatttccggtccgttgtatctcttgttacgatctttcaaagaaatgaacatggatttgaggcttttagtcctcacgttagtttcacaccttgcgttaatttgtgatcgcctgagcccttccgctcagttcatgggatcccccaagcgcttaattagaattgaacctgaaccaactttccctaaattttctgcgtttgaaaacattcatgcatacacatacgcatacgcatgtatattgtttgtggaaaacaggggcaggatcccctt

SEQ ID NO: 44693 - DNA, 361 bp, Glycine max
atcggacatccgagtgaaaagttatgaccatttgaatttctcgagagcttcctatgtttaattttgagcgtctcgatatattatacgcctgaatcgaacctcagtgtaaaaagttatgaccatttgaatttctttagagcatccgttgttcattttcgagcgtctctatatgtgatgcaccttaatcggacctccgtgtgaaaagttatgaccatttgaatttctcgagagcttccgttgttcaatttcgagcgtctcgacatattatgcgcccgaatcggacatccatgggaaaagctatgaccatttgaatttctcgagagcttccagtggtcaatttcgagcgtctcgacatattatg

SEQ ID NO: 44694 - DNA, 351 bp, Glycine max
atgctagcttcatatttgttgcatcctagagaatttatatacacttataacttgagacgattctcctcttgatgcctctatttcatcaaatcttatgataaacatttgtttgaatctatacctcgatctaataatatatgagacagtgccacaacaactttatttattaatgtagtactaacatatcgatcttaacattatattatactatataacttaatcggaaaataaaatgcctattaaacttatattaggatgccttaatctatatgatattctacaaaatattattaattcattattggtttgaaaacgctgttaaattataaaactaaatcctattgaaatgaa

SEQ ID NO: 44695 - DNA, 327 bp, Glycine max
  unsure (1)..(327): unsure at all n locations
taaaagaaataaaaatatgtaaatttttaattttagatattttgaccattgaattttaagtataagagaacttaaaatagtttaatttgttcaacttacatatttttttggtaaaacatgaaactttaatgattntagattaaaaaaaattaacggaaactttaattgtagcaattntaaaaaatagaaggtaaataaaaatcagaatcacacattcattatcatataagttaaaataagcctagattataattcactcttcattcgttgtattttcactcctacaacagtaagttaacaacatgcaggtgaaaacctaccttcacg

SEQ ID NO: 44696 - DNA, 390 bp, Glycine max
agcttgtgatgtgcaagagagaaaaacatttgatcaaagtgaaggcaagagccatttctagggtaaaattgggtgttgaggagtcaaattttgattcgctagagttttcatcgtaaaaccagtttgagcaagtttagattgatgatatacacttgtttgaggtgagagtttgctccaaatttaccccattctcattttcacttctcaaaccttgaaaatccactaaattgaggggttttagatgcctatattttgagttgctttggtcagaagcttgtccttggtttagacatgattgatacatgatttgggacttgtaggattcaatttgggcaaaattggatgagggaaagtgtgattttcaacatctgcactttatgcagaactttg

SEQ ID NO: 44697 - DNA, 312 bp, Glycine max
  unsure (1)..(312): unsure at all n locations
tgaaggtaactanatgccttggtaacttggtaacccatctgtgccttgaatcataaatctgtacttggtgcaagagtctatggtttattctcctctgctgaccaccatacaatcctttgcccttctatgcagcaacctggagcaattgagcagcctaaagcttatgttgcaaacatttacaatagacctcctcaacctcagcagaaaatcaaccacaacagaacaattatgacctctccagcaacatatacaatcccggatggaggaatcatcctaatctcaaatgggctagccctcaacaacaacaacagc

SEQ ID NO: 44698 - DNA, 379 bp, Glycine max
agcttgagaacaatttatttgtatgtccttaaattttataattagtgtactgagaagtgtaaatatcaatcaatctcttattgcataaaaataaaattctagaattatttatatgatagtctctcataaccttattttttataattatatctttcagtctttttatctcattattcatcttatttcacatttccttttcttattcaaaattgttgcataattatatatgtgatatcttaaaaaatattaaatattaatttgttatggagagaaatttaaatctaagacttctttcttcttttttcttatttcttattttaactattaagtcaacctattaactccttatatatgtgatacttaaatttttctttactta

SEQ ID NO: 44699 - DNA, 413 bp, Glycine max
tggtgctagacaggctatgataaaggtcatactacatttctttctttcctcactttctgctatgcatgatgcctttattagaaagcgaatgtggttttctgatatgaatgcacagtacagctgagaagaacaacataccttggaggaaaatggcacaagagattttagagtcagaagtctatagggagctgaacagcattcaaaaccagtctttagtgtatcctgattgtaagcttctgactttcttctttataccttttggcttacccttctactcattgttggctattctcttgcgttgtcgtgtaaatgatggcgtgactgcttaattaacttcatagattatttgaatgcattccgtgcatatgaagagggcaatcttacatggctggtatgtggtaattctgaatttc

SEQ ID NO: 44700 - DNA, 357 bp, Glycine max
agcttcactcacctttaacttccagaatgttgttcttggctcaagcgattctagcaacaacaaagtcaccattaacatgtctaacatgatagagcaagacaatgtttatagagaatgatgatgaatgaatgttattgaaaaatatctataaattggattacatcaactccatatatatgtggagtgaatacaaactaactaacacaactggcacaagttagttattaactaactaacctccaaacccacctaacttttgaattattagttattcactaactaaaatctccccttaattgaaaagcttttactatctacaacaccaaatgctttcttaactttacaaaattatcaatc

SEQ ID NO: 44701 - DNA, 329 bp, Glycine max
  unsure (1)..(329): unsure at all n locations
tagctcgttgaacgaaagacatcctataagtactttgtatattgttcatgcatcaattaatagggannnnancattatggactttgaacttttctcgactccgaaagtgggcaataagtgaacatatcctatattttcatttgtttctcagcaaagtctatcagttcctctgggaatggctcaatttaactttccataatgcccaactgtttaaggtggactattagaggatatcaaccgagttcccattgtcgagtaggaccttgcacactaagaagtttgccacctatatcttgatgaccatcggatcattgtgacatctttaatgt

SEQ ID NO: 44702 - DNA, 384 bp, Glycine max
agcttacaaaacaagaaatactatatggcatatggcatttgaccaaatataaaaaagttttggtagcacagagtcaacatttatagcctaaccccaaatacacccaaatcctaagacagggaacaaaacctatttgagggtagtgaggtttacacatcacataaatttcacaccccttcccaccacttgcacaaaaagatgtggataccatacaggggtctaaaaaagtgatgcaactaccctttaccctaattcattgtgcaatgtcacaaccctaacttggtgcatgtattttcatcatccatcattggtttattacaccaacacaaacgaaatatccaccagtcagaaaccaaataccacacatgcatagaaaaatcgaat

SEQ ID NO: 44703 - DNA, 396 bp, Glycine max
  unsure (1)..(396): unsure at all n locations
tcagctgtattattaattgatggaaagacttctatgcaagcttcaaccacttgtgtaatcaattaggattagcctatagtcgattaaaatagagagttttaacttcagaagaaattttctaccgttagaaattttcttcttactcctacatgatgatgcacgatgcatatatganaagataaagactaagatgcaacacacaatacaacaatcaatagaaatgccacacaagagagttggacatgtaaaaataaaaaattcttcaagctcttcttcaagctttcaagggctagtcttcatgttctccccctatctttcacacttcctagggtatttgagtgaagatgaatatgtttgcattcctacttttttttttctattaannaacatttaaat

SEQ ID NO: 44704 - DNA, 403 bp, Glycine max
agcttgtatgattatggggtacccatcacatgtgtgactaggtggcggtcgggcgatggtgcacaacaagttttcccacatccacaatgcgcgcataaacccaccatcccctgttgcccacctccaactgagctcacgtactcccacgtagcccatatcctcgtttctctcaacaccgggtccccatcaatcctcccaagcttccacagcatccaagcaaaacaacattcaaacagcacaagctatcacagccaagcaaaacagagcaaaggcagaaaactctgctcaacacatcaaccaaaatcacagcttttctcacttaaagaccccagtaacaattccttcgatccaattcgttaaccgttggatcgactccaaatttttactggaagtctctagtaca

SEQ ID NO: 44705 - DNA, 318 bp, Glycine max
tctagccaaatggacttaccttgaattaattcctttgatagctcttttgagcctcgattccctttccttgtattgaagctcactacaagccttaaatgaaaaaccatgatatgaccatatccttaaggaatattggagccttggaattgttctgggaataagtgtgggggggttttgtttcattggataacttgttttgttggctatgcttcgcgatgtattttgggccatacttgatgtacattgtatatttgttaaatcgtggacatgctgaatgaaatgttgtttctcaaacgctatatatgtaaataaaaattc

SEQ ID NO: 44706 - DNA, 405 bp, Glycine max
  unsure (1)..(405): unsure at all n locations
agctatagtattaccagtacaaacaaaacaattaccatttagcataattaacaactacagcacaatctatcacaatcctacgcatattgaatgagaatatttttaaaaattattattcaacgagaggatttttagattttttttcttatattaaataattttgaaaattattatcacgttagtttagtcgcatgccatatgataatatcatgtcctgaacattttattttattttgtaatttttatttctttcatatatacttcttaatttttatttcaagtttaattaatttaacaactagtctaaaaaaattattttttaccatctcaaacaacttttctttttttctttattgatatacttattnttttaactacttatatctttcagctatcatttttatc

SEQ ID NO: 44707 - DNA, 337 bp, Glycine max
atactaagctgctgtgggctttatgaagcggatctctagcttaatttggtttttaatggagattttccaccatggagatgcttcctaatacaaatgacaacacgtgagaggaggcgctcatttctatggaattagccatggaataaggagcttctccaccaaaatgatccttggataagaaagctagataaaaatgcttttaaaataaatatggagagacagagagatgggggagcaccaaattgaatgaattatagatggagataagtggaactttgaatttttttcacaatactctcattcatcaaagtaaccacaagtgtcacacatgcttcta

SEQ ID NO: 44708 - DNA, 311 bp, Glycine max
agcttctagccaaatagacttaccttgacttaatttctttgatatcccttttgagccttgtttcccttttcttgttttgaagctcactacatgccttacgagaaaaaccatgatatcaccatacccttaaggaattttggagctttggaattgttttgggaataagtgtgggggtttttgtttcattggataacatgttttgttggccatgcttcatgatatatttggagccatacttgatgtacattgcatattggttaaatgtgggacatgctgaatatggtgttgttgttcagaggccacataattga

SEQ ID NO: 44709 - DNA, 271 bp, Glycine max
  unsure (1)..(271): unsure at all n locations
tacttttatttcttgaccatatagtggtacctggagatatgtcactgtggtcaagagaacctgcggacctcatgtgggatgctattgcccaanaccaagcttgaacaatcccaacccatcctgtgcatagtcagtcagtgagaaccctgtgacgtacctaaacaggcgagctcctggcagcaccgattaagaacgaacaccaccaaactaggaggcttgtgtggtggctagccacctatggatcttgagtgatatttagattatggcctct

SEQ ID NO: 44710 - DNA, 396 bp, Glycine max
agcttgggaggattgatgtggacccgatgttgatagatacgaggatatgggctacgtgggaatacgtgagctcagatggaggtgggcaacaggggatggtgggtttatgcgcgcattgtggatgtggaaaacttgttgtgcaccatcgcccgaccgccacctagtaccacatgtgatgggtacctcataatcctacaagcttgagatgaggaagtgttgaagggtgaaacttcctgcttttattgttgaccacagagtggtacctggagatatgtcgcgggggtcaagagaccttggggacgtcaggtggggtgctattgcccaaaaccaagcttgaccaatcccgacccaacccgggcatagttggtcagtgagaacctgtgatgtacctaaaca

SEQ ID NO: 44711 - DNA, 334 bp, Glycine max
  unsure (1)..(334): unsure at all n locations
actcagcttctaattagtgtaccaaactaccgcggctccggccaagctatcttgtaagaagtgtattaatagcttctcatccttagagtgtgcgcccatcttgcgacagtacattttgagatggtttttgggataagtcgtccctttatacttgtcgaagtccggcactttgaacttcgggggaataacaacatcgggtactaagcaaagatccgtcatgtctgcgaacggatagtccccaaatccatccacggctctcaatctttcctcgaggagaatcaagctcctctnttcttcggttgcccggggcggtccttctgtggacaaaactatt

SEQ ID NO: 44712 - DNA, 221 bp, Glycine max
agcttattagacaagttccctattaggtctgaattcaacccaccctacccggagctacgatctggacattattccctcttctcttctcttcagcgccgagcgtaatttgcaagtttcttcacaaacaaaccatctcattcattcacgtctgcgcataagccttctatccattctcacaatgttcagatctgctattttaccttctgtatcaacactggatg

SEQ ID NO: 44713 - DNA, 566 bp, Glycine max
  unsure (1)..(566): unsure at all n locations
acctccgtgatcatctcntcctatnatcttgttcgagcaatataatattcaatntagttactactaaaatnnntagnnnaagnnaagtatgatcattcgagaccctacgaaacgcgaactataaaaactcaagcttacaggccccggaggaccatctgacgtcgatgttttttatttttcnagcgattatattaaattgatgaaggaagatttctttacaacttcactctaccctctgcatctaagcaaataagtgttatgcaagtggagttatctatgtcaagcaatngcgccaaataacactcacagctggcaaacaatgtaggagaaaaaatttcaactctttgccaaacttaacaaactgtgtaaaaagaaactacctccttctcccttttgagaatccacattggtgtccataaaaaccacattctacaaaagcaatctggttttactaaagatcaatgtcgataatctatgccccctaatgagcaacgctctcctacccctgactgagatgcgccgacacccttatatttatccacccgaaaccgcggcgactccaaacg

SEQ ID NO: 44714 - DNA, 393 bp, Glycine max
  unsure (1)..(393): unsure at all n locations
agcttgcttgcctctagttgacaaaggtgcggattactattangtatcttcgcatgccacctgactcacgggttggggtgacagaactgtggggtggttgacaaaagcgggacttttgctcctacatatcttcaattgcgagactacatagttcttcaatttttgtgtgagactacaaatagtctcaatgttattttactaaaatgcgaacatgctaacatgctttagcaaagaaacaaaccttcaactgatcaaggcaacatatatttttttgaataaaaacaatgcgtctattggagaaggaaagtatgctaataaaattttctcataaccacaaatgagattttggatggtagcatttcgtttctaaatgaccatttagaagaaacactg

SEQ ID NO: 44715 - DNA, 506 bp, Glycine max
  unsure (1)..(506): unsure at all n locations
cacctccgtcctttctcggtnatnttctgttttaatattcatagacgttaagatnnngnngannnnnnnccgctgtagcagcggttcgcagacgcgcccanagaatacccagctgctgttttaactagaccaccatttattcccactaatttctttttctcttcattcatattcattacctgctgctctttttacttaactcttttttgctatatagtatatatcatttggcatttcctctcacgacctctttttttacacttttctctctgaaaaagcgtgcggcaaaggccacactacctactacgtcaaccacaggtgaacgagtacgcacaaaatggaggtcgaatatgggacaaaaaatgaagccatacgccgaaattttaaagaacgacaatatgatgtatgtagtaccattaaccaataaaatagaatgtaacacaacatggcaaaacgaaacgtatagcaactaataaaaaacaatattcaataagcggacccgtccn

SEQ ID NO: 44716 - DNA, 404 bp, Glycine max
agcttttccttgagcttcaagctttagcctttatgttgttcaccatgttgctccccctatctctaacacccttcacccttgccagcatataatgacaataccaccaaaacataacaaccccaacacccccacataaaggctaaaagccccatacatcaacaagcactctctccaattcagtggtagagcttgagagataacattggaggggccgcataattaaatttataatatataaattagagattggctgtcatacactaatgacataaaatagtttcactctatcattcaattacaaatgatatgacttttaagttagttatagtaaaaagtaacacacatatcgttttgtgattaattgacaatgtaaactattttacatagtacacaatctatttttc

SEQ ID NO: 44717 - DNA, 333 bp, Glycine max
tggggcttctatggaagctggatcttcgagctttaatgaagttctttaatggtgattttccaccatggatatgcagcggatgacaaaggagatgaggtgaaatgatgcaccatccactatggaataagccatggaagaaagagcttcaccaccaaaatgagccttggattataagcttggagaggatgcttcaatgaatgaaaagaaagaagttgagaaagatagagaggggagcactaaattgaaggaataaaagacgtagagacgtggaactttgaagtatgtcttcacaagactctcattcatcaaatgtacaactagggttacacatgc

SEQ ID NO: 44718 - DNA, 314 bp, Glycine max
agctttccgcaagacatatggaaagatcttggatttggctatgatagaagtctttgttgaagccattgtgtccctcacccagtattacgatcagccactaagatgcttcacatttggggactttcagctagtaccaaccataaaagagtttaaagagatcttgggatgtccgctaggaggaagaaagccataacttttttctgggttctatccctccatggggagaatagccaatgtagtcataatcttggcgcaagaattggaccaagtaaaacaaaatataaatggggtggctggaatatcaaggaagcact

SEQ ID NO: 44719 - DNA, 387 bp, Glycine max
tacatatccggaagtatccaatccatatcctggaaataaaaaattaaaaaaatcaaattaaaagagatcgaatacctttcagatacgtccagaagtatcctagaaaaaatatataaaaattaaataaaataagattggatagatttgggatatgcatccggaaatatccgatgagtattgatgcccaaccatttttagagtatccgggcttcatagatatgtattattcctagctcggaagttagcttttcaaattcgtttcttggttgagaaaatcaactgtatgaagacttgcgagtgtatatcaatttaatgattccttcctcaatcttctattggttgtcctgtcatataaactgattcttagcagtgttattgaagcctgat

SEQ ID NO: 44720 - DNA, 408 bp, Glycine max
  unsure (1)..(408): unsure at all n locations
agctntgaagaaaaaagagtaagattgagaaatgtttctgtttaataatgacactttgcgaaaaaaatctcaaagatattggacaatgttccctacaacaaaaagctcaatcctttgtttaacaaagttatttgttttgtgttgtgattgcttatcctcactccatgagtttgtttctttgtaaatctttcaaacacttttaattgagaaattcaagagtggctttgttactagagaatataagcaggaaacaagaatcaaacccgtatagttaactgggaaagctaaggattataatcgacattgattcatcattttgattttaatttaacatttccaattaaaataaacatgaaacatttgtttcattcagcttctttaataaaaaaataagatttgaaaattaaa

SEQ ID NO: 44721 - DNA, 373 bp, Glycine max
tcccgcatccgcacttggaaggatctgattaccgccttccttatgcagtatcaatacaactctgacatggctctcgactggactcggtatcaatacaactctgacatgcccagccttcgttaaccattggatcttcttgaaattgggtctgcaacttcacaagacacttgtcaatgatctaaccgttgggatctttgaaatgatgtctggagtatgctagaagcctcttaatgaagcttctggaggaagcctcctgatgaagcttctagagaaagctacatgaagctacctccgtaaaaacgctgcccaaccttctataaccgttggatcttctcgaaatttggtctccatgatctgaaccgtgggatctttg

SEQ ID NO: 44722 - DNA, 403 bp, Glycine max
agcttttaaccttgacttggtagaacctcttgcttgtttgatttgttcccatgcttgctaaagtgagacaaaagctggtgcaaatcaaaactccgatatctcatgggtggaatggatgaatgcatgaaggaatgcatataacacagatgtaatctaggaatgcgggggtccggggaattcgtccccttcttagacacaatgtctaggggtagcaaagtgccccaacgtacgtttttaagaaggcgacacggaccctccgttggtttgtatacagaagggatcaagacagaacccatatgcgatgcctatgcaaaagacacaatgcgggaatgtacacagtatgataatattcactgaacataagcaaaagggtatatgatacttatgcatggcagtgtaaaat

SEQ ID NO: 44723 - DNA, 291 bp, Glycine max
tgacccactgacctagaatttatatcacttaaagccttcacctacggaatttaaaaaaaacttaacggctgagtgtaactgacattgtggcaaccaaaagtcacccccaacagtcaatatgtcagccaccatgtggtctcccaaaatgctgatgcctacgttgccaattgggcccctattacaacttgaactaaacctaactaaagccctctttttgattaacccaaaacatatttttggtctgccaactgtatagggattgggccatcatttatacaaactcaacactct

SEQ ID NO: 44724 - DNA, 361 bp, Glycine max
agcttgaaattgaacaatagaagctctctagaaattcaaatggtcataacttgtcacacgaagtacgattcaggcgcataatataccgagatgctcaaaattgaacaacggaagctctcgagaaattcaaatggtcataacttatcacacggaagtccgattcaggcgcataatatatcgagacggtcaaaattgaacaacggatgctctcgataaattcaaatggtcataacttttcaaacggacatccgattcaagcgcataatatattcagaagctctaaattgaataacagaagctctcgagaaattcaaatgggcataactattcacacgaagttcgattcaagggcataatatac

SEQ ID NO: 44725 - DNA, 348 bp, Glycine max
  unsure (1)..(348): unsure at all n locations
tctcgatatattatgcgcctgaatcagacttccgtttcaaaagttatgaccatatgaatttctccactgtattccgtgtgacaagttatgaccatttgaatttctcgatagcattcgttgttcaatttcgagcgtctcgatatattatgtgccagaatcggacttccgtgtgacaagttatgaccatttgaatttgttgagagcatccgttgttagatttcgagtatctcgatatattatgcgcctgaatcggacatccgtgtgacaagttatggccatatgaatttctcgagagcattcngttgtcaatttcgagcgtctcgatatagtctgcgcgttaatcggact

SEQ ID NO: 44726 - DNA, 315 bp, Glycine max
ttattgttgaccacagagtggtacctggagatatgtcgcgggggtcaagagaccttggggacgtcaggtggggtgctattgcccaaaaccaagcttgaccaatcccgacccaacccgggcatagtcggtcagtgagaacctgtgatgtacctaagcaggcgagctcctggcagtcaacagataaaaggaaaacaagaccacaaagcaaggaggcttgtggtggctggccagctgtgaattttgtgtaatatgtgagatatggcctctggtaatcgattaccaagggtgggtaatcgattacaaggcttaaaaatg

SEQ ID NO: 44727 - DNA, 431 bp, Glycine max
  unsure (1)..(431): unsure at all n locations
cacatagtctgatatcgcataagacacnaattttaacctttgtatttatttgcatttaatcaaaattttaaggctcctgattcatcttaagacataaatgtcttttgacttaacatgcatgctagtatttttagctttccaagccattattctcatttatgaaactctatcagttaaaactaagtattctcaacttgccaggtgataatactatcttgcatagactttgagaatttttaactaggttactaaattatttgtcatacttaaatatgcccctaaaccatttttttaattggatcttgaagttgcatgtgttttttaaattacgtccatagttgggtcttaaaacttgtatttgttttttaattagatcccaccagggacctaattaanaaagcaaatacaagtttaggaaccccattgaaata

SEQ ID NO: 44728 - DNA, 433 bp, Glycine max
  unsure (1)..(433): unsure at all n locations
agctntgcggatttggtcttcgccagtgaaatgatcgatgtgggtccgaaaagaggcaaatttgatcatcctactaggacgactgagaaaactggggcaaataaagagggtgaggatgagggagaaaccaatgttgtgactgccattcctgtacggccaagtttcccaccaacccaacaatatctttactcagccaataacaaactttctccttacccaccacccagttatccacaaaggtcatccctaaatctaccacaaagtctgtctaccgcacttccaatgacgaacaccacctttagcacaaaccaaaaaacaccaaccaagaagtgaattttgcagcgagaaagcctgtagaattcaccccaattccagtgtcctatgctgacttgctcccatatctacttgataattcaatggtagccataaccct

SEQ ID NO: 44729 - DNA, 442 bp, Glycine max
agcttatcaagacctggagacaagttatgaactaaacaggtgcatccaaaaatatgtggatcaacatgaagcaatagttctttaagaaaaaaatggaatgtggtattttatttttaatagaggaagaaggcattcgatttaccaaaaaacaggctgtcaaaactgcatcaccccaatgccggacaggtacattggcatgaagtaataatgtccgagcagtctcaacaagattcctattcttcctttcggcaatgccattctgttgaggagtatgaggacaagaagactgatggagaatgccctgcgctgacaaaaaagaagaaatagcagaagaaaagtattctttcgcattatcactcctaaggatcttaattgtcttaccaaacttgagtttaatttcattaacaaaagaagtgagaatcgaagaaaatttagatcattc

SEQ ID NO: 44730 - DNA, 465 bp, Glycine max
agcttattgtgtggtgttagcagcgcataagaagttgagtgctacatatattctagaaattgatacatttagaaaagttggtataaggccttctcaaatgatgggtgatggaagcttgcttgtgggacttctatggaggttggatctttgagcttcaatgaagtcctttaatggtgatttttcaccatggagatgcagcgaaagacaaaggagaagaggtgagaggaggcgtcatccactaaggaataagccatggaagaaggagcttcaccaccaagatgagccttggataagaagcttggagaggatgcttcaatggaggaaaagaaagagggggagaaagagagagggggagcacaaaattgaagacaataagggagagaagttgaactttgaattgtgtctcacaagactctcattcatcaaacttacaacaagtattacacatgcttctatttatagact

SEQ ID NO: 44731 - DNA, 415 bp, Glycine max
  unsure (1)..(415): unsure at all n locations
aagcttcattaagaggcttctagcatactccagacatcttctcaaagatcccaacggtcagatcatggaaaagtgtnttgtgaagtttcagaccaaatttcgagaagatccaacggttaatgaaggctgggcagcgtttttaccgaggcagcttcatgtagctttctctagaagcttcattaagaggcttcctctagaagcttcctcgtggcttctttgagaagctttctcaataagcttctttgagaagctagatccttatctatccactcctctattaactaaattaacttccgtaaaaataattacggatganaataacgcaacanataatcaaacatcaaacataattactaataatatatagatatatatatcagggtggtacattgagcatcacccgtgccaccattat

SEQ ID NO: 44732 - DNA, 460 bp, Glycine max
  unsure (1)..(460): unsure at all n locations
gctaggagaggatgcttcattggatgaaatgataagaggagagaaagagagaggggggagcacgaaattgaaggaagaaaaagggagtgaagttgaactttgagttgtgtctcacaagactcccattcatcatagctacaacaagtgttacacatgtttctatttatagactaggtcagcttcttgagaagctttcttgagaaaacttccttgagaagcttctttgagaaaacttccttgagaagctagagcttagctacacacacccctctaataactaagctcacctccttgagaagcttccttgaaaagattcctaaagaagctagagcttagctacacacacctctctaatagctaagctcacctccttgagatgagaagctagaacttagctacacaccccctataatagctaagctcacccncatgacaaaatacatgaaaatacccaaaaagt

SEQ ID NO: 44733 - DNA, 287 bp, Glycine max
  unsure (1)..(287): unsure at all n locations
aacatgatgatgactacaaattacgaagcaagcctaccactttttgttgcactttcttggatggtgatgaatactctaactgcaacaaataaaacaaatacattagtccacaaacaaacacaaacttttaacctaaatttatntaactcgtaatagcttacccattgaatctnncaaattcataacaaaagttatgaaagtgagttcactgtacttttgttctactcanacatagtaagttactaatgatgaataagaaaggtgaaacaaaatgtcaacatacttca

SEQ ID NO: 44734 - DNA, 456 bp, Glycine max
  unsure (1)..(456): unsure at all n locations
agcttgaataanagtaatagggattcttaactcttgtttatattcgaactttttttgggtgtctaccatgatagggaccttattcagaagggcagacaagcctgacgtgtattctttttggggaagattacacaaaaaatgtgtaacattaatgataaagaaagccatatgacatctgggttcacaggtttaagcatgaaacacactgcactcaaggaccagtaattagaacttagaactctgcaaattaaacagttagattttcaatcttgagtcgaatttcataaactggctcagggaaatagtggattcttctatccataatcttgagacatgcaacatcattgttctcagctcctcaaacctctttatggtcgatgttgtccttgagttgctcaggtttgacacacagtttccatcctagtntgtacctttaagcaagtgctcgtacttgtt

SEQ ID NO: 44735 - DNA, 409 bp, Glycine max
  unsure (1)..(409): unsure at all n locations
actcagctttgaagcactcacattgngttgaagcaatggaagaagagcttatgtctattgagagaaacaagacatggagtctcacatagctaccaacagggaaaaaagccatagcagttaaatgggtctacaaaactaagttgaatcctagaggagaagtaacaaagttcaaagccagactggttgcaaagggatttctgcagaagcaaggtctggattatgatgaagtatttgcccctgttgctaggttggaaacagttagacttgtaatagcaatggctagctacaattgctgggaagtacaccaaatggatgtaaaatctgcatttcttaatggctcactagaagaagaagtatntgtcactcaaccaccagcgtttgtgatgaaaggtagagaaacagaagtgta

SEQ ID NO: 44736 - DNA, 390 bp, Glycine max
  unsure (1)..(390): unsure at all n locations
agcttgcaagtaagacatatatcaaggaatgttcgtcaagccaattcctcacggtcactgtttctctcaagcacaagtgtttaggcaatttctcaatcaacaaccaacataagtctcaacttttgaatttcatctcatgccatacagtcacaaacacacaaattaaatctgaaggacttttcttggcttgtaatgaggctgggttgcaaacaattcatggtttctctaggatgcaaaaacttaagttctaggagagcattcatccttagatcaacatttttctcttttattccaactctattacttgcctttcaatatttatagcactttgcttcacttagcttcaataacagcacacactcagctnttattcttgaaatttcttttttt

SEQ ID NO: 44737 - DNA, 427 bp, Glycine max
  unsure (1)..(427): unsure at all n locations
gcttgccgctggagctgacccatcaactgttctaactctnttagactggtgatccctaggctcttgaccttgacttgatagaacctctttttaagcgaaggcattcgacttgatcccatgttttactaaagtgaacaaaaatcggcgcgaatcaaaactccaacatctatcatgggtggaaatggatgaatgcataaagaaatgcatatgacatagatgcaatttacgaatacgggagcccgggaaattgtctcctttttagagacaacgtcttggggtagcaaagtgcccaacgtatgtatttaagaaggtgacacggaccctccgttggttttctaatgagagggaatcaagacagaatccgtgagtgatgcatatgcgaaaggcgcaacacgggaatgtacagtatgacaatattcacaaaata

SEQ ID NO: 44738 - DNA, 465 bp, Glycine max
  unsure (1)..(465): unsure at all n locations
agcttcataaaagtttatatggctngaaacatgcactgaggcagtggtacaagaagtttaatgagtttatgagcaacttatgattcaacagatgtggcatgaaccattgctactacgttaagaaatatactaatagctatgttatccttgccaagtatgttaatgacatgttgattgcaggatctagtatggcagaaattaacaggttgaagcagcagttgacagaaaactttgaaatgaaggatcttggttcagctaaacaaatatttggtatgagaattcttagaaacagatcagaaggaattttgaagttgtctcaggagaaatatatacataagttgtttgacaggttttaccttgaagattctaacaccaggaatacccctttgggatctcatttgaagttntcaaagaagcaatctttgcagatagatgaagaanaatgttacatgtcaagagtaccat

SEQ ID NO: 44739 - DNA, 229 bp, Glycine max
gcactatctgaagcttataacgatgagatatatgtgtacacatatgggacagcacagctattaccaccccctgtggtggcataaaattctgaatggctactatgacgtctctaaaaaactttggcttagaaacataaattttggcataacttttatatagagttatggccctttgtacgacgcagtggctttttgtttcgattacatatacggcgtaatatgtccctca

SEQ ID NO: 44740 - DNA, 349 bp, Glycine max
cttctgaaatcaagaaacacacacacacactgtcataccctaatttcgtccggagacctttgcttgatgacatgcgacctttttttggtccttgtaaggtgcttggcacccatcattaggcaatttgtgaaattccgggacatgccgaaaaacaaagaaaatattgatgcacaatccgtaaggttccgtgacacaccggaaatcaaatggaagcatcgttgcataaatagtggggttccgtaacattccgttagtcaaaaaggggatgattatgtaatccgcaaggttccataacattgcggaaagaaaacaagtatcgttacgaagttcgtaagtttccgtaacttta

SEQ ID NO: 44741 - DNA, 531 bp, Glycine max
  unsure (1)..(531): unsure at all n locations
agacgatgnagttgancccctngaagacaaaaactgagcctccgtaggctccgcganntnnggnanngnacccgcacgcantgcaagcttgtganntnttnangtntgggaatatgatttgttgcatatatnataaaaagaatagttagggtggagtgatgatgggtangtcccgctccaagctgcaagcggagtgttgtcttttacagacttagttggacatctgttgagtattgaaagcagagtgttgactgcttcagcgcagaatgtggaacgtagtcccttatcctggagcatcgatctagcgatctccataactgtgcgatactttatcttggacactccgtcttgctgaagagaatatgcgactgttagttgtgcgttgatgccttcattctcacataagcgtgacaacgcacgagaggtgtacgtgttgacgcatcacttcttagtactgtatgcgcgtaactttgatttgaggaagggcggtgactttttgaatactcgaagaatatgagtttattttataaa

SEQ ID NO: 44742 - DNA, 375 bp, Glycine max
  unsure (1)..(375): unsure at all n locations
gcttgtaatcgattaccaaaagttttaaacattntataacagtctttagaaatttgaatntaaatttcaaagcctgtaatcgattatagcttgtgtgtaattgattgccagacattaaaattcaaatttcaagactgaagagtcacaactcttcaaaagctaactgcataatcgattaccacatttatgtaatcgattaccagtagggaattttcgaaaataacttccaagagtcacaattgttcaagaaatttttgaatggtcatcaaaggcctataaataggtgacttaggacacaaaattacctagagagtttttctgaacaaaattgtcttatcctcttcaaacaaaaatgtcttatcactctcaaaatat

SEQ ID NO: 44743 - DNA, 368 bp, Glycine max
  unsure (1)..(368): unsure at all n locations
ccttatagaaatttatctnttatgttgcctgtgtgtatttaagaggtttaatcattttaattattttaataaaattgaaattataattcttttaaaataagattgcttggtatgaggaaattaaaatgcatgcaattgtggttagttntgtttgatattttaagcatactaactttngatgtgattgcaaaaaattatacatatcttcgtccttaaatataacattattttaaattggtttgtcttttcttataaaagtctttttaagttgtcttttgcatttaattttttacccagatatccttagntattttatagtacatgttatgtactagtgaaaagataaatgtataatatctcatcactac

SEQ ID NO: 44744 - DNA, 287 bp, Glycine max
cacccctcaattcaatgggttttctaaggttgaaaaagtgaagtgagaatgaagtaaatttgaagcaaactctcacctcacaccagtccataacatcaatctaaacttgctcaaactggatttacacctaaaattccaccgaatcaaaatttgactcctcgacacccaaatttaccctagaaatggctctttgttcacttttgtcatttggttttctctctaacacaagccaagctttctcctaagtcctataagacatttcaagctaggattaactcactttaatc

SEQ ID NO: 44745 - DNA, 382 bp, Glycine max
  unsure (1)..(382): unsure at all n locations
agctnggactgaaagagaaacctagaatggctctagagtaaactaaataaaccattattataagactcaagagacctctagntttggaacttttatttccactaactttcatagacattccagaactaagaatggtataaactaggcaccaattatagaacaaattttgagccaagacaacaagcacacttccctttcacttatttttcctggacactgatttntctgccaacttgtgagagatatcttattatttccttgtattcagattgcttttctctcttgtcataatgttattccacatgtctggaaaatccagttaaatcttaagaataaatacgtagtgaccaattcccagtaatatatacaaattcgtatgttc

SEQ ID NO: 44746 - DNA, 389 bp, Glycine max
agtcatggagattgctaccacctataaacttgaagcggttttaatgactcctctgcggcttccacataggatagaggatgggcagctcaccaaatgtcttctccctgatacgatgaccagatgcccttccactacgaatttaacttttggtggagtgaaaggaacaactcccactgagtggatcccaggcccccaacagacagctgagggggggtaatatcatatttggaaagtacttgatggtgtagggtctatctgactgggaatcatctctcctaaccttcgcgggccgcgaagcacaccaccttgactctgtttaggggagattgaaggaattctcaaggctttaagctacgttaactggacctttcgagacacttggtacattg

SEQ ID NO: 44747 - DNA, 471 bp, Glycine max
  unsure (1)..(471): unsure at all n locations
agccttgagcctaatttagagttattagtatgatgtataaatagactccttattcatttgtggacagttttttataaaatttcatattagatatagttaagaaagaatttctctttttggtctgtattttcattttttgttttcatttcatgttttcattttctgaaaactgtttttatttttaaaagattagaattctgaaaacatgtttgatttgatttcttgttttctgctttcaagaaataaaaacactaaaaatgcattttcaaaaggaaatgtagttttaaatttgcttaaaattacattacttgtcacctcatttttattttacccaaaatgaggttcctggtttcaacttanaacattgaaaataagattntattatttccagtttttgattcgtttggggaaatattttcactgaanatgaaaacaganattcaaccaaacacattntcatcaccattttct

SEQ ID NO: 44748 - DNA, 354 bp, Glycine max
cctcatcactttcttccgaagcttttacctcattgtctctcacagtctttagaattgggagccaatccaatccttgtgtccggactctcagccacttatgatagccgccgatgatcccattactgcttcccctaagctctctgtcctttcttcacgccgcatcccatgccttgcgaactccttggagtaccctcgcgttgtggtcaccgaaaccccgtgcgatgaaaggcgtgatgctttcgtctgatggcactcctctcatggggtagccatgctgtcttatggcgaggacgggattataattaatacaaacccttgttcccatcaaaggaacatttggacatccttcgcatg

SEQ ID NO: 44749 - DNA, 368 bp, Glycine max
  unsure (1)..(368): unsure at all n locations
taccatatgtggnggtactcatgagtctggtctttgctttccctttgaagagcaaacgcaagatgttagctacatggggaatcaacaaaggcagggatacaatcacggtggattctcaggtttccagcagggtccttcacttgtctttcacaaagtatgcatttatccaaagagaagaataaaatttaacctgaacagatagatgaagttaggcataagacagatatcaaggaaagtagcttaaaccacagtctcacggctactatttcactcaagcacaagtgttaaatctattcattaataacaactagcangagatccaatctttaaatttcatcttatgacataaagtcagaaatgtataaata

SEQ ID NO: 44750 - DNA, 250 bp, Glycine max
atacacaggtgcatgtgcttgcgcaaaatcgatttagtcaaaatcgtgtatcatgtcttttatatgatttgggatgtcttcattaaccgccttagtatgagagcctattgctatatatgtttgatcaccatgcgagaaccattttgtgaaattcagaattatcccctcacatataagatgagatcttatgtcattgaatgactgtcgtctcccattcccacatttgacacatggacaaaaagtattttca

SEQ ID NO: 44751 - DNA, 363 bp, Glycine max
  unsure (1)..(363): unsure at all n locations
gtatttaaaaatctcgccgctgtgtcagtatattttacatgtgaatacgtaagatattggaaaaatgaaattgacgaatatatggctttagttgcatataatctcttgctattggagcattctaatatgtgtagttgcatataatggaaacacgtcaacgtcaaaatgttattgaagttaaattctaagggtatgtttgaataaatttttctctaaacacttttaagaagaagaaaatgatcagactttctcacgtcataagttaaaattaatttttcataaactaatttataanaaaattagtttctttaaaagagtattttaacatataataagctattttttcttatagagaaattattt

SEQ ID NO: 44752 - DNA, 378 bp, Glycine max
  unsure (1)..(378): unsure at all n locations
ngagatgaggaagtgttgaaaggtgaaacttcctgcttttattgttgaccacagagtggtacctggagatatgtcgcgggggtcatgagaccttgtggacgtcaggtggggtgctattgcccaaaaccaagcttgaccaatcccgacccaacccgggcatagtcggtcagtgagaacctgtgatgtacctaagcaggcgagctcctggcagtcaacagataaaaggaaaacaagaccacaaagcaaggaggcttgtggtggctggccagctgtgaatattgtataatatgtggatggtggcctctggtaatcgattactaagggtgggtaatcgattacaaggcttataattgaagacaggaggctaagatggtctct

SEQ ID NO: 44753 - DNA, 450 bp, Glycine max
  unsure (1)..(450): unsure at all n locations
agctgagatttgatatcacaagtggaagtgggtataaaagcagagggacgtgactgagttcatgtacctccaaatgacaaacaaatccaaacactgcaagaaagaacatatgggtctctggaacaaacattntttcttcggccctgaggttttcttgttttctattttaatatatggaaattgtgggggtgtgggtaagaaaaaaggtgcaaccatgcacccttttgagtatagtgcattgtagaattgttgcttgtttccttatttaaaagtctcatgtttagtgatctaaattcttcactacggcttattaacttatttatagtgggctttacaggttagtaactttttaatctaatgataaactcacttaagaacttaaaatgagtttcacatattaaatagatattaaaatcaaattaaaaataaataattntaaacatatattta

SEQ ID NO: 44754 - DNA, 241 bp, Glycine max
ctaaagtttaagtccctccgtgaaaattaaaaaaaaactctgtaaaagtaagcccccatatactcaaaaatatgtttgtgaacttttatacatataaattttatttgcgttttagataaatatcttaaacctatatttttaaattatccccttctttatttctctgaatcctcgggttaacccttgaatcaatattggtatcactttttaattgctttactttacaaattatagtcttttt

SEQ ID NO: 44755 - DNA, 283 bp, Glycine max
  unsure (1)..(283): unsure at all n locations
ggatgagttaaacattcttcattctgtttangggttttgtgatgatgtttgtgatgtttatatgctgaaattgctgatgaaatctgttaagacgaagggtagaactaacctatggttaaaaagtgagaatgtgatgttatgagtggaaaaagaatgagactttgagaagtggaagggctaatctgaattctgtggtaaatggaggttaaagtgagttaatactaacttgaaatgtttttaggacttgggagaaagcttggactgtgctagagagaaaaaccaa

SEQ ID NO: 44756 - DNA, 236 bp, Glycine max
caatgggagtgaaatatgttttcttgtattatatgtatagggtattatacttgtagccactgatcggggtttgctacatgaagtgaaacaatgtctctcttataattctgacatgaaggatgtcggtgaggcatcttatgttatctgcactaagattcatagagataaacctcgaggtattttgggtctatcacacgaaacctatattaactaaattctagaaagattctgatgaa

SEQ ID NO: 44757 - DNA, 458 bp, Glycine max
agcttttctctactatatacactgcactgcttaaacaagtatgagcttaaagattgtcatcaaataataatgttttttttttaaacaccaaattgaaagaatacaaacaaacaccaaaagcaactcaagtttccactgaaagctccgggattttgttacttaccacatatatctctcgcttgaactctgtagcaaggcattcaattgcaatatcatcaccgaaagctgcagcacgaccctctctattctcatctacagataataaaccctcctcagtatattgcaaagtgatgatatcatattcatcatcaggagaaccagagatcaacatgtatttggcccaacttggaccatcattcaccgaaacacatctctctttgaaatagactccgccgcatttctcttcatcacaaaacaacacatagtaagaaaacaaccaaaccatcgcaacacagcag

SEQ ID NO: 44758 - DNA, 364 bp, Glycine max
  unsure (1)..(364): unsure at all n locations
agcttaaatcatggtaaatgtacttcttgactaatccaacatttgcaaggtggtttgacatatgagaaatagctttaacctaatgttcttaaatttattatgaagctctctagtgattacgaaaatctctcaatctcttctctctctgtctcacatgtatcactgtaagataggtgtcaaaaagaaaggattgaagttaaatttaaacctaatgttctgaaatgaaggaaaaagaagagattaatgatgctagggaacttgaatgaagaaagagaaaggaacataattattcctttgaactgattgnggtggggagtgtggcacggaacataatttctagttctatggatntattcgtgacact

SEQ ID NO: 44759 - DNA, 355 bp, Glycine max
  unsure (1)..(355): unsure at all n locations
taagagggatctttgtataacanataacatcaaaatatatgacacacaattgtatgaaggaactgcatcgatgttntctagacaatcctgaatgaacaaggttatacttatattattgaaattgaccatttatacataatttaagataagcatgaaactctagccagtgtcttaccctccagataaaccaagataagcttttaactgggaaatgctccaagaaacactatcttctttttccgattctctggctgcttgctccagtaaagcacaagaagaaatatgagcaccagcagaatgccccattagataaatcctattacatagtaacaaaaaaaagggaaagataaatctc

SEQ ID NO: 44760 - DNA, 374 bp, Glycine max
  unsure (1)..(374): unsure at all n locations
agcttcaagctgttccatngctccagattgtttcatagaagggcaaaggtctgtatggtggtcggcaaaggagcataaaccacagagtcttgcaacaggtacagatttctgattcaaggccagctgggttaccaggttaaccaaggcatctagtttaccctcaagcttcttagtttcagctgatgaagatgaattcgtggctacttcattcactcctctaatgacaatagcatcatttctggcacanaactgttgggagttggaagccatcttctcaattaaattcctggctttagcangggtcatgtctccaagggttccaccactggaagcatctgtcatacttctctttcatgtactgagtccttcataaa

SEQ ID NO: 44761 - DNA, 468 bp, Glycine max
  unsure (1)..(468): unsure at all n locations
gcttctggtgggacatcttgacttgctttcctttctgacattcaccacagattctgccttcttctattttcagattgggaatgcctctaacagcacctttgtcaatgattttcttcatgcctcttaagtgcagatgtccaaatctttgatgccatattttgacttcatcttctttggaggatagacatgtggaggagtaactggtttcttgaggtgtccataggtaacagttgtcctttgatctgctgcccttcattagaacttcactcttctcatttgtcaccaagcattctgactntgtgaagtttacattgaatccttcatcacacaactgactgatgctgatcaagtttgcagtcagtcccttcaccagcagtactttgttcagactangaagtccatcatggactagctntcccattccagtgatctnttctttagagccatctccaaatgtcacatagctag

SEQ ID NO: 44762 - DNA, 373 bp, Glycine max
  unsure (1)..(373): unsure at all n locations
ttactcggagatctgattcaagcgcataatatatcgagactcttgataatgaacaactaaagctctcgagagattacaatgctcattatctttaactccgacgtctgatttatgcgcataatatatcaagacgctcgaaattgaacaacggaagctctctaaaaattgaaatggtcataacttttcactccgaggttcgattcaagtgcatgatatatccagacgctcgaaantgaacaatagaaactctcgagatattcaaatggtcataaccttttactcggaggtccgaattaggcgcataatatatcgagactctccanatttaacaatggaagctcttcggcaatactaatggacataactcttatct

SEQ ID NO: 44763 - DNA, 468 bp, Glycine max
  unsure (1)..(468): unsure at all n locations
gcttcttggaggttngatggatcctcctctattgtataggccatataatcgggcccatagtctttagcaattcttgctttcttacctcttcgaggctctatttttggttctggtagtgcaagattttcactactaatagtaggaaggcgactggatgaagtaccaccactattccttaatttaaaaggaaatttattttcataaaaatcagcatcatttgactctatgatcacttttgtgtttaggtcataaaacctatacgctttgttattaatagcataactaatgaacacacattcataggctctacttgtgagtttaaccctcttggggtctgggatccttacataggccagacatccncaagttctcaaataggacaaatttggttgtcttttccttaatatctcatagggagatgtcttgctttttgattngnggattctatttatcacataacaaacattt

SEQ ID NO: 44764 - DNA, 452 bp, Glycine max
  unsure (1)..(452): unsure at all n locations
caccactggtgntgtgaacaaaggatccatcttattatatattatatcatgngcgatncacaagcgtttgacttcttgtctctcccaacaatgccatatatttttgttagagtagtgttacgagtgaaacttgttggtctttacaatgtcacgctgtgtcatatatatagatgagtcttaatatcagtgctgcattgtctaaagattataattatgcatacacatgccttttgtatgtgttgtcaactacaccaatgacgtgacacaccttatcttgcatcagatttgcttgtgtagtcatgttgtgcaaggtcctgccacttgccttatgttaatgcacacgacaaattatcctacacgctttatcacaaagtgttgtttattctaacaactacatatcatacattgcattttataaataagtaataattctggtgtggacgtaacaaata

SEQ ID NO: 44765 - DNA, 450 bp, Glycine max
  unsure (1)..(450): unsure at all n locations
attaaaaaaaaatagaaacaatgtataggtatgccttttgctgtaattttgatatgagcaaacgcaaccaacaatcaaagtatactcaaactagtaaataattttatattatgtaagtttgtgaaaataaattcgtttcatcaacttgcgagacagaactattttgttgcatttactacaccaaactgtcaaagagacggngttattttgttacattgctatagcgtgaattaattaaagggtgaaacgtaatcacttttgcattttaatattgggtctttggttaaatctatggttaaacacttgaacgtcacataaatattactcctttntttgttgaaatctatggttaattntgcaaagggacggagtatatatgttgaaatcttggcctcctcttatcacgtgtttggttctctttgcattccatcatagtaggtatgacaatga

SEQ ID NO: 44766 - DNA, 491 bp, Glycine max
  unsure (1)..(491): unsure at all n locations
cgagacngagaccaacatgctagctatcattcccatgtttcaagaagagttatgtctagccgcggcccacgagcataagattgacgaccaatatgcccacgtatacgcgcgaaaagaggctagaagaacggcgatcgactctttacaccaagaggcaaccatgtggatggatcgcgtagctcttaccttgaacgggagtccaaaactatcccggttgttagcctaagccatagcgatgggtgacacctacgtctgtcctcgaacagattcacgggcttcttcagtatttcaggatatgatagactaaatggcccacataattataaatcgttatgacacttgtatggtctctcacaccttgactagatatgactttctctttgaaataaatagagtggtccacgttctactccaaaacatgtgaatcaaatactccacgttcattgtacatgcattcttttttaccatctacgttgttttaggaaaacata

SEQ ID NO: 44767 - DNA, 446 bp, Glycine max
  unsure (1)..(446): unsure at all n locations
gagccacctgcngcatgcaagcttgagatgaggaagtgttgaagggtgaatcttcctgcttttattgttgaccacagagtggtacctggagatatgttgcgggggtcatgagaccttggggacgtcaggtggggtgctattgcccaaaaccaagcttgaccaatcccgacccaacccgggcatagtctgtcagtgagaacctgtgatgtacctaaacaggcgagctcctggcagtcaacagataaaaggaacaaagaccacaaagcaaggaggcttgtggtggctggccagctgtgaattttgtgtgatatgtggattatggcctctggtaatcgattaccaagggtgggtaatcgattacaaggcttaaaagtgaagacaggaggctaagatggtctctggtaatcgattaccacggggtgtaatcgactaccangcttgaaaac

SEQ ID NO: 44768 - DNA, 227 bp, Glycine max
  unsure (1)..(227): unsure at all n locations
aacaaacttaatgactgagtgtgacttgaaattgtggcgaccaaaaattacccncaacagccaacaagtcagccaccatttggtcttcccaaaggctgatgcctaagttgtcaattgggcccttattacaacttgaactaaagcccttttagttgattaacccaaaacatatttttggtcagccaactctaccaggattgtgccattatttatacaaactaaacact

SEQ ID NO: 44769 - DNA, 383 bp, Glycine max
  unsure (1)..(383): unsure at all n locations
ctgcagcttacgcacattattatatgctctagcttgacgggaaatgttgaactactgtacataactcgtgaagttaaattgatgtttagattttgctgaatatttccctaaatagattaattctaattccataaacttatttactgtacaattatcattgaaatacaacacatgttattcggtccaatcaatggagtgattnntggtttttctagttcatagtcatagctgacccatgcattagcgcccttaacccacatatactaaagggctaaattgatttgggtcattntgttcttttatttagtggaccgtcagtgctatgtgggttgaaaacagggctaggttgggttatcccttttgccaaaacccacatctacaac

SEQ ID NO: 44770 - DNA, 296 bp, Glycine max
  unsure (1)..(296): unsure at all n locations
agagaataaagatctggaacttacttggacggtgtatgattgatgcttcanagtcgaaaatgcacaaagagagtacaaatgccaaatgtgcaaatttttggagagagagaatgtanaggcgaggtttctgtantctggaaaatgtgagtgtaactgctggtacattcacttaagcagtttcgatactttcgcttatcggaccgttgcgctaagcgagcaagtgagacatttgtgttctaaccaggctcgcttagccgacgtttcanattcgaattnttttatataaaactcggctt

SEQ ID NO: 44771 - DNA, 354 bp, Glycine max
  unsure (1)..(354): unsure at all n locations
agctggtgaatttgatgggtntattcatgataaagactaatcttgttgggatgaggcagtaagaaatatgaaccatgatctacaattttctgccctcggaaaagttttattttatttaacacaattataactcttagatntttatgcttagtacaagaaatatattgataatcatcgaccccattttccggtggattggagtggaaggagaggagagatagagagaagtgatatatatgataagggatatatatgatgaaaaatatagagaaataaacaagacacatacgatgagagtgagtcataagaaagtaaaacatctgacaattaatattntaatcttaactaaattct

SEQ ID NO: 44772 - DNA, 457 bp, Glycine max
gcgtaccatattgttatgcaatgcgtgtgccaactgatttgtccaatatggtgccatgcatggagaaacttttctcagctggcatgtgtgccctactcaattatgaccccttgtgttgacacatacaatgggtgcggttcacattaagctgtaatagacattggctgtgtctttgtcttcgatcctgtatattctaagatatcttgtttggtaaaagaacacatagaatgcttaaacaactaaacaatatagtggaggaattatgacttacccattgaaggtgtgcggccaaatcatcttgtgtgaagcatggtaaattctcacacagagggtgaaggaaatctgaatttctaatctcttcacaatacatgggttaagatgaattcaggaacacggataaaaattaatctcagttttgatttgtaattggtaattgcagaatccttcaataaaaaaa

SEQ ID NO: 44773 - DNA, 383 bp, Glycine max
  unsure (1)..(383): unsure at all n locations
agcttaccaagaatgttatacaaagatgatttactttgtgaagcatgtaaggggaaatagattaaaaccttcttttcaagaaaaaactttgtttccacctcaaaaccactcgaactattacatattgatttgtttggtcatatggtctggtagtagttgacgactactcaagatggacatgggttatgttccttgctcacaagaatgagtcttttaaggtcttctttaaattctctaaaagagttcaaattgaaaagggagtatgtattactttaatcagaagtgatcatggtggaaagtttaaaaatgagagctttcatcaattctgtgaaaaaaatggaattcttcataacttctatactactagaacancctaaaaaaat

SEQ ID NO: 44774 - DNA, 173 bp, Glycine max
  unsure (1)..(173): unsure at all n locations
tttattctttgaccacacaatggtaactggagatatgtcgcggnggtcaagagatatgtcgcggtggtgctattgcccaaaaccaagcttgaccaatcccgacccaacccgggcataatcagtcagagagaacttgtgatgtacctaaacaagtgagctccttgcgagcaaca

SEQ ID NO: 44775 - DNA, 439 bp, Glycine max
  unsure (1)..(439): unsure at all n locations
agcttcatgatgaatcaacaataattcaaaggtgttntgatgataacaatgatgacaacaaaagatgatgacaaaggtgatgaacaaaaagctcaaaagatcaaagaacaactcaagtgaatcaataacaagtcaagagttcaagaatcaagaagaattcaagactcaagaagaaagtctacaatcaagaatcaagattcaagatctcaagaatcaagatcaagattcaagactcaagattcaagaatgaagaaaagactcaaacaagataagtattaaaaagttttttctaaactttgaatagcacatgagtttttgacaaaacctttaccaaagagtttttactctctggnnaatcgataccatattggtgtaatcgattaccagtagcaaaatgagtttgaaaaagttntcanactggattacaaccgtccaatat

SEQ ID NO: 44776 - DNA, 315 bp, Glycine max
  unsure (1)..(315): unsure at all n locations
ctagcttctcaaagaagcttctcaaggaaggttcttaaagaagctaactacgctataaatagaagcatgtgtaacacttgctgtaactntgatgaatgagagtcttgtgagacacaactcanagttcaacttctttcccctttttccttcttcaatttcatgctcccccctctctctttctctctctctctctctctctttcttttcttgcattgaagcatcctctccaagcttcttatccaaagcacattcttggtggcaaagctccttcttccgtggcttattccctagtggatagcacctcctctcacctct

SEQ ID NO: 44777 - DNA, 386 bp, Glycine max
  unsure (1)..(386): unsure at all n locations
agcttccttacaacttatagaagagnaaaatgagggattgaagaaatacaagtagtgaggatgtctcctccacctctagaacctcacaatcactcacagactcatctcatgctctcaagatgacttcctcttcacgctccgttctctgccaatcttcgcacaacaaaagctctcaaaactctctagaacttggacctttctccctctagaaatctctaaacatgaaaaagctttgagaatttcccaaactcctctccaaaatctgatttcaggcttaaataggtggctttgtttgtgctagcgcgcttagcgcgactatggaccgctcagcgtgcattagtggattntggcttagcatgtgcttttctcgctcagtggatggactg

SEQ ID NO: 44778 - DNA, 234 bp, Glycine max
  unsure (1)..(234): unsure at all n locations
gaacgcttgagctcgatcattaacttggcctatatcacgacgaactgttggaaccttgttgatctgacaattactattataggggctatgatagcgagggcnaagccacgtgaggctccttccacatatgcagctccttctttagcgcgtaccttgatagctccttctaccccatcttctacagactttcaacgtcttgaagccatgcttcgaagcatacatcaggggcagatt

SEQ ID NO: 44779 - DNA, 403 bp, Glycine max
  unsure (1)..(403): unsure at all n locations
ccttatctatccacacccctctattaactaaattaacttccttaaaaataattacggatgaaaataacgcaacaaataatcaaacatcaaacataattactaataatatatagatatatatcagggtgttacaactctcccacccttttagaaatntcatcctcgaaatttaccttactcaaacaaggatgggtgagcttctcgcatctgactttctaattcccacgtggcatctcatccagatgcacctccccagatcaccttgaccaacggaatctctntccctcttaagtgttgtgttcgcctatcctcgatcctcaaaggcaatgtttcatatgtcaaattctccttcacttgtacatcatccaattcaatcacatgggatggatcacggatatactta

SEQ ID NO: 44780 - DNA, 275 bp, Glycine max
ggtcctgttcgcataccattggtttgcaatgcgtgctcctacagattcgtgcaataacgtgccatgccttgtgaaacttggcacagccggtctgtgtgtcctactctaatgtgacccattgtgcttactcatgtaaagggtgcagctcacaatacactttaacagatactgactgtggatttgtccccgaaccttgttattctcaaattaatgttctggttaaagaccacatagaatgcttaaacatctacacaatctagtggaggaagcgcgac

SEQ ID NO: 44781 - DNA, 395 bp, Glycine max
  unsure (1)..(395): unsure at all n locations
agcttctatagaaggttcgttcctatattttatacaattgcatcacctctcaatgagttggtgaagaagaatttggcatttacctagggtgaaaaacaagagcaagcatttgctttgctcaaagaanagcttactaaggcacctgttctagcttttcctgacttttctaaaacttttgagctagaatgtgatgcctctggagtgggtgttggagttgtattgttacaaggaaggcaccctattgcttattttagttaaaaacttcatagtgccaccttcaactaccccacctatgataaagagctttatgccttaataagagccctccaaacttgggaacattaccttgtttccaaggaatttgtcattcatagtgatcatcaatcacttaagta

SEQ ID NO: 44782 - DNA, 258 bp, Glycine max
  unsure (1)..(258): unsure at all n locations
ctaggctccctatgagtttaactagtgagtgacctaacttaccagtgtgtgggttggtttgtcatgtactccttggcacccgacgaggttnttcactaacatggtaccacattgcatataagattgagtcttaatatatttgttgcataatagttgtgtattgaatgatattgaaatggtgagtgatattgtgtntgatccttgagtacgtgaatgatgtgaaaataaatgagacgtgttgtgttgagatgggatgtt

SEQ ID NO: 44783 - DNA, 451 bp, Glycine max
  unsure (1)..(451): unsure at all n locations
agctgtagggagattctcattctagtttaatcgattactagttatccataatcgattacacagttccattgagaccatgtttgattttcattagtctatgctttaatcgattactaggtgattgtaatctgttacttcattcctgaaagtgttcccaagagtgatcaagaacactttaatcgattaaatcaagagtctaatcgattacattgttcttgaatgttttccaagtgttgggaagaacactttgattgattaaaatgagaatctaattgattacttcttcgagataatcgattacataggcaatttaatcgactacaggctgttataaatttttttctctataaatagtcaccttgtgttctcacttttcaaggaaggagaatgagtgtttagaataattntttgcgactcacatanttctactaatcattttgaagcattcatg

SEQ ID NO: 44784 - DNA, 473 bp, Glycine max
  unsure (1)..(473): unsure at all n locations
aatgtgtacatcgttcaagctttctaatataaagtaccaaagtacacaacataaactagtacctactgaatataaattagtcatatccaacaacacatcctaataacaaaataaaacaagaaatgggtcttcacttttcttcattgttatactggatctttatcagcagctttccttctagtgaaccttggtgttggcatgaaaagtaagggtgttgttggtgggccatccacaacaagtaagtctattgttgaagtgtctaaaatgtatgttttgttgggtgcgtctctatttatcattcttcttccacttgaactccctgcccatgaatatgctatactccctcaaggtagatntaaatntangcagagtaccaaacttcatccctacttccaacttcatttcaccanatcgactactntcattatattgaggataanacttgtgaacatctcatcttcatcatcactact

SEQ ID NO: 44785 - DNA, 446 bp, Glycine max
  unsure (1)..(446): unsure at all n locations
agcttgccgcgacacctaaattcgatgtactgtttatcctcatgctggatcagttggaacatggatgccagagtggcaagggcatcggccatctaattctccactctggggatgtggtgaaaggatacgtcatcaaagtactctatcagttttctaatgtaggcctggtagggtatcaacttatgatccctggtctcctattctcctttcaattggtggattaccaaggctaagtccccatataccttgagcaacttgaccttgaagtcaatttccgcttggatcccaagggcatacgcctcatattcagccatgttgttcgtgcagtcaaagcccaacctagtcgtgaagggtatacatngatcgttgggtgtaaccaaaagcaccccaactccatggcctagtgcattagacgccaccgtaaaccacacaatccatttgcccta

SEQ ID NO: 44786 - DNA, 462 bp, Glycine max
  unsure (1)..(462): unsure at all n locations
gatctgagatctccactctatctattcttcttctattgactccaaggggaataggaggcatttgacggcatatcacagcgtctagaaataaaataccagtgccttgccaaggaactctactgtggaataattatcctatatacaggtccctttgcccttgagacgcgcacgactacctacatatcctacaaatgtgatgcctaatggactaaggaccacattggactcatgaatcatgaccataattacgctaaancattattgaggttgcccaccaaatctctcttgcgtctcaaatgcgcntgaaataatggcctccttcattctcaacctcattagaaaanccactanctgctgccccaccatcaactctgatgatatgattctcctctacctaacctatacatgctattgggaacaatttctcaacaaccaatcaagggaaagtgaggtacttggatc

SEQ ID NO: 44787 - DNA, 474 bp, Glycine max
  unsure (1)..(474): unsure at all n locations
aagtcacctgcngcatgcaagcttgacaaatcggcttgtntaactaacaattataataataataactttattttatcaaatcttatcttatccagattttattctatctagattttattttatcctgattttattccatctagattttatttcatccaatcttatcttatcttgtccagattttattttattttgtttatgggcttggactcaaaatagatttgtgagctttggggttgaagacctatataacaacaccaaggttttaggttagagagttttttttttcggagaggagaataattttaggattttagaattccagtttttattactgttcatgcacactgttcacgtataataaaatttgttttctacaatttcgtttcggcttcaatctacaatttcatttctactgattaatggaaggctaagtctccaacattgttntctcttgaggatcaagcacaactc

SEQ ID NO: 44788 - DNA, 471 bp, Glycine max
  unsure (1)..(471): unsure at all n locations
agctntangttgctcattgactccagaatgctacaaagaaggacagagatctgtatggtgattngcaaaaaaacatagaccacagactcttgcaacaggtgcagatttctgattcatggcaatctgagttactaggttgaccaaggcatcaagttttccctcaggctttttattttcaatagatgaagatgaattcgtggccacctcatggactcctctaaggacaatagcatcatttcttgcactgaattgttgggagttggaagccatcttcttaatcaaattcctagcctcaacaggggtcatatcaccatgagctccaccattggcaacatcaaccatactcctctctatgttgctaagtcccttatagaaatattgaagaatgagttgcttagaaatctggtggtgaggacagctngcacacaatttcttgaatctttcccagtactcatacaagctctctccact

SEQ ID NO: 44789 - DNA, 407 bp, Glycine max
  unsure (1)..(407): unsure at all n locations
gcttaagctccttcttctgcacaaggctcttaatatttgaagagtatccttgtggaaccttcacccgacgaagacactgacaaaaacttatcttctcctttntggacaaagtatggcaagctgggggcaagtaaatnttcttcccatcagacattggatgcaactgtgatcgtatgcccatatcagctagatcttgacgggtattcaagccatccttcgtctttccttgaatgttaaggagcatcccaatcacactgtcacaaacatttttctcgacatgcataacatcaatacaatgtctaatgtcaagatcagaccagtacggaagatcaaagannatcgacctcttcttccatatgcaactcttacttatatccttcttttgggtctttccaaatacattattc

SEQ ID NO: 44790 - DNA, 376 bp, Glycine max
  unsure (1)..(376): unsure at all n locations
gaggagatggtccttttcaagactggcccagattgatgataatgcctacaaaattgatttaccgggtgagtatagtataagccctacttttaatgtggctggtctatctcttttcggtgctcgtgatgatttagttgatttgagggcaaatgcttttcaagaaggaggaagtgatgatgacataaaagaccaaacccaagctcagaaggaagcccaagacccaatacaaggcatatgagggcccatgacaagagcaagggctaaaaagacccaagaagctttgcaacaaatagtggctaatttgagggcgatccaattgtatgaggggacccaacatctataggcctgcatgcgtgngttgctagttacatgtatt

SEQ ID NO: 44791 - DNA, 440 bp, Glycine max
  unsure (1)..(440): unsure at all n locations
agctntcttataagtcaagtcaatttgtgtgtacaaatttacatgggcatgttgcttaaagaactcaaaaagagggaaataattcatggaatcctgtttggttgggggggtggaattggatcttgtttccaccatagggaggagtgctcttgatccaataactntgatgacctaatcatacaatgaatttccttttgcagggcatgggggacttcttggacgaaatgttaacaatgatgagtcagaccaaatcaaatgtgagtcatctagttagaggcgtgtttggtgataaagctatgcaattaaaatgttgttttatatatattttagtttagtggataaagctagacataacatagtgttntcttttgtcaaatactatgtaagtgtgtagtatatagtttatagttnttctgctgtcctaaatggaccattccatg

SEQ ID NO: 44792 - DNA, 418 bp, Glycine max
  unsure (1)..(418): unsure at all n locations
agctngcntctacactattctgcagtcggtttgtttctctagggacctccatgtgaagtcacccataatttctgcaaaacaagacacaactacaccattaatgtctattctatgcacaatgctatttagacacctagaatgaagacatggcgtattatttatcgttcaactcaacaatgtgcttccacgactaacgaagagacaacatggcttatgtgtataacgaggctaatgactgctctaaaataaccttgtagaccctctccacaagggttaacatatcctcatcataagacttaaacttcgtggggtcagacttccaatagaatgagaagcatggcccactgttcatatgtttaacatcagtggcanaccatcacccaccacatcagtagactgaaccttgaataaatattct

SEQ ID NO: 44793 - DNA, 159 bp, Glycine max
agccatttccgcaccttttcctctgtccactttcaaccgttcctccaaatgtaaaatggcctatcggaatacattttctacatcctaactactataaaacaacctttagacttacgtttgctactctcatggtctcaatactgccgccgaaattctgtc

SEQ ID NO: 44794 - DNA, 441 bp, Glycine max
  unsure (1)..(441): unsure at all n locations
ncaagctttatgtgcagaagccagtttctttgctggaaganaacatcttgcagctttctaatgacanttttgaagagataggggttctctctaccaaagtacctccctcactagttttctattatgaacttttttattttttgaaggatattatgaactttattaatatttgatattgatatcattcttatatttcaaaaccaggtggtcatcttatctctggatcccttaccacagtcaaacacgacaaaagtggtgtttgcagttgatcctgatagtaaatattcagaaatgtctgcagctgccattagtttgattagagcatcattcaaatacctggttatacgccaatcatatctccagctctctacatcctttgttggtgtccctctgttttgaggtgctgaatttaaggaaggatcactatcatcccaacagagt

SEQ ID NO: 44795 - DNA, 273 bp, Glycine max
acctctctaatagctaagctcacctccttgagatgagaagctagaacttagctacacaccccctattataactaagctcacccccatgacgaaaaaacatgaaaatacaaaaaaaagtccttactacaaagactactcaaaatgccccgaaatacaaggctaaaaccctatactactagaatgggcaaaatacaaggcccaaacgaaggaaaaacctattctaatatttacaaagataagtgggctcatacttagcccatgggctcgaaatct

SEQ ID NO: 44796 - DNA, 387 bp, Glycine max
  unsure (1)..(387): unsure at all n locations
ttttaaaaagcttgagcttgacttttatagtaaactaactaaagccaaatctaaccttaaataggtcgagccaaagactccttgacaaacgggtcgactcatttccatccctaattgtagtgatttgaataaaacatttattntgacatngtctctataattctaggatttttttgggagaaattaattaataattataacattanttatgattttacttatgaataatatatacattttcttataaatacaagcaataataccaattcttctttataaaactaaagggaatattgaggtcttatatcttcaccatctgcatgttaaaaagaacatgaaaatgaagtttccacatctattttcattaatttcatggtgtagtaatcg

SEQ ID NO: 44797 - DNA, 439 bp, Glycine max
ctaagaatacgaagcattatgcgaactaattaacgaaaaaatcatgatgataagactatgaaagatgataaccaattgttagagataatcatgagtcaaggaagctgatcctataagataatctaagatttggaatactcttggatatgtccatataatattctaacatggagctataatatcaacttgaacaaattgtcatcttaattaatggataaaagtcataagatctttgagataaccacacctcataaactagtcattgtagtgggagagcccaatgactaatggaccctacactaaaatgccatactcccaatgtgggattctagtctcataccttacgaaaccctactaggaggcagtaacacatcagggaaatatatcttcaacatgaaagctgatgaagaagcaataaacataaccatcatacatgctg

SEQ ID NO: 44798 - DNA, 367 bp, Glycine max
  unsure (1)..(367): unsure at all n locations
agcttgccacccagctcgcccaagggagctcttcttgcccaggcgagctaggttgcttcctctagaaggcaccgccttctggaaaacttccaggaaggcccaaatgggcctggttactatttgcacccctttntttatactaaatacacccctttgccttttttgctgattctttntatgtaacgttacggaaacttacgaattatgtaacgatacttgttntccttccgtaatgttatggaaccttacagattacctaatcatcccttttttgccttccagaatgttacagaactttacgaattgcgcactaacactttctttaatttccggcatgtcacgaaagttcacggattgtgctacaatg

SEQ ID NO: 44799 - DNA, 217 bp, Glycine max
  unsure (1)..(217): unsure at all n locations
agctgattcctctcgggtgcataacagtgggagagtctgcatctactataggaggctgaatcatgttaccaaataagaccatctttccctgccatacattgaccacatgcttgaacgcctgacaagtanatctcactactgaccccctgatggtgtttttaggttatatgctattcactattgcttctgaggatcaggtatagaccacatgctcctg

SEQ ID NO: 44800 - DNA, 469 bp, Glycine max
  unsure (1)..(469): unsure at all n locations
agcttgctaaaaagctaaaattcatccctgttccttctatcttagagaaaattggctccgaagtaggccactagatcatgaaaaacaccttgagtcccacattgggaaaataaccttagtcttttcctttccctatatatagagaagaccatcaagcctttggagcaccacaaaatagagtggtcttaggattaagtgcggagcccctcatagttaatattttcatcttcccaagagttttcaaacttggggcatataggtgatgtggggttgtgttttaaatcacacctatgtgccttagtaagagttagggccatcaagttcgttcgggttagtcggagtttgtctctatactttctaggtgattgtttcccctatcctttctaagctatnnttcttctttagttttggtgtaagtattntatcttttcttaggaattagatatcttagtttaggtgaatgatatgg

SEQ ID NO: 44801 - DNA, 270 bp, Glycine max
acgcgagctctgaccactgttctttcttcccgcgatgcttcttttcatgtccgcctgagtgggcttatagcctaaaccatactttccacgatttccttgggtttttatcaagctagttatgccgccattgtctttgcctaaacccatcccgggttcataaccgttccccaacataactcgggccatcattaccgccgcatcggacatacaaggtcgcccaaagagggagtccacggaggaaatgctgaccaccttaaaagactggaaagc

SEQ ID NO: 44802 - DNA, 453 bp, Glycine max
  unsure (1)..(453): unsure at all n locations
agctcatcatcatataagtataagaatatgtatttcaataataatgtataaaatataattataactagatgatattttaatattttgtatgaaatcagacaattctttgtattttctttttcttttatctgtaaaattagtaatagctgtctccttcaatcttttctggattgctaaacaaatattattggacactttgtgggtgagctgttccaacttactctctttcttcccagcttggcaaagacaaagattacaaaagcagaagctgatccgggccaactggctgacaatcactgatgatgataaagaggaagggaatgaaagaccttctagctgcaagagagaattagtagaacggaacaaaccttggaatatggccacggacttncttcctacacattctttcccaatgcgttcagatntctacctcaacataactccgcaacttac

SEQ ID NO: 44803 - DNA, 350 bp, Glycine max
accaactcgtgccacttttttagttcaacaatatggcatttacctacttcgctgaaagaaccacttcaacttgcgcacaggattatcccacttcaacaacctgcgaagaaagcaaactcttaccttatatatataactcctcaacttataatggccaaggacataaatgtgttattgagaggatattgcttttaaacatatctgatcaagtaaaggtgttaaagcaatggcagagaagatatatcggtgctgtgctgttgtgtctgtggaactagtgctagtgttgagcggctgcgagtcaagcacaaacgaagtcagtgttccaatggtgatgcagatgaatatcaaca

SEQ ID NO: 44804 - DNA, 397 bp, Glycine max
  unsure (1)..(397): unsure at all n locations
gcacagtatcacagaatctatgtgtccaacacccctcaattcaatggggtttctaggtttgaaaagtgaaatttaaaatgagggtaaattgaagcaaactctcacctcacacaagtccataacatcaatctaaacttgctcaaactgaatttacacctaatattccaccgaatcaaaatttgactcctcaacacccaattttgccctagaaatagctctttgttcattttgatcatttgttcttctctctagcacagtccaagctttctcgcaagtcctaaatgacatttcangctagtattaactcactttaacccccatntaccacagaattcagacttaacctttcaactctcaaagcctactctttttcactcataacatacattctactttc

SEQ ID NO: 44805 - DNA, 376 bp, Glycine max
  unsure (1)..(376): unsure at all n locations
gcttctcaggaggtgagcttatctatgagaggagtgtgtatagcttagctctagcttctcaaggaagttntctcagagaagcttctcaaggaagttttctcaagagatcttctcaaggaagctacctagtctataaatagaagcatgtgtaacacttgttgtaactttgatgaatgagagtcttgtgagacacaactcanagttcaacttctctccctttttcctccttcaatttcgtgctcccccctctctctttctctccctctttcttttcctccattgaagcatcctctccaagtttcttatccaaggctcatcttggtggtgaagctccttcttccatggcttattccttaatggatggcgcctcctctca

SEQ ID NO: 44806 - DNA, 456 bp, Glycine max
  unsure (1)..(456): unsure at all n locations
agcttatcttggtgattcaagaactaatttggttcaatgaaaagggaaagttcttctcaagctaatatctaggaaaatacttgctttgaataatgtgctacatgttccctctataagagttaaccttgcttctgtagcattgctgggaaaggttgggggtaaaggtttcctttgagtctgataagataattatgactaagaataatgtatttatggggaagggttattgtgatcaggtctctttgtactcaatgtttcttaagtgattaataagaatgcatcttcttctgcttacttgattgattcttatgatatatggcatgctagattangacatgtgaatccaacatatgttatgaaattgcaacaactaggtttaattaatataagtnataaacaaaataagaaatgtgaaatatatattgaataaaaattaactaaaaaatcatgtccttt

SEQ ID NO: 44807 - DNA, 481 bp, Glycine max
  unsure (1)..(481): unsure at all n locations
ctcagcttttatccaggcactttcttggaggtgaagcttctccttccatggcttattctccagcggatggcgcctcctatcacctcttctcctttatctttcactgcaactccatggctaaaaatcactattgaaggaccttattgaagctcatagatccagcctccatagaagcttctcaagcaagcttccatcaagtcaaatttacaaatntttacttgtttaaaaagtatattntatcatcaaaaactataaatttattaaaagaaactactcttataactatatttgaaatattcatatgtatgacttataatttaagtatttttttaataaatgaaaacaactacggtataacgattaatcatcaaaatgaatacttntgaatgcaatacaataatacatggttatgtcaatacaataatacaacaaactatggtacatgcatgaatcatcttcaatgggtggagtttcctttgct

SEQ ID NO: 44808 - DNA, 279 bp, Glycine max
agtattccctaatcaatagtcttacttccctctccttgatgatgcctcaactaacattgttcttggacctctcttggttgggagagcccataatctacccttctgcaaaccattggaaggatacttggtggcatttccggtggttttatgtgtccgtgtttatgactgacgggatggatgatgtgttgcttatggtggtggcggaggattctcctgaatgtcatcatcttcacgagtggtagaaggggctatacaagtagcacctctttttgtactcta

SEQ ID NO: 44809 - DNA, 363 bp, Glycine max
ctgcagctttgctcttggtataccgcatcgttatctactttttcacaatccagacattgtactcgagctcccccacacggacgatgatctccgaccttatcgacggcggcaatggtgtcctcaccaataaacgagcccggacgagacgccgacgatactctgtatcatcgtcggactcaataacgtccctgatatcacccaccgccctcctgaaatttttcatctcccatacctgtatcgggaatccccgaagttgaagccagacgaccctattattgtgtctagatgacggcgaccacttcttcacttctagaagagagagtcgcctctttccgtttcgactgaataatgagacgagccttg

SEQ ID NO: 44810 - DNA, 360 bp, Glycine max
taaagatcattttcatctgtctactattgaagcacaatatgtgtctacctcgagttgttggacccaattgatttggatcaagaattaaccatatagactaccacatctttgaaaataagatacctatgtactgtgcccacaaagcattgatgagtctatctaaaaaccctacattgaattctagatccaaccgtatagaaatcaaacatcactttcttatagaccatgtttacaagggaacaatggacctacattttgtacccactgaagatcagctctgctaatattctacaaaccgcctactgaagaaatgtctatttataatgaatctcccgcaatgactatgtaaggaatgatcat

SEQ ID NO: 44811 - DNA, 377 bp, Glycine max
  unsure (1)..(377): unsure at all n locations
agcnttgtccgcagatccctcatgtaagactatgcttaaactaaacagcattattgtaacagcataattaaaaccaaaacttaacccgcagatccctcatgtaaggctaagtttcaatcctgcttcaatcaagttctagggcaatagtacattttcgaatgctaaagtcacctaactatgcacacaaataggtgatcagacaaaaaatcattgcaacattaagcattgaacacagaacacataatcaattagatattaggtatttacatcaggtattcattaaaaatccccaactagggtggttagccattcattatctaagaaaccctacaataaatgagattaanagcagagaatgatagttccttacacaatac

SEQ ID NO: 44812 - DNA, 397 bp, Glycine max
  unsure (1)..(397): unsure at all n locations
agctngaatataaactaaatgccttggtattttggtaacccaactggccatgtatcagaaatatgcacctgtcgcaagactctgtggtttatgctcctctgccgaccaccatacagacctttgcccctctgtgctgcaatctggagcaattgaacagtctgaagcatatgctgccaacatctacaatagacctcctcaacctcagcagcaaaatctgccacaacagaacaattatgacctctccaacaacaggtacaatcccgggtggaggaatcatcccaaccttagatggtcaagtcctccacaacagcagcaacaacaacagccttattttcataatgctgctggcccaagcagatcatacgttcctccaccaatccagcaccaacaacaacag

SEQ ID NO: 44813 - DNA, 406 bp, Glycine max
  unsure (1)..(406): unsure at all n locations
agcttgagactggcgcgaagcccattttctcttactcgtgctaagcgcagcatcgtgatttcagagcctatttaaagtctatcttgtgcagaattagggtaccacctttagcacttttatgacaacttctacagacaaccagggcacagaattttagagcagccacaggcctatttggggaaaagagccctagaagcagaanataggagcagcttgtgcattgaagcctaggttttgtcatttgagaaagattattgagtagagagtgagtgtgagatgctgagaagaggagggtgaatcccccttcttgtgtaaggaactatcattctttggttttaatctcatatattggtaggggttctttgtaatggttgtctaaacaccctagttaggggattctaatgaa

SEQ ID NO: 44814 - DNA, 197 bp, Glycine max
  unsure (1)..(197): unsure at all n locations
cttctttgcaatttggtcttttcttgatgctctctgatgatgttttccaggaccctgtcaacctgcttgtgcaacttcttcaatctggtcatctttccagtaggaaatataagaatggaattgaaggaaagacatcagcaaggtcgaatcctcccccggattctacganttttcggatcaaagacacaacaaactca

SEQ ID NO: 44815 - DNA, 445 bp, Glycine max
  unsure (1)..(445): unsure at all n locations
tattatagagctcatcacctcacgaacgaattctattaattattttaatacggctaattctttggacataaaacattataactagcatttgacggatcacatcagtataaagtaaaataaaggaggtaaataaagagaaatngtttacctctgaaggacataatgagaaattgttaagaaaataatcaaatactactgcccagttagatactttgacttggtgcccaacagcaattatagtgcatcgactatttctattatgacttagtgtgcatgtgcaacagcaattatagctctcaacagtcaaggttctcactgtcacattaactattgttgcccaagtgcacttatatattacatactatacacaatattaggagaacgatacatcctgatgaatgatatattcatgtaaaaactgtactgaatacaatggattaaacat

SEQ ID NO: 44816 - DNA, 389 bp, Glycine max
gcttctgacagtatgacaaagaagataattcttcagactgtcgactatcagtggaggcagtttaaatctgacttgaccaggaaatgggcacttacagccgacaaggacggtgtaaacaacactgtctgtgaaaaatacggcattagccaggagaaatgggcccagttttgtcagacccgtagagacccctcgtgggaggtatgtagtttgttattttagttgttttccacaaaaaaaaaaaaatcacttcttataattcattatagtaatcattttcattaatgttcgatttttgcaggatgtgtggaaaaaggcacaagccattcagaagcaaaacactgccccccacgtgttgtctcgtgggggttatgaatatttagaacaaaagc

SEQ ID NO: 44817 - DNA, 348 bp, Glycine max
  unsure (1)..(348): unsure at all n locations
cagctnaaggcgcaactttgagaattgaacttactataatgttttagtaacacattgaagagttactaattctgattcatatggagatctacgccgtcttaattcaatttattgtgtatgtcttggaatacactaaaggcctatgttgggtgacgcactattattatgaatgccgtttgtcttggataggtgagatccttctctagctgtaatattactggagaactgtatgagcctgatatattgttggcgttcatgtacctttaatatggcactcgtgatacttatctcttttctcaccttggtaacgaaattcgcgatgacgtaatttatcgtggtaatacttgg

SEQ ID NO: 44818 - DNA, 453 bp, Glycine max
  unsure (1)..(453): unsure at all n locations
gctttcgattcattctatgcacccatagatgtccacattgngtttagtgcatttntattctcgntttgtttactttttataccccctgtcgacgtgcttaagccattttacttaagtcgtttctcgcttaacttaaaaataaaataaatttccaccgaacgtttgaattgtattatccattaactttggttaaaatcaattccgaccgttcggtcgtgccgtaaccacgttggaaatcaaaaagaggtaaaaaataatataataatcaaaaaatatctttttagtaaaataaagcggaaaatcaatcggacgttttctctgtgggatttctcattcttaatcgaattgattaataactaaggtgaaactaaggctaaaatcaactcgcctagtcaagctcgtcccacaaaataggcttttgaagtttgtcatttcaatttcctcactaagtaa

SEQ ID NO: 44819 - DNA, 237 bp, Glycine max
taagcttcttcatcagagttctttgccttgtatgaatatatatctatctctagagctaatgtgcttatgcttatgggtcgctggagccatttaatgctcacattaaatgcatgcattgtttcatgttgaaacaccaattcgggtggcttttgtgttgagcactatattaaaaaccactttcttagactagaggaacataacacaagcaggggtattgaattgagatcttatatttta

SEQ ID NO: 44820 - DNA, 409 bp, Glycine max
  unsure (1)..(409): unsure at all n locations
acctgcngcatgcaagcttgtctcagcggttatgcgagaccgagactctcatgttagccattatcagcaaataccaagaagaattaaatctagccacagcctacgagcacaaagtggcggatgaatatgcccgagtgtacacggaaaaggaggcaagaggaagggtgattgactcattacatcaagaggcaacgatgtggatggaccgatttgctattactttgaacgggagtcaagaacttccccgattgctggccaaggccaaagcaatggcggatgcctactccgcccccgaggaaatccacgaactcctcagctattgtcagcatatgatagacttaatggcccatataattaggaaccgctagggagttngtattgtcactcaaatcttgactagttataactt

SEQ ID NO: 44821 - DNA, 327 bp, Glycine max
cgaaagagaaatgatttaacacttattgtattctagatgtatacggtgctgaagataatctatacatactaataccataatggatagttgaacaattaccaggttatcactaaagtagcgattcatgactacaatccccaatttatagtcgtcgccttacaaaaaaataatactttctagtgaaacacatgatgacatgtcaagtgatgctcaaagactggggtgaaaagaataataagcctatactgttttacagtagtgtatcaaaagaaaatgatctgacataatgactatctagtaaatcagaagacgtaaaagctcactctg

SEQ ID NO: 44822 - DNA, 427 bp, Glycine max
  unsure (1)..(427): unsure at all n locations
gcttgcctcanagaggtccaggaaggacaatgcagccgaaggaactatttccgccccggagtacgacagtcaccgctttatgagcgttgtacaccagcagcgcttcgaagccatcaagggatggtcgtttctccgggagcgacgcgtccagctcagggacgactagtatactgattttcaggaggaaatagggcgccggcggtgggcaccactggttactcctatggccaagtttgatccagaaatagtccttgaattttatgccaatgcttggccaacagaggagggcgtgcgtgacatgagatcctgngttaggggtcagtggatcccgttcgatgccgacgctatcagccagctcctgtgatatccgatggtgttggaagagggccaggaatgcgagtatggccagaggaggaaccggtctgat

SEQ ID NO: 44823 - DNA, 427 bp, Glycine max
  unsure (1)..(427): unsure at all n locations
gctccttcttccatggcttattccttaatggatggcgcctcctctcacctcctttcctttgtcttccgctgcatctccatggtggaaaatcaccattaaaggaccccattgaagctcaaagatccagcctccatataagccccacaagcaagcttccatcaatatatgcatgcaatctacggaggggagcggtgttgcgaagcccanacccttggtgatatacttcactaanagcgcagcttcgcnaaagcctggacacccctttgtagccaaacctgttcctttcctgtaccaaaatagccacgcggtcccgtggagatatgcacctncaagggagaaggaagaagaagtcactgacgtcagctcgctgtcagctaaagtaacaaatatcacgggactgagtggtgtgacccgtagtggtcgtgtg

SEQ ID NO: 44824 - DNA, 203 bp, Glycine max
  unsure (1)..(203): unsure at all n locations
cggatcttaagcacctgggcatgcagctgtaaatggtatacatgaacatgttttggttggtttggntcaaggataaaagggatgccccacattatttccatgacacaaatgcaaaaatgatgatntggaaactttatgcaaaactggtcatgcatgcacctatgtggacactcaagtgtcaaaattttatggtcatgtgatgc

SEQ ID NO: 44825 - DNA, 398 bp, Glycine max
  unsure (1)..(398): unsure at all n locations
gaagaggagagattgaagccttcattttattgtctgcagcgacgagatgtctgctcccaaacattaatgtgaaaatctcaatggtgaacatgagcggatatgaactttatattagatatgccaaatatacctaagatccaagcagtaatgaggtttggaatcatagtttgactataacaagtatgagtattcgcggggaaaaagaaagctcaatgcgaagggcatgtnccttacttcatatatagtgcaaaattccatggcagaatgtcaaaaatgagtcccaacctgatgctaaattgtacacgacaacgagtaacaagttgggatcgtaatttactagaacaagttggtatttgtgggaataagatcccgacagtccaaagtacttctcccacccn

SEQ ID NO: 44826 - DNA, 543 bp, Glycine max
  unsure (1)..(543): unsure at all n locations
attatgaatgannttttgaagccattgtagatttgagagcctttcgaagacccagngagcctgcanagacgatctgcaggcatgcgatcttccatcagcttatttttatggatcaccttctaattacacgccaccagccatgctagatgacactggtcctgttccttcctccgtcctttgaagggagccttcttgacttgcgacgatgtgcatggagatcatatatagatgccctaagagacatgattcctaccccccggactccattgatgggccgacatccagcatactgcctcagcccagtctaccagcataggcaatattcttgtccatagaaggaccaccccccggagtcggaaaaagacagaaactcgatctcatcaaagagagaatgagagctatcgtaagctttggcgactatccgctcgcctacatggcgaatcgttgcttggtaacggatagttgcctacccacataattcaaggtcgctgattttcactagtacaaatggacaacttgtactcccacccttttttatggatg

SEQ ID NO: 44827 - DNA, 341 bp, Glycine max
  unsure (1)..(341): unsure at all n locations
agctntataaaccaatattacttacctattttcacttgcttggatccagtaacaatataaccttctacaccacgaacaatatccctttgataatgctgaaaacacaattgtgatttggagctatgatcagcctaggggagaagggataaatcgacatcaactataaatgaaaacaaagaattgaaatcaaagaaccaggtaaccttccccgcacgtgtcgatatataaagtatctcaagtttctggtgtagctggagctccactccatcagtaaccacattatctgaaccttcataaccgccacccccaaactgcttcagaacagtctaaatagcaacact

SEQ ID NO: 44828 - DNA, 439 bp, Glycine max
  unsure (1)..(439): unsure at all n locations
nagcttatcaaggacatgtttggataatttatacattctataaaatttaattattgatagaataaaaatatattcttgttataattactttaattattattatataatcgntgtaatcgagcccgcactattaaggtttgtttacaatttaaaaaagttaagtatttttagtgtaaattttctttttttaagtagattttagatagattagggattaggtagattttatgcaaactcaataaactctcaatttataactgtattttgttttgttgctttagttattttcaattgatgtgttattcttaaataaaagaatttttaattttaataacatcaaatccttaataataatattattgaaatatttaattgatacattatttatatacttgagtctgataagcttgagtgcgaaccatgatcactgcaatacaag

SEQ ID NO: 44829 - DNA, 414 bp, Glycine max
  unsure (1)..(414): unsure at all n locations
agcttgggacacagaacatttcgcaaccatatgtgggacatgtggngatcttgtggagttagacgcggcaacggaggataaggttaggatggacatcgcatgggtccttgttcgcacgaaggcgaaaccaaatatatctttgtcggtgatcgtcgtagtggatggaagtcggcatcgtttggagattcgtgaagacttagcttctgggtggagacggacggtacattttgaaaccgaggagggctatcctctgtctcctttctcatcggaaatggaggtctcggatgcagagccaaacatcaccctccctcgtggagcttctcccgaccatgtttccggaaaccatatcggagactcccccatctagtggccctcgcctggcatggcggaagagggtcggagtcgcccgaacct

SEQ ID NO: 44830 - DNA, 406 bp, Glycine max
  unsure (1)..(406): unsure at all n locations
agctntttctttgcttanaagtcttagaatacttggctctggaaacactttatattagtgattgcgagctgcttgtctcttctctcccaacggctcccgccattcaaagtttggagataaaggccatcactaacatccaaccaacttgtctccggtctttaacattaagggattgctcgtcagccgtgtcatttctgggtggtcgtttacctgaatcactgaagactctgcgtatctgggatcttaaaaaactggaattcccgacgcaacacaaacatgagttactggaaacactgtcaatagaaagcagttgtgattcactcacatctcttccattggttacctttccaaatctcagagatcttgcaatcagaaactgtgaaaatatggaatatctttttggttc

SEQ ID NO: 44831 - DNA, 291 bp, Glycine max
taaatttcagtcagcaactgtaagccataaacacttaagacttcttgaagtaatgtatactgtcaaaagttatttctaccttacacgtgcattacatttccatcgtttccatttctccttctccctattatcttctgtcaagaccccttatcttagaatgtaccttttataattaagaatgtgagactcaatggtattctctttaaatataggtgatattaaattaggcccctgtatatatggtgaacttagtcctgtgtataaaaaatatatttaaattgcgggctaaaa

SEQ ID NO: 44832 - DNA, 417 bp, Glycine max
gcttatgcttcaaacatttataatagaccttcttagcagcaaaaccaacaacaacagaataattatgacctttcaagcaacagatacaatcctggatggagaaatcatccaaatctgagatgggcaagtcctccacaacaacaacagtctatccatccttttcagaatgctgctggtccaagcaagccatatgttcctcctccaatacagcagctgtcacaacaaagaaaacaagcaactgacgctcctcctcaaccttctttagaagaattagtgaggcaaatgaccatccagaatatgcaatttcaacaagagacaagtgtttgatcaagtggactcggaataattaagaaggggggtgaattaattattaatgaacctttactaattaaaaatccatccttcttaatggtacta

SEQ ID NO: 44833 - DNA, 396 bp, Glycine max
  unsure (1)..(396): unsure at all n locations
taagcttctatncaagctcatcttggtggggaagctccttcttccattgcttattccctagaggatggcacctccgctcacctcttctcctttgtcttccgctgcatctccatggtagaaaatcaccattaaatgacctcatggaagctcaaagatccagcctccatagaagccccacaagtaagcttccatcataagtgcactgaccttgtcagatggcccaaacatgggtgacaagtgtggntaaagaatctaactatttctgaggagattcttaggcgctntaatnggtccatgagctttggcactgctttcggccatgttcatagctcatatgacatanganatagagtaatggtggcagagtgtacctttgactgatggggcgtgtcacct

SEQ ID NO: 44834 - DNA, 454 bp, Glycine max
  unsure (1)..(454): unsure at all n locations
agctgtcaanagggaagcaagttaaaaattgttttcaaagtaaatacgttgtttctacttcaaaaccccttgaactacttcacattgacttatttggtccctcgaaaactatgggttttggtggtaattactatgtcctagttataatagatgattactcaaggttcacatggactttatttntgaaaaccacaagtgaagcttttgatgcttttcgcanacttgccaaggtgattcaaaatgaaaaaggtctcaacattgtttcacttagaagtgatcatggaggtgaatttcaaaatgagtatttgaaaacttttgtgaagaaaatgaaattcaccataatgtttctacctcaagaacacctcaacaaaatggtgttgtggagaaggaaaatagatcccttgaagaaggtgcaagaacccttcaaatgaaacaaagtacctaagtacttttg

SEQ ID NO: 44835 - DNA, 314 bp, Glycine max
gaatacacatgaatattattttattgtacggatgcagaatggaatcactgtatttgattgagtaccaatccccttgtatcccaaatggcctcgaataacctctcagctaaaatactaatttttcctttaagacaaagacttggtaggaaaaaggtcaacatttggcttgcattaagtaacagaagtaaacttcggtgggtggtgttcatgttcttggaatagcattacatctgtccagaatatgaccctccatatctaggctagtgtactctaaaagctttccagtacaccaacttcccgtcgggatctcataa

SEQ ID NO: 44836 - DNA, 452 bp, Glycine max
  unsure (1)..(452): unsure at all n locations
tgcaagctnttgagagccattagtctatcaacggtttatantttgccacactatgtctgacgaataatagccgttgatgaaaattgtaggttttttttattttaaattaagttatattagttagttatattacccgataccgcaggaggcgtgatacgtgtatggaccatagtgttgctatcgctcaaatcaatgattgagttcgctgaaaacgatgtcgttaagggagaggaattgtgcctagtattatgcaactgttttattttttcattctttttttcttcttttattatatgaaaaaaataatgttgtcatgataagaccatacagacaaatgcttttctttttctttccagagataaaaaataaagaacaactaacattagaaaatgttntcttatcgacagggagagtctggtccaagattatttttagtttatctngaatttaaa

SEQ ID NO: 44837 - DNA, 211 bp, Glycine max
ttcctagtttaatgaggacacctacttctatcatcatgataatcacttcttttatttcccattggcgtgttattttttacagtccctcctcaaccattttggctaacgtgcacttatattttaatccaaagatcatccctataccattccatcgtgtcacttatctattcataaaagctcatccaaatccttctcacctggtgactaccat

SEQ ID NO: 44838 - DNA, 290 bp, Glycine max
ctgcactttggtggttctgcctgcttttatcccccctttggtaacctctgacggtcactttggttattggtatggtggcaatatctctacataccaccaatctccttttgcctatggcaggtcttgctaacttttcttgctggaatacatttgtggataacacagtgtgctatgttgcccataagactttttttgatccgaattgccgggaatacactactccaagacagtgcaaattatgccacatgtgagctgtccctacaaaagtggccttattcttactctctcta

SEQ ID NO: 44839 - DNA, 474 bp, Glycine max
  unsure (1)..(474): unsure at all n locations
agctcgcttgtggtgcttctatggaggctggatctttgagattaatgaggtccttcaatggtgattntccaccatggagatgcagcggaagacaaatgagaataagtgagaggaggcgccatccactatggaataagccatggaagaaggagcttcaccaccaagatgagccttggataagaagcctgaagacgatgcttcaatggaggaaaagaaagagggagagaaagagagaggggggagcacgaaattgaacgaagaaaaagggagagaagttgaactttgagttgtgtctcacaagactctcattcatcaaagctacaacaagtgttacacatgtttctatatataagcgggctcatacttagccaatgggctcatacttggcccatgggctcaaaatctaccctaaggctcatgagaaccctanggtcttcccttggatctctggcccaatctacttggagtcttcta

SEQ ID NO: 44840 - DNA, 327 bp, Glycine max
taacgttttactcggatgtccaattgagtcccgtaatatatcgacacgctcgaaattgaatgttgaagctctgagccaattcaaacaacaataactttttactcggatgtccgattgagtgacttaatatatcgggacgctcgaaattgaatgttgaacctctgagcacattcaaacgacaataactttttagtcggatgtttgattcagtttcgtcatatatcgagacgctcgaaattgaattttgaacctctgagccaattcaaacgacaataacattttactcgaatgtctgattgagtcccgtaatatattgagacgctcgaa

SEQ ID NO: 44841 - DNA, 331 bp, Glycine max
  unsure (1)..(331): unsure at all n locations
gcttcatgatgatgaaccaagccaatttgatgatgcctaaagcccaagtgctcgattcaatattgattcaagacttcaagatcaagcatcaagaatccaatccaagattcaagagaagaaatctagaagcaaccagtcaagacttcatataggataaatattaaaagaattnttcaaaaaccaaatagcacagttttgttttacaaaagaattttctcaaattttctaggttaccagagtgattactctctggtaatcgattaccaattggcattaatcgattaccagtgaccagtttggttttcaaaatgttgtcaaatgatttataatt

SEQ ID NO: 44842 - DNA, 448 bp, Glycine max
  unsure (1)..(448): unsure at all n locations
ccttagaatctcagcttctaatgatggaatcaagtagtttgatgatggccaaaagctcataagaatggtttcaagattgagtcaacaagttcaagatcaagattaattacaagattcacgataagaaatcaagaagaatcaagattcaagagaagatgaattcatgattcaagagaagaaatcaagaagcaacaaatcaagacttcacaaaggaagtattgaaaaggatttttcaaaaaccaaacatagcacaattttgttntacaaaaagagttntctcaaatttttcgaagttaccagagtatttactctctagtaatcgattaccagtttcctgtaatcgattaccagtggataaagttggattcaaaagcttttaactgaatttgcaacgttccaaatggattttanatggtgtaatcgattacaatatattggtaaccgatta

SEQ ID NO: 44843 - DNA, 325 bp, Glycine max
ccacaaatagtaaatgataatgtcaagttagcccctgaatgttaataaaccaaacaaatctccgagaataacttccatcattcatattcctcttacgatttaggatggcccctacaagttatcattaaaatgcagtttaatgtaacgactaaattgcattttaatgataacatgtgagaacttatttcaaattataaagatgaatatgagagacggaagctgttttaagagactctttttagtttatttacattaacggaataacatgaaatgtaatacatttttacggatcacaattactaatttattttatattaatatataa

SEQ ID NO: 44844 - DNA, 256 bp, Glycine max
actctttggctggatcagaaatggtgcagaaattacgtacggaccttacggtgcaacctggtctcatgcactcatatctcggcggcaactatcactttttcacatcaaacttcttacacagctatagttgcaacacaaagaacatgtgcatttccatagcttagaagtcgatagagataatataaacaacaaaactaagattaagatgaacgacgtaagaagaaaacaattgtgagatccataacttccctggcat

SEQ ID NO: 44845 - DNA, 403 bp, Glycine max
  unsure (1)..(403): unsure at all n locations
agcttcttccttttgtttctcactttaatcttttntntattgttgaataataatagggttgtcaatgacatacatgggttttctactaagaagaacaaagagtaccaagagaagctaccccttgttgtgctcagggcagtggaaattatttactctaaagccaactccgaggtaaccttccttctttgtttcttgcttacttgcttgtgtactcaactattttattttatggtttgcaaaacgaaaaaggaaaataaaaatgacttgaggttattttatttcttgaggaggttgaaatagaaatatcacgagcattaaatnttttttttttagtgtttaataaataataaatttgtttttttgggtaggctgaatacatgtntcaatatcatcttacaaatat

SEQ ID NO: 44846 - DNA, 428 bp, Glycine max
  unsure (1)..(428): unsure at all n locations
ctcagcttgcgggttggtcttctccgggcaaaagatcgaagtgggtctgattagaagcanatntaatcatcttgcttggacgaatgagaaaactggggcaaatgaagagggtgagaatgagggagaaacccatgctgtgactgccattcctatatggccaaatttcccaccaacctaacaatgtcattactcaaccaataacaaaccttatccttacccaccgcccagttatccacaaagacaatacctaaatcaaccacaaagtctgtctaccgcacttccaatgatgaacaccacctttggcacaaaccanaaacaccaaccaagaaatgaattttgcaacgagaaagcctgtagaattcaccccaattccagtgtcctatgctgacttgctcccatatctacttgataattcaatggtagccata

SEQ ID NO: 44847 - DNA, 338 bp, Glycine max
atatatctggacgctcgatattgaatgttgaacctctgagccaattcaaacgagaatgactctttacttcgatgtttgattgagtcccgtgatatatcgagacgctcagaaatgaatgttgaacctctgagccattcaaacgacaataactttttactaggatgtctgattgagtcccgtactatatggagacgctcgaaattgaatgtgtaagctctgagccagttcatacgacaataactttttactcggatgtctgattgagctccgtaatatatcgagacgcttgaaattgaatgttgaacctctgagccaatttcaacgacgataacttttta

SEQ ID NO: 44848 - DNA, 300 bp, Glycine max
actcgccgcatcattcagcgcgttttcggctaacgtctaggatgggagacgcacatcacttcactccatttacgcctgatagctccagaaagtttgcttgatggtagactcacatcatttacgttctaattcggctcataactcagaaagtaagcgtgatggtaagttacataactggcgtattattcgactacaactctaaaagatgtctgaaggtaagtcactcattagcgtctatgcgatctcactcataagatgcgtgatttaagtaatcattagctctttcgctatactcagaaa

SEQ ID NO: 44849 - DNA, 379 bp, Glycine max
  unsure (1)..(379): unsure at all n locations
gcttatattaattacaagcctggtctttatgtgctaaatanttttttcctttgtactgactgtctttaggggtgtggtagactcggaagagtaattgaaatctgaactgagttatattattaaaggcgtgctaattttttaatctttattgaaatttattttagaaataggttntatgttttcttattttatttgtttattagatgggtaaaaaattaactgaaggtttattcagcatcattgtatggcactacttaattttcaaaattncgtactggcttcttatctagttattatttatgatggatttaaggtgaaccactgccatangtggtccaccatgcaccacaatntatagtcgttgcattaatctatattg

SEQ ID NO: 44850 - DNA, 353 bp, Glycine max
  unsure (1)..(353): unsure at all n locations
agcttccaagaatcaagatcaagattcaagactcaagattcaagaatcaagagaagacttaatcaagataagtatgaaaaggttttttcaaaaactgagtagcacatggattcttctcaaaacatgtttaccaaagagtttttactctctagtaatcgattaccagattgttgtaatcgattaccagtaagcaatatggttntcaaaaagctttcaactgaatttacaacgttccaattgatttcaaaatgttgcaatcgattacaatgttttggtaatcgattaccagtgtgcttgaacgttgaaattcaaattcaaatgtgaagagtcacattctttcacaaaaaagcttt

SEQ ID NO: 44851 - DNA, 518 bp, Glycine max
  unsure (1)..(518): unsure at all n locations
aggacgatggannattgagaccatcgagntccagngctgttnacagtcganctgccgcatgcaagcntgcacactcgagtctgcgacgtgcgcatcatgtgtctagacttctcatttatggcgatcgagtctaccgctagcaaactaagatcctcaccatcagctcagatgtcctagttgaggacttcacttcttgtaactgtcataattatacaatggaaaatatcgtgctattccactggtcactaccttacaatcaagcggacgattaacacccattataactcccttcgcctctccctcaacaacgagatctcgatctctcatcacctgagcctactctcggactagggatgccccattgagggacatatattatccctgtcactcggccttactgaacttgcatctatcaggaacattctaatactagcactgttacggcatatcagaccatatcaatgatcataacaatatccacggagtaatattcgctcccggtgagaatcttgggtttg

SEQ ID NO: 44852 - DNA, 452 bp, Glycine max
  unsure (1)..(452): unsure at all n locations
gctctcctgctaaacgttatgttaaacagattgcatactcttccattgtaggttatgattatgaatgtctgtaacattttttttctcccctggtacagtttatgaggataatagtgtaaggaatccctgctgttgcaacctgaattgatggtctttttctatggcttttctttttggcagaactaagttatttgcttgcaacatctagaacctatacttttacatcttcattttgccttcctggactgcattgtaagtaatcattagcagatagattgtaaaagaatataaaaaaacttgaaatggagaaatatactangaagatatctagattatcgttagcaccctcaattgtagtaagatatctagaattctaacattccctttcatttaagagcccattggactttaagtgtgggcaatcttatactgatgatattcaacattatgta

SEQ ID NO: 44853 - DNA, 460 bp, Glycine max
  unsure (1)..(460): unsure at all n locations
actcagctnctttacacatctnctcagcttacaacctacaatctttaatctattcaaactctacaggatggcttcctgttcaagctcagttttccctcagtatatccacagccaaaaactctaaaaaaactcaacttcccctcagaaatagtgatttcagcttaaataggaaatcctgtcggtagccgcgcacttagcggaagatgagctcgcttagcacacgttagtgaactttagcttagcgccagtcacactcgctcagcctagaggtgaagacggtgcacttagcgagtcgcgctcgctcagcgcctctatacagctcattcttcttctagaattgtcccatgcttagccatcaaatggtgtgctagcggatgacgcgcttagccagatgatgagtggcttagcgagttcatgaaatctgcacttcaccaatcttggctattttacctgaaattga

SEQ ID NO: 44854 - DNA, 367 bp, Glycine max
  unsure (1)..(367): unsure at all n locations
gaacatatatgttcaaccctcctggtatctgagattcacttaaaattagtgagaaaaattgtttccgtgaagaaaatccatgccgaggcgctttcgtaacacttccgtggcgtttccgtgagtgatttcgcgaagattctcaaccgttcttcgtcgttcttcgttcgttctttggtcttcaaccggtaagttcctgaaatcaaacttttcaattcattctatgtacccttagtggtcctcatttgtttcgcgtacttttattttcatttcatttactttccgcacccnctttagacgtactttagtaatntatttaagtcattttctcgcctaatcaaaaataaaataaatttccaccgatcatttg

SEQ ID NO: 44855 - DNA, 329 bp, Glycine max
  unsure (1)..(329): unsure at all n locations
gttcaagaatcaagagaagtttgatgtctagattcaagaaatgatgaattcaaggtccctgagaagaaatcnagaagacttcacaagggaagtattgtttatatgttttcaaaacaaactggccaatttgttttctaagagtttcacagaattttctaaggtaccagagtctttactctctagtaatcgattaacagtttcctgcaatcgattaccagtggcagaggttaatttcagaagttacaactgaatttgaacgtttcaatcgatttcaaatggtgtatcgatacaagatgttggtatcgatactagcgcatctgaatggtgga

SEQ ID NO: 44856 - DNA, 428 bp, Glycine max
  unsure (1)..(428): unsure at all n locations
agcttatcattattattgtacttagcctttttataatataagttagtagagattattaagatagttgatcccaacatgttctatgatcaccctaagacatacagaaataattaagaagtgaatgaaaantttagtaaatatcaaaatgatatccctttacatgaatttttgcacgattgaattcttataagttacacatcttgtctcagtcctgcaccgttttaattatatgtaatttcgttatatttggattaataatgttaaacgtgtgattcatagtgtaacagtaagtgccaccaaattnttgtatgaaaataaaggccatagttaaccatcacgccaaaatattaaaaagggatacattcttgataaccctcgagtgacttaaaattataattaatttaaatgaattagtaaataactgaata

SEQ ID NO: 44857 - DNA, 433 bp, Glycine max
  unsure (1)..(433): unsure at all n locations
agcttaattgttnnnttttcttntcttttgttctattccctcttagtactagaataacatgtcttaacagtttcacttcttttggattttccttaattttccatggaaaaagtttgtgaagaacacttctcagtctgcagctcaatggagcagtactaattctagaggaatggtgagattatgcctagctntaccctcacatatatataagccttaaaaatcccctccttgtttcattgccacattagttgccccttaaaaatgtagcttccatggcatgcatggatggtttggagtttaaaattttacattcaatcatattacgacacccagaagttattgaagatagcatttctgcacttgtttagctgttttgtttcagttcatcttaaggttgaaagttatgaagcaactgcatcacctctgaatgaca

SEQ ID NO: 44858 - DNA, 413 bp, Glycine max
  unsure (1)..(413): unsure at all n locations
cagctggtaaatttaatttgtagtatagaagtttttgttaagcaagaacaagagatgtgctaagacatcacagagtcgatcatgggttctttaaggttaactatctattttttattctctaaagaatcaagttaagcgacgtgaaagctttaataacaaagaaatatgtatactaaaaataaaagatatactcacagtgtataaaaaatatatcatgtaaaaaaggaaaaattcacattggatgtattcaattcattagataattttatcgttgataaaacactccttattttttcattattctcttttaaactacgataattgttactactcttacattgtgggttttttcttccctaacacttatntatttatttattggacctgcacacctgttttttctcttcttttct

SEQ ID NO: 44859 - DNA, 365 bp, Glycine max
  unsure (1)..(365): unsure at all n locations
acaattatgaataggaagaactcatccactaacaaccttgaagtacatgtgatactcaacaaccattttcattttatgtggggaacaaaagaaggaatgataaagaatatgaatataggttattctttgntaccttaaaccagtgtcataattgcacctaagtacattgaaccaatagctttctaatccaagtttgcgttngaacctaaactggngaagctcacatcaaatgggcccaacgaatgaagtggctcagcccttagtaattangatgatgagaatcacatccaagtgagtangaaaggatccattataatggattggtggtagtattataaagatatatatgntcataaaaatgactg

SEQ ID NO: 44860 - DNA, 428 bp, Glycine max
  unsure (1)..(428): unsure at all n locations
agcttgtttcactattgaagttagatagttttatctttgcatttctaaccattgaggatcaaaccaactttntaatcactgccaacctataaaatctgatgtggggtacagctaatgtttatattcttcaagttggatttgctgtatttttggaaaatttcatttcattgttctcaatttttgtggaataatggtgttctcttgtgtattaactgtcataattgtttaattttcaaatacagagataatcgctcctccagatcatcacttgtagatggttttgatagtctggaggagggtggtctaagggcttcttcttcttactcacgtgaaattaatgagcatgataatgataaagccatagagaagttggaggacagagtttcgtttctgaaacgagtgagttttttctatcaagtactatttca

SEQ ID NO: 44861 - DNA, 321 bp, Glycine max
  unsure (1)..(321): unsure at all n locations
gattgttgtcagaggggcanaggtctgtgtggtggtcgacagaagagcataaaccatagagtctggcgataggtgcaaatttttgattcatggccagttgggttaccaggttaaccaaggcatctagtttaccttcaagcttcttaatctcggttgatgaagatgaatttgtggctacttcatgcactgctctaatgacaataacatggcactaaattgctgggagtttgaagccatcttctcaattaaatttctggcttcaacaggggtcatgtctccaagggctccaccactggtagcatctatcatacttctcttcat

SEQ ID NO: 44862 - DNA, 356 bp, Glycine max
gatccttaagtgacgcagcatgcagctgagagttcttgcctttattgacattttggaggtaaatgagttaccattggtagggagaatgttttcttggataacggcgggaggaggagccatgaataggttggataaagccttaatctcattggaatggttacaagaatgccaaactctacacaatacgtgttagatagatcaatttctaattgttgcctcggtattgtcaaacattacaatattgactggggacctacgccatttaagatatgtaattattggattgaagagccatggtttgtggattttgtgaagaaaaaaaaatatgaataatgcaatgtacaagggtgtggagt

SEQ ID NO: 44863 - DNA, 293 bp, Glycine max
  unsure (1)..(293): unsure at all n locations
tggactcatgatcatactcacattgatattaaaaaaaaaaaatacatgatcacaccaattgaaacagaaaatggagactttaaatattataaagactccaataaatataatanaaatcaaagttattaaaagattataccataatagtaactaacagaatgttgaanaatataacaattgtaacaacattaagtgttctcctacacaacagcataaggagtgagaacaaactcgaagaaatatttatactttcattcatgcatattctactctcttaatcaatgattcatgtg

SEQ ID NO: 44864 - DNA, 393 bp, Glycine max
  unsure (1)..(393): unsure at all n locations
agcttcgaatgagtctaatgtttgatcttctatccatcaacgagaaccatggttatagtcttggaccgttattgctatagattgtcgaattagcaattcatcgtgattggagaggtttccaagtgaaagaatacgatggaaacggaaatggatgtttagagaaaatattaacaaatcgattcaaattaacaactcagaggttattntgcaattgaataaaanttgatcaccttcatttgaattactttgcattttaaattctctaggattttaaaactctatccaaacacaaagtaaatgtaattagatntaaatattntaaatttttatcttagaatgtgagtttaagtctaactcaactctaaaaattagtttatagaatgaggattactc

SEQ ID NO: 44865 - DNA, 400 bp, Glycine max
atgcatgcaactttacgtgagagatgtcttcctgcatcttcttcctaacacatgtgatcaacatgaacttataggagattccaaattgtcgcactcttatggtcagagtcatacatcaactcattcatgacctcgctagttaaattcataaacatcattcacttcaaaatatatatgcacaacatggtgcatggttcacatataatatacacatggtttattttcaaagtctcttgaagattcctatccacagaggactacgttctccccaatattttgtaacacctacacataccatcacatattgcattcacattcatgcatagacatcatgcattccatcataatatcgatcatagtattaacattgtgtatcataggtatatttataggaacaata

SEQ ID NO: 44866 - DNA, 438 bp, Glycine max
  unsure (1)..(438): unsure at all n locations
agcttggagaggatgcttcaatggataanatgatagaaggagagaaagagagagggggggagcacgaaactaaagaaagaaaaagggagagaagttgaactttgagttgtgtctcacaagactgtcattcctcaaagttacaacaagtgttgcacatgtttctatttatggactaggtagcttcctttagaagctttcttgagaaaacttccttaagaaaacttccttgagaagctagagcttagctacacacacccctctcataactaagctcacttcgttgagaagcttccttaagaagattcctaaagaagctagagcttagctacacacacatctctaatagcttagctcaccttattgagatgagaagctagagcttagctacacacccnctataatagcttagctcacccccatgancaaatacatgaaaat

SEQ ID NO: 44867 - DNA, 302 bp, Glycine max
  unsure (1)..(302): unsure at all n locations
tcagcttcagaatcaagatcaagattcaagattcaagattcaagaatctagagaagacttaattaagataagtatgagaaggattnttcaaaaactgagtagcacatggaattttcacaaaacatgtttaccaaagagtttntactctctggtaatcgattaccagattgttgtaatcgattaccagtagcaaaattggtttcaaaaaatntcaaattgaatttacaacgttccaattattttcaanaagctgtaatcgattacaatggtttggtaatcgattaccagtgccctttgaacat

SEQ ID NO: 44868 - DNA, 526 bp, Glycine max
  unsure (1)..(526): unsure at all n locations
cgggagcggatgaacctgattgacctgtgaattcgtggacccggaacttaacgcacctgcaggtgccacttgttttcctcntcacctttcttttaaaataagggaacatcctcatcgccatgttataatttatggctcatgagagagagatgttacttatgttgggactaattaataaattattaataatgaatgactaaattattattggatcaaatatgagaagtttataaggtagttgtgattataagaggggggtaatggccacttacatgaaactatgtcccctcactgacaggaaaattattctttctatttctacacgaacctagagagacagaaaaaatagttaagagagtgaaattttgttttcttattctccaagaaatcaaagacattggagataaacctcactatggagaaatggtaccttggttaatctatatattgtgagaattataaggttccaagaacctattgtgttttcttatccttgttaactctaaggtagtacctaacaaaaaag

SEQ ID NO: 44869 - DNA, 497 bp, Glycine max
  unsure (1)..(497): unsure at all n locations
ctcgctaagccaatccgctggcttagcgagcgtccgctaagcgcaacactcattggctaagcccaaggaagaatctggaagaagatgagttgcgcaggtttgctaagcgcaccgcttcatctcactaagcgcaccgcttcagtccatccgctaagcgagaaaggcacttgctaagccaaattcactaatatgcgcttagctggtcaganattgcgctagcgcaagagcacggacaaggccacctatctagcctanaatcagattttgctgtgtgaagatctgcagagaccagagcttgaagaagaagctgttctgagaacttgagatgagtttgtgagtggttgtgagatcctagaggtgaaggagacatcctcaccacttgtattttggaatctttcatctcgttcttctctttgttgtacagcaggcttcctgttattcgacgctaaaatctttattggatcttccctgtaggtactngatgtaaatatcttttg

SEQ ID NO: 44870 - DNA, 448 bp, Glycine max
  unsure (1)..(448): unsure at all n locations
caattatctaatcattccaatccactcaaatcatacaattgctcattcaaataattatcaaacactcatttcataccaaacaatccattgcatatcattttcaatcaattcattgttcaaacacgcttntggtacaagcaaacaactcatagtgctgaaatttaaaataactaaaatataaagcaaactaaatactaataaactaaaatgttcatgctntgcagaaattaaactaaacacaatttaaacatcctgctcatcttgtggctgatcttcattatgatctagtgttggagctgctgatgaatcctggataggctgctctggctccgtgactggtgtatatggctgggtctcctcangaactggtgcangagatggcttaagtatttgatctatggaagtcccctcctcctgagccatgtgtgcatctgcatcaaaataaaat

SEQ ID NO: 44871 - DNA, 494 bp, Glycine max
  unsure (1)..(494): unsure at all n locations
ccaaatatgcatgtgaattaggacgcatcaacaagaatcaagccaaggctattgtgcaagcaatcaatggggcaaaacacaccanatgattataatgatggatggctcanattctcacaaaggtaaaatcatcactttcanattgagctttcanaactatcatgacatgtagagaagaatcaaggatttcgggtcacaaaatgtcaagaaacttttatttcaaaacaattacccatttcttgaacatatcctataattcaaagaaaacatgcagagtcgtacgtgcacacgaaattgacccataatattaaactgaaaatccgacgaaactaacaacattaccaaataacacaactaacagattaacanaacccacataactaggcaaaccaaagaacactccccccccccctccatacttaaacaacacattgtcctcattgagcacaattaaatgattaaanaattaattcatcaaggagatcggacagttg

SEQ ID NO: 44872 - DNA, 185 bp, Glycine max
gacctcatgtagactcgtccaaaatcttgaagtgttcctcggatccctggcagatacaatagtataatgaattccatgcaacctctctactaccttgatgtacaagtgcactagctattgcattctatgctctatttccaccggaattaaatgagctaatatggtgagcacattcactatgaccc

SEQ ID NO: 44873 - DNA, 493 bp, Glycine max
  unsure (1)..(493): unsure at all n locations
acacctctacatgaagcattagttttctattttaagaagatgtcttataattaagtagcatttcctttaatctttataagacaaattattcgacaattaatccttgtttttcaagacatgatattaagaatagtatataagcgtatagctacatgtattttattggctcgtattggtttaattttgattttcaaagataggagaatcatactatgtgctcttccattatatatatatatatatatatatatatatatatatatatatatatatctcgatgtcacctctgagtgatgtgaagtttaggtcttgtctaatgcctgatgtgtgcgaatgaattatcttcacacctgcatatgaactaggtatatttcttctgtgtgtgtgtgtgttgtgtaagcagtctccttcattatgtatatatcatacacaaactagtattgttgtatgttcgtctcctgagtaactcaatatggaagtgtctgctattttn

SEQ ID NO: 44874 - DNA, 149 bp, Glycine max
atgttagtcagcttgtcagattgattgtgagggaatgcattgagcgcatccctgtgagagttttattcttaaattgtgagaaaaacaacgatcatttagtactgatttctgcatgaatccatcaagtatggactgaatgcgtgaattga

SEQ ID NO: 44875 - DNA, 445 bp, Glycine max
  unsure (1)..(445): unsure at all n locations
agcttcaacggtgtgttagggttgatgcgggttattccattcactttatatcgtanctttccattaattatggctttagaatttgccaacacaagtgttctttgaacagggatggttccatagtggaatgagccctgaggatttggtcgaactgcatttgctgtcaaattcagtcttcaaaacaacacaatagaacacagtctgagcctatgatcaccagatccccaattatttttttttttggttataggtaagaatcaaaaaattcataaaactgatacacattactgaattaactaagaaaatatgttctatttacctcttaatttaaattgttaaaaattataaacttaagaatgtcatatttccatttcatcttaatttttatattaaatatataaatcaagtaaccaacgtatattttttactatttatataatatttg

SEQ ID NO: 44876 - DNA, 373 bp, Glycine max
  unsure (1)..(373): unsure at all n locations
cttcaagtagtgcatgatatgcttccagagaataacacattttctaaaagttactatcaggccaagaagatactgtgtccaatgggtatggagtattataagattcatgcttgcccccaatgattgcatattgtacagacatgaatttgaagaaatgtccaaatgccctacgtgtggggtatcacggcataaaatcaatgatgatgaggagtgtagtagtgatgaaaactcaaaaaaggacccctcagtgaaggtgttgtggtatctgtcgatcattccaaggtttaagcgactttntgctaatggagacaaaaccttacatggcacgcaaatggcagaaactgtgatggaatagtccgtcatccggttgatt

SEQ ID NO: 44877 - DNA, 440 bp, Glycine max
  unsure (1)..(440): unsure at all n locations
agcttgcaagtgtagtcttattacttgactttttcacacgacacaaagaataggttgcattagaaccataaggtacggtcaaaacaatattccttatgaaatatatcttgatgcaggtcatcaaactataaggcattaacatcgctacgaacaaggaattgcaaacatccatacaacaaacatacataaacttataggttcctaccacaagcatatatcgtgcatacaagaaataagaatcaagctaccattaatggtgtattactgaatcgcaagcttcaacaaccacattcatgactacacacaaaagaagagaagtaagtagccgtgtgtntacacatcaagaanaagacactcatccaaggcatatataanggtcanaaggttttcacaacactaatccacacatcaagagagaaataagcttattaacaacatac

SEQ ID NO: 44878 - DNA, 404 bp, Glycine max
gataatcaatgaacattgccatagatagtgaaaaaaattattaataacctcattcaaaaataaacatgtcatggttgagcttactttaattcattgtttatgtcatagtttaaatgataaacgagacagaggtagcttagttatttcattattaaatcaattggttaattaaacattgctcaaagaattcataattataatttgttcataaaaaattgcaacagaaaaatattgatgagctaattaaatgttatatttttaatactatctttaagattgcaacattttaagattgtagttatcaaatgcatgatacaaaagaagtgtgtgttgatcattatactgctccatgaataattgaagcttgcattaattattataacatgtcattatttatcatacca

SEQ ID NO: 44879 - DNA, 359 bp, Glycine max
  unsure (1)..(359): unsure at all n locations
gagaggaagagagaggtgggagcacntaatcgaacgaataaaagatgtatcgaagcggaactttgaagtatgtctcacaagactctcattcatcgaagttacaaccagtgttacacatgcttctatttatagactaggtagcttccttgagaagctttcttgagaaaacttgcttgagaagcttctttgagaaaacttccttgagaagctagagcttagctacacacacccctctcataactaagctcacctccttgagaagctttcttaagaagattcctaaagaagctagagcttagctacacatacctctctaatagctaagctcacctccttgagatgagaagctagagcttagc

SEQ ID NO: 44880 - DNA, 280 bp, Glycine max
  unsure (1)..(280): unsure at all n locations
cgatgcgctngggtaaccgaaatgtcaagcatttattgtggcacgcgtttgcaatttcattatagtgcaacctttgctttgtcttctcagacatcccagcccattttaataccatatacttttctatttccttcccaaagcattccccttttggtctctttcatatatcatcatcccgttttctgcgttattttacatctaaagctatgatattttacaccaaaactgtgatttgtatctcagatttcatgacaacgatatcatatttgcattcttctcc

SEQ ID NO: 44881 - DNA, 265 bp, Glycine max
taatggacacacatgaacatcgctacgcaacgacattcatggcgctccgaacatacgtggagtattgaggattgccttgagggtccgcacttaagcgatcatgaaactatgctccatacatcatagtggaggacacatgaacaaccctaagcaataatattcatgtggcgccgaaaaaggatgagaatggaggatggccttgagggtcctctcttatgcaatcatggaacacagactacaactctcaaacggaggacacatgaat

SEQ ID NO: 44882 - DNA, 459 bp, Glycine max
  unsure (1)..(459): unsure at all n locations
cctttaatgtttcagagtacccaaacaatattccattatcacacttagagacaaactttcctaagttgtccttagtgtttaaaatgaaacattgacatctaaagtgatggaagtatgatatgttggggtttggtcctttccacaattcatatgaagtcttttttagaataggtcttacgtatattttgttttgtgaataatatgtaatattcactaattcagctcataagtgcttaggagtaaaaaatattattaagcatggcctttgtcatttcctataattatttgttcttccctccaaccacaccattctgttaaagtgttctaggagttgaaaagttgtgaaggatactattttcctcacaaaatagttgaaaattcacattttcaaatttntctccatggtcacttctcattgaagcaatgcatactccttctatanttttcaatcttgttcat

SEQ ID NO: 44883 - DNA, 325 bp, Glycine max
agcgtgctcgtctcgctgatatttatcatgcttacttttctgatgatgaccgaagaactattagggatccactttgaaaccttatgtgcttcaagtcgagaagataatgcttcctttctccacctgtgaagatgttcacagtttggctctgacgatggttcaaactgagaaacatttggtatttccattgggttataaactcattgagctagctatgatattgccggtgtcgacagcattctgttgaaagagctttttcagcaatgaagattatcaagtctaacatgcgcaatacgatcaacgatgttgtggtcaatgacttgat

SEQ ID NO: 44884 - DNA, 457 bp, Glycine max
  unsure (1)..(457): unsure at all n locations
ctaagctttacatgcttggaagtatagataagtggaatattaagcttatataagagattncttagtagtgggacaataactatgtgtaaggcaaaaattctgtttatcattcaaactcatctccataataaacataatttgggacaaggtatcaattaaaattagctactagtttaatagatgtgagtgggcttaaaacatattgtaagttggaagtaataaataattatagtttccttttcttaaactgtttgactgcttaagtatgaatattgttgtatctctaaaacatagaatgttacactattgcaataccatcaatataatcctttcaatggaacaaaatctaaaaatatatattataacacaataaactaattatactgaactgagtcttaaatcaagattcaaatgtggaattgccaccttatttagtaactcgtatttctcatagcta

SEQ ID NO: 44885 - DNA, 343 bp, Glycine max
  unsure (1)..(343): unsure at all n locations
ggtgatgacaaactaacatggttgntgtgtacgtcataccatcacataatattccccttgtcttcctttgaagcgactttaagtattccatggctgccccaatggtgcttttcacaaaacaaaacaaaatactcaggcaaattcacttatctaaagcaattgacaacatatatctcttgcaacataaacaaagcacctacttgtatacttgccactcagaaggaggagcataaatacagcctttgctgtcctatgctcacatatcatgccacctgcacacagaaataagaacattcaatcacttatatcctagaaaatgttcaacaggagttacagagaactt

SEQ ID NO: 44886 - DNA, 491 bp, Glycine max
  unsure (1)..(491): unsure at all n locations
ccttcaaccacagcaacacagaatctaggtatccataacccctcaatttaatggattttcaagggttgagaagtgaaattgagaatagggtaaatttgaagcaaactctcacctcacacaagtctataacatcaatttaaacttgttcaaactggatttacacctaaaattcccccgaataaaaatttgactcctcaacaccaaaatttaccctagaaatggctctttgttcactttggtcatttgtttttctctctagcacagcccaaactttctcataagtcctaaatggcatttcaagctagaattaactcactctaacctccaaataccactaaatccagaattggccttccaactctcaaagtctcactctnttttccactcacaacaccatactctcaccttctaaccctaggttaactctacccttcatctctaacagttntccataagcaatntcagcacataaccatcacaagcatcatcat

SEQ ID NO: 44887 - DNA, 469 bp, Glycine max
  unsure (1)..(469): unsure at all n locations
gtctaacattcttcctcaacaaggaacaattgacctacacaatcgtatcgaacaactaatcacatctctgcatgatgaacaacttcacaaattttgcagatgtaatgggttgtggctggccaccaccataatgaccacaatatccacctctttgtgatgcacgttacccacacttaagttctctcatgcaaacctaccaaaccacatgcacagtcacactcgatcactaacattggataaatatgaacgaacatgatgaaaaaaaacctaaatccatatttgccttacaacatgtgacaacaatctgtgctttgacgagagagaagacacatatgcactnttgataaggatactctctttggaagtctgcgctatacccagagcttgacaatgattcatagagagctgggaaaaaagaactaaaactctaagaactgtgtgagcagaccaaaaatgacatgctgacatg

SEQ ID NO: 44888 - DNA, 128 bp, Glycine max
tactatgtatttattacctatacttaacagaaaatacctattaccttattaaataaccataaattgggagagtttgatacaattcatacaagttttatacacaaaagttagtcattttcaccgactaa

SEQ ID NO: 44889 - DNA, 472 bp, Glycine max
  unsure (1)..(472): unsure at all n locations
ggttgcttcctccaaaacaacagccttctggaggaatcttctggatggcccaagtggaccttattgctattagcacccacattattactacatacacccacctgccttattttggtgattcttttctctgatagctatggaaacttacgaattaccgaacgatacgttgtttctttccgtaaagttatggaaccttgcggattacataccatccccttattacttacggaatccaactaattgtgcaacgatgcttccatttgagttccggtgtgtcacgaaaccttacggattgtgcataatattatcttttgttgtccggcatgtcccggatttcacacattgcctaatgatgggtgccaagcactctacaaagaccatactaatgtcgcattcttcagcatatgccactcgacgatatatggtatgacacccgctctgcatgctgacgtctcactgtaatgacaatccn

SEQ ID NO: 44890 - DNA, 52 bp, Glycine max
acacatgtattggtaatctattcatgtgccttaagatgacttgaaacccttt

SEQ ID NO: 44891 - DNA, 256 bp, Glycine max
attcttgtgctggcttgtgctttaatgcattcttcttcttcttcaaacctcttaataactactgtgccttgaatgttgggtttgagtatatctctttctcctccaaaagtagtgccacttacgtagggcatgatgatgaagaagagtggttttgagaagatggtgatgttgcagaagaacaacaagaacaatggaagctatgatgatgagaaaccaaggagtaagaggtttctggtgaacatcaatatcatgggga

SEQ ID NO: 44892 - DNA, 479 bp, Glycine max
  unsure (1)..(479): unsure at all n locations
atctgaagaactcgccaagcgcacttactgcgctaagcgatgttatcccttaaggatgaacattcatcctcttgctgaactacctgtggctaaacccaggtaacttaaccatttttttttgtgataggcgcatgctaagctgagcattcctgagccaagcacaattggttggactgtagcaatttctgctaagcggctctcctgtgtcgctaagcccaatgtcgtttttgtgaaagcccgctaagcgaattatgtctcgctaagcggccagtgttgttttcagttttattttccaaattttgattctgaataacttatgtcctgattaattgtttggttcctttatctacagatggcttctagaaagagaaagagcattggtacaaggcccacatctcagtatgacacacggagatnttcttattagatgcttggaccagatacacagacaantgtttggggagaaacattttacctga

SEQ ID NO: 44893 - DNA, 587 bp, Glycine max
  unsure (1)..(587): unsure at all n locations
tgcnncaatatgtnnnnnantgaaaccttgagagcatcgagatacccagagtcacctgctgcatgcaagcttcataattctntaactcgagtcgcanaagtctactttgaatatatttaacagcatgaatctgtgtatgttttcttaaggaaagagctgatctttattcaataactgaaagatcagatgcatcattttcctaacacactaggggcctcatgtatgctactactatcacgtgtaacaacaatgtaatatgctaactctataaaaaatgtagtactgataatatatagaagatctaattataatcatagaaatacgtatgccaattcattaacgatctgagaatctcacatataattaagatataatacgttctctaatgattatttaacaaatagaatgttaattatgagtgtaatatctcttacataattaatctctttttaagataaattagcatcgatcaattatgatttggatatacgtctttgcttggtaacactttacgtgagtggcatcgcgtcacacatcatatatggaccaagacttgagaagagacatccccacataagaagggaacg

SEQ ID NO: 44894 - DNA, 285 bp, Glycine max
gttcatgctgggggtcttcaaacaagcaatagggagaggggaaggagcttcacacttatgagcaaaaaatgttcctacaagaacaccaggtgcttgagtccctctattgcttggcctcacttcatgaacattgaaacctttctcatcactgctcttggctggtccccaaatacatgagtttctctcacactggtctgtgagatctgacctaacacacctgattttgtcaagtgagggtttctcatgtgtggtggtgacaacatggcctaacgctttatagccatc

SEQ ID NO: 44895 - DNA, 402 bp, Glycine max
  unsure (1)..(402): unsure at all n locations
agcttctcccattntctataatagggggagaagtgaagggaataaatgttcagccctcttgtgtaattgagatcacttgaagttagtgaaaaaaattatttccgtgaagaanatccaagccgaggcgcttccataacgtttctgtaacatttccgttggtgattntgtgaagattntcaaccattcttcaacgttcttcgttcgttcttcggtcttcaaccggtaagttcccgaaatcgaacttttcaattcattctatgtacccttagtggtcctcatttgttttcacgtgcttttattttcaattcatttactttccgtaccaccttttgacgtgctttagtcatttacttaagtcattttctcgcctaatcaaaaaataaaataaatttccactgatca

SEQ ID NO: 44896 - DNA, 486 bp, Glycine max
  unsure (1)..(486): unsure at all n locations
ngaaaaactgtctatatgcagcagcccccaggcttcgaatatgacaataaccttgtttataaactgaacaaggctctttatgggctgaagaaagcacttcgtgcatggttttaaaagctttcagcaactcttatctctcttgggttcaaggctagcaagtgtgacccttccttatttgcctcttcctcatgtggaaacacaacttatgcgcttgtctatgtggatgacataatcctcactggaaataacagtgttctaattcaacaacttatttcacagctaaactttattttctctcttaaacatcttggcaagttagactacttccttggaattgaagtcaagtataattttgcaggttttgtcatgctttctcaaaccaaatacatctcagattntcttgaaagagtaaatatggaagaagctaaaggaattttcacccttatggttggtaatctcaaattgtcaaagcaagaaactacatgc

SEQ ID NO: 44897 - DNA, 355 bp, Glycine max
  unsure (1)..(355): unsure at all n locations
tgttcgcgatatgtgaagatgatgttccaagtacttcggatttggtccgaccatgccctcctgatttccagctgggaaattggcgggtggaggaacgccccggcatttacgcaacaagcataatgtaaacctttacggttttaaaagctctatagttgggcctaggctttagagttttcattntgttaaggctttgtgtcttttgtctttgaatttataatacaaggatctttcttcatctgttcctagtctctacccattctcattcatttgcatgtntacttctttnttctaaaacggcagattcgatgacgagtcccccgaaggtactaatacctgngacccgtctatcaac

SEQ ID NO: 44898 - DNA, 453 bp, Glycine max
  unsure (1)..(453): unsure at all n locations
cagctacggcctgtttcccattcagatcaaatcagtgtttcaactattgctcttttatcaagtccatacaaagcatctgagtccattttggtattcaggaaagtccttcattattttcatcctcaagatacacattctttttcctttttcaaaaacctttttgttgtgtttcgatctacaaaattttcgaagagtactggtggttgttccttttaaaagcacgttagttttagaaaaaaggtttgaatcctggacaaagttataatccaagactacaccataaaaaatcaaatggcgcgcgaaaataaaaacaatccacgcgtaagntttttttttcttttctttgtcaacaatcatcacaacaaaataaccaaaatacgagaacaatcatcacaacataataacataatagaatactatacacaatatataagataaagacatagtcacaaa

SEQ ID NO: 44899 - DNA, 283 bp, Glycine max
  unsure (1)..(283): unsure at all n locations
attattaatntgaggttatattcctaagaatgctcaactattttttttttcatttgaaaaatatatcttatgaatatttaaaattgaactaactgtattttcttcctaattaccgtacttatttaatcaaatataatgttttagattccttaattattttaatcaatacttacattgcgttatctaaccttaaatgtaataatacgttcattatctctaataattttttaatctaataaactaatgttagaaattttcagaattaacatttacaaatatttat

SEQ ID NO: 44900 - DNA, 460 bp, Glycine max
  unsure (1)..(460): unsure at all n locations
agaaagttggagagaaagagagaggggtgcacgaaattgaaggaagaaaaagggagagaagttgaactttgagttgtgtctcacaagactttcattcatcaaagttacaacaagtgttacacatgtttctatttatagactaagtagcttccttgagaagctttcttgagaaaacttccttgagaagcttctttgagaaaacttccttgagaagcttctttgagaaaacttccttgagaagcttctttgagaaaacttccttgagaagctaaagcttagctacacacacccctctaataactaagctcacctccttgagaagcttccttgtaaagattcctaaagaagctagagcttagctacacacacctctctaatagctaagctcacctccttgagatgagaaactagaacttagatacacacccnctataatagctaagctcacccccatgataaa

SEQ ID NO: 44901 - DNA, 287 bp, Glycine max
actcaatccggcattcgagtgagacgttattgtcgtctgaatctgctatgagcttctagtatcaatttcgagcgtatcgatatattaggggactcaatcggacatccgagtaaaaagatattgacgtttgaatttgatattggattccgttatcaatttcgagcatgtcgatatattacaagacataatcggagttccgagtaagaagatattgttgtttgcaataagtacgagcttccgttttctatgttgagtatctcgatatattacgggaatcaatctgacat

SEQ ID NO: 44902 - DNA, 357 bp, Glycine max
  unsure (1)..(357): unsure at all n locations
tggagaatgaagaagaagaaagctacgtttgatatggatatanaaggcttctgaatttctgctttggctgagtgaggagagagaaacactctctggtgttaaaaaacaatacaaagggtctttccttttttttgcattattttattcaagctctgccacatgtccctatttgattggagcagataggcccactttctctttttgactgtgacccatactcagtcacaaaagtgagaaaaatctgacctttgaaacgctaaaatcctgcctcgagctgcgtgtcgtttctctgattccagtgtctcgcgtatctcttcgttcgccggggccacttttctaaagcatgcagtatatata

SEQ ID NO: 44903 - DNA, 369 bp, Glycine max
  unsure (1)..(369): unsure at all n locations
agctttgagcaatttcaatcgacaataactntttacatggatgcctgattgagtcccgtcatatatcgagacgctcgaaatngaatgtagaagctctgagccaattaagacgacaatatctttntactcggatgtctgattgagtcccgtcatatatcgagacgctcgaaattgaatgttgatgctctgagcaaattcaaacgacaataaatctntactcggatgtctgattgagtcccgtcacatatctagatgctcgaaattgaatgttgatgctctgagcaaattcaaacgacaatatctctttactcggatgtctgattgagtcccgtaacatatcgagacgctcganattgaatgttgaagctc

SEQ ID NO: 44904 - DNA, 541 bp, Glycine max
  unsure (1)..(541): unsure at all n locations
agacccaatgatcccttgatacctgcgttacgtacacttataatacgcagctgtatatgtganacatcgacactgaacatgcgtttcatacatctaatacacttcngtatacatatatctatagagagagatattacgtgacacactaatgatatcacttaattaacagcacagggttatagcacatgagttgtcatgttgatgctaaacataatatttacctgactgttatattacatatacgaattagaaagatgtcatcttgtcaatactctctgtgttgaatcatagtcttctgtaagagtccttcactataatattgatctatcatgtcgtggcgtcgatgctcaccatacagatacactatagattgctatcagactatgaagactgtgcattcactccatgatacaaaagataaactgagataacacacattgtgacgagaattgtacctaagacatctactcacttcattgattgatcactatgaagctaatagctgatatgacatgagtattatgctataaactcactatgn

SEQ ID NO: 44905 - DNA, 367 bp, Glycine max
  unsure (1)..(367): unsure at all n locations
tctctaacatgaacaagcacataaacattatgaggagctggaaaatatgtaacgtaatctttgggtgaaagatgaaaaccacagaaagtcaataaagttttaagtgataagcttttgaacaatgaagctttagaaggtcaacctcaagatgttgtanaacttcatgaggaacgtgactctttaaagaccacattggccaaatttgttggaggaagataagctcttgacaaattgttaatgtatggtagatgttccacaaacaaatctagcaatgggtatcagggagaaatgtatagtcatcatgaggaaacataatccatactcttgtggcaggttggcacatgacatcaaatgatggacctaccta

SEQ ID NO: 44906 - DNA, 341 bp, Glycine max
  unsure (1)..(341): unsure at all n locations
caaactcagtttggtgtttccatcaagtgcctcaaatctgacaatgctaaagagcttgccctcactcagttnttggcttccataggcactcttcatcaattttcctgtattgagagacaagaacaaaattcagtggttgaaaagaatcattagcatcttctcaatgtagccagagctttgtacttccattctaaagtccctttatcattgtggggagattgtgttaccactacaacctttctcatcaacggaactccttcatcattactaaaacacaactcaccattcaacattttgttcaataaggaatcagaatatcatgccttgaggagttttgggtg

SEQ ID NO: 44907 - DNA, 256 bp, Glycine max
aagaatcttaagaaacaagtcacttgaagaattgcgactcttggaaatgtatttttcgaaatcaatcactggtaatcgattaccattaagggtgtatcgaatacacatcaacagatgtgactcttcattttgaatttgaaaagcttaacgtttaaaacactggtaatccattacctgagagtaaaactatgtggttatgattttgagaaaacttcttgtgctactcaatgctatgaaaacaaaattaatacttatc

SEQ ID NO: 44908 - DNA, 422 bp, Glycine max
  unsure (1)..(422): unsure at all n locations
gcttgcttctacagaatgctcctacgttatgttaatgtaacaacaatgccacatcatccaaggtgatagtcacccctcctacaggcaaatggaaactactagtttccttatgccagcgttccacaaaagcagacattagtcctcaatcacccgtatctaaggaacatgcgatcaaaggacttagtccgttggtagctacaagacattcaatctctagagcaggcctcacgaacttagccatcatcattccatgggaagataactttcagctccagatgttattgcaaacaataatatcgatcgtgtaacananaanaaaaagttctaagctacatgttnntatgtttttaacatttacatacctcttcattcaaactctaaagcaatgtgatttcanaatctctcnaactgatgtgtatggg

SEQ ID NO: 44909 - DNA, 246 bp, Glycine max
attgaggccaatgggattcatgtaatgtcagaacaatccgaaatccagctgtccaaatagtcattacatcgaagtagagctggtcatatatctacgtgatccaacaaaagatatggcatataataatcttcctcttgattgcctgagttggcatgatctatcatgactcaattcatatgttgcaacccttaatctgttgagatcttccatagttagcttgggatcatcatggtgagccatctacta

SEQ ID NO: 44910 - DNA, 434 bp, Glycine max
  unsure (1)..(434): unsure at all n locations
ccaacttccaaaattttctagaagggcatagactcaaaatgctatttacacccctatcttgataagttcactccctttnttcgtaatttacgtaaaagttacggaagtcttacagaagcatatatgactttactttcttatttttctcttccctttcatcaatgtaaagtgaaatatgcttacccaaggttttcggaaactctacagaagcattacggaagccacggaagccttggaaaccatttttcanaaacgtggaggagcttgccgcccagttgcttcctccttaagcaacccanattccaaaattttccggaagggcctagactcaaaatgctatntacacccctatcttngataagttcaccccccttttttcgtaattacaaaaaagtacggaagtttatggaagatatatgactaaacttcttatt

SEQ ID NO: 44911 - DNA, 133 bp, Glycine max
gcaatcatctttgcgaccctcatgtggcccactatgggcgtggcgtgatattgttcaaggatagaatatattatcgacaggaacccaggtaaccacatagcgcagttgttacagaatagatacttaaccatgg

SEQ ID NO: 44912 - DNA, 352 bp, Glycine max
  unsure (1)..(352): unsure at all n locations
gattacaggtaattggtaatcgattaccggagagtaaaaactctggttacttagaaaattttgagaanaaatcttttaaaaaataaaattgtgctatgtttgttttttgaaaaatcttttcaatacttcccttgtgaagtcttcttgatttcttctcttgaatcttgaaatcaaaacttctcttgattcttgaatcttcttgatttcttctcatgaaacttgaaattaatcttgatcttgaacttgttgactcaatcttgaaatcattctcttgggctttttgtcatcatctntgtcatcatcaaaactacttgaatcaacttgattcatcatcatgaagcttgcttctaca

SEQ ID NO: 44913 - DNA, 360 bp, Glycine max
tgcttaatggctccaggttgctgcatggaagggcttttgttgtgttagcggacatcaaatggacacactccatgcaccctctctacaagctctcatgtctgatacaccgccggctctgttaccttgttgaccaatgcatacctatagccatcactcttgttaactaccgatcatgctgatcggcctgttgctacctcatgcactcctatactgactatggcatcttctctggtgcttaactacagtgagatggctgcctatctcttcattgaactctggctgtaccaatggtcacgcctccataggtccaacaatggctgatctatcatacttctatccatttacagactccttatatat

SEQ ID NO: 44914 - DNA, 395 bp, Glycine max
  unsure (1)..(395): unsure at all n locations
agctttaaagttagaaaaattcttctgatgttaagagtctctantttaatcgattacagccatacaataatcaattacacaagttttttaagcttacagacaagtgtctcggtataatcgactacaaacttatcataaacaattgcatagttgtttttaagacaatgaactagtataaaaattggtgtacttcttctcttgatcttatctttctttcttattttgttcttagtcaatttactaaaggttaaagacaatatctttttgaaagaaagaactttaacaaggtttttgtgcaaagggtgattgattgagtattggtttatcaagctttgtgatacgattcgtgcaaaagaaagttttttttaactctggtttaaaagttgttttgttta

SEQ ID NO: 44915 - DNA, 474 bp, Glycine max
  unsure (1)..(474): unsure at all n locations
ngttcgcacatcgtccgcgtctatgatatccacttgacaaggtgtgaactataggagaccttcaatcctaaaacgcaacgtggcggacaaaagtgggtagttaacttgaatgaccattattgtcaatgcggaaagtattctgctattcactatccatgtccacacattattgctgcttgtggttacgtgagcatgaattacttccaatatgtagatgttgtttacacaaatgagcacatcttaaaagcttatttcgcgcaatggtggcctcttgggaatgaagcggctattcctccttttgatgatccatggacacttatccctgatccaagtataattcgtgcgaaaggttggccaaaatcaacaaggataggaatgagatggattggttggaaccatctgagcnaccgataaaatgtattatatgtggaagaaaaggacacaacagacgtggatgtncaatgcaatctcaat

SEQ ID NO: 44916 - DNA, 290 bp, Glycine max
  unsure (1)..(290): unsure at all n locations
agcaatgatcaattccacaaattataaggcgtatgtatggaacactctacacttaatttagcatcacaaataacaaacgtattcacacgtcccacaactttgttttcgacgaatacacacatcaactaattagaatattataaccgtaagatattatntgcagaagcctattgtctagttaccaacaaccttttacacnttcaatcattgaaactgctgtaagagatacttcccnctttgctccttcttccaccttattccactgcttgtcaacatccacagaacttttc

SEQ ID NO: 44917 - DNA, 489 bp, Glycine max
  unsure (1)..(489): unsure at all n locations
ctgaataatgaatagcataacagaatgccttgcacgaatcctaatgctgctatttaaaaagagtcactcaaagtcactgggccctattacaatactctggcccaaaacgaaataaacattgaacaacataaaataaaattgcgaaatttcctaattaactaaggtaagcgctgcttaatttgccctcttcaagtccataaccaaaatccggattaagcccaatgtttcattaattcctgaaattagattaaaaacatcaaattagctaaatgagcccaaataataaaactgcctgattaattgacaattaagaccaatcagtaattaaaatggtgcanaaagggtttagaaaatagaagaaaatgatggcacatcanaaccccccatacttagcctttngcactcctgngcaaaatgaaacanagaacanaatccaagggtatcanagagagacaaacgaaaacattcacatatntctcaatgaacatc

SEQ ID NO: 44918 - DNA, 463 bp, Glycine max
  unsure (1)..(463): unsure at all n locations
agctttatatagactttatagcttcaatccgttgagagattccaactagctgttgtctaatagctttggcacttaacacgaggccgctgctgtggagagaaagagtanggaccacacacactttctgttgcatatctntagagaagtacaatcttccagtgttgcctagtgctagagctgactttcaacatacaaatcacaagaaacgctgatagcataagacaaaaggagtgacaattacttnttgttatgcaacaaaaactattgattgcatgataatagaatgaagcanaatgccctcatcacttgtctttcacaaagcatgcagttattcaaagagaagaatataatgtatcctgtacaattaattgggagtaggcataagacagatatcaaggaaagtagctanaccacagtctcgcgctactgttcactcagcacagtgttaacattcattatacac

SEQ ID NO: 44919 - DNA, 313 bp, Glycine max
  unsure (1)..(313): unsure at all n locations
atatcttagttattttgttttntcccttttattgccttagtaccatccttttgcattatctcatatagccattttttgtgtcttcactctgtattacatttgacagtgactggaaaaaggttgaagcatttgatgtatcaaagacaggcatccaggtaatttcaaatgcaacttgtgactggatatttacataanctgcgtgttctgggttggtatccataaatgttgtggattgaattaggcatcttataattttcgaagagtgtacgattatgtcacattaaatattttggcactttccaaataaagaatt

SEQ ID NO: 44920 - DNA, 563 bp, Glycine max
  unsure (1)..(563): unsure at all n locations
ntgaccttgatcgtccatcccggaccttaagtcacctgccgcatgcagctcgtcaccctctatcaccatcactctccaactttatggtaatagcatcatcgccatggtagaattaatgtctcatgagagagagatgtaacttatgttgggactaataaatcaattattaataatgaatgactaacttataatcggatcaaataggagaagtctagaggtacgttatgactattatacggggttaatgtccactcacatgaaactatgtcccctcactgacaggaaaatattctttctaagttctacacatacctatagagactgaacaaatagtcaagacagtgaaatcttgttctcttatcttgcaagaaatcaaaatacattgtagatacactctactatggacaaatgtagcattgtttatctatcatttgtgagaatcataagttccaagatcctattggttctctatcattngtaattctaaggaagtcttataataattcacatgttggatcatacgcatgagttatgaaattacgactctctagaatgatctattg

SEQ ID NO: 44921 - DNA, 426 bp, Glycine max
tcagcttgtctccgttgatgctacatggacacatgtgttggacattattagtatgtctgcatggtcctgtcagtgggtatgaagtgctggctggtttcaattgtaccgactggttttgtaattatttttttgttagaataggaaaggatcctaaaaaactacttatttcttctgggtggagataaattgtgaaagaaagggaaaagaagctactctgatgtacaatagtgtttatgatcctcttgacttgagtattggtgtgcgtttgaatcggacaagtacatgcatcgggttattttactgttccaaaataacacaggaaacagaatggctcatgaattaatatttgaagaggctgttggtcatgtaattgagaatcgtcttgagaagtggaacaagaaaaatgtggcaagattattattattg

SEQ ID NO: 44922 - DNA, 350 bp, Glycine max
acccgtcatatgtggtactaggtggcgggcgggcgatggtgcaagtcaactctccacgtccaccaatcacacataaatccaccatccccagtttcccaccttcaattgagctcacgtactcccacgtagcccttatcctcgttcttctcaacaccgggtccccatcaatccctccaagcttccacaacatccaagcaattcaacatccaaacatcataaactatcaaaaccaagaaaacagggcagaggcagaaaactctgcccaaaacacaaaccaataccgcaactttccttactcaaataccccagtaacaattctcttcgttccaattggtcaccggtggatcgac

SEQ ID NO: 44923 - DNA, 376 bp, Glycine max
aattagtctatctattgactttcttttcttccgtaagtgcacactcttggactatctttgttcaacatgcatattcgttcaaattcatgacaagaaacacatatatcatcttaagcgtgcattcaatttaaaacaaggcatacatccatttcacaaaataaataaactacttcactgccataccaacacaaattaagttaaactgttccagatgcttcaagatgagcaactaaactattcatgcacaaaattaataaaaagtaaataatgtactaacaccataataatactaataaataaaaaaatgccaaaagaagcataaactcttcagaaatatccacattcttgtcaagatgaaccacaacttcctcaatag

SEQ ID NO: 44924 - DNA, 417 bp, Glycine max
  unsure (1)..(417): unsure at all n locations
agctttggatcttngggagtgcaganaagaatactatgatgttcatgaactacctttaaatccaacagtggctcagatgaagaatcacagagagaggaagaccaaaaaggctaaggctaaaaatttccttttctctgttgtgtcaaaaattatttttacaagaattatgaacttcaaatctaccaaacagatttgggattatgtcagatcaaaatatcaaggttgtgaaagaaccaaaggcatgcaagtacttaacttgggcaaagaattcgagatttaaagcatgaaagagactgaaacaattaaaggctacgttgaccaactgttatgcatagcaaatagagtgaggcttcttgggaaggactntcctgatgaaagaatagtgcanaaaatcttggtcactatactcaagaagta

SEQ ID NO: 44925 - DNA, 359 bp, Glycine max
taaaacaatccataatcaattgtacccttcaagttacgaagaattcttcttgcggcttttagatgaggagaggtatgagcctccgtatagcgacacacaacttccaccgcatatagaatatcgggccttgtattggttagataccttaaactccccacaagactcttgaagaccatggagtctaccttctctccttcatcaaactttgataacttcaagccaccttccatatgtgtgttcacgggattgcaatcaagcatactaaatttcttcaacacttcttttgtgtagcttccttgtgagacaaagataccattctccatttgcttcacttccatttccaagtaatatgacatgag

SEQ ID NO: 44926 - DNA, 486 bp, Glycine max
  unsure (1)..(486): unsure at all n locations
taataaatctatatatggtttaaaacaagccttccatcagtggtaccttatgtttcatgggataattcattcatttggttttgatgaaaacctcatggatcaatgcatataccacaaggttagtgagagtaaaatatgttttcttgtttatatgttgatgatattttacttgcaggcaatgatcggnggttagctacatgaggtgaaataatttctctctaagaatnttgacatgaaggatatgggtgatgcatcgttgtcattgacattaagattcatagagatagacctcgaggtattttatgtttttcatatgaaacctatattaacaaaattctagagagatttcggatgaaagattgttcacctagtgttgctgccattgtgaaaggtgataggtttaatttgaaccaatgtccanagaatgactttgagaaggaacagattgaaaacattccttatgcttagttgttggaagcctcatgt

SEQ ID NO: 44927 - DNA, 476 bp, Glycine max
atgaccaagaataaggtgttgaaagagcataacaggactgtcctaatttggattaaagatacaatctctggtgatgataatgcttttaatatgtcaaggaagttggcccgtgggcctaaaagaaatgtcataacttggcaagcgatatcaacaagtattcgttctacacaaaatcacaagatgacaatagttcaatgttagacattgagggttagtctaaaggttgattctcaacactttgctatagtacatgatgacaatcctcgttagcttccatgccttactttggagtcattgaaaaaatctgagagcttaattatgtaaaagtcattgtctgcgttttcaagtgttcgttggctgatagcaatatcaatgtgccgactgatgatttttgattactctggtaaatatgaaaaatcgctaccataatgagccttcatcttggagaacaagctaacattgtttatgataaaact

SEQ ID NO: 44928 - DNA, 72 bp, Glycine max
gacctggagtgactagctacaggcgcgccgtacgtctaaatgaaccattctcccacagctatattcatactg

SEQ ID NO: 44929 - DNA, 551 bp, Glycine max
  unsure (1)..(551): unsure at all n locations
ttgancctgagttggtccgatctccgacncgcgatcctctatagtcacctgcggcatgcaagcttatgaacccaaactnttagcttcaatgcaatataacatactcatgactaggaacccaaaatttggtttaaaattagaacagcatgaatatatggacttgcttgtaagaatttgggctgccccatgattggtactttgcacctaagtaacgtgggaaatgcctttcaatggtgcgtagatatatgtgtaaatataaggggcataaaatttctcgccaagtatgaataattgttttcctaaataaatgtatgatagcgtggaatgcctttntgaatgcaaatatgtgcacgatgtaattagctttccaatatgcatattaataaatatgagtgaaacaatanaaatgtgtatggtgtactctcaatgtatgtaagtagtttgtgaatcaaatgttaggatataatangtgtaaagttacactttggctgatattggtttcttttcatatgttatacgggatggcattaaaatatatatgttttgatgtg

SEQ ID NO: 44930 - DNA, 98 bp, Glycine max
tcaagctgctcaattgctccacgttgctgcatggaagggcataagtctgtatggtggtcagcacatgagtacaaaccacatacacttgcgacaggtac

SEQ ID NO: 44931 - DNA, 358 bp, Glycine max
  unsure (1)..(358): unsure at all n locations
gcctcattatctgcggtggtagatctcccacattcaccagcactctccacccctgcaatagtactcacaagcaccacaaacccaacaaggcatagcaacttcacacaataagtacaaccctccattatttctcaatattatgcttatgtctctctattagtgaaatgtttctctgttgatttcacaatgcaataacccctttggctctcatggggttttatagcctaacatgctccaaaaaagtgcttggccttgtcaccctctgattaatggagcttgcactangacaaagggtgagttntattattgcaccacttaagaacataaagcaggtgtaaacacaattttgctccactta

SEQ ID NO: 44932 - DNA, 486 bp, Glycine max
  unsure (1)..(486): unsure at all n locations
agagcccgggtagtcaaagagaagttcaagtccatagtcatcaaagtctgaagagagtatgatgaactaagggacgttaatatggccaccgatgaagccttggaatgagaaaccaagaaggcccgaaaggaagaacacgaccaaaacaagttttgaggggctttatagggcagcaatagtgagctcaaactctgaagaggtgaaaggaatcatcatgggtcaaaggcatgatctggaaggacgagctaaaggcttgccttatgtcgaaaagaaatttgtcccaacagttaaagtgagactgaagggaatatgtgggccgtcatcgatgagtgcaaagagaagctaaatcttgcagcgactcacgagcaaaggctagaggatgagtacgccaagatatcagcagaaagggaagcaaggganagggtaattgattcattgcaccaagaggcaacaatgtggatggaccaattngctcttactttgaac

SEQ ID NO: 44933 - DNA, 368 bp, Glycine max
  unsure (1)..(368): unsure at all n locations
acattcaatttcgagcctctcgatatattacgggactcaattaaacatccgagagaaacgttattgtcgtttcaatttgctcagaggctcaacattcaatttcgagcgtctcgatatattacgggactcaatcagacatccgaggaaaatgttattgtcgtttgaattggctcagaggttcaacattcaatttcgagcgtctcgatatgttacgggactcaatcagacatccgagtaaaaagcaattgtcgtttgaattggctcagagattaaacattcaatttcgagcgtctcgatatattacgggactcactcagacatccgagntaaaagttattgtcgtttgaatttgctcagaaggtcaacat

SEQ ID NO: 44934 - DNA, 330 bp, Glycine max
  unsure (1)..(330): unsure at all n locations
acatgattgatacatgatttgggacttgtangatttgatttgggcaagattggatgatgggaagtgtggttttcnaaatatgctctttgtgcagattntgctgtaaaattgtgcagcagaattttgcacaagtgcagaaaaatccgtgtatttgctggttgtggaaagagtaatgtagaatgagttctggatgttcgctagtagatcccaacggtcaaaatgtaggcttatgcactatagacttccagtaaaattttggagtcgatccaacggttaacgaattggatcgaaggaattgttactggggtctttaagtgagaaaagctgtga

SEQ ID NO: 44935 - DNA, 297 bp, Glycine max
  unsure (1)..(297): unsure at all n locations
agcttatgcacatatnttcctacgaacgttcactcgcacaagacatcctattaactaagaaaaatgcacccatatacaatcaaggtagcttcattacctagattatntacatgtacttccaaggtgtatttgttatntacatcacacacgcctccttggctaaatntacatacatgcatactcaaagcatttcggngtaccaaaaaatgcacatgcgctcatcttggtatntctaatacctatacatatacaaacttcatgatgaatcttgactacctacgcaataaggtgctacat

SEQ ID NO: 44936 - DNA, 447 bp, Glycine max
  unsure (1)..(447): unsure at all n locations
ttcctgccactgagacactgtgaatggngacctcccattactactgaaacccatcacagttcctcctccgccactgatgttcatgttttccactgttgtctacttgcgctactcttagtcctattaataacacgacactcttgttgggtatcgaaatcaaacatagttagagccgaaacatgagatcacactcggatcgagctttgtcggaaggaaccatttggatttgggtttgctttgcttgtgatgctccaactaattaatacttaaagtaaacttgcattcaagtcaaaactcatccttaatatttacagcttctaaccaaattcctgcctgaaagtattatgggtgataaattagttctttcatcaaaaatttaaatcttatctttaaatatgaaaattacaatctcaataattcaataataaattaatcttctaaatttat

SEQ ID NO: 44937 - DNA, 401 bp, Glycine max
  unsure (1)..(401): unsure at all n locations
agctntagacaatatattaatgttcattgtgataatcataacaaccccgccaatacttaatagtactataatttaaatattcatactatataattattcgccgcaggtaaataacagtaggaagcaatccaattcagcaaagcatattgaaatttgtgtccacgtgattcagatcaaattatggctcgattgaatctatcataataattaaaaatagtaaactaatgttaacaatagtcgtacactttggttttatgtgtaatttaaatttcttgctccttatagaatttaagtattagctggtggagatctattgcacacggaanaattatattatctntattcacttgtaaggttatgatactacgtgtacttctttatgactgttcaattgagacaac

SEQ ID NO: 44938 - DNA, 476 bp, Glycine max
  unsure (1)..(476): unsure at all n locations
ctcaagcttctccttccatggcttattctctagtggatggcacctcctttcacctcttctcctttatcttccactgcaactccatggctgaaaatcaccattgaaggactttattgaagctcaaagatccagcctccatagaagcttctcaagcaagcttccatcaagtggtataagagcataagagcttcaagtaggtgctctttaaaccttcattaattttcagctttaccttctcctccattgttgtttcttcatttttctcctcacatgtctttgtattgcgattttttgtggccgaaacctgaaccataaaattctttcaaaaacattatagtagaagaaaacctcaaaaatctagagtgacatgttcacctattgtagttntgtcatagaagtcatgtctagtcttgaaacttgtcacataagattccttatgttatgcctgatttnttttcttgtttctttgctaactc

SEQ ID NO: 44939 - DNA, 365 bp, Glycine max
  unsure (1)..(365): unsure at all n locations
agctntaccccactacttgccacaatcaccctctatacctatcaatgttaacataatgacatcggcagaagtgcagttgagaagagagttgggcctatgctttacttgtgatgacaagttttcccctagccatcgttgtcctaataagcaatattntgttccacagtgggaagaagaggatgaacctgcattacaaccagatccaccagacgaggttgagacagctggtgaccccagtttgcaagatcatcatttgtcttataatgctntaaaaggctcatcaggtcttgggacaatgaagtttcaaggatcaataaatggattgggagtgtagattctactagatagtgggagttcagataact

SEQ ID NO: 44940 - DNA, 474 bp, Glycine max
  unsure (1)..(474): unsure at all n locations
agagactnttcaagctatntatcttctatctcatataagctctctaactntntagttttctcactctaagaagtggattcactcttgtcttggatggttatgaatgaaagctcctaccattatttatactactccacttccacaatgaatggtggagattacttgtatcctaaggtgaatattaattctctagaatgctttgcacattctagtagtttctacaattttctatttccttccatatcctttcatactcttctataagattctagaaggtttcacacatctccataatagttcagaggtttccacatttttccataagtttctaaagaattctacaccactctagagttcttcagaacattctagaanattcaacattctnttagaaaagtttataaatttcttgaacctatgtgatttagaatatanaanaaattatagcacccaanaacaatttttaggaatata

SEQ ID NO: 44941 - DNA, 248 bp, Glycine max
  unsure (1)..(248): unsure at all n locations
acagagtggtacctggagatatgtcgccggggtcatgagaccttgtggacgtcatgcggggtgctattgcccaaaaccaagcttgaccaatcccgacccaacccgggcatagtcggacagtgagaacctgtgatgtacctaaacaggcgagctcctggcagtcaacagataaaaggaacaaagaccacatagcaatgaggcttgtggtagctggccagctgcgaaactagatngatatgtgagatatg

SEQ ID NO: 44942 - DNA, 520 bp, Glycine max
  unsure (1)..(520): unsure at all n locations
tgcacagagnnnnttgaaccttgattactgaactacccaacttagctaaagacttctgagtcaagaatgtgcaattactatttttatatcttactagagggagaagatgatatgtacgatcttgtggccaccaataaatctttggaatggtaaaccataaaggcccgaatggaagaacgctaccattgccagtattggggggctttattaggcagctttagagggctcaaactgctaatacttgacatgaatcatctcctatctaaggcatgatatgaaatgactaccttgatgcttgccttaggtcaaactgaaatataccctatcgtttaaggtgcgacctaatgtaatgtgtgcgccgtcatctatgagttcgaatagaagctacattatcttcttatacaatcncatgctcagcatgatttcgcccgatctcataanatatagtggcagcgtgtgaggaattttttattgtccaaaggacacctgtgtaggaccgactgctgtacttcaacatgct

SEQ ID NO: 44943 - DNA, 312 bp, Glycine max
ctatggaggctatatctttgagcttcaatgaagtccttcaatggtgaatattcaccatggagatgcaccggaatgcacaggtgaagatgagaggggaggcaccattcactatggaataagccaatgaagaatgagcttcaccaccaataattgccttggataaaaagcttgaagaggatgccttaatggaggaaaataaagagagaaggagggagcactaaatcgaatgaatacaagagggaaagaagtggaactctgattgttatctcataagactttcattcatcaaagttacaacaagagttacacatg

SEQ ID NO: 44944 - DNA, 424 bp, Glycine max
agcttctatggaggctggatctttgagcttcactgaggtccttcaatggtgatattcaaccatggagttactacggaagaccaacgcgcagatgggagaggaggcaccatccactacacaataatccttggaagaataatcttaaccaccaacagagtgtcttggataacaagtttatagaggaaactttagtggaggactacaatgacgcagagatggtgagagagacagactgacctacactgatagtttcgtgcgaagttgaactatgaaagacagagaagttgaactgtgaagtgtgtctcacaagactctcatttcatcctagctaccacaagtgttacacatgcttctatttatagccattgtagcttgcttgagaaacttccttgataaacttctttaagaagctttcttgagaagc

SEQ ID NO: 44945 - DNA, 323 bp, Glycine max
  unsure (1)..(323): unsure at all n locations
caccattctgatcctgagaaccaggcttagagtattgggcgacactcccatgttcttgaagaaacttctcatatgaacctggtgcttgtccatcctctgtgtatctaccataagactccccacctctatctgatctcacgatcctaatttgttttccacattggttctcaacttcagccttataaactctaaaggcatctaaagcttcattcttagaatgaagtaagtagagatacatatatcgcgtataatcatctataaagggtatgaagnatgtcggactatattcatgcatgttctgacaacatatgtctgtatgtatg

SEQ ID NO: 44946 - DNA, 390 bp, Glycine max
  unsure (1)..(390): unsure at all n locations
tgatgtgcagctaatcgtgtgtgcctctcttgcgtgttcgttggatttaaagtccttaagacatttcatgcgttgttaatacacatgtatgaacagatggtgcctttggttgtaacttataaaattgctcatgatcttgtgtcaaccaagatctgtgccggtcatatatatgtttgcccaatgttgtatcctatgagcaagcatgtaacatctttctctattctggcagagaatcactgaacaagttngccctgttctctctgttgatgccaaaccaagaggagtacaacgactattgctgtatatcgcggtgattgacttatatatgaaacgatattanttctatacagattagcatgatacatgccacgttcgttacgagagatgacg

SEQ ID NO: 44947 - DNA, 536 bp, Glycine max
  unsure (1)..(536): unsure at all n locations
tgagcatgagnnnnnnnnattgagaccctttgaancccctcgaatgacaccattgaatnaccngacactctagannactcaagctctggaacagtgagagccttattattgtgacaattgcaactttatagaggatatctctccaagaaaattcataaatctcattgaagagcaactctgaatataaaatacttaaacgtaaagagcacctcctcctaagagtgtatatatggttgcaagggtaaatgcccccattcaagagaagagaagtggtcctttgtgcaatgcgccacaattgagccttcttaanaatcatacaaatgtatcatagacacatttttacatgaaaatataatatataattaaaagtgtacccttgcaacttgtgaaatatataagagaacatatatacatacggaagcatggcagctaaataaatcaatttggcatctgttcaaaattaattgcttgagagaaaaacctctgaatgataaacactacaaacatgaggaataaactagccacagtgaatcatt

SEQ ID NO: 44948 - DNA, 430 bp, Glycine max
  unsure (1)..(430): unsure at all n locations
agctntgttaccaattatatcaatttgtcctgaacatcaactgccatgtagttgacaatctccccacttgtgtgactctgcttggctgagcatgattttagttagatgttcacatatttgagattaagaatcaagaattaagattaacattcccgttgaatcattcaaaatcacatttaaataccagctaacatgattttagttagatgttcacatatttgaattgaaagaacaagtaacttttgtattagaaaaaaaaaactgaattntgctattaacttgcttttataaggaaaacatcccaacataaatcacttcacttcaagctcaattntaactaanatcaatntcattcaaaattgattttgccaattcttacacaagcatacactaaatgttcttcatgatttcagatcatggttagaacatg

SEQ ID NO: 44949 - DNA, 357 bp, Glycine max
  unsure (1)..(357): unsure at all n locations
acctatttgaatatccttaatggattggagaccttgttatcgatacgaaatagattttccgggggacttctcagctacattgttaacgcatccatcatttcattggatgtaagcaataatcatctgatgggaaagaattcaagcactgtaaaaaacctatctggatagaggcaactattattgttcaataaccatcctgaatgctcaacttcgttagaatnggcgaaacttgaagatctaaatgatttatatctctcgaaatataacttgactggttcatgttcattctgtgtaaattcttccttgagatttatccaatttagcaacaaatatttgtaatgattacccaaaagaatg

SEQ ID NO: 44950 - DNA, 383 bp, Glycine max
  unsure (1)..(383): unsure at all n locations
agcttgagccaatatcccaacttaccaaatatatcttgccctcggatagaaacaaaaatagaaagcatacgaagaacattcccaatcaaggagtgagagaaagctagaacacaaaagaaagaatattcccgatcaaggattggaagacaacagaagaaatatgcagaaaggtctttgaaccagacaatatctgaacaatacgggattgtcaccaagtaaacaagaaaagataggaaaccatgacctanagtggtcctctccctttgattgccaaccaaaatcctgtgcgtcggtggcttgttcacctcactatacataaacagaaaaccttggcagatatcatgtccagccgttctacaagccttgagccataatctcaactt

SEQ ID NO: 44951 - DNA, 450 bp, Glycine max
  unsure (1)..(450): unsure at all n locations
ttgcaatgttccaattgtcttttaaatggtgtgatcgattacaatatattggtaattgattaccagtgtatctgaacgttgaaattcaaattcaattgtgaagagtcacatcttttcataaaatgctttgtgtaatcgattacatggttttggtaatcgattaccagtgacaagttttgaataaagatcaagagatgtaactcttccaatggttttctcaagattttctcaaggttataactcttccaatggttttctcttccaatggtgccatcattttcttctattttctaaaccttttttgcaccatattaattactgattggtcttaattgtcaattaatcacgcagatttattatttgggctcatgtagctaatatgatgttttaatctaatttcaggaattaatganacattgcgcttaatccggatcttggttatgggcttga

SEQ ID NO: 44952 - DNA, 366 bp, Glycine max
  unsure (1)..(366): unsure at all n locations
atatataccattctctcatagaatgcaaagcatggaaagagaaagactgagtataacagactgggaaagaggcagtagacccctcaaattgttcttccttntttgccttctcagtattcctctttaactctaggtgctacagatctctatntattgccatactaaaccaacaatatggaattaatctgttttatttctagtatcccatcaagcaaaaagtgaaaaaataataccatcccaacatacagttgtacttaccacctacaccaaaataatagaacctacacattaaaaaatattaatagttaagaggatagttttttttttctagaacttaatgacaacactcccaccaaacacgatttc

SEQ ID NO: 44953 - DNA, 376 bp, Glycine max
  unsure (1)..(376): unsure at all n locations
caacctccgttggagttgtcggntgtagccactccatatccgactccaccttgttcggatccattgcaaccccgtctttataaatcacgtgtcccaagaactgcactttctccaaccaaaattcacatttcgacaatttggcgaacaatttcctatccctcaggatacgcagcacaatcctcaagtgcttctaatgctcctccttattccttgaatacactatgatatcatcaatgaacacaaccacaaactgatccaagtaatcatggaatatagggtggatgatagacgaacagttctaggcaatcaatttgtggggctccacactctatggtggaggacgcatgaacagcgctacgcaatcaattcatgggac

SEQ ID NO: 44954 - DNA, 348 bp, Glycine max
  unsure (1)..(348): unsure at all n locations
gcttgtgaggagcacatgtgcatgaagcatatctnggtccaagcttaccaccactggtgggatcatgagttcctgcagggctcttggttctagatcctgcgacaatttgagatgtcgaatganaacatggacaattgttaacttgtntcagcttcttacttatgagatcaattgaaacagattggctttccatatcattaaatttatcaagaaaacccaagttactgccattttgccctgaaaaatgaagagttcactatattagaaaaggtatactattacaagacatgtattataataactacaatgcaacttcggagataagctctcaccagcatgagtacctga

SEQ ID NO: 44955 - DNA, 463 bp, Glycine max
  unsure (1)..(463): unsure at all n locations
tctacatgtctaaggttntctagagatataaaggtccaagtttctgagaatttgagagattntactgtgtgaagacctgcagagaatcgagcttgaagaggaagccgtcctgagaacttgagatgagtttatgagtgattgtgaggttctagaggtggaggagacatccccaccacttgtatntcttcaatccttcatctttctcttctctttgttgtaaagaaagcttcctagttatggagagctaaatcctctgttggttcttccttgtaggtacttgatgtaaatacctgtatatctatttaatgatgttttgtgtgttcactatgctatcagaacttcattctaccatgcttttgccttgatcacgtagatgcatgtgtttntatgatcattcaatagtgaaactggtttgattttanaacttgatatgacgggcttgntatcgtatatcacagggatc

SEQ ID NO: 44956 - DNA, 329 bp, Glycine max
  unsure (1)..(329): unsure at all n locations
gcttgtagccattagaagagaatgagcatgttattggaagtatgactganaatgttagtcagtctgtcagattgattgtgaacgaccgcattgaccgtatcccggtgagagtgtgatccttaaattttgagagacacgactatcatttagtactgattcagcatgaatctctgaagtatggactaaatccatgacattgaggatgatgaaggtcatgtgtgaatgtgatagccacttagccaaaaagcttaccatgtgcttgaatgaatcatnccttgtacccaattnttgctgaatgaattatcgattgatagaaccctgagcctata

SEQ ID NO: 44957 - DNA, 491 bp, Glycine max
  unsure (1)..(491): unsure at all n locations
aagcttaagaaccatcctcgatacatattggtgaatcttataagggtacaactagacattctcttaaagacttatgcaataatatggattttgtatctatgattgaacctaataatataaaagaagccataatagatgataactggatcattgccatgcaagaagaattgaaccaatttgaaagaaacaatgtgtggaaattagtagaaaaacctgaaaattatcctgtcatatgaacaaaatgggtttttagaaataaattagatgaacatggtataattattagaaataaagccaggttagtagcaaaagggtataatcaagaagaacgtatagactatgaagaaacatatgctcctgttgcangattagaagccattagaatgctctcggcatatgcatccataatggattttaaactntatctaatggatgttaagagtgctcttctatatggagtaattcacgaagaggtatatgtcgaacaaccc

SEQ ID NO: 44958 - DNA, 325 bp, Glycine max
acaacatagaacacatatagttgattaattagagaaatatttttatatacatcagctgtgttgtttgaaagacccaacacttctacctactgctgtcaagtttacttacatgcattattacagattttagactagacttagtttaactctattccaaatcatcaattatcaatgtttctttcaacaatgccttatttcttaatataaccctgtctaagactagttccctgagttcgatactcggattcatccatagtaatattaaatacttgacgatctggcgcgctttccggtaaaccggattttccttgaacatatttgtata

SEQ ID NO: 44959 - DNA, 420 bp, Glycine max
tgatgatgaatcaagttgattcaagaggtgttgatattgacaaagatgttgacaaaagacccacagagtgatttcaagattaaatcaagatcaaattcgagaatcacgagaagtttgatttcaagattctagagaagatgaattctagttccgagagaagaaatcaagaagacttcacaatgggaagtattgagaagattttttataaaacagacatagcacaattttgtttttcgaaagagttctcacaaaagttttctatgttaccagagtgtctactctctagtaatcgattaccagtttcctgtaatcgattactagtggcaaagtttgatttcaaaagcttttaactgaatttacaacgttgcaattgatttcaaaatggtgtgatcgattacaagatattggttatcaattact

SEQ ID NO: 44960 - DNA, 469 bp, Glycine max
  unsure (1)..(469): unsure at all n locations
tctccacagaggccattgcctccctcgcctagtattatgatcagccgatcaggtgctttatttttggggacttccagctatcacctatggtagaagaatttgaagagatcctaggatgccctctagggggaatgaaaccctacctcttctcatggttctatccttcattagctagaatttccaagatagtccaaatcttggcgcatgaattagaccacatgaagcaagtcgaatatggtgtggttggaatacctgaaaaatatatggaggcaaaagcaagaatcttggcaggtaaggcaagtgggccccgttcatagatatacttgcactgttgattttcggaggagtcctctttccgaatgtggatgggttggtggacctgcatcgagcgactcttttttgtctatcataacacacagaaagctcggtagtcgctatgctaccgacttattgacccttcatcaagatn

SEQ ID NO: 44961 - DNA, 308 bp, Glycine max
agtctcacgatcgtcacgtgtctctgctactattgttagccagggctatacgagacatcttgccaaaccaagtctggttagcgatgacttttctatgctcattcttccctgctatacgtatcagagacattgatcctatcctgtttgatgagctggaaaatgatgccgcgcttatactgcgccagctggatgaatatatactccatgatttctttgacttaatgattcacttgattgtgcatctggccagagaaatcaaatgttgtggtcctgtatatatattgtggatgtaccacgttgagctatac

SEQ ID NO: 44962 - DNA, 606 bp, Glycine max
  unsure (1)..(606): unsure at all n locations
tctgcactgccctcgtagtctggcgactgtacttgagacttgganttctatctcgntataanaaagtaataagcgacgaatagcgccttgagtccatcgcgacacgaganctctaagncgatctgcagcgtgcaactnaggaatgatgaggcacccgtctatgtgttactctgtgacgaccgggcganagcgctcaataactctctcactttcacaaatcaaactgttattgtctagctctactcgatgtttaaacaatggctaatatgttgttacaacatatgcacttaaacaatgagagaaagctggaggtgctgcacataatgaccaactttatgacaaggaatcagattgtgctgcaccatgccaaggcaaaataaagtgtcaaaagaaaacttgatctgccagatccagatgtcggaactatgtccagcaatcctcccgaaagtaccgacacataattcgctatcttttaacaataatggctagtacaacatatctgcgattacttaggaatcatataagactatatggcgattacaacctgatattcttccggatatacaataaatanactaacgtcttctgacttctttccttagtccc

SEQ ID NO: 44963 - DNA, 258 bp, Glycine max
  unsure (1)..(258): unsure at all n locations
tttgacactatagaaactgagcattatcacatgtactctatctaggcctgctttatgatacaataatttttacgatgtgttatgtgagtaatgactgttgtggagcatatccccnatgttgatcatgagtgaaccttagactcctgtttgagattcaatacagagattcttgtggatagtgagcattaatcactgtgttgaagcttgaattgttgcgctggacagtttatggagactcattattttatgagaaattca

SEQ ID NO: 44964 - DNA, 238 bp, Glycine max
gcggaaagctgaagatactgaaagaaatatgaatcagacaaacaataaactttctgcttctacagcaaactttctcaaaccatcttctgcctccaatcctgcacaatataagcatggccaaggggatcttagattgtttagtgcatctattgtttctttctttattagaaatattttggatcatatctcgtttctttgaagtcaaattggaagtatacttagcaaaactctattctat

SEQ ID NO: 44965 - DNA, 466 bp, Glycine max
  unsure (1)..(466): unsure at all n locations
ggccgcccagctcgcncaggcgagcaaagttgtttcctccataagcaacaaccttctggaggaatctgctggggcccaagtgggcctggttgctatttacacccccctttttactaaatgcacccccttttctattttttttttgtaattctttttccgtaacgtttcgaaactttacgaatttcgtaacgatacttattttccttctgctaggttacgaatccttacggattatgtatttactcttttttggctttcaaagaagttacggaaactcacggattgcgcaaaaacacctcttttcgatttccaccacattacggaatttcaaggattacgcaagcctagcttcttttggatatctgagacgtctcgggacttcatatattgcatgtcatcacgtaataatccccggacaaaattatggtatgacagttgccccttttacttacctctcatcggagat

SEQ ID NO: 44966 - DNA, 467 bp, Glycine max
  unsure (1)..(467): unsure at all n locations
tgtcatggcttggttaggntcaaggataanagggatgccccacattatttccatgacacatatgcataaatgatgatttggataatttatgcagaactggtcatgcatgcacctatgcgaacgctcaagtgtcaaatttttatggtcatgtgatgctagggctcaggattcatttcctctattgtatgcaacccaatgtttccaaaatatgttcttttatccatttgtgcattcatccaagtccatttcgggcgtacgggaaaatttcacagcattcacccttcaggtgtacacacattttatttttccanatactagctatgatcagcgaattttctttaacgaaagttggaagtcttctttttcacaacatgttggtcttcagcagacaacgtattttatgtatcttccacttttcgtctttatttataagcaaatacttatctgctggattattctttcttttn

SEQ ID NO: 44967 - DNA, 393 bp, Glycine max
tggtgtttgggcattgggtgtgtggtaagcacgaaggccttgtggctgatttggggatggcctttgtggatgattgggtgagagggactgttattagctgagtaatgacattgttgggctgatgggaaatttggccatgtaagaatggcagtcacggcaagggtttctccctcattctcatccttttcatttgccccaatttttgcattcatcaaagcaggatgataaaatttgcctcttttcagacccacttcgatcctttcgccagcgaagaccaaattcgcaaagcatgaatgtgcgtaccccaccatatttttcatagtaaaacactactaatgtgtctactattattgtgatcatctccttctccgtcattggaggtgcacttgagct

SEQ ID NO: 44968 - DNA, 432 bp, Glycine max
  unsure (1)..(432): unsure at all n locations
agcttctcaagaaagcttccatgaagtggtatcatatgacaagagtttcaagtaggtgctccttaaacctccattaattttcaactttaccttctcctacattgttgtttcttcattnttctccatgtatctcctcacatgtcttgtgttgaatgttgctagcatgattttttagaatttccactgattaagattgctacaaaagctagatttgatttttatggttcaaatttcttattcttgttcttgaaccatgaattgtgttaagtttaagttcctttgagttntgtattgctattntttgtggctgaaacctanaccataaaattcttacaaataaattaaagtagaagaaaacccttaaaatcangagtaacatgttcacctatttgtattttgtcataaaagtcatgtctagtcgtgaaacttatc

SEQ ID NO: 44969 - DNA, 532 bp, Glycine max
  unsure (1)..(532): unsure at all n locations
tggctatgtnnnnnntttgaacccttgnanaccccgcatgngaccctctaagcacgccaacgccnaaactgatcattaagataggagatctatcattgtcctctgcacaggatcttctaacatgtggaacgcggcttttaaagactaaaactggtaatgcttggttctatgccaactcctccacaaactatagatggttagggaacacccacgctgacagaaacgaagatgtatatacatcgatgccttattgataagacaacttcatataaatactttcttacccacttactgaataactcttcttatgctcaaggaatattctccacatcaccgccttattatattgcgatcattctgtgacaatgctgtcctgtcaaccgatctttataaatttgagcgttcttctctgtgcaacctctatagcttacctcatacccctctctatatgttacatatatgtagaatgtcttttatgacactctgggcttgctaggactgcacctgtgtctgtactgccattgccaagtcn

SEQ ID NO: 44970 - DNA, 474 bp, Glycine max
  unsure (1)..(474): unsure at all n locations
agctttgngatgtanaagccttccatgccattttacaccaccaatactttctcgggtatcatagattnttggctattctctattaatctgtttcaaaaaatatcacataataagacttggaataaaattaaattctgtaaaatagaagaaaaaggaagcaacaaactaatactacatactcgatatttgacttgtatgtttgtgatgctggtaatttacaattgaattntcccttgcaatctggacaatagtaatctgtattttccagatcctgtaaccacgagtctgacctttatcataatccacttcatgaaagagagaaatctaaaaataaataaataaatagtgtcatcatgtntaagcatgatacagcaccttgaaaactttgctggatattntatcgcactcagcatgcacccacacattacaaccatcacaacacacctgatacaaagagttcattaccacaatatg

SEQ ID NO: 44971 - DNA, 474 bp, Glycine max
  unsure (1)..(474): unsure at all n locations
gtattcaaattggctnttggaagtgccttggtcagaatgtcagcactttgatgctctgttntgtagtacagtaacttcacttctccttccctttgaacttctcttagaagaaaaatctttatcttgaaatgcttagttttgccgtgaaacactagatcattagcaattgatattgcagcctggttgtccacaaaaatctgtgtgctttcttcttgtttcatatgcaaatctgtcataattttcctgatccaaagagcttgattcactacaacaacagcagctacatactctgcttctgcagttgattgagctacaacttcttgctttttagaacaccaagaaaagactccagaaccaaatgataaacaataaccagaggtgcttctcatgtcatcaatacaacctgcccagtcactatcataatatccatggagcttannaatatgagaatgagagtacattataccatagtct

SEQ ID NO: 44972 - DNA, 410 bp, Glycine max
  unsure (1)..(410): unsure at all n locations
cgacaataactntatactcggttgtcttactgagtcgcgtaatatattgagacactcaaaattgattatcgaagctctgagcaaattcaaacgacagtaactttttactcggatgtctgattgactcccgtaatatatagagacgctcgaaatggaataccgaagctctgagataattcaaacgacatatactttttactctgatgtctgattcagtcccgtaatatatcgaaacgctcgatattgaatgttgatgctctgagaaacttcaaactacagtaactttntactcggatgtctgattcaggcccgtaatatatcgaaacgctcgatattgaatgttgaagctttgagtaccttcaaacaataataactttttactcggatgtctgattgacacctgtaatata

SEQ ID NO: 44973 - DNA, 332 bp, Glycine max
taccttcaattttaacttatgtgcttatatgataagtccaaaccagttctgaagaagctattctaaatggccccaaattgtattcttgtgtctttaatgctcgtgctgtccaagcttctgttcctggcctgtttattttcttcactgaaataatttgtgttctgtgctgacgagtgtgctgtaagaaactgactttggcgatcttaacctacctaataatctattttgaaaacaggaaaaaccgagtccatggatccaaattcaagaattatggttcctgaagataggcatggactccatgcaatttgatatttggaccctgacttggtatg

SEQ ID NO: 44974 - DNA, 394 bp, Glycine max
  unsure (1)..(394): unsure at all n locations
agcttccttntagtgcgtcacatttaanacctagctcgatggtggtgcgagcctttgatggtaatggatataaatcccgcctatagctgcctcttgggaagaccgtggattcatgccctgngagtggtcccttcaacgcttcaccagaaattgaagttcgcagtgggtggacttttagtgatagtgtcggtgaagaggacatgttagtgagctgcccctcctccgcaccatacgtagaagcggtggaagaatcattggaaacggctttccaatcctttgaggtggtgagctgcgcctctgtggaaccaagtccgtcgctaccttctctctccaaagcggccataatggtggcgcgtgttatgctcacgaacggatttgagcccggaatgggtct

SEQ ID NO: 44975 - DNA, 481 bp, Glycine max
  unsure (1)..(481): unsure at all n locations
tcccttctccttctctctaacgttagggaaccctatttattatgattaactcgaggaatctcaagaaaccgctagagatgccactattgctgtcacaatacacatgtgagccctttagaggtaagggatgattttattgcaattggggttagaatgaacatgtgtagggaaccttagaggattaaattgaagtttatcttgggatgtttattgaattataatttttcctttacaattataaatacaatattgttgtgttttacgtaccaattgatgttctgatgagatgagaattgattgataaacttgagtgcttttcatgtttntgtgttttgacccatgattttgattaattgatcttgatataattgtgtaaaattatttgatgggttttactccccatgttgtgataaacctcttatataaattgttatgttgagaatatgaaatggtgattcatattgtgagtatgtgatatatt

SEQ ID NO: 44976 - DNA, 271 bp, Glycine max
  unsure (1)..(271): unsure at all n locations
aaccttctggtggggtcttatagatgtcttcctctaaattcccatgcaagaatgcagatttaacatctagctgctccaagtaaagattctctgcagcaacaatactcagaataactctgatggtagttatctttacaactggaaaggagtctctgagatatcaattcccctgttctactgaaaccctttcaccacaagactcgccttgtatcttcttctaccgtcagattcttcctttagcctacagacccacctatnttgtgacgctttc

SEQ ID NO: 44977 - DNA, 394 bp, Glycine max
gatgatcacaaagatgatgacaaaaagcccaagagaatgagttcaagattgaatcaagaacacttcaagaatcaagaggaaattcgatttcaagattcaagaatcaagtttcaagatttaagtttcaagaatcaagaatcaagaatcaagaataatcaagttgaagattcaagaatcaagtaaagactcaatcaagataagtacaaaaacgtttttcaaaacattgagtagcacatgaatttttcacaaaaccttttgccaaagagtttttactctctggtaattgattaccagtttattgtaatcgattaccagtagcaaagattgttttcaaaaagctttcaactgaatttacaacgttccaattgatttcaaaatggtgtaaccgattaag

SEQ ID NO: 44978 - DNA, 322 bp, Glycine max
  unsure (1)..(322): unsure at all n locations
agcttgtcgcaattgccatgtctgggtgagttatacatacccattctgttttagggntcttgtgatgatgtttatgatgtttatatgctgaaatcgctgatggaaatcttgtagagatgaagggtagaactaacccacggtttgaaagtgagaatgtgatgttatgagtggaaaaagagtgagactttgagagttggaacgctaagtctgaattctgtggtaaatggaggttagagtgagttaatactagcttgaaatgtcatttataacatgtgggaaagggtatgctgagctagagagaaaaacaaatgaccaaagtgaa

SEQ ID NO: 44979 - DNA, 529 bp, Glycine max
  unsure (1)..(529): unsure at all n locations
ggcngtttgatcccttgaacccatgatgaccgactcatnaccactaaccatggaaggaaccgcagcgattatgctaatttgtaaaatatatgtatcatattaaatgcacctcttgacatcaatgcacactgctatggggggctcatcatctcaagtggcaatcttcctaaaatgtttaaatcgatggtcatgtctattgttcacttctaccagcaatatgctattgatgacacatatgagagtttgctgattcaaggactgtatctcgatatctaaagatgcgtcatgggcaatcaatttccatagctgctgttgtgagacccacatatgacatgcctatcgatacccctatcacatgtcatgtctgcgaattatactcattgttgtgccagacattatcattaatgggagatagtctagcctatcgatatttatgtctctcatacaaatggcgactcccattaatcttatcatatgcctatagagcacctaataaagctgggaacacctctagtaaaataatccgacn

SEQ ID NO: 44980 - DNA, 323 bp, Glycine max
  unsure (1)..(323): unsure at all n locations
tctatccttcctaagatggagccaaacctagtcaccgtcattaagaactagctcttttcttcctctattgcctttagctgaatacacttttgtttggttctctatttggttcttaaccttctcatgcaacttctttgcaaactctgacctagattccccttctttatgtataaaagaagtgtccagtgggaggggaatgaggtctaacggtgttatgggatngataacccatagacaacctcaataggggatggcttggtggttctatgaacccctattgtaggcaaattctacatgaggaaggtactcatnccanaacttat

SEQ ID NO: 44981 - DNA, 334 bp, Glycine max
  unsure (1)..(334): unsure at all n locations
cactgaagaggaagacaaaattatctgcactctatatgacaccatcggaagcaggcaagtccattattnttttttttttatatatatgaacgtattgaatatgtgaatatgcattgcttttgcattattattgctatatatctgagtaatgtgatggttttgcctctaggaggtgctttatatcatgtaaactttccgggagaacatacaatgatgtgaagaatcactggaacacccagctaaagagaaagctcttggcaagaaacacatgtagtactggtgccacgacaagcaacaacaatgtcactttgagcaatactaaatattgtgatca

SEQ ID NO: 44982 - DNA, 213 bp, Glycine max
gcttgttgcacatcgttcgcgtgtatgatatccactcgacaagggttgaagtagaagagaccttctatcctataacgcaacgtgacggacaaaagtgggtagttaacttgaatggccattattattaatgcggaaggtattctgcacttcactatccatgttcacacattattgcagcttgtggttacgtgagcatgaactactaccaatata

SEQ ID NO: 44983 - DNA, 459 bp, Glycine max
  unsure (1)..(459): unsure at all n locations
tttgtttcgttattttgcattcctttcatctcacacaagtaagtgacatctccatccaattntaccttttccttgtggtattttggtgctttatttgttattttctttgcaatgtttgtgagataaattgtttgtgaatccaagactggaatgctttggttgggggctgtaatggatggccctangcctatcgttgatcctattgcagatttgcatgtcatgttgttctccatgactcatatttacatgcttaaacatgcgcccaccaaccgtttgataaaatgtcgtaatcaccatttcatgtgttgttttgngaattgaatgtgaaatgagctntatgcatgtccagccatcatttagaacgtatgagcaacttacattgatagattaaaatgccaagagtatgagataggattagaaatctagatcttgtcttatatgtganatacatgaattaca

SEQ ID NO: 44984 - DNA, 502 bp, Glycine max
  unsure (1)..(502): unsure at all n locations
gggatggcctgacctgtgaacctgaaacccccctgaaaaactnacaataagttttttttaattgttangtttaaatccgtcagaggacgtgtaggaatctttattaatttgttatttcggtggtggataccttccttggtatgaagtgtccagcagaaatgatggggtcatatgatgaagcaccattgttgagtttcgcatttcctatgtctgatatttaggatgatacaatcaatattactcaattaacttcttgacttaacgatttcgctgtcaattaaacacagacaacacagaaccaattatgaacgccaaagctaaattaaacgtaattcaatcatcttgtgtgtggagataaatcttatggatatgaaatggtactacctgcactaattatgtgcttttaacatgaatatagcactctggattatgtagaattgggtgaattcatacccaagcctgagtatcatcatttcttctctcaaagtatgatttaccaccg

SEQ ID NO: 44985 - DNA, 385 bp, Glycine max
  unsure (1)..(385): unsure at all n locations
taccgcgctggctccggcaatgccgcagcagataccctttctcgcgtggttcccgccggccaatgtttgattctatccattcctcttttggattgtatcgccgatatccaccactcagtgcaacaatccccagcttaccatgaattacttgccaagctccaacaacaacccgagacccatcctgactactcaatcatctccggcaaaatccactttcgcggcaagctatggttgccttccaacaaccccttcattcccatgctcctagaggaattccactccacgcccctgngtggtcacatgggtgaaacgaanactcttcgctgcctccgcgattccttctattgngatcacatgcaccgtgatgtccaccgcatnggttctc

SEQ ID NO: 44986 - DNA, 441 bp, Glycine max
  unsure (1)..(441): unsure at all n locations
cttgagcttcaatgaggtccttcaatggtgattttccaccatgctgcggctgccattcttacatgngccaaatttgaagtcatgttttgcacactcgattaaaggctgccgtcacttgtgacgggcgcgtggggtgctaataccttccctatgtgtaaaaaaatcccgaaccctcattttcaaaatccgcagaccttcatatttttggtttttttagcatttttctcaaataaatgttggtggcaactccgctcgttttctccctcgaagacaaatgctttggcctatctgttttggcctttcgcactcccgccgaagggtaggttgtgacacaaggaaataataatttccaccanaactcatggttctagaaagaccaaagagatccatgtgcaaaagttgtaagagttgagtggtagaaacaatatttntngatttgaa

SEQ ID NO: 44987 - DNA, 398 bp, Glycine max
gcttcatgagagagtcaaagatcaaattgatatgaaaaataaaagttatgctaaacaagccaacaaagggagaaagaaggttgtcttcaaacccggagattgggtttgggtgcacatgagaaaagaaaggtttccggaacaaaggaaaacaaagcttcaaccaaggggagatggaccatttcaagtgcttgaaagaatcaatgacaacgcttacaaagttgagctgcccggtgagtataatgttagttccaccttcaatgtctctgatttatctctttttgatgcagatggagaatccgatttgaggacaaatccttctcaagagggagagaatgatgaggacatgaccaagagcaagggcaaggatccacttgaaggacttggaggacctatgacaa

SEQ ID NO: 44988 - DNA, 426 bp, Glycine max
  unsure (1)..(426): unsure at all n locations
tcaaactcagcttttatccaggcactctcttggtggtgaaactccttcttccatgacttattccccagnggatggcgcctcctctgacctcttcttctttatcttctgctgcatctccatattggaaaatcatcatcgaaggaactcattgaagctcaaagatctaacctccatagaagcttcacaagaaagcttccatcacaatatttattttgactttgaattcctataaagtcaattctacttaaaaataatttttacatatacatattaaaattaattagttaaatatattttattacaaaataattgtaaattatttacttaatataaaaataaattaaattagttttatatttcatgatagagaccacaacactacttgcaaaacgacattcctcgacgtttataatgtacattcaaaga

SEQ ID NO: 44989 - DNA, 414 bp, Glycine max
  unsure (1)..(414): unsure at all n locations
agctggcttccacaagaatggctctagagtgtagtaaaaaaaatttaaaaagacttaagaaacctctagttntggcacttgttttcacactaattttcaattgaaatttcagaactaagaatggtataaaataggcaccaattattagaacaaatttgagccaaaacaacaagcacacttctctttcactttttttcctggacactgatntttctgccaacttgtgtgatttttcttattttttccttttatccaaatcgcctggttctttntttattaattttttccatatgtctagaaaatntagtaaaaatntcagctcanaaaacgtagtgaccaattttcagtaatatataanagttcatatgttcaagctgtcagcaccagcgatntcaacctagaaatcaagagtag

SEQ ID NO: 44990 - DNA, 468 bp, Glycine max
  unsure (1)..(468): unsure at all n locations
tcggtacaacaatatcaatgtacctttctcgggcctcatgagaagtgaacttggatcggtcatatcggacctgtgaaggtgtggcaggtgcctttctcttctttgattccatctaaaagaataaaatcaaaccacagggttaaacaagattatttccatcaaaaacagaaaattaaaactgaaaactgaacttggcacttagcgcagcatgctatgcctagcgcgccttatgtaaatttactcatgggctaagcgcgacagacgggcgcttagcctgaagacacaaaatatgtntttctacagattaagcttagcgtagcatgctgggcttagcctatcctcagcagaatgacccttatgcttagcacacagggcgcacttagcctacccataaaaactcaaaaacaatgagagagttgagcttagcgcagcatgtcgtgcttagctcaacctccttgacacataaca

SEQ ID NO: 44991 - DNA, 392 bp, Glycine max
  unsure (1)..(392): unsure at all n locations
ttatatgcacatgtatgttttcacttctcatcactctagtttttcctgttagattattgagatcaaccttagaagctggaatttcaagattagtttactttcaaaagagtaccagcatacctgcaagtcaacaggtttgatgctgtgggaatcagctcggttgatggcttctgtccttgcagaaaatcccaacattgttgctggaaaaagggtcttggagttggggtgcggcagtgggggaatctgctccatgattgctgttagagatgctgatctagtagttgcaactgatggagatggctntgcactngatctcctgaccaaaaatgttgcatccaacattgagccatcattactgactaaactcaccacaaaaaaactggagtggggaa

SEQ ID NO: 44992 - DNA, 436 bp, Glycine max
ctcagcttcacattcaatttcgagcgtctcgatgtatcacgggactctatcagacatccgagtaaaaagttatcgtcgtatgaatttgctcagagcttcagaattcaatttcgatcgtctcgatatattacgggactcaatcagacatctgagtaaaaaagttattgtcgtttgaatttgctgagagcttcaacattcaatttcgagcgtctcgatgtatcacgggactcaatcagacatccgagtaaaaagttattgtcgttcgaattagctctgagcttcagaattcaatttcgagcgtctcaatagattacgggactcaatcagacatccgagcaaaaagttattgtcgtttgaattagctcagagcttcagaattcaatttcgatcgtctcgttatattacgggactcaatcagacatctgagtaaagaagt

SEQ ID NO: 44993 - DNA, 570 bp, Glycine max
  unsure (1)..(570): unsure at all n locations
cgagggaccattgaatcttgacgacatcgcgatctcctagagtcacctgctagcatgcaagctngttccgaataacacatntggcttgtgaggtgcaagtataaggactaaatcccacaccttgttccatttgaatagattcaattcatcatgcaaaactaacaaccaatgttcatcatgcaatgcttcatctatgtttctaggttcaatttgagaaacaaaagccatgttattgcataaatttctaagtctagagcgagtggatactcccttagatatttcacctatgatattgtccaacgatatatctctttgtgaggtgtggcagtgatttacttgctttgctcaagatccttaaccttggatcatcttcaagtgctgtgtacttaatttgaaaacctacatcctcatcttacaatgcattttcttgaatgagagttaatattatcacaaaccacatgtacaaaatctttcacacaccatgtttactactaaacactctatatgccttgctatgaataacaagaaatgttgctcatcatctattgcatcatattgcgagagattctn

SEQ ID NO: 44994 - DNA, 489 bp, Glycine max
  unsure (1)..(489): unsure at all n locations
ctcagcttgaagcaacgttgttgaatttaagttgcttgagagtggatgcttacattccattccattcgagttgcacctataactaatatntttgtttgaatttacagattctatttcgattttaacatgacttatgtgggagcagggatgatttgcccccacctagtgaatntgtctttgctccttggagctgttctatcttttggagtggtatggccgctcattgatcttcgtaagggagattggttcccgaccaatttagatgagagcagcatgaaagccttgtatggctacaaggtcttcctgacagttgctctcatcctcggtgatggcttatacaactttgtcaagattctagtttcctcaatccttagcgtacatgananaattaagaaccgtaaaaatggtaagaaaaggattcagaacttgccattctcgaggtcatatnntggtatgaaatattacattcaattcacatataatttggct

SEQ ID NO: 44995 - DNA, 337 bp, Glycine max
atgcaactatatctgaaactaaatataaccataattataaatgtataaaagcggtaatgataaaaaagtgtgcaaagacgggaaaatggaatataaatcatgtcataggtcctgtggtgcagaaggggcataatccatagctgttgcatcgtcctcctcctcagaaagctccagctctagtgtcatcactggggatgcctgcggagtagagaactccagcacaggtgtggtcattggtgatgcttgtggagtcatctttggagtggcctccgcagtgtcctcctgagtagttgggtcagtctctaagttaacctctggcatgtctggctctggaata

SEQ ID NO: 44996 - DNA, 86 bp, Glycine max
ttaaaaatcagatacgcaatacccttaagctaaccgacaagcaatttttggatgatatttactaccgacagcctttcacatatgca

SEQ ID NO: 44997 - DNA, 550 bp, Glycine max
  unsure (1)..(550): unsure at all n locations
agaggcnnctttggggcccatgataccctatgatgtacgcgactacataaaccactcagctntacctttntccttccccagtcctacacaaatatcatcttatatttntaccacatggtatggtttgaaagatgtgttttgctaccaagtaccaatacctttattttcttcatgcctccatatctggatcccatatattgatatatttcactggtgcctacaagttaagagaacaaatcttttaaaaaattattaaaatcaaatttagtgacctgttacctagaaataagtgtgatatataaatataaaaaggattatttcttgatgaaccaaatatgaaaaatggtttggttatagatcatttccagaaagaaatgagaatgatctacaatttttttattttggttttaataatgtctaagaaatatgtatgttcttcaattcaaccaattgcaaatggataattaataagcctgtatcaaatcttacatatgcacatatcttacatattttcacaatgaacataccgctcttaaattatacgaccagg

SEQ ID NO: 44998 - DNA, 389 bp, Glycine max
  unsure (1)..(389): unsure at all n locations
agctntaggtcttanaatgtcagtcatgtcaattatgaaagcatgttaggtcctcttttccaaagagaactgaaatangatgtaaatctactttttccactattcactctgatatttggggtccaagctgtgtcacatcttttggtttcagatattttgttacctttattgatgaatactctagatgtacttggctntatttaatgaaagatcgatatgaactttaacctatattcatgtctttcattaatgaaatcaagacccagtttttaaaagtaattaagattctcaggagtgataatgctaaagaatatttctcctttaatctcttttcgttttaaccacacaaggcattttacattagtccacatgtcctcacataccacaac

SEQ ID NO: 44999 - DNA, 437 bp, Glycine max
tctcatagctgcattgtgaatagttattccgcaagtggtcttccttttatgcattactagaccagtttcaccctttgctgcacttgcatgttctcaactatgtagtctatcttaatgataacgatataagcaggatttcatatgaaatttatctatgttttatttagccatcatggcgagtatttgagtatgatgtattccttaaaccatagtatttgggaaaagttacaatgagattgaaagttctattctttatcacctatattgtaattgcagacagcttgtattttattctaaaaaggagagttcttaaatctatcacaattttacttgagattctgaagattgataacatgggatatcgtgtcatcttgaactaatttagatttgcacatacatgtgttcatgttgcgtcatgaacgattgcagtctttact

SEQ ID NO: 45000 - DNA, 350 bp, Glycine max
  unsure (1)..(350): unsure at all n locations
gcctctactccagttcccattcgagtaccttattgtgtgattttcaaaatttaaaaatcagaatacacaatacccttaagctaaccgacaagcaatttttggatgaaatttactaccgacagcctttcacatatgcaggtaatcaattttggtttcaatgtatgcaactgaaagatgatgctgatattaacacaatgttaatgtgtaatcatgaatcttcgtttgttggtccgattgagttattatgtagcattgctagaaccccagatgatattntaaacttacttcaagctactatgacccctactcatgatgccctgctatattacaatgggaggtgaaacatgtca

SEQ ID NO: 45001 - DNA, 406 bp, Glycine max
  unsure (1)..(406): unsure at all n locations
tgaatgttgagcaactctntgcttgccatcatacaagtgaggaaaggaaggttcctttagctacccatagcttccaagggtatgcactctattggtggacttcccttgttagggaaagaaggattcatggggatcctccagtagtgtattggaatgacttgaaaagtgcccttatgaagaggcacatcccctcctactatgaaatgaagcttatggacaagctccaaaggcttagacaaaggagtatgattgttgaagagtataggcaacaaatggaactactccttttgagagctatgcttanggaggaggaaagaacaagtattgctaggttccttagtgggcttaanatggaagtgagggacaaggttgagctccttccaccatatatggacctagatgacct

SEQ ID NO: 45002 - DNA, 639 bp, Glycine max
  unsure (1)..(639): unsure at all n locations
cgactcgttttctaactctttactacttactctcactttantagtgntgtactgtntnatnatctatgnnntatagganaanattaacacttgaattgaattcatctnctacaccgtgatcctctaaagtcgacctgtcagcatgccagcttacactttctactgtatataangaagatttctttagtcagattctacatatgatggtagcggactatgattttgctgtacatactaagagaggcattattggacacaattccttattgattctctcaaaaggctagcatgttgaccttattcacgtcacatatcaacgttgacaaatatcataaagaactcaaatttgcattaaaatacaaaatatccaacactcgggatacacatgcaccttcccaattgtaaagactccatatcaatacaacacaaatatcatatatcaacaantgtgttcccatatgagttccaataatatctctcctcttataatttcttaactattgccctaggcaatggaacatgagccgccattaaaataacaagatattatcaagtttctccaacatgtcatcatatgagtttcttctccagagaccatcgcaactgttcatgtcataatcgactcctcatatatacctn

SEQ ID NO: 45003 - DNA, 466 bp, Glycine max
  unsure (1)..(466): unsure at all n locations
acccttgaaccaactctttcatataatcagctaaaagatataacataaaacattaaacaaaatatattttctgagtattcttatgatcattaaaaattatcaattaaattgttctgtttactgtatatatgtatgcggtgttattcattcgatattctggacattaatcacgttgaagcgtctctgtctatgtgaatccatggccatagattacaagaaacacgacatatgtgggtatatggatagaagcttgttacaacagaaatgttagtgatgatgtcatggatggatgcatctttaaaaactgtccaaaaatttgattaattgtggaccatgccactgagcaattnttcgtatcatctatggcatattgctaaataaagctttgattgtgaatgagttgttcacaatgctagcttctttcttttgtacatcctaataatgaatcaacaataaatggttgctg

SEQ ID NO: 45004 - DNA, 280 bp, Glycine max
tcatcaagctgtgcttcaatccagtccattaggtattctacatatgttggagcagaaacctcaataggtgtcttaatatgtacaccatctgcccatctatattcatacctaaagttgtcgtgcaaaaagacaagaccacataagagctacgaatgtataaatatttagcacagatggatctagaattctcattggcattaaaggaatgattatataacacacacatgccagatggatccagaaagggagtgcaaaagtaactcgttactaaatattgtct

SEQ ID NO: 45005 - DNA, 400 bp, Glycine max
  unsure (1)..(400): unsure at all n locations
ctcttctccataganatcctattgaagagnaaatgagattaatgaatggaaggaagtgagaattgcgagaaagagtacctttggaatagtagttcattgaaatgattagtaggtatcatttgccacctttggaaagacctgcaaaatttgcgaggttgcttgcacaacaaacaatgatcgttccgacgcatataccaaatgcaaattgaacacattgtgtcaaacttgaggtgcaaaacaacatgtttttaacaaatatttattgttattgacacataaaagtcattacatcaggtaaattgtttctaacacttaatcaaatacatgacanacaccaaagcggttgttcgcatgttaactacagctttgtacattggatgcttctaagtttacaaaatat

SEQ ID NO: 45006 - DNA, 438 bp, Glycine max
  unsure (1)..(438): unsure at all n locations
gcttatgcgcatatntccttacgaacgttctcttgcacaagacattctattaactaagaaaaatgcacccatatacaatcaaggcaccttcgttacctagattatttatatgtacttccaaggtgtatttgctacctacatcacatgcacttccttggctaaatttacatacatgcatactcaaagcatttggggtaccaaaaattgcacatgtggacattccggtatttctaatatttatgcatatacaaacttcatgatgaatcttgactatctacacaataaggtgctacatttcatgctcttttcaagtttttgctacctacagccgcatgcaaattcaagtatattttcttttgctgactaaaattgtattcaaaataaaaggtatatatntttttgtaatgtattttctttacataacatgtaatatgtata

SEQ ID NO: 45007 - DNA, 464 bp, Glycine max
  unsure (1)..(464): unsure at all n locations
cactctctcggtggtgaagctccttcttccatggcttattccctagtagatggtgcctcctctcacctcttctcttttatcttccgctgcatctccatggtggaaaatcaccattgaaggacctcattgaagttcacaatccagcctccatagaagcttcacaagcaagcttacatcaagatgaatgtgcaccaaacaacanaagggacccctaagggtacatagatcacatccaatcctcaaaaataaaaactaaccgacggtcgcacgaagaacgccgaacaagaaaaaaaaaaaaggaatgatcgcggtagcgattcaatagcgcttcggcctcgtttcctcttctttctctcttctctcaattcctaacactttgccccctttttcccaaggaaaagacccttttgccccttttttttggtatttttgcattcttgatcaaaacactgaatgatccttta

SEQ ID NO: 45008 - DNA, 454 bp, Glycine max
  unsure (1)..(454): unsure at all n locations
accccttgttcattactaaacaagctgataatttaatcacaatcacaagcaagatgctctaacatgtagaagaaaacaaattcaaatgaaatgcaataaaaagtagagaagggaaagaaaggctaggctgcctcccagtaagcgctcttttaacgtcattagcttgacgcctcttcctgttatccaagatcaaacaaggttcctacttcaagcaccttcttctcaggtctcctttcctccatcccatgcacttttagacagacattttggctaggtggatctttgtcctcatggaacaaatcaaagctgatcttctgatcttctatgcccatttgcagcattttctttcccatgtctacgacgcagctcgcagtagacatgaatcggcatccaagaatgagaggaatgtcaacatcctcttccatatntatgacaancaaaatagctggaaata

SEQ ID NO: 45009 - DNA, 464 bp, Glycine max
  unsure (1)..(464): unsure at all n locations
gctataaatgagttatattgtatctatccattcttcatnttgatagagcacgtttaacaaagtttcttcactaaaacacgaaataaaattttaataaaaattagtgcccaatttaaaggttttatattaggttaaaatagtaaaacggctatcattcccagtctccatttacattatggttgatagaagaatgctagaagcctagaagtctccgttgtaaaatagaaagcttatcattcccagtctccagttcctgtcactctatactaccaagcgtagcatgcactattaggtttggacgtagaaaagaatccttcaagttcagttttaacttttaagaacgccattagagttagatgtaagtaatttcatcgagaccaanacggtgcaacatgcatatgcaaagccattatcagcaccctctcaattcgacgatgaatgcacagcccatttcaatcacctac

SEQ ID NO: 45010 - DNA, 401 bp, Glycine max
  unsure (1)..(401): unsure at all n locations
ctatctattattagtatttataaagtagaaacctttatatattaataaagaaaatcacatatgttaataattaaaaagaaataatatatttaaagtaaaaaataaaatttaaaacttattntaagtatcgattatcgttgaaccagctaagagagagaanatgataaaaagtgtgcatacaacggtgtgttggctcataccctcattctactttttcagatacattctcttcttaattcaaaactagttgttactttactaatttactaattaacttgagcgtcgcacagtttttgcaaatagctaccatctctctcccttcaatctcgacaaagcgatgacactattaactctccatccaattcaaacatcagtcagtggcacacttgtagtatataaat

SEQ ID NO: 45011 - DNA, 481 bp, Glycine max
  unsure (1)..(481): unsure at all n locations
tgaaaatcattttaaaattaataatatttataaccattgattataattaaaattatattatcattttcacgttcattctcaaattgattgtttcatttttttatataaactgtaccttaaagggttgtaaatatccacccaatttttttttagtgtgctttctatcttctttttcttcttttcattgttataatatgatttctttcattcttttatttttatttttatgtatgaaaaagtatacttgaatgtgttattgatcatcaaaattgacaatttgactcttttagatcggtaaggtataaggtggatctatattcataattgataaaaaaataatatatttaaatttttatttttagtgttatttatatttatatttttattttaggtttaactatctctttgaatgatttttatgagaatgaataaacatttgaatcaacatgatgtttntattataaaattcttatataaatca

SEQ ID NO: 45012 - DNA, 409 bp, Glycine max
  unsure (1)..(409): unsure at all n locations
atgacanatcattcttttcagcctggatccttganaaagctggctcgtgatgaagtcgcagagaaacagatattgcagaaagttaaagctagtatgacaacagaagatctagcagagttggcccgtgctactcatgagcttcggcttaagcaggagactcctgacccacctgaagctttgaaaactgttcctagcctttctctacaagatattcctaaagaacctattcgtgttcccactgaggttatcactacttcccctcgagtgaggtagacctgtntgtcttatgatctgtagaaattcacaagggattactngctaaatgtaggttggggatatcaatggagtaaaagttttgcagcatgatctcttcaccaatgatgtccttacactgaaatagtatcaacat

SEQ ID NO: 45013 - DNA, 502 bp, Glycine max
  unsure (1)..(502): unsure at all n locations
actcagctagtgaaatttcttctttgttcctgtaacaaactaagtccaccttatgctttaagttgagctttcgaatagcagcccacttcaccccctacccaagcctctgcagttatatgaaagaattatcattaatacctttatcatctcccttctctgcttccatgtctaccaaacatcccataagctgctgaaaatcccccccacaggtcaaccccatttgatttagaagctcacattgtctctcgataatttcttctttttctttcactgataaagcagaatttgtgtctgtcaataactcctgttgggcttttttctttntgcaccactttcatctggaatagacctgcagaccattggatatcaactgttgttgcgggtgggggctattgtgttcctttaattgggcctcaggggtgcaaggcccaaaaagggtgtgaggctgtaattctgaatactcataaggtggggtgtatggaccgttgtgatgataactact

SEQ ID NO: 45014 - DNA, 185 bp, Glycine max
  unsure (1)..(185): unsure at all n locations
agcttgcaaggtttctatactctaagcaagtttacactgagttcaggagcaccattgctatcaggattcatcatatagaaagcttccgagtctctggacccaacaattctctcaaacttggccctcatgtacatgatttcaccctctgaccctgcttcagctncactattattattggtattatt

SEQ ID NO: 45015 - DNA, 428 bp, Glycine max
  unsure (1)..(428): unsure at all n locations
tctataagtcagaggtngataatgttactgcacgaacctttgacaaaaagttggctaacatagcaccttgtggtgacaaggaggctgttgtcgaatcaagtgacaatgttatccactctgtcaaactccatcctacctatgggtttatatgggagagggaggaaattgatgctgttccctctgaagatggagtcattccaccaactgggtggaatatatatgaagattaatatgactgaggccactgcatgggccagaattacngcttatatggccgaaaatagactaaatacgacctttgaggctgaatctcaacaaaatatggcagttgaagccaagatcgaagaacatgataacaaagaaacataggatcgaagacttgattgtatntatgatgatgagccgctcgggtttgagaaaaatcccat

SEQ ID NO: 45016 - DNA, 410 bp, Glycine max
  unsure (1)..(410): unsure at all n locations
agatgtttcagcttatatgcttcanaactttaggtcatagccctaatttataggtcccgagactgtttgaagaggacggacaatccccttttgagattaaaaacagatatccactttattctgatgaaacagttggttcaaaagagaaatttgccaagtgtcaaggttcttgagcctgcaatggcacatgcccaagtttagacttggatgccatcttaattaatgtcacatattttgatcttcaacaaaaccatgtttctccatgccttacatagatgcttgcacctatactatgttgtacacaaagggagaanaagaaagactaaagcattagctacttacctttggttctttattataccaatgaaaacaacacttgggaaanagatctatatactcctaagaatcat

SEQ ID NO: 45017 - DNA, 484 bp, Glycine max
  unsure (1)..(484): unsure at all n locations
cgcttcgaagacatagacacgatctacaaagaaggatntaagttatcacctcttaaagaagatggcctaaatttcctccaaagagtcattcccaggttgatcaatgctgctaatgatagccaaaaccttttgcgctttgatacaccagagacagttaaaagtaagtacatttagatcctttgtttgggtaaacattttcggaaacacttacagaaaaaaataagaatttaaaatgaaaaatatttctttacaagttgaaataagtttattggtgagtttgtttaaattttttaaaaaataactttaaaataagcgttctttatataaacgcttatatatagaattcacttttttaaataaacaaaaaaaattatgttcttaaaaataattcaaataaacacacgtaaaaacataaagctacttattcttttaaaataaacatttatttcgacaaataaatttaaatatattgacttatgtatag

SEQ ID NO: 45018 - DNA, 351 bp, Glycine max
agcatgcaagtttactaatacaagatcatacctcttcttatattctactctgtatagatcagtagttggagctcttcaatactctctactataaccagacctacacttagttatgctgtagacaaagtctgtcaattcatggtcaatcctattgaatctcactggacagcagtgaatagaattctcaggtatatcaaaggctgcttacaccatggcctacttctgaaagctgctacttctggaattcacattcccagtaatgccctttgtgatgcagactgagcttctgaccctgatgatcacagatctactacaggaggtgctatttattctggccttaatcatatatct

SEQ ID NO: 45019 - DNA, 455 bp, Glycine max
  unsure (1)..(455): unsure at all n locations
ngatgcctctctgtataaccctntntacttttgggatctttccaatatcttctagcatcaagtcaagacaatgtgctacacatggagtccaaaatatattttgtctcgtgacttgtgaaattctacctaaaaagaccaaaatcaataaacttgtatgagtagtgtaacaattaaaagttataactactaaaaaaaacttcattaagtatgattgaattctcacccgccaacacataattacttccattgtccgtcaccacttgaataacattcttttctccaatctcctcaacaaagctatccaaaagctcaaagatcttctgaccagtcttcatgtattcagaagcatccacactcctcacaaattgtgttcccaacgaacaatntaccanaaagttaatcaaagttctattcttcctattcgtccaaccatctgacataattgaacacccata

SEQ ID NO: 45020 - DNA, 378 bp, Glycine max
  unsure (1)..(378): unsure at all n locations
agcttcaggttgctcatttactccagatntctgcanagaaggacagagatctgtatggtgatctgcagaagaacatagaccatagactcttgcaacaggtgtagatttctgattcatggcaagctgagttaccaggttgaccaaggcatcaagttttccttcaagctttttattttcagtagatgaagatcaatctgtggccacttcatggactcctctaagaacaatagcattatttcttgcactgaattgttgggagttggaagccatcttctcaatcaaattcctagcctcagcaggcgtcatatcaccaagtgctccaccattggcagcatcaatcatactcctctccatgtngctaagtccctcatagaaata

SEQ ID NO: 45021 - DNA, 476 bp, Glycine max
  unsure (1)..(476): unsure at all n locations
tttggatccatttgacctctatcatntaaagaatcaagatcatcaaaaccttctcttccatccaagaagttggcaaactcaatattcactttcctccttacatccacatcaagaaagaacctcttgaagcatttttatctttcacgagtgagttccatgtcttgatgtggaggaactcgattagaatcttcacttaaccattcatgactattatatctacaattaaaaagaaatatatacatgattaaaatttaggcaattctaaaaaaaaatgtaagtaaaaaagtatagagttaattacctatgatttaaagaatgagctaaacaatggagaggagtgctactcttagtccaacggtcaattaatatggagtgcactacctcataaaagtttgatccttcactctcctgctttctctcatattgatatatggcattcttcacctttcaatcattgaatcccacatctcatatac

SEQ ID NO: 45022 - DNA, 405 bp, Glycine max
  unsure (1)..(405): unsure at all n locations
agcttggccaataatcttatagaagttctccatatgttacagcaagaagaagaaggctattcctcanagaaggaagatacaagttcgtcataggaagaagcagccctttctaccagaacgaaggtgattgttttggtatttccctgaatgatgaataaaatgttaattgttctaccggtcatataaccggttgaatgttttattgttgtaatagttccggtcaagtaaccggtactgtagcaaatagtgaaatttttggttataaaaggagtcttcgaccatgatgtgagacaccctttcagatagcccaatttttcanggtctagagaggcgctctgcatagaaaaaatctttgtaaactcttctttcgatttgaataaacacaaagtttcttttcattatcct

SEQ ID NO: 45023 - DNA, 453 bp, Glycine max
cttcaattttgccgcgaacgctttgttggattgtataacacttaaattgttagaacctgtcgtgtttccatttccaacctctcgatattctattcgcccgaatctggctttccgtgtaaaggtttacaccttgagattgtttgagagccttccttggttaaatttcagccaattcgtatattatgggcctcaaactggattttctgtggccaaatcttaccctttgaatttcttcagaactttccttgtgtaaattacagcgtgccagatatttattcccggaatgggttttcctttggaagagttccaccttgaatttctgcagagccttcggtttcaatttcgacgtggtggtgactattgcgccgaatcgtcgttcctgtgagagattgaccattggaatgtcggagattctcggtctattatagcgggtgggatatgtctcaaagactc

SEQ ID NO: 45024 - DNA, 341 bp, Glycine max
  unsure (1)..(341): unsure at all n locations
gcttactataacaagagcagacctcttctcttatcctactctgtatagaacagcagatggagctcttcaatactctccactataaccagacctagactaagttgtgctgtaaacaaaatctgnctattcatggccaatcctcttgaatctcactggacagcagtgaaaagaattctcaggtatctcaaaggctctttacaccatggcctacttctcaaagctgctactcctggaattcccattcncagtaaagccctttgtgatgcagactgngcttctgaccctgatgatcacagatctacttcaggagttgcctattatttggccttaatcatatatct

SEQ ID NO: 45025 - DNA, 447 bp, Glycine max
  unsure (1)..(447): unsure at all n locations
tatatgtaaaatatgtattgtctccttgntattttggcaaatatttgtattatttttcgtaatttaactttgatcaatttaattctaaacattagaaaaatagtaattttcatccttcatcaccaatgattttttactataaggaacgaaattactattttttaaagtcaagagatcaaattaatcaaatttaaaatttgaacactaaaatcaaatttcatcataaatatagatacttgaaaacggattttaccctaagtttgtttatatattctcatattntgtaaaaataggtatcgtgatcgataaagttgtattttttttaatattntaataaatctaagttaataaacttacgacacattctttctganacataagtacaaaagcaatcataggtgtngaggtctaaacttactggtggatatggccatttagaatgtgact

SEQ ID NO: 45026 - DNA, 573 bp, Glycine max
  unsure (1)..(573): unsure at all n locations
ntggaacccttgattganaccgatctcgtacccgngatcctctgagtcacctgccgcatgcaagccttgagggagtaactggcaccccatataactggcagaggcccgtgatcaanggctgaaacctcagtgctctngtggacttctctaggtccactatgtgtctggaaggcgtgatccctgaaaattgataaatggcatctgagatcaactagaccacacgaactctcacctgggtcaagatggcatagaccagctggcacttcagcaagggaaggtcanaattatgatcattgtggaggatgttgctaagcagcaatgtcatctatatctgtgttaggatggtcatgctagtacgcatgatccgcacccgtcttcctatcacactttggtcgaagtcctgtcccggaacacacagtatgtggcctatggcctcctcatcanatcccgaggtctggcttctctgactgaattcgcagtggtgcccctcttctaggaccaatggatgccccaaaaattgattaatggcatcttcatcaaaggagatccattgccccgcacctaagagcgctn

SEQ ID NO: 45027 - DNA, 425 bp, Glycine max
  unsure (1)..(425): unsure at all n locations
nggagaggatgcttcaatggaggaaaagaaagagggagagaaagagaaagtggggagcacgacattgaaggaagaaaaagggagagaagttgaactctgagttgtgtctcacaagactctcattcatcaaagttacaacaagtgttacacatgcttctatttatagactaagtagcttccttgagaagctntctttagaaaacttccttgagaagcttctttgagaaaacttccttgagaagctagagcttagctacacacaccctttcataactaagctcacctccatgagaagcttgcttaagaagattcctaaagaagctagagcttagctacacacacctctctaatagctaagctcacctncttgagatgagaagctagagcttagctacacacccccgataataactaagctcaccccc

SEQ ID NO: 45028 - DNA, 485 bp, Glycine max
  unsure (1)..(485): unsure at all n locations
taaaccttgacccagggtgagaatgtcaatccttaccctcggaagcgaanaggaaagaaggaagatttccaatcaaagagaaagcaaaaaaaaagaaagagcagaaggaaaattccccaatcaaagagtgggagaaagcaaatagaanagaaagaatattcccaatcaaagaatgggagaaagtaaaataggaagaacaagaatgatagaaagctcctgatcatggattgaatgaaaacagaagacatgtgcagagaggtctttggaccggacaatatctgaacaatacagaattgtcaccaaatgaacaaaaaaagaaggaaaggaaaccacgacctanaatggtcttctccctttgataccaaccaaaatcccgtgcgctagcgaacttttttttcgcccgcactatacaaaatataacagaataagaaatatgccagaataatcanaagccaataacacacatatgccgaataaaaagaccg

SEQ ID NO: 45029 - DNA, 183 bp, Glycine max
tcgataattatgtgctcctaatgagcttcgaaatctgaagttaatattcaaatgatcaaaggttgaagaaatgcacacacatgacctctattattgcctatgtgggcacaaaatggatggaaatcacattcactcgatttgaattgagtttgtgagccaactttgagccaaattcactattat

SEQ ID NO: 45030 - DNA, 327 bp, Glycine max
ctgctgactcctcattgtatctgataggaacattctagtcgtcaactgagggatctgattctgcatcgcatatggttttccttactgctatagtgtgaagcatatatctatttagaagatttgtgagacaaccccacacctgcaatgatattggagctatatcaattatttaaaggctacaccaaaatataagaatgacccatctgtctgtaattgatagctgggtgaaagcagctgcaacaaatgattcattctggttgatgaccacagaggaattaaacttcttactcccatgactatttatgtgtatttctacttccagatgaa

SEQ ID NO: 45031 - DNA, 314 bp, Glycine max
  unsure (1)..(314): unsure at all n locations
cctcataaatagaaggaggaaactttgcnttttcaaatgcgtcatttaacaaatacaatatcatagtcattgccttgtcgcttaatccacacaaaacttttatatgatataatttgattataaattctagttttgtgtactcgcttccttcatacaatgtttggctcccatcatttagaagctcataaaagacattatgatcttctcttggttcatcatttactatttcatcttcatttaatggttgtgatgcacctacattatggtcatgttgcctatattgttcaaatgcgtcattgatcatcatatccatt

SEQ ID NO: 45032 - DNA, 336 bp, Glycine max
  unsure (1)..(336): unsure at all n locations
ttagtactgttgacgccattggaaacaggtcgtgcgactagattatttcggtgtctaatggtgtattcaattcaagaaagaggatactacaagccgtactataatgtgcagatggtattgatgaggcttgcctcagatttgatgaagcagttggccaaatggagaaacagcaacagcaagatgtagatgcacttcaagtttcaaaagatgggactgagaagaaagattatcctgttgatctctctcttccagatataaaaaatgggatatatagctcagatgagtntaggatgtatacattcaaagttaggccttgctcaagagcttattctcatg

SEQ ID NO: 45033 - DNA, 251 bp, Glycine max
  unsure (1)..(251): unsure at all n locations
gaccacagagtggtacctggagatatgtcgcggcggtcacgagaccttgtggacgtcacgtggggtgctattgcccaaaaccaagcttgaccaatcccgacccaacccgggcatagtcggtcagtgagaacctgtgatgtacctaagcaggcgagctcctggcagtcaacagataanaggaaaacaagaccacaaagcaaggaggcttgtggtggctggccagctgtgaatattgtgtaatatgtggattg

SEQ ID NO: 45034 - DNA, 323 bp, Glycine max
ttttatagtggagtaccgtttatgtgtctaccatcacgattatcgtctccctttccattattggggataccacctgtgccgtcagatccctccaccttttgggcgtgttctttgaaagatccgtcccccctttttgcacatgttctgtagttgcatcctattcagaaccatatcaaaattgtactgatactgcctaacaacggcgaccattatgtccttccaagaatggactcgggaagattccaagttagtgtaccaggtaacagctaccccagtaagactttcttggaaggaatgtattgtcaattcctcatcttttgcgt

SEQ ID NO: 45035 - DNA, 399 bp, Glycine max
  unsure (1)..(399): unsure at all n locations
ctgatgctgcagccagttcgtcactctctgcaccctgcacattataacagagataagcattaagcaaagcataaagcctaacaacaaacagtatcatagattgaattatcaaaagctcagatcctctaagtctaatctagagaaccaacaacagtcaacagcaaaccgcccttatattacactgatagattaggaattgaagcagtgtatcactctatctatattttgcacaaaacttaccgtagtatgatcatgataaacataagagaaaacagtctatgcgctggatttacattgtcgtccaatggcacacatgcatgtatgataagtttgttgactttaacaataattaccttaanaccataactatcatgattgttatntaattcttttcactat

SEQ ID NO: 45036 - DNA, 318 bp, Glycine max
  unsure (1)..(318): unsure at all n locations
cgtgaagatgcctagttgtgagtgtggcaattgttttctcgagccgatcgaatgacttggaacgggtggattccgccatggcaattgggctcaatgaaagcaccaagttgctatgacccacgggtcatagctagaattcgaggttctagctcctccaagacaaaaagggtaagaaagggaaatttgtattattgattatgtgttntccgaattacattcattctatttataagtattatgctctattctagaattgtgtaattctaacagaatttggcatatgtgccttggaggaatttgtaaatggctatggataat

SEQ ID NO: 45037 - DNA, 171 bp, Glycine max
tagccctcaatgcccttgtgtgttgttgaatggaagtagaaaagaaggtactctgcagtgaatgctgaggcagcaagccaacaaagagcaccttctggcaagggaagaaatctgttgtagaaaatgtcacaaagaggacatggttaggaagatatatactaagatgcttgg

SEQ ID NO: 45038 - DNA, 321 bp, Glycine max
tgggtgatgttgcgcgttctgatgggtaccatgaggtgtattctggggtatgaccctcgcgggcgatgaagagacagcatgggcatcttcttccttcctctttgcccctgttgccccgattcttatggcattcgcgattgcggaggatacgtaatcaaactttcctctttttaatcctagctcgattcttttctcggcaaacaccaaatccgcaaagctggacggcttgtaacccacttgcttctcatagtataacactggcagagtgtctaccattatggtgatcatatctctctctacctgggaggagctacttgtgcc

SEQ ID NO: 45039 - DNA, 280 bp, Glycine max
actcagcttgtgcaacctcagacgcgaatcttccattctgttctgcctgaatgaacagacacacatagtcacattccatttccatgtctgcgtcatgcggagtggtggagtgtgtgttcgtgctgggctgcgcgcggtggctgtggaagcgctgcacctacgtgggcagctactacagcgccacgtggtcctccgccaccgccgacgagttcgacccggacccacgcgtctgccgcctcatcctcgccaactacgagcccgatctccgtacccccaacca

SEQ ID NO: 45040 - DNA, 428 bp, Glycine max
  unsure (1)..(428): unsure at all n locations
agtctcacaattgtcacgtgctcatgcataaattgttagtcgtggctatacgagacatcttgccaaacaaagtcaggttagccataactcgcctgtgctttttcttccatgctatatgtagcaaagtcattgatcctgtcaagtttgatgagctggaaaatgaggccgcaattatactatgccagttggagatgtattttccccctgctttctttgacatcatgattctcttgattgtgcatctggtcagagaaatcaaatgttgtggtcctgtttatctacngtggatgtacccagttgagcgattcatgaagatctttaaaggatatacaaagaatctatatcatccagaagcatctattgttgagaggtacattgcagaaaaagccattgaattntgtcagaatacattcagaaggctaaacatg

SEQ ID NO: 45041 - DNA, 426 bp, Glycine max
  unsure (1)..(426): unsure at all n locations
tgcacctactnctcaacctaataagtactaattaaacctgatanttttgaaccttatgaactcttaattgcattattgcaatgcacaccatacacaaagactaataagccagaacaagatccaactnttttcaatactgaggatcaaagctatatgatgttgtcagtcccctcatcaaacaggtataagcctaagttaaataaaattaagtccaactaattagtattttaacaagttctccaagagtcatatatgtttgcgcagattgttggttgaatctcatcaaaagggaatctagacttttagtctccaataaagattaaatatttcgtagacagaacggatgcctcgttgcatttacacagttccatcatacttctaaccctaatcgagtgctagtttctttgaaatgcagtaagctatatg

SEQ ID NO: 45042 - DNA, 432 bp, Glycine max
  unsure (1)..(432): unsure at all n locations
tatgacacttgaaactcagctgccccagctacccagcgagcaggttgcttcctccagaagcaacaaccttctggaggaatcttctggagggcccaagtgggcctggttgctatttgcacccccatttttactaaatacaccccctgcccttttttggtgattcttttttcgtaaagttacggaaacttacgaatttcgtaacgatacttgttttctttctgtaatgttatggaaccttgcggattacataatcatcccctttttgacttacggaatgttacggaacttcactaattgtgcaacgatgcttccttttgatttccggtgtgtcacggaaccttacggattgtgcatcaatattttcttttgattnttggcacgtcacggaatttcacaaattgcctaatgatgggtgccaagcacctcanaatg

SEQ ID NO: 45043 - DNA, 427 bp, Glycine max
  unsure (1)..(427): unsure at all n locations
ttgccgtggagctgacccattaactgccctaactcctttagactggtggtccctaagctcttgaccttaacttgatagaacctctntttaagtgaaggcattagacttgatcccatgttttactaaagtgaacaaaaatcggcgcgaatcaaaactccaacatctatcatgggtggaatggatgaatgcatgaagaaatgcatatgacacagatgcaatttacgaatacgggagcccgagaaattgtttccttcttggatacaacgttaagggacctataagggagagagctaactangcttttagtgataacccccaaggtagtcatatctctcttgatggtttctagaggtatcatccncttcgaagaacatactgcagcagtatggactactagcaacaatatgtgttccacgagaaaaactct

SEQ ID NO: 45044 - DNA, 271 bp, Glycine max
gcgtccatcttgaagagctttagccattacacggcctaataatcggaaatattcaatcactctgaaaatttgggtaccctctgatgcatcagcatttgcaggccaaggtcgaggaaacagcccaagaggagcttgaacgagttctccatctccaacaaaagagccttcactatttttcattttcttttcatctccatcaatgtccatttgatatttctctgaagaacctgatctccacatttgaagtacaactgtttgtaagtcatgactg

SEQ ID NO: 45045 - DNA, 150 bp, Glycine max
ttaggcttcaacaggtaggtcatggtagcttcatgctggcacaaatgcgggggcaaccactccggacttacactaccaccggcctgaattttcggcacgacaaaccgttcttcgataaaatatgataggatggaaaagacatttgatgaa

SEQ ID NO: 45046 - DNA, 405 bp, Glycine max
  unsure (1)..(405): unsure at all n locations
ctaatcttcccaatcaaagtataaaagtttgaagaaatttacgcgtactacggactcccaaaatattcatcttcatgaggaacacacaaacacattcagaatcctgtaaaagaggggaaccgtttgagggaaatcaagaatgacctgattatggataaccgccgaaacttacatgtaatggtttcttttctacttgatattcttagcgccagtcaaagatgcttatcttcattattgcattttttaaactatagtcaatgagaaagcctctgacagcggcctatnnttttagagtgctactaagtttgcaccgaacacgtatgtaccataatacagttgttcttcacagatgatgaaattatgcttgtctacagacctttggcttcactacgtactacgtaaagc

SEQ ID NO: 45047 - DNA, 422 bp, Glycine max
  unsure (1)..(422): unsure at all n locations
aatgaaaattttgaaacttaattcattcctctncctttaagttattgaggtcacttgtccaaccatacactntattataataagtgaaaatcgattttttccaaactaatttctcactttcttttacaatagttaagaaatcgattntcacatgatccgatttcttaactaatgttcttttatacacgtttaaaaaaaatatggtggtaatatttccaatctcataatatttttaaaagaaatatatttttattattcttttattggtttctatttcatttaaaactatttttgtatttcttaatgtattatatggataatcattatttcttaattttgtgtaaaaaactctttacttgcactctaacccnttatatnggatatttnnaaaaagagaattttagttgtttctattgtcattt

SEQ ID NO: 45048 - DNA, 367 bp, Glycine max
tctacattcaatttcgagcgtctcgatatgttacgggactctatcagacatccgagtaaaaagatattgtcgtttgaatttgctcagagcatcaacattcaatttcgagcatctagatatgtgacgggactgaatcagacatccgagtaaagatttattgtcgtttgaatttgctcagagcatcaacaatcaagttcgagcgtctcgatatattacgggactcaatcagacatccgagtaaaaagttattgtcgcttgaattggctgagagcttcaacattcaatttcgagcgtctcgatatgtgacgggactgaatcagacatgcgagtaaaagatattgtcgtttgaattgctcaagcatcacat

SEQ ID NO: 45049 - DNA, 245 bp, Glycine max
cccatcacatgtggtactaagtggcggtcgggcgatggtgcacaacaagttttccacatccacaatgcgcgcataaacccaccatcccctgttgcccacctccatctgagctcacgtactcccacgtagcccatatcctcgtttctctcaacaccgggtccccatcaatcctcccaagcttccacaacatccaagcaaaacaacattcaaacagcacaagctatcacagcctagcaaaacagagc

SEQ ID NO: 45050 - DNA, 587 bp, Glycine max
  unsure (1)..(587): unsure at all n locations
caactctttttgccgtttcttacttattcatcttctctttatatcaagcctanngaggattgaagccntgacaatcaaaccatactaaccaccctttgaacccactatnacggacctatataaactcacactattagaacaatatngccttatccatatccatatatgcatgtgaagtaagacacatctacaagaatcaagccaaggctatagttgaagcaatcatatgggcaaaacacacccaatgattataatgatggatggctcacatcctcacacaagaaaaatcatctactttcacatgagctntcaaaactatcatgacatggggagaaaaatcaaggatttcaagtcactacctgtcaacatctataatttcctgagcaatcacccttacttgaacatatcctataattcatagaaaaacatgcaaatcttacgtgccacaaaattacccaaaatataaactaaaaatccgacaaactaccacatttactatttacatactaacaattaacaaaccaccaaacttgccataccaagacacttccccctacttaacacacattgctcaagaacaaataaag

SEQ ID NO: 45051 - DNA, 314 bp, Glycine max
  unsure (1)..(314): unsure at all n locations
tgtatctccttgtcagagtagctctgtcccgaatacacaactctgaaaacatcatcattgctcaagaggtgtttaattccatgaggagcaaganaaggaaggtgggttggatgactataaagattgatttanaagaggcttatgatagattgagttggtctttcatccaagatattcttattgatattgggctttcgacgagttttgttgagctagtgtggtattgcatatcttcccctacaatgaaggtgttgcaaaatggcaaagcattagaggaatttttacaagctatgggaatttgcaaggtgattcat

SEQ ID NO: 45052 - DNA, 473 bp, Glycine max
  unsure (1)..(473): unsure at all n locations
tagatggagaagaagagagtgcgagcaaaatagggctcgcgttctatatattttaaatgtaagtccaacatcggttttcaatacaaaaccaatgttaatcaaatgatgttaacattaacattggttttctggaagaaaccgatgttaacttatcatacgttaacatcggttgtctgaanaaccgatgttaaagaattgacgttaacattggttcttgaaaacccgatgttaatgaactgacgttaacatcggttcttgaaaaccgatgttaatgaatacacattattaacaattatgccaccgagtttatgttctcatcggctttgtcaaaaaccgatgttaatctgatgatgttaaatctacattttcaagtagtgccaacaaccaaatagaaaaaatcatatatatatatatatatatatatatatatatatatatatatagatatatcaaaagagatacattagagtatg

SEQ ID NO: 45053 - DNA, 468 bp, Glycine max
  unsure (1)..(468): unsure at all n locations
atgatcaataacttctggtgatcgattaccatatatgtgtcatcgattacacagagcagattntgaattcaaatgttaatagctgttgtaaatcatttttggccactggtaatcgagtacatcctatggtaatcgattaccagagagtaaatctcttgaaaaagaatttttaacttaaatctctcggccgaaccttttgctacttcaatcacgaattcccttcttatttaatatacccttcctaagactctagagactgtcttgatcatacatcttgaatatctttgtcttgaataaagctttgagaaacatgtgatcctttggcatcatcaanacattcagcttgatcctttgtctacactaacaagatgtgcccaatcaatttgtaggcctttatgagaagcccacataacaataagatcttcttctaaacctgtgcaaggttgaagacttggcacatgatgcgac

SEQ ID NO: 45054 - DNA, 434 bp, Glycine max
  unsure (1)..(434): unsure at all n locations
tgcttgttcttcccataagcagtagtcagcaatgcactctcacacatctccattacaagcctttcttcttcctgaacacacatggtcattaattcattgatagaccatttatctttatgtgtgttgtaggaaatcttaaatggcccatatgcatgtggaagggtgttcaaaatgaaatgcactatgaaggactcagacatatcaacctctagtttcttaagttgagctgaaatatctcgcattntcatgatgtactcacgcacacctttcacactggtgagccgaagagaagaaaacttcatgatcaaggtgcttgctaaagtcttatctaaagtgatgaactgatcatcaatggccttaagcaagtctcagaccttttcatgctggtcaacagaaccacgtatcccagccgagaatttggtcttaatgaacat

SEQ ID NO: 45055 - DNA, 407 bp, Glycine max
acacccaaccgagtacactgacctattaatatttcagaaaacatatttatagttatcacaataaagatgaaatgaaatgttatatctattttacttaagagtgacaaattaacaatgctgaagcctttgtataaatcttgaagctgtgaacttatgatgcaaacgcatgtaggtaattgaagaaaacagaatggaagatatatgtgttgccaatcaaggaataaatcataatacaaaaatgttctcttttcactctagacacattaatatgcatactaaaaatgaagtactgaagagtgcctaatttgcatcatatgatataagtctcaattcatttcttgtgaaaaaagaatcgcaacagttgatgtaacgagattaagctgtagctcacattccacttggttgac

SEQ ID NO: 45056 - DNA, 264 bp, Glycine max
tctcccctattatgctataaatatgtggagaagtgaagaagattagggttcagccccttatgcacttctctctctctcgaaattgttgaggaaaattagttccgtgaagaatatccaagccgaggcgcttccgtaacgtttctgtgagttattacgcgaagattctcgaccgttcttcaagattcatcgttcgttcttcgctttcttcggtcttcaacgggtaagtactttaaaccaagcttttcaattcattctatgtacccg

SEQ ID NO: 45057 - DNA, 331 bp, Glycine max
  unsure (1)..(331): unsure at all n locations
aagtcttgatctgacctttttagcaaatatgcgtgctaattgcctagntctaattttaatgacccacanaaaaaatatgtctagtccctatctgtgctggttgcaggttgaactagcaaagtagaaaagcagagacaaattatgtgtgggtacccatttagttttgatatatactcttcatatgatagtttgccacatacctcatgactttgttatataccttttattgggctnggagacatcactctaaatatagtggtaagatcgaatttaatgtaaggatcaatgtgccagccaatcatcatgtaaactgaaggatcaaacatagata

SEQ ID NO: 45058 - DNA, 328 bp, Glycine max
  unsure (1)..(328): unsure at all n locations
ctcagcttctagctttcattggtgtatttgatctccttcttgtgctctaaattgtgggagtgtgctcaaatatatggggcaattntgatttggtttcttgcttgattaagttgaattgggggtttgtatgagatggccctaggcctataatgcattttgaagtaatgggacatgccacattgtccccgttctcttgctattgatgcctaaacgcgcgcccaccaagtgttcggtgaaatgcctcaatggcattagcgcgtgatttttgtatggaaacaacccatggggcaatttggcttgcacatatttttgggacatgcattcattt

SEQ ID NO: 45059 - DNA, 442 bp, Glycine max
  unsure (1)..(442): unsure at all n locations
tgatattcatctaaatntaagcaaagaatgaagattaaatacatagatggataatattcataggaaagaaattgttcagataacaaaattaacaaagcatttgggtgaaagtttacaaaatacaaaatgaaaaatacaaaacgacctttaatctgtgtcgctattctcccagtgcttctgtctcctaatcacaatttcccaatttttttcatggcactgatagtagaatgacacttcatctccatgatcgaagtcgctctcattgagaaagacataccatggtcgaacaatgctcctatcaccaatgccagggtccagggtaacgacgttccattgtaaaagaggcccatatttccttataattgtcatgaaatttcctggatatttaanaaacaaattaatgatggtattaaaaatngtataagaatctaaattatataat

SEQ ID NO: 45060 - DNA, 293 bp, Glycine max
caatacttggagactcatgcctcttcctccttcaaaacagctatcggatgtcgctggatatataagatcaaatatcgagccgatgggtccatagaaagatacaaagcacgcctggttgccaagggttacactcaaacggaggggttggactaccttgacaccttttctccggtagcaaaactcacctccgtacgagttcttctagctttggccgcactcaacaaatggcacctgcggcaactggacgtcaacaacgcgtttctccatggtgaccttgaagaaaggtatatatg

SEQ ID NO: 45061 - DNA, 285 bp, Glycine max
  unsure (1)..(285): unsure at all n locations
tataataacaaaattgcctcaataatttgcatatatgcatgttaattacgacgcctcaacaagaatcaagccaacgctattgtgcaagcaatcaatggggcgtaacacaccacatgattatgatgatggatggctcaaattctcacaaaggtgaaaagatcactttcaaattgagctttcataactatcatgacatgtatagaagaatcaangatttcaagtcacacaatgtcgagaacttttatttgcataacaattacccatttctcgaacatatgctataat

SEQ ID NO: 45062 - DNA, 292 bp, Glycine max
  unsure (1)..(292): unsure at all n locations
tgtagaccacgtcttttccggtttttccgacgttttcctcatataaacagtggtggtgactctgcgcgtattcctttcttggaacacacacccgcgagtcacgcgtcgcccaccctccgaagggtaggttgcgacaaggtccaacgccttatatgacccccttccaagtaaaaagaatcacttgattcgccccttttcanagaactacgtaggtctgatttccttatcacaattgaggaatacgtatgagcaagggaaacacccttgtccaccacacaaagataaaaaatac

SEQ ID NO: 45063 - DNA, 429 bp, Glycine max
  unsure (1)..(429): unsure at all n locations
ctcagcttataatatgaatctaattaatgtgctagatataaataacttttctaagtgtcctatatgtgtggaagctaagtatgcaaagaagccttttaaacctgtcaaaaatagaactacggaactgcttgaattaattcacacggatttggctgacttcaaaacacagtaagtagaggaggtaaagcatattttattacttttatagatgatttttctagatatgccaaagtttatcttctaaggacaaaagatgaggctgaagaaatgtttttaaaacataaggcagaagttgaacaccaattagatcgtaaaattaaaagacttaagtctgataggggtggtgaatatggcaactattttcttgagaatnttgtgaaaagatgggaatatcatgaaatagtgcccctatactctcaacaaatggat

SEQ ID NO: 45064 - DNA, 339 bp, Glycine max
  unsure (1)..(339): unsure at all n locations
tcttatccaaagctcatcttggtggtgaagctccttcttccatggcttattccttaatggatggcgcctcctctcacctattttcctttgtcttccgctgcatctccatggtggaaaatcaccattaaaggaccccattgaagctcanagatccagcctccatcgaagctccacaagcaagcttccatcaagtggtatcagagcacaagagcttcaagtaggtgctccttaaacctccattaattnttttttttgccttctcttccattgttggttcttaatatttctccatgtatctcctcacatgtcttgttctaaatgttgntaacatgattcttt

SEQ ID NO: 45065 - DNA, 457 bp, Glycine max
  unsure (1)..(457): unsure at all n locations
gtgtgaaagtggagataacataagttgtagtatgacttcaataatgattctggaggtagtttaatacaatgggtacatgccatgagctatgcatgacgtagaaatcattgaaagacgcattacggaagacaacaagtgaaaacatacgtgcctacacttagttgagatgcagaaaccaaaaataatgaagatcaatacgatgctacaatatgttgatgcactgtcatggaggactctcttcatgtaacacatgtatttggattagaagggagttaagtcttacattaacatcaaagccttganaaggaaaaannagtcgttatgtttgcaatggtccctaaactctcatttttacttggacatgcatattagttagctttgacatacatattattattttaagtatttcttaaaactactatagtntcatataattaatttactattgcatatttat

SEQ ID NO: 45066 - DNA, 380 bp, Glycine max
tgtggtgggagttgttgagtttgggcgggaggtacactttcgcggagatggatgtgttttcggagatgacgatgtctttcgaggagactaatgtttcggggtctaagatggatggtggcacgtgcggtgaacctatgaagcgttccacggttccgtcgttgtagacgcggaggagaggagggagctctctggctatctctttggaagccattgaattgaaggaagcagagagaaagagagagagagagatggtattgtgaatgaatgcagatgatgacatgaatgtgtgtcatataggagcagctgatgagcgatgacttcacatatggtcaaggacgaaacttgtgtgattccttcctcgtcgtgccacactacctacc

SEQ ID NO: 45067 - DNA, 452 bp, Glycine max
  unsure (1)..(452): unsure at all n locations
ttctggttttagttactccatattgtcgataattaacttgggttcctgtcttcatgatntttaagttcactgtgcaaagttgtttcaagtttggtctttggcaagtgcgtacaaagatattcatgacccgctgattaataggaaagattcaacacctataggatatgaggagacttttggtgtactgctaaattgctgatttcttaatatgatgcaaggctaactcaatgatgtctactccaatatcaatgatatagagtcttggaaattgtgggtttttgcttaaaaaaattcaaatattgaaagttntatttccttaatatcttggttctatanagattccaataaacaagaagaaaagagacacttatcttcaaataattggatggtctcttacattgaagaaatcanataaaatggtcgattcttttttgtagtcctatcacttatat

SEQ ID NO: 45068 - DNA, 251 bp, Glycine max
ttgttgaccacagagtggtacctggagatatgtcgcggaggtcaagagaccttgtggacgtcatgtggggtgctattgcccaaaaccaagcttgaccaatcccgacccaacccgggcatagtcagtcagtgagaacctgtgatgtacctaaacaggcgagctcctggcagtcaacagataaaatgaacaaagaccactaagcaaggatgcttgttgtggctggccaactgtgaaatttgtgtgatatatgg

SEQ ID NO: 45069 - DNA, 413 bp, Glycine max
  unsure (1)..(413): unsure at all n locations
ttatctagccaatatcatacaaaagtgttacaacagaacctatcgggttctaattatatgggccattaaatctatcatatgttgacagtaattgattagcccatgaatttcttctggggctgaacacacttcagcgatggcctttgctttggctagcagtcgcgggaggtcttgacttccatttaaggtcaaggtgaacctatccatccacatggtcgcttcttgatgcaatgcatcaatcaccctccctcttgcttccttctcggcatacgctngtgcgaagtcctctactagtttttgttcatgggtcaaagactagtttaactcttctttatactgccctatntatagctagcatgcttgctccgtggcttctaagtgttgggccaaactcctcttggatcttgagcatg

SEQ ID NO: 45070 - DNA, 335 bp, Glycine max
  unsure (1)..(335): unsure at all n locations
gctgtaagcttatttgcctgtncaacactctcatggtaattggtaaccataatcagagatacaagatcaaagtcatcagaaaatatctatacaaactttacacagtatcaaatgttataataaaagagtctccggctcattgaaagagtaaataccccaatctttcctaaatattcgagatggttcgcaaacctcacctcatgttagaacccacactaaccttcctaaagagaaaatatttgtgtangattcacaagaaattaatttatgttgtagacagtaaaatctaaatcatcaatgacacatactaaaataaaacaaatttggataaatta

SEQ ID NO: 45071 - DNA, 432 bp, Glycine max
  unsure (1)..(432): unsure at all n locations
cctttatatatagtcttcattttctagtatttattgtctcataacgattgagttcttcactctgcttttcgtccgaagtcttgagcctgttggagcatttaatgtttgaattaaatacacatcctttcttcatgtaaagtccatgttgaaagcggacatgccttgtatttcaacaggaaagttacttctttcatcataacaaatatgcaacgacagaggcacccttttgatgaggatcaacgtcttctatggactccatttattcttcataggactttgacagatcctatgagaatgttttctggatgaaagaatctcatacacaaagtattaaatgaanggcctatatatactacttatatgccatgacaaatcatcttatggatgcatcgtctgaggatacacatacagatcatgatcngatagcacatc

SEQ ID NO: 45072 - DNA, 298 bp, Glycine max
  unsure (1)..(298): unsure at all n locations
tgcctcanagaggtccaggaaggacaaagcagccgaaagaactatttccgctccggagtatgacagtcaccgctttatgagcgctgtacaccagcagcgcttcgaggccatcaagggatggtcgtttctccgggagcgacgcgtccagctcatggacgacgagtatactgatttccaggaggaaatatggcgccggcggtgggcatcactggttactcccatggcccaagttgatccagaaatagtccttgagttttatgccaatgctttgccaacagaagaaggcgtgcgtgacatg

SEQ ID NO: 45073 - DNA, 107 bp, Glycine max
  unsure (1)..(107): unsure at all n locations
agaatgatgtcaagactgagtcaacaagttccagatcaagattaaagaanagacatcaagaagaatcaagattcaatagaagatgaattcnagattcaagagatgaa

SEQ ID NO: 45074 - DNA, 373 bp, Glycine max
  unsure (1)..(373): unsure at all n locations
cgagccganggccttgaagtgcatgtntctggagtacccacattgagtgaatgggtataagttatggtgcatggagaatgggcatcctcgcgtcttgataagcagggatgtcgtgttctatgagtctaaaatgtatcacttgaacgaggattcaagtaaagggaaggtagtgtggacgtacgagagtgtccaattggaagtggagtttggtgcaagatcgtccactgcacgagggggtcatccactacttgggtcaataggtgctgaagtggagcgtctatagcactggtcgcctattgccaaagtcatgatgcaaggtgaggaacaagaggctgacatcatgcgttcaaacttgtacgattatctcttataa

SEQ ID NO: 45075 - DNA, 355 bp, Glycine max
  unsure (1)..(355): unsure at all n locations
acttgctaactcattcatctcgaagtgcattctttcatgagattatgacaactgtgaacgtgagagttggccaatgaagctttttgaaatgttatgcaagttatctcatgtattgtgattggtaaactctgaactttatcttagtataataactntacttttgcttgaggacaagcaaagttttaaatttgggggaagttgataactgctgtctatatgtatactttgggattaaatcatataggaattggtaattttcctctcttatttcttcctttttgtgtgaataattagaattttaacatcatttaagtnttaatgcanaaagtgttcagtttgtgcttggtgaataatt

SEQ ID NO: 45076 - DNA, 184 bp, Glycine max
cttttgagagattttagaaatgaatcgaaaatggatgagagatgatgttgaacaagattgaaagatatatgatttaaagatcattgattattgttgaacttcatgccatggtcacatatttataatctctggatgactcaagtcatagctcatgactcttgggcatttctttaatactagtcac

SEQ ID NO: 45077 - DNA, 370 bp, Glycine max
  unsure (1)..(370): unsure at all n locations
tcaacattcatacagcacaaactatcacagccaagaattatatggcaaaggcagaatactctgccgaaaacaccaaccaaaatcacagcttttctcacttaaagaccccagcacataagcctacattttgaccgttgggatctgctagcaaacatccagaactcattctgcactactctntccacaaccagcaaaacatagcatttttctgccaaagccaaagtctgctgacctattagaacaaaattctgataagtgcagattcaaatacacttccctcatcaatttccccaatcgatcctacagttccaacatgttcatcatgttaaccaaagtcaactcaaacacacacacaaattaggtcataccc

SEQ ID NO: 45078 - DNA, 338 bp, Glycine max
tgaatgagagtcttgtgagacacaactcatagttcaacctgtctcacttattcgtcctataattgcgcgctatcccctctgtctttctctccctctatcgtttcctccattgaagcatcctctgcaagcttcttatgcaaggctcatcctggtggtgaagctgcttgttccatggcttattccttagtggatggcgcctcctctcacctcttctactttgtcttccgctgcatctcaaaggtggaaaataaccattataggacctcattgaagctcacagagccaacctccataaaggccctacgagcaagcttccatcaagtggtatcagagcacaa

SEQ ID NO: 45079 - DNA, 280 bp, Glycine max
  unsure (1)..(280): unsure at all n locations
ctcacaagagactcctcacttctaaaatcccatttccttatttccccctaatatccctagtttcctaaaggaatttatagtctctcactactcattttccatggttgtcctttgaatttcttaatgaccttactgttgagaatagataccaactgtgtgagaaaaactccttttgaagtaaaatgtcttccttttcttctccctccttaagaaaaaacanaagttggaacccaagaagtttaattaacccttttatgccttatgttaatttatgatgaac

SEQ ID NO: 45080 - DNA, 395 bp, Glycine max
ctgtttagtctcctcacgccgaactgagttaaacttaatttctatatggacttattttagtgagtttgagaatcaattggaatcactgtcgcacatgaatatattaaaagttggtcttcactatcacgttcattttatctcaatgtgtgtcacacatactcaacatacaatatgatacacatcgaccattttaatgagtgactcatcgtaatattataaggtcttagcacttcacatagacttaaatactatataaaatttactctaatgataaaaatattaacataactgatcaatgtaattgtacgggtcgtattatacctagaaaatattctatttgagacataagactattaacgaaccgctatttatataaacaatgatatgtcatctac

SEQ ID NO: 45081 - DNA, 510 bp, Glycine max
  unsure (1)..(510): unsure at all n locations
cgcaagtattctgcggtggtactctgtcatgctgcctcattatattctctctactcttaggtntctatatgaagtgctctgatgtaacacatataatattatagtatagctagcggatctctacttctcgtttnttattcggatctctttaattgacntccaacgtatcactttctcacagttgcaagtntttcgtcctgttcacattctaaaatttttgaaaattctagcttaatatctaaatacatgcatctgtggatccgacatgagaatgagaattcactatctctattgtacattggttttgagaccatcgagtttaataaactaattttgaaggacatcttntcatcattgtacatgtttagtgacgctgagttcaaccctttctttacgttaactacatgccccatgagcgagctctgaaatattatatttatttattatcatctccactacatgaaaaaagaattaacggatattatctttaaccctttatgtgatatatan

SEQ ID NO: 45082 - DNA, 419 bp, Glycine max
  unsure (1)..(419): unsure at all n locations
nttacatgaactcacgataacacatttgcaagagcatcggtctgccgacagcgaagccggtgtgggcgatgttagatnttgcacttccaggaatgtgtgattntcaatttgggtacaaaaggattangcgaatgaaactgtttntgtcangaacaatattgcattgctgcttccactttagaaattaattntgtagcttattttttgttctttaatcaaaatagtgtgtcaattcttactttatctttattntctattattaaatattatactaaaatggaattttattntattattttttaatatgtgatttaaatttattattctttaattgagatancnttattttacttntaaaaatcttaaatttaatctctatattttagtgaacatttacttttactttaaaaattatattt

SEQ ID NO: 45083 - DNA, 355 bp, Glycine max
  unsure (1)..(355): unsure at all n locations
caagccctaaaggcaaagcttgaatgagcccgggttgtctaagataagttctagtccatatccatctaagtctgaagagagtatgatgaactaatgtacttctatatggccaccgatgaagccttggaatgagaaaccaagaaggcccgaaaggaaaaacacgaccaaaacatagtttgaggggctctatatggcagcaatagtgagctcaagctccgaagaggtgaaaggaatcatcatgggtcanaggcatgatcttgaatgacgagctataggcttgccttangtcgaaaagaaatttgtcccaacagttaagcgagactggagggaatatgtgggccatcatcgatgagtg

SEQ ID NO: 45084 - DNA, 364 bp, Glycine max
  unsure (1)..(364): unsure at all n locations
ctattgactaatattttttgtaatacttaataaaaatattgttaaaagtctttgatcacattcaaaaaaatattatcaaattatgaataaatatcactaatatatgtttatgacattctatcaaatgttatatatagtttatgttgttaaagcttaaaaatatcataaaaaaactttaataatatacgtaacatttgataaatattataaaatatattaacaacatttattcataattgtgtgacattnttttgaatgtcgtcaaaagttttagtaacatttttattaaatgttagataaaaaaaaaatattgctaaagatcatgtttgtagtagtgcctggaagtatgttgctttctgcactt

SEQ ID NO: 45085 - DNA, 326 bp, Glycine max
gcaatgcaccctccatcttcatcttaccatcactttcacacatgtgattattcatatcacattaaatctacactataaagtcaattacctccttttgttctcaccaaatagattattagacctagaggtccaagacaagattgacgttgtccacactttataattgattttttttttattacttttagcatcttatatagtgtcttgaattttgcactccaattatttatgctagatctatgagttaggcaacagatccccattcatggacctttgttgtaaattactcatatggaagttgttgatcatgtcttatatttctccat

SEQ ID NO: 45086 - DNA, 370 bp, Glycine max
  unsure (1)..(370): unsure at all n locations
ctataacgtcaataaccatagtccaattcttatgagatttctttatgaatcccaatttgtagtaattacacattagaaataagaaaaatgacatgctcacaaaatgcaaggataaactacaagatccattattcatcactaaccatacacaaattaacaaactgctgggttgaaattagttaagatccaggataaaattacagacctttattacatcacggctcaggtcattaacattnttcacattaagagtaatttttttccctttttcaggaattcgaccaccacgtttcaactgcaaggtgaagaagaaatatttattccagccctcaaaatagagaactacactcaagaaatcagcatatacctc

SEQ ID NO: 45087 - DNA, 410 bp, Glycine max
  unsure (1)..(410): unsure at all n locations
cagaataatccanaaatgtcaaagaattgggtgttgtaaaagcataacaagactttctgtgattggtttatagatacaatctttgcagatgagaatgcttcagaaacattaagaaaactagccgatgggcctgtaagatatgttataacttggcaaggatacgacataaacaagtattcattttacacaaaagcacaagatgacaaaagtacaatgcagaacagcggtgtcaccctaagggctgaatctcaacactctgcaagtgtcaatgacgccaatccctgtgttgcttccgtcccttactntgggttcattgatgaagattaggagcttaactatgtgaaatttacggtatgtgttttcacatgtagatgggttgacatacacaccggtgtgcgcaccgatgatat

SEQ ID NO: 45088 - DNA, 265 bp, Glycine max
  unsure (1)..(265): unsure at all n locations
cgaggatatgggctacgtgggagtacgtgagctcagttggaggtgggcaacaggggatggtgggtttatgcgcgcattgtggatgtggaaaacttgttgtgcaccatcgcccgaccgccacctaataccacatgtgatgnggtacccataatcctacaagcttgagatgaagaagtgttgaagggtgaaacttcctgctcttattgttgaccacagagtggtacctggagatatgtcgcggtggtcaggagacctttgggacgtc

SEQ ID NO: 45089 - DNA, 561 bp, Glycine max
  unsure (1)..(561): unsure at all n locations
tggcnancactgggtttgaaaccttgtagnaccgatgacctttgataaccngcactatagccatctaacctcctcctgtgacaggtgatgtacctttctgctgactcctaattgatatgaaaggaaganctattcgtcgctggtggacctgattctgcatggcctatggttttccttaatgcactgagtggaagcagaaatgtaattatatggttttgcgagaaaaccaaacacctgctatgatatgggagctatatcaattatgtataaggttagaccacatcatatgaatgaccacgctgcatgtcattgacagctgtgtgacatctacggctagatatgattctattatgtttgaagaccacaataggaatctagtattaaatatctccaattgaagcagccatgatgctatttcctactttctagatagaatacatgtctcgactaaccaatgtctgaatatgacaactaacattggtgttggaaatcattgttggtgaactgaacaatcgtacttcagatattgtaactgtataatgaatacaggcatttcttgcn

SEQ ID NO: 45090 - DNA, 345 bp, Glycine max
  unsure (1)..(345): unsure at all n locations
catctggtggtgaagctccttcttccatggcttattccctagtggatggcgcctcctctcccctcttctcctttgtcttccgctgcatctccatggtggaaaaccaccattaaaggacctcattgaagctcaaagatccaacctccatagaaactccacaagcgagcttccatcaagtggtaatcagagcacaagagcttcaagtaggtgctccttatacctccattaattnattttctttaccttctcttccattgttgtttcttcattattctccatgtatctcctcacatgtcttggtctacatgttgttaacatgattcttataagttccacctattaaac

SEQ ID NO: 45091 - DNA, 131 bp, Glycine max
tacgtgagctcagctgaaggtggtatattgtggatggcgggttcatgtttgatttgtggatgtgggagagttgatttgcaccatctgccgatcgccacctaataccacatatgacgggtaccccataatct

SEQ ID NO: 45092 - DNA, 302 bp, Glycine max
cttgaatggcaatccaaacacaccttaacagttgagtagatagagcccgtgctcataagccaaatgataatagtactataacacctttaccagaaatgctcttcgtgggttgaagtgtatttctggtgataccaatgttagtttctttcatttaacaatgtaatgataaccaagtagacacatgctacaaaaagatataacttatattttcttgtgaagctgaagactaaataatgacccataaacagaattaccaatttaagatattaataaaacataatagcatgcatgtttaaaaatct

SEQ ID NO: 45093 - DNA, 456 bp, Glycine max
tgttaattggacttctcacaagggaagtacttgttaagcaacctgtcatttgttgtgtgcaacaattatacacaatatattttttcttagatatagcatcatttatactcccttactaattcgatactccagaaaaaaaaaaaaaaaaactcccttgttaaagtgcttttataagtacacattcatcaacattgatgtaaaattacaagatcatcaagaaacatcatgatttagacattaaaacccatgtcaaggttctaataactccactaagtggaagaaaaaaatagcaaattaaatggaagaagatacattactaattattttcatcacaactggttccttctagcatttatatatggctcctggtcttggcacaaagacaaagatgattcttcttgtgttggggtaatcctggcaatacttcaaaatcgatgtcttcctttactatccctt

SEQ ID NO: 45094 - DNA, 446 bp, Glycine max
  unsure (1)..(446): unsure at all n locations
ctctcgagaaatgtaaatggtcatcataacttgtcacacggaagtccgattcaggcgcatactatatcgagacgctcgaaatctaaccacggacgctctctagaaattcaaatggtcataacttttagcacgaaagaccgactcaattgcataatatatcgagacactcgaaattaaacaccgaaagctctcgagaaattcaaatgatcataactttntacacgtaggtcagattcagacctataatatatcgagatgctcgaaactgaacaacgaaagctctcgagaaattcaaatggtcataacttgtaacaaataagtacgaattatgcgcataatataatgagacgctcgaaatttaacaatggaacgtctcgagaaattcnaatggtcatcacttttcacatggaggtcacaatgagacgcatcacatttcgagacgctca

SEQ ID NO: 45095 - DNA, 465 bp, Glycine max
atgtgtacttgaaaactacatgtagttaaactaggttggttacttttcaatgagcttagttgaaatagaactacttggttaggtggaagagagagataattctgtgagtccatcctgtctagggaaaataaaaaagtttttatgtgtattggtaaagaatacatagataaatctcaacatgtttcatcaaaatctcaagtttagtcatttcttgtccatatggagatttatgacttgaaaaaaaaaaatcttacaatgaatataaggtcttcatgtgtctgtgtggattatgggaaggtctcacttaagtgtgtcagatagacaattccaacttataatacattctagattcttgaactcaattagatggctcttattacctcactgtgattcataaggtgagaaaatcacttttacatcacttgaatgtaatataagtaaatctcacgctcaatttatctgtag

SEQ ID NO: 45096 - DNA, 443 bp, Glycine max
  unsure (1)..(443): unsure at all n locations
ctcagcttgtatttgttttcaaatgaggtggtggaagttatatatggtttttaagacaacctaataggtgcattataaaaaaagaagacgatctattaggtcatgtatagctacngcaaagtgtaacgatgagttattntgttgagatgtgaacacgcaaaaagaacaattttcgtacgttggatgactaatgttgtatgctagttgtagtgttgtattgaatactttaataaatgaagttataaatcactataaatatctataatctatagaatatttccaatgatgattgtcttagtgagtagagtttcttaaattatatatttagtctctatagtattttttgcggtgctcatagtgttatgttattatcaacaacttatacctatatttactctaatgataagatacttctagaaaattactgttatatccttttattt

SEQ ID NO: 45097 - DNA, 378 bp, Glycine max
tctagactgtatacaagaatgaagctctgataccacttgctttacaagtggcctcagatatcttatgataaggggttgaattaagatatcacaatcttttatatattaaaattctattgtgattttaacccaaatcccaagatttctttcaaaaattgaactcctaaataattatgcaaattaatcttactgaatagacataataagcaataagcaataaacaataaaagagtttaagggaagatagattgcaaactcagatttatactggttcggccacacctttgtgtctatgttcagtccccaagcaacccccttgagagttccactatcttgcaaaatccctttacaagttctgaagcacacaaagacaaccct

SEQ ID NO: 45098 - DNA, 441 bp, Glycine max
  unsure (1)..(441): unsure at all n locations
tgaagaggatgatgctntaatggatganaagaaagagagaatgtgggagcacgaaattgaaggaataaaagagggagagaagtggaacttggaagtgtgtcttataagactttcattcatcanagttacaacaagtgttacacatgcttctatttatagactaggtagcttccttgagaagctttcttgagaaaacttccttgagaagcttctttgagaaaacttccttgagaagctagagcttaactacatacacccctctaataactaagctcacctccttgagaagctttcttgagaagattcctatagaagctagagcttagctacacacacctctctaatagctaagctcacctccttgagatgagaagctagagcttagctacacaccccctattatagctaagctcaccctattccaacaatacatganaatac

SEQ ID NO: 45099 - DNA, 402 bp, Glycine max
  unsure (1)..(402): unsure at all n locations
tctgcatgtctagagagttcaagagagagaaaggacaaagttcatgagagnttgagagattttgttgtgtgaagatctgcagataccagagcttgaaaaggaagtcgttctgagagcttgagatgagtttgtgagtgattgtgaggtcttagaggtggaggagacattcccactacttttatttctgcaatctttcatctttctcttctctttgttgtaaaggaagcttcccagttatggaaagctaaatcctctgttggatcttccttgtaggtacttgatgtaaatatctctttatctatctaatgatgttttgtgtgttctctttgctatcagtatttcattctagtatgctnttaccttgatcatgtagatgcatgctttgttagcatcattcaacag

SEQ ID NO: 45100 - DNA, 337 bp, Glycine max
  unsure (1)..(337): unsure at all n locations
tatgactcggtttcttagggattcctaaactatatgatgatgaggatgggattttgtgaaagatggggaaaatggatccatggatgcctttctagtgcaactatatcaattttgatcaatggcagcactactagagaatttgtgcctgagaggggactgaggcaagtagatccccttgcacctttcctatttaatatagcagctgagggactcactggtttgatgaggacaactgtctccaaaaaccttttcagcagctataaagtggggaggcaaaaggaggagattaacatcttgcagtatgcagatgatacactatnntttggaactgcaacta

SEQ ID NO: 45101 - DNA, 447 bp, Glycine max
  unsure (1)..(447): unsure at all n locations
tgatgatagatggcgactctgccttgagagatacgaagattagggctacgtgggaatacttgagctcagctgaatgtaattatcataggatgaggggcttatatgagatttgtggaagtggagaatcgttnttgaccatcaccctatcttcacctattctcacatgtgatgggtacccaatactcctacaagcttgatataaagaaatgtagatgggtgaaactacctactttattccacacttacagatctatgaagtcgtacaatgctcttgcattcaaccaaccttaatcttgcaccaccgtacacttatcttatggacaacgactgatttgtcaagcaataacaaaaacgttgagcctcttactcttgtttattcaatattctcactcagcttggacaatgccccacaacttttacacaattctgttgcccttgcaacttgtg

SEQ ID NO: 45102 - DNA, 402 bp, Glycine max
  unsure (1)..(402): unsure at all n locations
tgctttgaatgaagtgacataatacatggacganntttttgttgtttggtatatgtaaacccttcactgggttgttgacagtgcaagtccttttgctcttctgccagcagacagcagtttatattattcagtatttgtaaaaatgaatggtcttcacatgttgatgacattatttgtctagttggggcattgcaaaggttatttctggtttctgctgctgaagtgttttgcttacttgtaacttttgcctcttgagtttgccgttttatgaggatattgttccctgactaagaacttttagggttcctttggctnttgctcttgtttgaatngataggttcactaataactgcacaaatgtcatcttgttttcaatggatatgttcacacaattatgaaata

SEQ ID NO: 45103 - DNA, 470 bp, Glycine max
  unsure (1)..(470): unsure at all n locations
aacctttattcaaacctttcatagttagtgagaaggctaaacgaanaattagggaacttagaaaacctaaatccttaattgaaggcataggtgataaccatagtgaattacttaacaagattggtagtttacttaaggtcattccagatactccccaagcctcggaaaatacttccaaaatggtaacaagaagtacctccaaattaattaatgttattaatgaagatagtgacctaaactcagacaacacaactgagataggatcagtgtcagaaaagaatataagtccaattaattccaaacactggagaacaccctccaaattatattatcaacgtccgactgcccctgacctactattagaggaaagaggtgaannacaatttaagaagtttagtgcanacaacatctatgaatggaacatagatgcacaaacggagtataacatcatgaatacacttccacatatg

SEQ ID NO: 45104 - DNA, 370 bp, Glycine max
  unsure (1)..(370): unsure at all n locations
catcatttcaatttctcattaagtaaaatggatcattntcaaggtccaacgccttataatgatcacctcttaagtaaaaaaaagagtcgcttgataagcaagaactacgtaggtctgatttcctcatcgcaattgaggatacgtaggagcaaaagccccgcttttgtcgaccaccccaagagatcgttaatggtccaatgccttaacgtttctctcctttcaaaaacaagagatcgttaatggcccaacgccttaacgtttctcccctttcaaaatcaaaagaccgtttaatggttcaacaccttanatgaccttctgttcaataataacatattgtgcaaaagaagataaaaacaacttaaccaaacac

SEQ ID NO: 45105 - DNA, 492 bp, Glycine max
  unsure (1)..(492): unsure at all n locations
tcagcttgtactataaatnntgtggtcganataagagagtgaagcattgttttcagttattgatntttttttaaaatgtcatatatgagcattaaaatatgaaaaatattacttttatttcttaaaattgattataagatttgaccaatagtctttttcacatcaatttaatctcttgaaatgattaaattgattagtattttcatctttggaacgtgggaaagaaagtgaggaggaaagacaaaaaattaaaaatttgaattagaaagaaagtgaaaggaaggaacaaagaaattaaatgtgtgaaaataaattgtcaacaaaattctcatatctccattgttgaaggcagtataagctgaatgtacagagtagttacccgttgtttcatgtngcccaaaccacacatcttcacgacttcactaaccttgtgcattgttttttcttcagttaaagctaacaattccgtctccaattagattcacattcatc

SEQ ID NO: 45106 - DNA, 335 bp, Glycine max
  unsure (1)..(335): unsure at all n locations
atggtaaaataccacctcaagctgatattaagaaggtggcaaagtgtttcttttgcaagaagaagggacacatganaaagaattgccccggattccagaaatggcttgagaagaaaggtaaatcaatctcattagtatgttatgaatctaatatggttagtgttaatattaacacctggtggattgattctggatctactattcatattgcaaattctttacagggtatggaaaacctaaggaaaccagtgggaagtgagcaaagcattttatcaggcaataagctatgctcacatgtggaggccattggaactttgcatttgactttaagtagt

SEQ ID NO: 45107 - DNA, 305 bp, Glycine max
  unsure (1)..(305): unsure at all n locations
acttttctatgttgtagcatactcttctatacgagaataactatttaaaagattagaatatggaaagtattgaccagtgaagtgttggtagaataatctttttatacctgttacaagtctccagtcttgttttgaaatcttaacaacgatgaaagcttgcaaatccttgatgccctgaccaaccatttgaacggngtaattttaagcaagatatagaatgagttggcaaagcagatactgcagcttttaataaaacttcttttttgtgtgtggacatcttaattgttcgttaattattaattata

SEQ ID NO: 45108 - DNA, 439 bp, Glycine max
  unsure (1)..(439): unsure at all n locations
tgaagacaagactatacgaggtatcttccttgggtatagcaatatctctaagggctaccgtgtctacaacttgcaaactaagaaactcgtcatcagtcgagatgtggaagttgatgaatatgcttcttggaattgggatgaagaanaagtggagaagaaggttcttatacccgctcaactacctcaagaagaagctgaggaagaagacccaggtgaaccaccttcacctccaccacaacaacaagatcaagaactatcatcaccagagtctactccaagacgagtaagatctttggtggacatatatganacctgtaacttggccatacttgaacctggaagccttgaagaagcgtcanagcaggaagtatgggtcaaggcaatggaagaagagatgcagatgatcgagaaanacaacacatgggagttagtanatcgt

SEQ ID NO: 45109 - DNA, 483 bp, Glycine max
  unsure (1)..(483): unsure at all n locations
tctcagcatccttcanacccagctgtgaatggttgtcaagtatctacttactatgtgcaaattaatttagaaatactataatacatccgcgtgatgaaaatgatgcaagtggacatacttcagcaattgttgtgggttcaagcccactcaatggcctacgttctgaagatgatgatgttctgcgcatganatattcgctaatcctgattggaaaatatcaagatagtcatgagaccactaaactatatacaaaactggagcaaaatcatttggaagatgattaagaaaataagtttgttacaagtaattcacagaaaattgtttgactatgcttaacctaatataagctgcacttcgattgctgaggatgattggatcacctgatttgatgtattggctctcgatataagttgatggcttgaatatgacaatggaagacattgatagcatcaaattcattggtcatattcccacatccttata

SEQ ID NO: 45110 - DNA, 426 bp, Glycine max
  unsure (1)..(426): unsure at all n locations
tgtccgcagatccctcatttaagactaggcccgatntagacaaccctcttaggtttagactaacttaaactaagtttcatccgcagatccctcatgtaagactagactcagctcaagtagcttatgaaattttagcctaatttagcctaagcttcgtctgtagatccctcatgtatgactaggcctaaagtaaacagcattattgtaacaacataattaaaaccaaaacttaactcgcagatccctcatgtaagactaagtttcaatccttcttcaatcaagttctaaggcaacaatacatttcccaatgctaaagtcacctaactgtgtacaaaaatgggtgatcagaccaaaagcatacaaacatcaagcattgaatgaagcattgaacacagaanacacaatcaattagatattatgtattta

SEQ ID NO: 45111 - DNA, 421 bp, Glycine max
  unsure (1)..(421): unsure at all n locations
tatgatacttgttaatgttttcttactaattgtggttattttaattttgtattaatttcttttataataaactcgcccctcgcagaagatagaatgttggtttaccttattacctacattttcactctgaggtcaagcaatcatgctcaggtaacagatgatgatctacagattntntatggtctgaaattangtatcaagatgatctangtactattgattggagacgttatgttgaagagtcgtcgcctggtggattatgaatttctttatgttgtacttgcctcaagattcattgactacttcaatgttgatgtctctaatgagaatatggacttcaccanagcgtctattgagaataccaaaaggtgtctcaagaaagttggaacgaggttcgtngatcatgaatggataatggatg

SEQ ID NO: 45112 - DNA, 557 bp, Glycine max
  unsure (1)..(557): unsure at all n locations
tagctatctttaagcctatttaaatatttttcatagcttatcaggtgacctgaagctaaccctctaacggcttgaaccttcattcggaattaaaactcacttctcctatctgcttatatatggtgagaagtgacaaagttataggttcagccccttangcatcactctctctctctcaatatctggtgaaaattaattacgtgaagaaaatccaagccgaggcgccttcgtaacgtttccgtgagtaattacacgaagaatctccaccgttcttcaagacacatcgcacgttcttcgatatcttcactcttcaacgaagtaatacctctaacccagctctttaattcattctatgtaccttgggtggtccacattctgtctcatggattattaatttccctatcatttgctttttatacccacctttgacatggttgagccatttattaagtcacttttgcctaatctaaaataaaaatattttccccgccgtctgaatgatactccgcatcatctgtaaaatgaattcgaacctcgtccgccagtaccactttaag

SEQ ID NO: 45113 - DNA, 277 bp, Glycine max
  unsure (1)..(277): unsure at all n locations
cttctcttctgactcatgatgtanatccatgtcattcttgtattgtcatcaattatggacataaaatacatccaccacctagagaagggactcttgcaagcccccaacagtcatcatgaatataatcaagagttcctttggtggtgtgaattgctttaagaaatataatcctatgttgcttgccgaaaacacagagctcacagaatttcagttcatccaatttctgatttcccaacagctgctgtgtttgaagtattatcatacccttttcactcat

SEQ ID NO: 45114 - DNA, 427 bp, Glycine max
  unsure (1)..(427): unsure at all n locations
agctntntgaagtagaaacatgggaccaactcattntatttcanaaaaaggttgtatctagtcaaggtctgagagaccatacaagtttcctagcgatttctaattatgtgggccattaagtctatcatatgctgacaatagccgagaagcccatgaatctctccgggggcagagtaggtgtccgccatcgccttggccttggctaacaagcggngaagttcttgactcccgttcaaggtaagagcaaaccgatccatccacatggttgcctcttggtgtaaagagtcgatcacccttcctctagcctctntttccgcgtatacttgggcatactcgtccgcgatcctatgctcgtgagccgtggctagacctaactcttcttggtacttagcgatgatagctagcatgtnggtctccgtctcgcata

SEQ ID NO: 45115 - DNA, 387 bp, Glycine max
  unsure (1)..(387): unsure at all n locations
actagatgcctgggttaacctggtaacccagctgggcttgaataaaaaatctcacctgtcgccagactctgtggtttatgctcctctgccgaccaccacacagacctttgcccttctgtgcaacaatctgaagcaattgaacagcctgaagcttatgtgtcaaacatctacaatagacctcttcaacctcagcagcaaatcagccacaacagaacaattatgacctctccagcaacaggtacaatcccgggtggaggaatcatgccaaccttagatggttgagtccttcacaatagaagcaacaacaacagccttanttttagaatgttgttggcccaagcagaccatacgttccttcaccaatctagctagaacaacaacaacagc

SEQ ID NO: 45116 - DNA, 408 bp, Glycine max
  unsure (1)..(408): unsure at all n locations
agcttattcaaatattcggattaagcatatgtttagttttaaaaaaattaaataattattagctcttagaattttattaataaaggaaaatatgtaatttctattttaaaaatgttaaattaaatatgcactaaattgaatgaagaaaatatattcttaccattatttaaacaactttcacataacttcaaaaacttaactgcaagtataccttgatcaacaactagcttgtccgatatgttcaacaacattatcatacgtcataaacaaataaaatcactagaacacatataagggtaagctctctttactcaatgatgtctctcaagctagatgaataanaatgaaggtgatgggaatgagctccaagttctacacgaattttgcagcagcaacgctgcaaaagta

SEQ ID NO: 45117 - DNA, 478 bp, Glycine max
  unsure (1)..(478): unsure at all n locations
cagcacatagggagttgcagaaatctggtaccattaagatacacatttgtttgtgtttgtgcgatgcagagtgttaatggatttaaggatcgctgacatgaaagaagattgagtggccaacatgcggacccagattggacaaccatgcaggtcaacctataaactaaaaatatttctgtactaaatcgcaagtggcacaatgagcgtttcccactttccaaaaggggtatgaactatgtaacgaattaacatcgatcatgtacattaaataataactcanataatgaaaaagtgataatgtgtatcatacttcattctttcagaacatcattatttgctctcctattgaaatgccccaacgactgctgcacctcttaagttatttcacctccactctggacggcaatatatatattacgtntcccagttcatcatcatcgattgtgctggcacaatttgcttcgtctttgttnttctc

SEQ ID NO: 45118 - DNA, 484 bp, Glycine max
  unsure (1)..(484): unsure at all n locations
agcttgtangattatggtgtacccatcacatgtggtactaggtggcggtcgggcgatggtgcacaacaagttttccacatccacaaatcgcgcataaacccgccatcccctgttgcccacctccaactgagctcatgtactcccacgtagcccatatcctcatttctctcaacaccgggtccccatcaatcctctcaagcttccccaacatccaagtaaaacaacattcatacagcacaaactatcacagccaagataacagagcaaaggcagaaaactctgccaaaacaccaaccaaaatcacagcttttctcacttaaagaccccagtaacaattccttcgttccaatttgttaaccggtggatcgactccaaaattttactggaagtctctagtacataaccctacattttgaccgttgggatctactagcaaacatncagaactcattctgcactacgcttttcacaaccagcaaatgca

SEQ ID NO: 45119 - DNA, 485 bp, Glycine max
  unsure (1)..(485): unsure at all n locations
tagcccacaatgttctccaaatatggcttaagaacttggtatccctatcacttactatgctcctaggtaggccatggagtctcaccacttgcttgaaaaataagtcaactacatggcaagcatcatcaacctttttgaaacgtataaaatgcaccattgtttataacattgcaacaaccacaaaaacaaaatccttgccactctttgttctaggaaattgcaaaacaaagtccatagatatgtcaatccaaggaaaatcacgaactggcagaggatgatataaaccatatggcttcacttttgattntttatttttacaaacaaggcattatttatgtacatcatgtttcatatgagaccaataaaaatgctcatgcaatatttctaaggtcttttgcaccccagaatgccaccatcaaatcatcctcgtgtgcctcatttaccaacaaatctcttatggaacacttaggcacacacagtctttt

SEQ ID NO: 45120 - DNA, 437 bp, Glycine max
  unsure (1)..(437): unsure at all n locations
agcttctacttatgtggcagggcgggcttccttcactttcttgtctcccacgcgagctntgaccactgctcttccttcccgcgatgcttcttttcatgtccgcctgagtgggcttatagcctaaaccatacttcccacgatttccttgggcatttatcaggctagttatgccgccgttgtctttgcctaaacccattccgggttcataaccgttccccaacataactcgggccatcattactgctgcatcggacagacaaggctgcccagagaaggagtccacggaggaaatgctgaccacctcaaaagactggaaagtggtttctaacgattcttttgcggcttccacataaggcatagaggatgggcagcttaccaagatgtcttcctcgcctgacacgatgaccaagtgcccctccactacgaatttcaacttt

SEQ ID NO: 45121 - DNA, 426 bp, Glycine max
  unsure (1)..(426): unsure at all n locations
acagcagatttcagaatgacccactaacctagaattaaaataacttaatgccattaacctacggaattaaaaaaaaacttaatggctgagtgtaactgagattgtggcaaccaaaagtcacccccaacagccaataagtcagccaccatttggtctcccaaaaggctgatgcctacgttgccaattgggcccttattacaacttgaactaaacctaactaaagcccttttagttgattaacccaaaacatatttttggtcatccaactttagagggattgggccattatttatacaaactaaacactctaaaattgaaacaaagtggtgtcatttagtcctcctgcatttgggccatgatacaactcacaaccttggactnttctccttgaaacttgggcttgtattcaaataatatggacagcac

SEQ ID NO: 45122 - DNA, 480 bp, Glycine max
  unsure (1)..(480): unsure at all n locations
agcttgtggttgatttagggatggcctttgtggatgactgggtggtgggtaatgagaagggccagtattggttgagtaatgatgctgctgagctggtgggggattttccatgtaggaacggcagtcgcagcatgtgtttctccttcattctcaccctcttcatttgccccagttttctcattcatccaagcaggatgattaaatttgcctcttttcatacccactttgatcctttcgtcagcgaaaaataaatcagcaaagcttgaaggtgtgtagcccaccatcttttcatagtagaacactggtaatgtgtctactatcatggttatcatctccctttccgtcattgggggtgccacctgngctgccagatccctncacctttgggtgtattctttgaaggattcatgctcctttntgcacatgttctatagttgcatcctatccagagccatatcagaattgtactgatactggcta

SEQ ID NO: 45123 - DNA, 458 bp, Glycine max
  unsure (1)..(458): unsure at all n locations
ccctctggttgctctgctagggtttccaagcattagagagaatgtgaagggattataatctcaatttcactatctttgtgcgagaggaatttctctctctacagacattattttgcaaatcccaacaataggaatgtgcaaaaatgagttttgaaggtggtgtccaaatttcaggatgattcaatggttaacaagtctaggatcatagttttattgcgatagatttgcgtgtatgcggtaaaaagagagagtttttggagatgaagaagggagaacaattttgaaagagagctctattttactccctattgaaataaataaacaaaacatcctttntattttctaaaaacatatttattntatttaccttanaaccattattttaattaataaaactatgcatccttatttattttacaaaanatagggtgttactgggtagctaatatgcagatcaa

SEQ ID NO: 45124 - DNA, 509 bp, Glycine max
  unsure (1)..(509): unsure at all n locations
agcgaagagtgttcatgcagtacagcgacnctgatactctnactgcangcgtgcgcatgtattctantgtcgtgcctggagctgctctttctatttcaaaacatggatgtatacttattgngtctcgtcagaacatacagagttaactagacgagtggtacttataccttgcaaatatttgatctgatgggcactaaaacctaaatacacgatagtgtctgtactctcttatataaatataaactatccattggcctgtgctacatatgatgaaactttgagtctggtcacgtcaatataccctacgcgaatcagcagatgattgtgtaataaaagatcacgagaatattcctctttttactcatgattgactatcagaactaactatctgtggtgaacatggttcactactatcttctggtggcgattatgtaaaatcaaggtccttgagataaatgaggtagtactttttttacgtgaacgtacatattttgtcatacatctatgcn

SEQ ID NO: 45125 - DNA, 297 bp, Glycine max
ggtgttttgatgaacgatcttgtgaagagaggaaaggttgaagacgccaaggctttgcttcatgagatgaacaggacgcgctttaaccagatattgtcacgcacaacctattgataaattatctttgcatggaacgtatcgaaatggaagcttacaaagtcttacttgacatacagattgcgggacgtgtgccaaatgcatctacatacaggataggtggtgatggcttgcgccataatggggattttgaggtaggtacgagtgctctcaatgcaatgcttactattagacaactaa

SEQ ID NO: 45126 - DNA, 472 bp, Glycine max
  unsure (1)..(472): unsure at all n locations
agcttcaagaatcaagatcaagattcatgactcaagattcaagaatcaagagaagacttaatcaagataagtatgaaaaggttntttcaaaaactgagtagcacatggatttttgtcaaaacatgtttaccaaagaatttttactctctggtaatcgattaccagattgttgtaatcgattaccagtagaaaaatgaatttgaaaaagttttcaaatgaatttataacgttccaattgatttcagaaagctgtaatcgattacaatgtgttggtaatcgattaccagtgcctttgaacgttgaaattcanattcaaatgtgaagagtcacatcctttcacatannagccttgtgtaatcgactacactgattnggtaatcgattaccagtgattgtntttgaataaataaaagatgaactnttanatggttttgacttttaaattgtttaagttttcttaagcatactctct

SEQ ID NO: 45127 - DNA, 480 bp, Glycine max
  unsure (1)..(480): unsure at all n locations
ccncgtggcttctttgagaagctntctcaagagacttctttgaaaagctagatccttatctacccacacccttctattaactaaattaacctccttgaaaataattatggataaaaataacacaacaaataatcaaacatcaaacataattactaatatatatatatatatatatatatatatatatatatatatatatatatatatatatatatatatatatatatatcatggtgtcacactcgctgagggtgaatctctacccgctcactctagatactgcangatgcctactgacatcagggatattgaggctgctctgtgcatacacgggcgagggtgtattttatatgctgagggacactctgngaagatacttataatagatctcaccactcttgctcaggtgtggagagntctctcatactccaacctcgctcagacttcccacgcctcagatatgactgtagatagagctan

SEQ ID NO: 45128 - DNA, 628 bp, Glycine max
  unsure (1)..(628): unsure at all n locations
tcgtaattcacgaaatagcgtcgtaattttacagctaggttatacgtattgtaatatnnnnntaantnnntatggatgacgtgattcctngtcgttcccgacacacgtgatctctaatatgaacctgttcgcactgcaactattacgctatgaccatatcactgttatattaccggagcgctagacctaacgttgcatcatacgtactgaataaaagctcaagaatctaacatgctcaccggttctttgaacgcctatttcacacttgaacgataccctctcaaaatgagatcgtgagtctctagcatacaagtatagatagctgcagttgtgtctacgcctataatgatgcgatcgacttcgacaggaggagctatgaatgaaaggagagacaacagacagtgtagcgcaaccacacgactgggaagaaacaacatcacaaatgttcaatgttggtgactggtataacttgttcgcgcggaaaacaacctatgatctgaacatagatcaatagttggttggacgatatgcatagacaccaccaaccatgtgcgtgcgatgacactttctgttgtttccaccatatcggatcaacacccatgttgtgacactatgtgtatattaacgg

SEQ ID NO: 45129 - DNA, 469 bp, Glycine max
  unsure (1)..(469): unsure at all n locations
caacacaaatgagtgggcgagcattggaagttaatgatgccaccatatatgcctgtgccgagataaagcttagagcaggtggatatattgagagtgcacacatccataccgcagataggcatcaacatggagcacctgcatataaagtgctaccgagnactgtctacattaacaatctggccactttatactactttccctctcggtaacctgtcagaaactaatgaaccacccttatcatatataataatatatgaatatccttaatctgaaataacgaacattacgatctatgtgaagtactcgtgctctgaattactctatatataatacgctattactgaccaggatagccgctaatcatttgaagccagaatatagattccttcactaattatggtagggccagctctgtcaccagaggcatacatgagccactcgacatacatgtggttgactacatgggcat

SEQ ID NO: 45130 - DNA, 432 bp, Glycine max
agcttcaaggactttaacacgtacctgctagttgtatttggttgtagtgtcttaatacatgttttaatacatggcttacacatatacatgtatatataaaaagtagtaacaatgtgctttacctggacttgatataatgaaacagcttccacaagaacaccaatggacaaaccaacttcaactacaacatagtaattcagcttcacctggagttcatataatgagtaatggcattagaagaactcatagccaaaccaagttcaagtacaacaaactaattcagctttttctcaaccaaactatgtcaaactacttgttggctattaaaagtattagttattcatgtgacaggcatactattctagtttctattcatcatctaacattcacaaagcagatatagggttctcatagcaataccacacagagaga

SEQ ID NO: 45131 - DNA, 452 bp, Glycine max
  unsure (1)..(452): unsure at all n locations
ngctaacccatggaagctcctaatatctcccacactntntgtggtgggccattcttggatgaccttgattttctcagggtccacttggaccccatttctaccaactacaaaccctaagaaaaatatattatctgcaccaaaaatacacttctctatatttgcatagagggtgtttttcctaaagactgaaagaacttgcctgagatgtcccaagtgatcatctaggctcctactgtacactaaaatatcatcaaaataaagaactacaaatctatctatgaaatcccttaagacatgatgcataagcctcataaaggtgcttggtgcattagtgagcccaaaaggcatcactagccattcatacaaaccaaacttggtcttgaaagcggttntccactcatcgccctttntcatcctgattnggtgataaccacttttaagaatcaattttg

SEQ ID NO: 45132 - DNA, 452 bp, Glycine max
atcctctgagtcacctgcggctgcagctagtagcaatagaataaaattcttcgaattcgaagcagaaaccccatcctgtttcgaagtagtctcactctgacctaaaatgtggaatatcttccactcccaaacctgctggagctaccagatacttgttcagctgaattagaactatgttccgtcccatcaacatctctaagaaattcaggctccttagtggtaaccatgaagtccatcaagttgcggctgaaccccaaatcagaatacaccctcaaggcatcctagatatgaaaatagatactactagatatagcagtggcagaacattaaaaaaactgatatattgaataatatcacaataaagcacccatatatatgttcatatcctctactgtcaaatcagacagagaactcatatgactgtgtctcattccttatgcagtagccataaa

SEQ ID NO: 45133 - DNA, 427 bp, Glycine max
  unsure (1)..(427): unsure at all n locations
agtccaccgtagtctttgccttgattaatagcaaanaatgttataaatgaccatttccagaagcactggctttcaacctctgaaggttattaatagtgttagagtttgtgggttctactttatgtgttgtgcttattgggccttaagcccacttctgcttttgtactgtatctattagcaaatcaatgagaaccaaatagaaatagaaatttgaccattaaccattaccaccaaaaactgacagtagaatcattcaaattaatctgaaaagttggcgatattaccagtctggcaaaaacaattagcaatgagcttagcaagacagagttttgagcagattgcatgcgtttgacaagagcagcaatcangtctcgtatatgtacagccatctgtgatggtaaatgcacaatcagttgaagaatgtaac

SEQ ID NO: 45134 - DNA, 607 bp, Glycine max
  unsure (1)..(607): unsure at all n locations
atactgccatctaaatantaatgctattctntctcgnctccgttataatannnncnnnnnnaccaccatgagtgaatcatncattgacaccactcgtaanacccacgtncacgtanagcaacctgcangcatacaagctaataggagattattatactccaaactatctcntacaaaccgccgctggatcatgaatttataacaccttaatactattaactcatacaggttatgtcactgaggatgcgccaactctatttacttgatgcaaaagaaaattattatcatggaatatcatgaaaatacaactcgtttatttactatagtgagcagataaccttgtagactgtaacaactcaatatatacccggagccaccatttccttgtccactgttcatgcgactcaatccactaataatattcggtcaatgaaagtacatttacactgttcatggtacacatgatcagacacttttcttatgaaaaatctattccgacatgagatccggcatcttgtacgtgtattgtacttttcttatntataaactatggagtgtgaccatgacgttttcatctactctacagtattactatcgttgtgcccag

SEQ ID NO: 45135 - DNA, 379 bp, Glycine max
tggttctggatttttgtctaggaaggcagtgggtatagttgaaccttccaatcaaacaactgaaacaactatgagtctatgggtgtgtggattcatgtctaaaaggatgctcttgtcctactttgattctagtttacacatgctgattactttttctccaagttgtttccatccaatcctttgttaactgaaaaatatcttgttataataagaattcaaatataatagaggttttatcaaatgcaagggcacaaaaatgattgttagaatatcactttatccctaaccaatttctcatggactttatttttctttgaaaagaaaattataaggtctattttatggaataaaattagagtggttaatgtaataatgatgt

SEQ ID NO: 45136 - DNA, 471 bp, Glycine max
agctagaagattcatttggattttgtgaacttggtatagtctaaagtcttatagttcggatctttaacctccaattgtgtttgtcaaagaatattttagagattaataaaaattgtgtagtcatttcaaaagcaggtgggataaattacaaatgttatgtgccaaagatactacttatccactttttgatatgatccaggttagcagagttgaaataggttatttatatttataatcacatatttatccttttttatggatttgaagagacttttaaaaagaaaatggaactttatggattctacattgttattaatatcacacataataacatacaacgatattcatagtcatattcttttaattttaacgtgaatttaattaattgaactattttttaaacatcataaacaaaatccatatcttttacattaattgaactacttttgaattgttactattcttctaaca

SEQ ID NO: 45137 - DNA, 469 bp, Glycine max
  unsure (1)..(469): unsure at all n locations
cttgatccgcctctatattttccacaatcccatcctccctccagataatgagcttctggtgaagggtagatggcacagctccaactccatgaatccactcccttcctaatagcaagttaaaattagccttagactgtatcaccaggaaaagagttggtcgaactatactgcctacagcaacatctacttgaatggctcccaaagaatagccagttttaccctcataattcgaaagcacaatgttgtgggcagatagatcagtgtcatgtttcccgatcttgtagagcatagatcgaggcattaagttgacagccgctcctccatcaatgagcactntgttgattccaacattctcaacttttgctctgatgaaaagaggtttgagatgaattntcatctgaaaatctggctnttcgaaataagctaattgctcttccacacagccattattcataacatagtaacatac

SEQ ID NO: 45138 - DNA, 407 bp, Glycine max
  unsure (1)..(407): unsure at all n locations
ggatccttaagcacctgcggctgcagctggagaaagctgagatgtttgtgtttacatgcctaactgacgcaatcctaccccgcaagggcattggatagaagactccaagtagattgggccagagatccaagggaaggccctagggttctcatgagccttagggtagattttgaccccatgggctaagtatgagcccgcttatctttgtaaatattagaatagggtttttccttcgtttaggccttgtattttggccattctagtagtataaggttttagccttgtatttcgaggcattttgagtagtctttgtagttgggaccttttttgtattttcatgtatnttgtcatgggggtgagcttagatattgtanggggcgtgtagcanagttctagcttctcatctc

SEQ ID NO: 45139 - DNA, 434 bp, Glycine max
  unsure (1)..(434): unsure at all n locations
ctaagctanggaccttcatactntaaaacaacatgttgaatcagtgaagctaaagacattgatacaatccaacaacattataaaatttaaggagtttggacaagcttcaagcacaacacactttggtgcttgtccaggaactacaacaacaaatataatgatatcaaggtcaatttaacgctctatatttctgttatgctatcgaaaaaaaattattttctatcttgattttctatcagcataaaggaagatggattctgatactggcctttaaataaattccccaattatacctcaccagccctagtgcataacatggtcctcatgtacgcttctttatcactgtcatgggctaagtacatgttgctccacatgataaattctgtgtgaataagtatgacttatataaatgtctatcattaaaagagacaata

SEQ ID NO: 45140 - DNA, 492 bp, Glycine max
  unsure (1)..(492): unsure at all n locations
agcttcaagctgcatggtccaattccgttgatgaagctaatttgtggaaaggccaaagtggacctgagctaaaacagaaaattcaacaacaattcagaaacatcaggtattacttcaaactagtggaagtggacctagctctgcctagctaaatattatccattaataacttgcagggctttgttgtggcttaatctcttttaagcatgcatcattcttccaacaaatatgtagaanagacaattgattactaatgattcgtagtgatgcttacaaaaccattttttgtggaaggaatcaaagtatatataggttggattctatctaaaatcccgtcattgatattnttagtcctgcagtatgggttttcttttcatcttatggtggttggaatcttagtctcattngagttttccacatctaatctgaacataacttaagacaactaaatgaccactccttntactggctctncattatttatctactact

SEQ ID NO: 45141 - DNA, 487 bp, Glycine max
  unsure (1)..(487): unsure at all n locations
ttgaatgctctattcaatggagttgacaagaatatcttcagactgatcaacacttgcacagtggccaaagatgcatgggagatcctgaaaaccactcatgaaggaacctccaaagtgaagatgtccagattgcaactattggctacaaaattcgaaaatctgaagatgaaggaggaagagtgtattcatgacttccacatgaacattcttgaaattgccaatgcctgcactgccttgngagagaggataacagatgaaaagctggtgagaaagatcctcagatccttgcctaagagatttgacatgaaagtcactgcaatagaggaggcccaagaacattgcaacatgagagtggatgaactcattggttcccttcaaacctttgagctangactctcggatagggctgaaaagaagagcaagaatctggcgttcgtgtcanatgatgaaggagaagaaggtgagtatgaccttgatactgatgaag

SEQ ID NO: 45142 - DNA, 470 bp, Glycine max
  unsure (1)..(470): unsure at all n locations
ttntcagtttcagaattatctgagtacatatatatatatatatatatatatatatatatatatatatatatatatatatatatatatatatgtctacctgcacatccatctttgaggtttttttcacatagtttaatggaattatattatctttattattcacaccccttgtttacactaaactagaaataggccattttcaatttcttttgttgatggacacgcacacgctagtgtcattacaattaatgattaagaaattaaaatgcacaattacttaataagaaatataatatctattatatatactatattcaatgcgatacctcttattttttaattttataatagtacccacagagcatgtcatgataaatatataattatatatgtctntagcaaggtatctacacacgtacgcacacttcactattgattataacgcttctatattgacatatagagagcct

SEQ ID NO: 45143 - DNA, 448 bp, Glycine max
  unsure (1)..(448): unsure at all n locations
ctgcaatcttttctttggagacttgccgaagcactttgtctcccagactcaaaatgatggcactatgtgctntgtcgagcaagatcttcttgtctttacgttccatcttgacatcaagattggtttcaccattcagagcatcttcaagaccttgatgcacaaaaagagccctcatccttaatcgctaaagaccgaaatcagtttgtcctatgaatntcctgacttcatactttgcagatgccatggatgatcaatccacgctcactgcaccggtttgttatgcaaagtatcacataaatgatacacagaaatctcataagttatttatcaagatgagtttcagattaccagggagttttctagagagagttgannaagaatcatacacaaactaaacagtagttgagctatttatacttactttttacaaatggacaactcactaata

SEQ ID NO: 45144 - DNA, 444 bp, Glycine max
  unsure (1)..(444): unsure at all n locations
catgcaagcttgcctcanagaggtccaggaaggacaatgtctccgaaggaactagttccgctccggagtatgactgtcaccgctttaggagcgctgtacaccagcagcgcttcgaggccatcaagggatggtcgtttctccgggagcgacgcgtccagctcagggacgacgagtatactgatttccaggaggaaatagggcgccggcggtgggcatcactggttactcccatggccaagtttgatccagaaatagtccttgagttttatgccaatgcttggccaacagaggagggcgtgcgtgacatgagatcctgtgtaaggtgtcagtggatcccgtttgatgccgacgctatcggccaactcctaagatattcgttggtgttggaagagggccatgaatgtgagtatggccagaggaggaaccggtctgatgggttcgatg

SEQ ID NO: 45145 - DNA, 430 bp, Glycine max
accttgctaattcaattaggaattcccttcctaatattctagtgatcatcttgatgttgtgacttgtaatcttgaagtattgtcttgaattttaatcttgaaaagcccatttgcatcaattgcaacacatcatcatgatcatcatcaaaacatcaaagccaattgcatctacacatgtgtcctccaccttcgagattggagctatgtttcacgattgcctaagtgcggaccctcaaggcaatccgccattctccctttttttttcggagacccatgaatgttattgcctagcgctattcatgtgccctccaccttcgaggttggagctatgtttcatgattgcctaagtgcggaccctcaaggcaatcctccattctccccctttttggagccccatgaatgtcactgtctaacactgttcacgtgtcct

SEQ ID NO: 45146 - DNA, 457 bp, Glycine max
agcttcattgagaaaacttccttgagaagctaatgcttatctacacacacccctctcataactaagctcacctccttgaaaagtttccttaagaagattcctaaagaagctagagcttaactacacatacctctctaatagctaagctcacctccttgagatgagaagctagaacttagctacacaccccctataatagctaagctcacccccatgacaaaaaacatgagaatacaaaaaaaaagtccttactacaaagactactcaaaatgccccgaaatacaaggctaaaaccctatactactagaatggccaaaatacaaggcccaaatgaaggaaaaacctattctaatatttacaaagataagtaggctcatacttagcccatgggctcgaaatctaccctaaggctcatgagaaccctacggccttcccttggatttctagcccaatctac

SEQ ID NO: 45147 - DNA, 439 bp, Glycine max
  unsure (1)..(439): unsure at all n locations
tcatgatgttgaatcaagattcattcaaggagtcttgatgataacaaagatgatgacaaataccctaagagaatacaagagaatgatttcaagaacaagattcaagaatcaagagaagtttgatttcaagattcaagaaaagatgaattcaagattcaagaaaagaaatcaagaagacttcacaagggaagtattgaaaagatttttcaaaaaaaaaaaacatagcacaattntgtttttcaaaagagtttttctcataattttctaagttactagagtttttactctctggtaatccattaccagtttcctgtaatcgattaccagtggcaaagtttggtttcaaaagcttttaactgaatgtgcaacgttccaattgatttcacaatggtgtaattgattacaagatattggtaatcgattaccagtgtatctgaat

SEQ ID NO: 45148 - DNA, 439 bp, Glycine max
  unsure (1)..(439): unsure at all n locations
agcttggttcgaggtacttacccgttgaagatcgaagaacgatgacaaacgaatgaagaacgtcgaagaacggtcgaaaccttcgcgaaattcctcacggaaacgttacggaaacgtttcggaagcgcctcggcttggattttcttcacggaaacaatttttccaagcaaattcgaaagagagagaagtgcctaaggggctggaccctttttcacttcacttctccccctatttatagaanattgggggagaagcttgccacccagctcgcccaggcgagcagggttgcttcctccagaagcaacagccttctggaggaatcttctggagggcccaagtgggcctgggtgctatttgcgcccncatttttactaagtacacccnctgccttnnttttggtaattctttttcgaaagttacggaaacttacgaatttcgt

SEQ ID NO: 45149 - DNA, 393 bp, Glycine max
  unsure (1)..(393): unsure at all n locations
nggttacatactacaactaatttcttgataagtggtccattaagtaatatttcattcaaataaaactctnttgtttagtttaatcaaacaagatcttctcccattgccaaccccataagaaaagaaactcaaatcttgtactagctagaagccaaggatggtatgcaaagcaatgggtcctttntgcttcacatcttacagctatgtaatggggtcatgaagttagacttattcaatactaaccgatactagatatttagaaattagaattgagttcctttgttggtggggaaagcaatcgcgcgaagttcanaacaggtgtaagaaatggtttaaggctacagctcaattattgaaacaaaagtcactaattgtaattgagtccacctacca

SEQ ID NO: 45150 - DNA, 412 bp, Glycine max
  unsure (1)..(412): unsure at all n locations
agctntgagcacatacgaacgacaatatacttttactcgcatgtctggttgagtcccgtaatatatcaggacgcactctattgaatgttgaagctgagagcaaattcaaacgacaataactttttactcggatttctgattgagtcccgtaatatatcgagacgctcgaaatcgaatgttcaacctatgagccaattcatacgacagtaactgtttactcggatgtttgagtgagtcccgtattatatcgagacgctcgaagttgaatgttcaacctatgagccaattcacacgacaataactttttactcggatgtctgcatgagtcccgtagtatatcaagacgctcganattgaatgttgaacctatgagccaattcaaacgacaataactngttacttcgatgtctga

SEQ ID NO: 45151 - DNA, 358 bp, Glycine max
  unsure (1)..(358): unsure at all n locations
tanacattcaactgtgagcgactcgatatattacgggactcattctgacatccgagtaaaaagatattggcgtttgaatttgctcataggttcaacattcaatctcgagcgtgtcgatatattacgggactcaatctgacatacgagtgataagctattgtcgcttgaatgggctcatagggtcaacactcaatgtttagcgtctggatatgttacgggactcaatcagacatccgagcaaaaagttattgtcgcttgaatcggctcacaggttcaacattaaatttcgagagtctcgctatattaccggactctatacgacatgcgagacaaaagttattgtcgtttgaaaagctca

SEQ ID NO: 45152 - DNA, 487 bp, Glycine max
  unsure (1)..(487): unsure at all n locations
agctntgatagcagatgatatgatccttactaggagtggatcgcttgatacaggtcatagagtttggatgatgctacttccagagagggaagataagtcaggatagacaccacaagaattgccttgataagtctgagattggttcaacaagaaacccagagagaagctctctctaaattttataaaatgccaaaagtacttctattgaaaatgacacccatacatatagtgtatctgaatgaaaaaaatataaatagacaagggccttcaaataagtttgggccaaaattacaacgaaaaaattataaataaaaaatagaacatattttgcatgggccttcaaattagtttgggccttcaacaacaattaatattcttagtagtgcctctgcctttggaccttcatccttctccacttgagccgtgttaagtatgtctggtacccatttgttggagggtattcactgactgtttggtcctactcttg

SEQ ID NO: 45153 - DNA, 481 bp, Glycine max
  unsure (1)..(481): unsure at all n locations
tgtctcagcgtttgtgcgagacggagaccaacatgctagctatcatcgccaagtaccaagaagagttaggtctagccgcggcccacgagcataggattgcggacgaatatgcccaagtatacgcggaaaaagaggctagaggaagggtgatcgactctttacaccaagaggccaccatgtggatggatcggtttgctcttaccttgaacgggagtcaagaacttccctgattgttagccaaggccaaagcgatggcagacacctactccgcccccgaagagattcacgggcttctcggctattgtcaacatatgatagacttaatggcccacataattagaaatcgttaggaaacttgtatggtctctcagaccttgactagatatgacttcctttntgaaataaaatgagttggtcccatgtttctactccaaanaaacttgtgcanatcanatcactcctacgtntcatctctagcatg

SEQ ID NO: 45154 - DNA, 320 bp, Glycine max
gactcttgtaagttggcacttggatacatctttgtgatagttaacagagcaatatcttggagaagagctaaacaatcattagttgccacctcaactatggaagcagagcttgtctcattatttgaggcatcatctcaaagggtatttggttgaaacaattcattgttggtctacaaatagttgatttcatatatagaccattgaagatatattgtgataataaagctgctatttttctggctaaaaacagtaaaagtggaagcaaagcaagcatattgtggaaacaaaagaaatcattactcaacaataaattaatgatt

SEQ ID NO: 45155 - DNA, 439 bp, Glycine max
  unsure (1)..(439): unsure at all n locations
ttgcatgtctagtgattctagagagagaaaggtccaagttcccgagaantttgagagattntgttgtgtgaagatctgtagagaccagagcttgaagaggaagctgttctaagagcttgagatgagtttgtgagtggttgtgagatcctagaggtgaaggagaaatcctcaccacttgtatttttgcaatttttcatcttgtttttctctttgttgtaaaggaggcttcctggttatggaaagctaaaatcctctattggatcttccctataggtacttgatgtaaatatttttctatctatttaatgatgttttgtgtgttctctgtgctatcaacttttcattctagtatgcctttaccttgatcacgtagatgcatgctttgttagggtcattcagcagtggaaactggtctgattctgatgaccttgataggaca

SEQ ID NO: 45156 - DNA, 473 bp, Glycine max
agctttacaaatgggtaaaaggctcacattcactttcttctacatcatattcaaacttgtccaaataaataataaagtcatctcgactcaaagaaagtcatataagtctcatacaattaatatagaacctatatcctaatgtcacatcctatcagagcgtggtgttcccgtgtcctctagcatgaggttcttcatagtcatccacctattcatctgctcccccgaacacaaagttcaaatcattacaggatcgaaacacaaacagcaaaccgggagtgagttatcacattgctaactactagagagaaacaacacaacatatagtaaccaaatacaatttacttagcatatctcacattatttcatcactgtgtcattcatcaatcacactcttcatccattaatcacacctttcaatcatcaatcattatacacaggaatcacacactccgatcaagacataataacacatc

SEQ ID NO: 45157 - DNA, 479 bp, Glycine max
tctataagtcagaggttgataatgttactgcacaaacctttgacaaaaagttggctaacatagcaccttgtggtgacaaagaggctgttgtcgaatcaagtgacaatgttatccactctgtcaaactccatcctacctatgggtttatatgggagagggaggaaattgatgctgttccctctgaagatggagtcattccaccaactgggtggaatatatatgaggattaatatgactgaggccactgcatgggccagaattacggcttatatggccgaaaatagactaaatacggcctttgaggctgaatctcaacaaaatatggcagttgaagccaagatcgaagatcatgaaaacaaagaaacaaaggatcgaagactggattgtatttatgatgatgagccgctgcgttttgagaaaaatcccataagtgaggtgccaaagatgcacgctcaagatcctctggaggaaatcgacat

SEQ ID NO: 45158 - DNA, 380 bp, Glycine max
  unsure (1)..(380): unsure at all n locations
agcttacacagcaactactagcggtaagtccttctcactcttctgttatgcaggtagggggatgtcacatatgtggaggaacacatgagtcaggtctatgcatggcccaagacgacacatccaatgaagttaactacatgggcaatcataatcatcaaggattccatcaaagaggaccaccaggattctatcagagcgataatcttttgcaagaccatgattggagatattatccaagtaataacttcaaccaagggggttcaccctatcagcatccttgccatgggccgagtcatctagagaagcccactaacatagaagacttgtaatacagntcatgcaggacacaaggtcacatatgaaaaggactgatgcaacaa

SEQ ID NO: 45159 - DNA, 412 bp, Glycine max
  unsure (1)..(412): unsure at all n locations
tgcaccacaagtttctaaatctggtgtttttttttgtacaaaatagagtatctcaccaatcaactaagtccactaatatatacaataattactcagaaggaagggatggaccttgattaagctcatctaatctacccaattaaactaaatacataaagcaaagcccaaattcgcaacccaattatttaagtgtagaggttatgaattccaagctcaatttgacccttgaaatggtagaattggcccaagcttatttgtgacaaaattgaagatctttttcttagctttccaaggactactaagatgatccatttggaattctgtagtgtcccataggctctacacaaggaaaatangtcaagcaagcacaaaatccgaaaataagcaacaattatcaattacgtccaattat

SEQ ID NO: 45160 - DNA, 409 bp, Glycine max
  unsure (1)..(409): unsure at all n locations
agcttgagagcctatgcaatatagagacgtaatattgcaagggagcaccaaanacctcagcttttaagaggattctaggttttagagtgatttttacgttcttagaggtggaggagacatccataccactgtgtaatctgaattttgcttcaaaaaccttctattgtaactgaaaggtgataacttgccatggaaggctaaatcttttgttgggaatttctactgagccttgatgtaaatattctttactatctatttaatattgttgtgatgtgttcattgcttctatctgcacttaattcttgcatgctcttggttagatcatccatttgtgtgcanagctaggatttttagcattgggaaatgttttgatccttataactggatagagtatggctagataactgta

SEQ ID NO: 45161 - DNA, 409 bp, Glycine max
  unsure (1)..(409): unsure at all n locations
nttaaaagatatttactctgtggtaatcgattactagtgactgtaatcgattaccaatggccaaaatgcttattagaatgctctaaaatgtttaatattttttaaagtttgtaattgattacacaaggcttgtaatcgattatcagaagttnttgaacattttaaaacaacttttagaaatttgaatttaaatttcaaagcctgtaatcgattacagagtgtatgtaatcgattattagagttaatattcaaatttcaaatgtgaaaagtcacaactcttcagaatacaactgtgtaatcgattacatcattctggtaatcgattaccagtgaggaattttctaaaataattcctaacagtgattttgaatggccatcaatacatangtgacttgggacacaaattttc

SEQ ID NO: 45162 - DNA, 433 bp, Glycine max
  unsure (1)..(433): unsure at all n locations
agctntgtccataactcatacacattggtataagttgatacatgctcgaacaggctttggtcaatatatttatgaatcatagcaacaagctnttaactaaggagctcctattagttgcccttcttcccctttggcttattcttgggggtgattggctcgtgcaaatccttgcagtatagatggtcttccatcattagcttccaataggaataattntctacggttagcttgaacatgtttccatcatgagtaacaattccctccatcttgaatcacacaagataatagctcccctcgaaccaggcgagctctgataccactgttgggaaacaccgacactatttccctttctgtagactcaaaataggcacttagcgganacgaaaagaaaacaagaataaagagtagaagaatgacaccaagaaattttaac

SEQ ID NO: 45163 - DNA, 435 bp, Glycine max
  unsure (1)..(435): unsure at all n locations
tctagagcaagtagttagaattgatagttatcatgaagtgacagctggcagaaccattctgagatagtccataagaggttctcattttaaggaacctttctgatgagcattatgaagtgtgaacaaaataaccattntgatgtttgctaagaaagcatccatacatgatagatnttgttgatgaagatcaaactaatattccattttgaagtagcacaacttcattaaacttaacacttcttcacaactctaagcattctgaagtagactgcttcataaatattaagttaaggttcaaatgttggtgtgttagtgttttgtccatggtcgaactgtgtagtgtcttaagtcttctattttgatgcttgtcatggacgaaatcatcttgttacaaaattgtatcttcttatgcaggtaggccttactttatgatgt

SEQ ID NO: 45164 - DNA, 467 bp, Glycine max
  unsure (1)..(467): unsure at all n locations
agaggatacttcaatggaggataagatagatgtagagaaagagagagggggggagcacgaaattgaaagaagaaaaagggagagaagttgaactttgagttgtgtctcacaagactctcattcatcaaagttacaacaagcgttacacatgcttctatttatagactatgtagcttccttgagaagctttcttgaaaaaacttccttgagaagcttctttgagacaacttccttgagaagctagagcttagttacactcacccctctgataactaagctcacctccttgagaagcttccttaagaagattcctatagaagcttgagcttagctacacatacctctctaatagctaagctcacctccttgagatgagaagctagagcttagctacacacccnctagtatagctgagctcacccacatgacaaaaacattgaataccctaattacgtccgggacctttg

SEQ ID NO: 45165 - DNA, 422 bp, Glycine max
  unsure (1)..(422): unsure at all n locations
acgacaataactntatacaaggatttccgattgagtcccgtaatatatcgagacgctccacattgaaaatggaaactcgtagcaaatttgaacgacaataactntttactcggatgtccgattcagccctgtcatatatcgagatggtccagattgaaaacgcatgcttgtacaaaattcaaaatacaataacttttcactcggatgtccgattgagtcccgtaatatatcgagatgctccaaattcaaaacggtagctcgtagcaaattcaaacgacaataactttttacttggatgtgcgattgagtcccgttatcgagacactcgaaattgaaaacggatgttcatagcagattcatatgacaataactttatactcggatgtgctattgagtcgtcgcctatatagagatgctcccaa

SEQ ID NO: 45166 - DNA, 398 bp, Glycine max
agcttctctcaacttaaagctctatttcgattcttagctataaacattcttatcaacgaggggggagaacccaaacatgctgacagaagcatgtaaccataaaaatacacttttccttttaattgtagttagcgtatagaagcgaaatgcttgaatactggcgagataaatatacctgaagagcaagtccccagttattgagcgcctgtaatagattccatgagtcaccaacaagggctcaatatgcaatgaccatgcttgtgaagaatatcataagtgttcgatcagacagtgtacagagtaaaaccaatatttatctaatgaaacatgaaaggtctgttcataatcatgttcccacattataatacaatgctagacaaacttttacaaattaattg

SEQ ID NO: 45167 - DNA, 353 bp, Glycine max
aactcaataataaggattatcttgaagcttattaatatgatttttccaagaactaatagaggaaaagagaaaagcattgattacaagttctcttgagtcatttggcgaagagacccattatgtttcaattgtataaccttcgcttgctatgttgggaccgaactgacatcattggacactttctttatccccccacttaaaatcatattatagtgttgattaacacttattatattcgattgtaatagaatcaactgggtttctctagttttttcttacgctatccttgcaatttggaaatatttgtgagacgtgtctaaaaaccaattaacccctttttttagttactatcg

SEQ ID NO: 45168 - DNA, 472 bp, Glycine max
  unsure (1)..(472): unsure at all n locations
catgcaagcttcttcacatagaccgcctttgctcgaccttctttatgactaaaaacagacacattatgcataagcaaaagatcaagaggagttagtggattaaaaccataaacaacttcaataggagaacaattagtggtgccatgaacagttctatggtaagctaattcaacatggggtaaacaagcttcccaagtttttaagttatacctcaaaactggcctaagcatagttcccaaagtcctattaacaacttccgttagccatcggtttgcgggtgacaagtggttgaaaataacaatatagtgcccaacttgctccacaaagtcctccataaatgcaaatcatcatgcctaggtataggatgcctatatttaatggtgatgttataagggctctacaatcagaacacatgcgccatgtcccattcttnttagggaccaaatcactgggacagcacatggactcatac

SEQ ID NO: 45169 - DNA, 599 bp, Glycine max
  unsure (1)..(599): unsure at all n locations
actatttctctctcactctcatttcgtcggtnattatntttgttagatcactcgtttntatactaantcnnnccaggagagngatgatgctaccattgngcgacacttagaatacccaagcttgctcttaatcaacattgacgcttgcattaatgggaggaagctacttctcttttctgcttcaacagtaaccacccactggtaatactaacttttcgaatgcttgccttcccatgaatggtcccgatgaaactcgcctcaaagacgtccatgtaagacaatgcgcgcgaatgaactatatcccccccgtattccgacagtcaccgctttatgagcgtgtacaccaacagcgcttctaagccatcaatggatggtcgtttcttcaggagcgacgcgtccagctcatggacgacgagtattctgattaccatgatgaaatatggcgccggcggtgggcaccactggatactcccatggcctacgctgatccagaaaaatccttgacttaatgccaatgcttggtcaacaaggatggcgtgcgtaacatgagatcttgagtacggagcagtgaatcacgtcgatgcgatcctatagtctcg

SEQ ID NO: 45170 - DNA, 465 bp, Glycine max
  unsure (1)..(465): unsure at all n locations
agctcttttatacgacaccttgtatgcaaattcactgttaatcctctcttgaatcaaagaaacttttattgatggatcttctctaatcatgcctgtcaataacataacaaaatttaaatgacaattaacaaaaaattaacataatatgaacataaaatacgtacctactacacaggtggcaattaaatctgaatcaagtttctcgtgatcttgtgtcatggtcatattcagacatgtgtgtggtccaccccattgtgtgactctccacgtatctgttnttntagataaaattacccacatatagaaagggcaaggacactctgcacttttattcaagcaacaaaccacatacttgttcgatttgctttcaacaactntgaaactttgatgcaccnttcataacatattgttgactgcagttttgaccgcatctttactatcatatttcatgccaacatataattc

SEQ ID NO: 45171 - DNA, 426 bp, Glycine max
  unsure (1)..(426): unsure at all n locations
cgtggagggtgactntgctggaactggaccatntctatgtaagtggaaattntatcttttattttaaagaacaaatttgctcatgatgctcttttgatgttttagtatgatgcttgtgataattactatttactagctatagtgcttagttaacaatgaacataatttacggtgtacatattcagctcaatgcattgagcttttctcaagtgcagacaacctgatttgcatcaatgaattaaatattactagtttaggcatcatggagattcctatttgcttaggtggctctatttcatccactggctccactttatatgtgctcatgttttcctgcttttacaagatccaatgtctcttggattccaatatatatgtcttaacttcttagtcatatatagtttctgatacaacatttaattcact

SEQ ID NO: 45172 - DNA, 399 bp, Glycine max
  unsure (1)..(399): unsure at all n locations
agcttattaaatataacagactaatttaatttttataaaaaatacttcaagataaatctttattccaacctaacaaaataacttacaaaaaatatgtgatactacagaaatttcaaaaaccacctaacaaaataacttacaaaaaaatattgatatcacaagaaatnttcaaacccacgaaagcaaaaacgaaggcaattgttgcaagtgaaaacagctgataaatatggtgaaggaggaggtgtatttaaacaccctaaaacgccaaccccatttacgcttccatgctactgcctcgctgctcctgcctgccaaagctgctcctggtctcctgccaaaactgatgtccttgctgcaaaggtaacacgccatgttgactggcgccttgggtatccatgc

SEQ ID NO: 45173 - DNA, 461 bp, Glycine max
  unsure (1)..(461): unsure at all n locations
tcttgaaatataagatatgagataagttttaatttttataaagataaagatatatgaaattattctaaacaatcattatatttctttgaaaaggacccaatccatatctctttaatattataaatagaaacatctacttgaggtaaagtacatcagacacaacctaggaaaagttttaacctaattttagacctgaaaagtagaaaagagttttctctttagagagtttcactcatcaaagagctgataacagtgattggtctcgatatgaatatacgtagagtcttcacactattgaagaataattttattttgttgcatcaagaacgcacatttgggtatacaaatctattcttctctatttattattgtctgatattctgaatgcaagatagatcctaattntttcgctgcaagtgttgtgaacacttttatgtaactatcaagtgcaataggggagt

SEQ ID NO: 45174 - DNA, 485 bp, Glycine max
  unsure (1)..(485): unsure at all n locations
agcttctatagaaggttngttcctaatttctctacaattgcctcacctctcaatgagctggtaaagaagcatgtggcatttacctgnggtgaaaaacaagagcaatcctttgctttgctcaaagaaaagctaactaaggcacctgttctagctcttcctgacttttctaaaactntttagctagaatgtgatgcctccagagtgggagttggagctgttttgttacaaggtgggcactctattgcttattttagtgaaaaacttcatggtgccacccttaactacccctcctatgataaagagttttatgccttaataagagcactctgaacttgggaacattaccttgtatcctaagaatttttcattcatagtgatcatcaatcacttaagttcattagagggcaaagcaagttaaacaaaaggcatgcaanatgggtagagtacctagagcaatttcatatgttataaatacaaaagggaaa

SEQ ID NO: 45175 - DNA, 463 bp, Glycine max
  unsure (1)..(463): unsure at all n locations
tgtagaatggctagacatgatacatgtcagggtttggtttggttcaaggataaaagggatgccccacattatttccatgacacaaatgcaaaaatgatgatttggaaattttatgcaaaactggtcatgcatgcacctatgtggacgctcaagtgtcaaatttttatggtcatgtgatgctagggctcaagattcatttcctctattttaaatcaacccaatgtttccaaaatatgttcttttatcaatttgtgcattcatcctagtccatttcgggcgtccggngaaatttcacagcattcacccttcaggtgtagacacatntttcaaaaattggttatgatcaatgaatntttttcaaagaaaagttggaaatcatctcttttanaagcatgtcggttttagctagacaactattttctctttcacctttttcttactgttttttttctattgcctcttt

SEQ ID NO: 45176 - DNA, 406 bp, Glycine max
  unsure (1)..(406): unsure at all n locations
agcnttgagtaccttcatacaacaataactntntactcggatgtctgattgacacctgtaatatatccagacgctcgaaattgaataccgaagctctgagcaaattcaaacgacaataagtntctactcgtatgttcgattgactctggtaatatatcgaaacgctcgaaattgaagaccgaaggtctgagcaaattcaaacagcaataactttttactcggatgtttgattgagtcccgtagtatatcgagacgctcggacttgaatgccgaagctctgcgcacattcaaacgacaataacttttttcctcggatgtctgattgagtcccgtaatatatcgagacgctcggacttgaatgccttagctctgagcaaatccaaatgacaataacattttactcgga

SEQ ID NO: 45177 - DNA, 419 bp, Glycine max
  unsure (1)..(419): unsure at all n locations
tattacggacactataaaactcagcttcacattcataccgagcgtctcgatatactacgggactcaatcagacatccgagtaaaaagttattgtcgtttgaatttgctcagagcttcggcattcaagtccgagcgtctcaatatattacgggtctcaatcagacaaccgagtaaaaagttattgtcgtttgaatttgcttagagcttcggtattcaatttcgagagtttcgatatattacgggattgaatcagacattcgagtaaaaagttattgtcgtttgaatttgcacagaacttcggtattccattntgagcaactcgatatattacggtactcaatctgacatccgagtaacaaggtattgtcgtctgtaattgctcagagacttgataatcaatttcgagcgtctcgatatgt

SEQ ID NO: 45178 - DNA, 462 bp, Glycine max
agcttaagcgtttctattgatccatcaatagacataatcttgtcaggaatccttgccataaaattacatagacctgccaattctaaatataaaatgtaataaatccaaaaccatgcaaatgatgtaaagaatgattgtcaatttataatagaaaattatgctgacaaaaaatagaacagcaacacagactcaaatgacacatgcaataacatgttcatcaatgacaaaataccataaaaactatgatactattcgttgaactactaagccaatacatgcaacaacctgaacaaaaaaaaaaccaaatcggcaaatagcagagaagcagaaacaaatattatatctctgagcatataatattgcaaccatcaacaaacaaatagaatggccgaaaacaaacacaacaaagttcagcttttggaaaacagaataccaactcatccttaaaccacatatgcaata

SEQ ID NO: 45179 - DNA, 456 bp, Glycine max
  unsure (1)..(456): unsure at all n locations
tcttcaagccggagctaatgtaaaggtttcaatttcattgctctattaacataataatataaatgaaatttggaaaacttgttttaaattgattcaattcattntttctttcttcttcttcggattagcataagggtcctcttctcttctatcttgatttttattatggatcttggccttttctttttccatttttttatttcctagacaagtttatggtcaattcaaataattaaattgtggatcttgtatcatgcatgtgctacaatgcactagtatgttcatttattcattcattaatttattattattattattattattattattattattattaattgcanatccttgtcagttttgcttgtaaattgtaatatatggtgatgtgttttgaaaacttcctcatcgatatttactacatgttttgaaaattgttgcattcatataataatg

SEQ ID NO: 45180 - DNA, 455 bp, Glycine max
  unsure (1)..(455): unsure at all n locations
atattgtcatcttataagagtctagttctcataactttctacgatagacaatataaccacctctcataatttaattcggtatgatatttctccaaacacatacttcaatccattctatccaaccagactgcattgttaataaaatttctcttattagagaaaacaaaggataaaaaatttgtatcctgcactgcctgctccaacaaacaggggaggagggatgacgtaaaaaatcactaagaacgttaggggaagatgaacaactaactacaagtgacggtgcccgcttataatggagagtgaggaattacacatgaaaagatgagtgatacgagacgattcctctcactaagaaagcttcattttgaacaagataattgttgccctgtagagagatacatacaatctctggtttttggaaaataaatctaacacactttcatcggatgaatggn

SEQ ID NO: 45181 - DNA, 366 bp, Glycine max
tatatctgatcgccatagtgatacattcaaaaaagatatcctgtgcatcttcccgatcaaagtatcgcccatcaccatccaacaccaacaagccattcttcgaatcctcgggaggcaatgaattatacagggcctacagatgcacagaattctcacttacaaagcaaatgcataattcatgcaatcatacattgcatggaaatctacaaacctgtatccaatttgcgagagaaaagacttgcataaacactttcacctgcaaaacaaatatgcctataattaattatatggaaaatactactctcacacttccaacatggagctacacccgtcaatacttccttataactgtgtccaatgtgttac

SEQ ID NO: 45182 - DNA, 474 bp, Glycine max
  unsure (1)..(474): unsure at all n locations
agcttagggagaagacagtgagcgtgtatgttgcaagagggagataaatgaagaaaaaaaaaactttataaaattgaagtcaagctgggccaacgtgatttataggaacaaataagaagccatttcaattataccacataggaaatgaaggaaaaggaaatgataaaatataggcaaaacttttgagcccaaaatggtccaactgagtaaaaaaaatagcttgaagttcaatagagtaaaaacaaaaatgaaactttaaattaatattgacccaataaagaaacaagtgtaagaagaaataaaatattattagggcaaaatattgactcagtgtgttttctttttttttgtggaactcaatgtgattngattatatgctgagaaggagagaataaaatataaaagtcaaataaaaataatgaaggcagataagatttgtgtatatatattatctaacaattggaaaagtaatta

SEQ ID NO: 45183 - DNA, 389 bp, Glycine max
tgacactgacagggaaggaggtgataccatgcttaaagtggcatactacaaagatgaatatatgagctgccactgccactgccacagattgtggggactatcacagtctcaccaattggccccaccatgttgttcaaccttagcttatcgccatgtgtgggaaggacactaacccagctggttcttttgcccaataggtaattaagtcttccctctcttctttcactcctactcctactattcccattgcttctaatgtgttatgttatccaaatcaatgcttatactgttatacattatactcttgctttaccggtatcgatcggaaagaagaaaataaataaacaaagatgtactcctctaccattaacattacaaatattttcatc

SEQ ID NO: 45184 - DNA, 388 bp, Glycine max
tgtaaggttaaagtctcacgattgtcacgtgttgatgcaacaatggttagtcgtggctatacgagacatcttgccaaacaaagtcaagttagccataactcgcctgtgctttttcttccatgccatatgtagcaaagtcgttgatcctgtcaagtttgatgagttggaaaatgagaccgcaattatactatgccagttggagatgtattttccccctgctttctttgacatcatgattcacttgattgtgcatctggtcagagaaatcaaatgttgtggtcctgtttatttgcggtggatgtacccggttgagcgatacatgaagatcttaaaagggtatacaaagaatctatatcatccacaagcatctattgttgagaggtacatt

SEQ ID NO: 45185 - DNA, 472 bp, Glycine max
  unsure (1)..(472): unsure at all n locations
cgtaccggatcttaagtcaccgcggctgcagcttaggtccgaggtgcattacagtttgtaatcatgtgtttntgtactgatgctcttganaactgttggcaatctaattacatgtccgaggaacattacagtttggcagaagtgtggtttgtggtctcgtatcaatccgttgctgcttaatattgaatcttttaaagagttggtgtgtatcttatgttgctcactcaatgaagatcaatctactttgtttgttatgactatgtggaaccttcggaggagtagaaatgagattctttggaattcaagtgatgatcaagatattggagttntgaatagagctagattggttcttgcagattggaagttgtctcaggctgtcaccaaagttggcaattaagaatgagcaactagaattatgtgagatggagaaagccttctactggtcaactaaaatgcaatacagatgcaacat

SEQ ID NO: 45186 - DNA, 441 bp, Glycine max
  unsure (1)..(441): unsure at all n locations
ntgtccgcanatccctcatgtaagactaggcctaaactaaacagcattattgtaacagcataattaaaaccaaaacttaactcgcagatccctcatgtaaggctaagtttcaatcctgcttcaatcaagttctaaggcaacagtacatttctcgatgctaaagtcacctaactgtgcacacaaatgggtgatcagaccaaaaacatacaaatattaagcattgaaggaagcattgaacataaaaacataatcaattagatattaggtatttacatcagttgttcattagaaatccccaactagggtgtttagccagccactacaaagaaaccctaacaataaatgagattaaaagcagagaatgatagttccttccacaagaaagaggattcctcctccttttctagcatctcacactcactctctactcaataatctctc

SEQ ID NO: 45187 - DNA, 448 bp, Glycine max
  unsure (1)..(448): unsure at all n locations
agcttctaaggatgtaatgtgttaaaagagatgtataaaggaagaaacaaaggtagcatctcaaccaaaccaaggagaagaagaaaaaaacacaaaaaaagaagacaatattataggtgacttttgtgtcttaaattttgtgtcatgttaatagcgtgtagtaagcaagtgtttcttgagggcgagccctggtgcagcgataaagttgtgccttggtgacttgttggtcatgtgttcgaatctgaanacagcctctgggtaatggggtacgaagttttttttttttttattttatgatccttcttccgtcttgagtggttttcagcaagttgtgaataaaactatgcaactttattagtatctattatagtcccgaaatctatggcataattattaagtttaaggtttctctccccacttctttttggatattgctatttatacttat

SEQ ID NO: 45188 - DNA, 477 bp, Glycine max
  unsure (1)..(477): unsure at all n locations
tcccgcatccgcactnggaaggatctgattactgccttcctgaggcagtaccagtacaactctgacatggctccagaccgaacccagctgcaaaacatgggtaagtgagaacactagtctttcaaagaatacacgcagtgttggagagacctagcagcacaagtagcccctcccatggtcgagagaaagatggttacaatgatggtggataccttgccggtattctaccacgagaaattagtgggctacatgccctccaactttgcggacttggtattcgccaaagaaaggatcgaggtgggcttgaagagaggaaagttcaattacgtctcccccacaggtaccagcggtaggaggaccaaaacagctgggcacagaggaagaagggagatgcccatgccgtcacttcaacgcctgcgtgggccaagccgccgcaaatcttccatggtacccaccaatatgcgcaacatcacccga

SEQ ID NO: 45189 - DNA, 90 bp, Glycine max
  unsure (1)..(90): unsure at all n locations
agctntggctctcaagaagagatcaaccaaaggatggagtattaaatatggatctcatatgatccataattccaagtctgatgtgggagg

SEQ ID NO: 45190 - DNA, 466 bp, Glycine max
  unsure (1)..(466): unsure at all n locations
ngagataattagatactgggttgcttgagatgttgtggagttctcttaagtcttaagtcaccgcttagttctcttatgtcttaagtcacagtttttcttttttctttctttggcataaacatcacactcacacgagtgtactaatagtttatttctatctgaattgcttctttatataatcgtttagagcctctcaccgtcaccggggttttgcagattttacacctttagataaacgttggatcacttttgactntagtaaaagtaactcttgcaggtaaaattgaaatggttatattaagctttattagttgtcactaaagttattaaattcaagtcaattcaatntaatattttntaaataaaattaagataattcacatcaagtttattataaatactaaacttccattaaaagacacaacanacggcgacggataaatacagggtattttactaatctata

SEQ ID NO: 45191 - DNA, 365 bp, Glycine max
  unsure (1)..(365): unsure at all n locations
ggatccttaagcacctgcngctgcaagctgacaacgtcgtgaattttgtagtacattgtatcaactagaggctgntaaacaatccaatccagaaattagtgtgtcagtgagtgtagaataagagacagcgagaagagagaaagaggaaggatgtggaattactgtgctgccccagcggtcttgaggatcgacgtcggcgcctcgtctgagcagcaagccaactacgtcggtgcggccctggcatgcggcgacttggagcgcggtgcggccgtcaatgtcagtgaaattgacgtcactcccggcgtccaagagctccttaataccgtccgagtcgccttcgttggccaaatacattaaccggaccg

SEQ ID NO: 45192 - DNA, 444 bp, Glycine max
ttggaagagggtaagaagagtagaagacaagattaatgatgttaaataaggagacaatgagctgccctgtgattgattagagggaaagaattggccaattccctctcattttcactaatttttcagggggaggggggtgggaatatcaattatagggttcttcaaaaccgggtcctgcatgacccataccactttggtgtgtggccgcttgcaccaaaatcacatgattcatgtgcaacctacaattcctatgtgattcctgctattcgtggggtgattcaagcaccaaaatgattcactcaaggatttgagtcaccaactgctcgaattgaattgtatgtcttcgtatcgcgaattgtatgatactgataaccgtcctatgaaatataatatatcttgcacagaacccatagatataatggaacttaatatttaccttttcat

SEQ ID NO: 45193 - DNA, 286 bp, Glycine max
ctgaggagtgtcatttctggtattgttgatgaaaggcaatcagccttcataaaggatagacatatccttcatggaattctctgcaaaggaatttcatgtggggggggggagcatgatgaaaaaaagatcccttgggtcaaatgggatgaaatatgtcttcacaacaaggaagggaatcaagaatctttctaagtttaatgcagctctcatgggaagatggatttgggatttatactataaacagaattagttcttgctcacggttctaaattccaagtatggagga

SEQ ID NO: 45194 - DNA, 426 bp, Glycine max
  unsure (1)..(426): unsure at all n locations
ctcagcttctcagggaagtttacaagaaagcttctcaaggaagctacctagtctataaatagaagcaagtgtaacacttgttgtaacttggatgaatgagagtcttgtgagatatacttcaaagttccacttctctccctcttttattccttcaatttcgtgctcctccctctttcttttcctccattgaagcatccttccaagcttcttatccaagactcatcttggtggtgaagcttcttcttccatggcatattccctagtggatggcgcctcctctcacctcttctcctttgtcttccgctacatctccatggtggaaaatcaccattaaaggacctcattgaagctcanagatccagcctccatagaagccccacaagcaagcttccatcaagtggtaattagagcacaagagcttcaagt

SEQ ID NO: 45195 - DNA, 417 bp, Glycine max
  unsure (1)..(417): unsure at all n locations
agcttgtgtctttttatatgcctaacttatcctatggactctaagcaaacgagcacggacccataggggaacgcgcgattttctactttgaaaagggggggggggtatgcacagggttagctcgcctgggcaaggttagctcgcctgggcgagcaccccctacacgagaaaggttaaaaggagagggaaggggtgagtttttcaccaaaaacttcttcctctcatccaaaaaacgtaagctcacgggatccctcagatttctagccttaggtcaccattntctcagcgtttttgattccattctgcattgttattcatccccaacaagagatggctccgaagaagctctccacaaagaggtccaggagggacgcccaagtggaaagctccagtgcccccatggagttcgacagtcac

SEQ ID NO: 45196 - DNA, 436 bp, Glycine max
  unsure (1)..(436): unsure at all n locations
tccatcaagtggtaatcaaagcacaagagcttcaagtttgtgctccttaaacctccattaattgttttcgctctaccttctcttccattgatgtttcttcatttttctccatgtatctcctcacatgtcttgtgataaatattgttaacatgattctttagagtttccaccgattaaacttggtatagaagctagatttgattttctatggttcaaatttcttgttcttgttcttgaaccatgaattgtgtagagtttacgttcctttgatttttgtcttgttattttttgtggctgaaacctataccataaaattcttacaaaaatattaaagtataagacaacctcaaaaatatagagtgacttgttcacctattgtagttntatcatagaagtcatgtctagtcatgaaacttgtcacataagaattcttatg

SEQ ID NO: 45197 - DNA, 325 bp, Glycine max
  unsure (1)..(325): unsure at all n locations
agcttgaatcggacatccgtgtgaatagttatgacgatttgaatttctcaagatcttccgttgntcaatttcgagcttctcgacatattatgcacccgaatcagatatccttgtgaaaagatatgactatttgaatttgccgagagcttccgatgtttaatttcgagcgtatcgatatattactagcttgaatcggacatccgtgtgaaaatttatgaccatttgaatttctacgagcttccgttgtcaaattccagcttctcgatatgtgatttgcctgaatcggacatccgcgcgaatagttatacccgttgaaattctcaag

SEQ ID NO: 45198 - DNA, 429 bp, Glycine max
  unsure (1)..(429): unsure at all n locations
tctatataagctgaacgcatttatcaataaacacaagttgagttntattcagaanattagagtttatctcttttatcttagtgagagtgattctcctaaattcttgagtgattcaagaacaccttggctgtatcaaaggactttcacaacctttgtgtgttgccctcgctggaaagagtgattctttccttcctttcatcatcacccttgttctttcaaaccacaattccagaaaatccacctctgcccagaattatctcgtggccataactcccantttacgcactcaaattaagttattcttgagcctaaattgaatatcaaaacgagacctttcacctcgttttggaatcaccttatttggagccctgtagcttcagttattgccatttctatatttctgtccagccaccacttaacctacgtttt

SEQ ID NO: 45199 - DNA, 414 bp, Glycine max
  unsure (1)..(414): unsure at all n locations
nagcttancatcagacagagcttgaagtttctgctcccttgactttgcagcctgctcaacctttctcttgtacacatccaagcactcctgttctaactgaagaagcatcttgtctcgttgctcatcgctctcaccaacctcatcccatatttcctacagtgtataaagataatgtaattatctaatcccattattctgtagagcattctcatcttaagtgacaaagatgaatagctgaatgtagttagttacctgaagctttcttaacaaggaaccacatgtgttttctccaagaagaggattctgagcttcggtcactgccattgaagtcccagcgacacttaccctgcacctccaaaaacaaaaatgacatgaaaattttctctccttccaccaaacgaatagagaaacatc

SEQ ID NO: 45200 - DNA, 462 bp, Glycine max
  unsure (1)..(462): unsure at all n locations
taccatttaatctaatttgatcttatcctaataaatatgttaattttgatctgatcttatcctttttatttatttattntatttttacatcccaataaattgttaaaagcttaatattaataattaatattgataataaaatctttccagcatcgaatgaacagatatcctgagctttggagacctggctcctgccatgtcatggcagttcccctcgattctgcttatggcaccaccaaaattaaagtagtgggccaaaagtcaggcctggctactcaaattcaaagagaccatgaaaaccatatccatttattctcattttattatctnttttagaaataaaatctgctcagagaatcatacacttcagatgggttaaactgtgacagaaagaaagaaaggtntacacttttactgaagattacctacttaaccttttcctatctttgtaaatggagataa

SEQ ID NO: 45201 - DNA, 399 bp, Glycine max
agctattcaacagtcccgctgcccttctaataattaaaaaaccacacttaacagaatattttcaattaaaagagttgtgtcaaaactgagaaattccaatcaaatcaaatctcaaacaaactcggaggtatttttcattgataaaatatttattatggcattttgactttctcatatgaaatacatgaaatgaaaaccagccagcaagagcaattaattcattatatgaagagaatttcaatgcaaatgataaatctttcaggattttagaataaaagaacatgccagaaatacaattaaaccacagaataaatcaaacctcaactcccgcatcatgctttcgtttcttcccttttgacactgcacagagattgatgcgtaaacttattagacatacaa

SEQ ID NO: 45202 - DNA, 254 bp, Glycine max
ctccttcgcaaacgtgcacggatccactaatgacctcttattacgaacgaagctttactctatcacgtcttggctacaacaagcattctctatatcacttctggcttatccttaatactccgctaagattatgaacacccacgctttctttgatcactgtcactccgggctttccgaacaacaatttgaattaatacgaacacttaagctcacatacagatagataactgtgctaagcaaatgatgaactttct

SEQ ID NO: 45203 - DNA, 461 bp, Glycine max
agcttctaggttagtgtatcagatgactgctgtctcggccaaaatatcttgaaagaaatgcatcaacaacttctcatccctggaatatgcacccatctttcgatagtacatttttaggtgattcttacggcaagtcgtccctttgtacctatcgaaatcaggtaccttgaactttggagggatgacgacgtccggcaccaatcaaaggtcggtcatgtccgcaaatggataatcgctgaatccttcgacagccctcaacctctcttcgatgagatcgagtttcccctttccttctgctgccaggggtggccctcccacagacagaaatattggctggcgtggttggcttcgagggtctcccgtgatggtgggttgaggtaatgcatcggacgctggcccctcatcgggagacggagagtatgagtcgatgtctccctgagcatgctctcaatgatcctcgt

SEQ ID NO: 45204 - DNA, 370 bp, Glycine max
actgtatacaactccaaataatgaacaattgtcaagcatatcaagcatacacattttctgtagttgatctggacgtgtatttggatgattatctttatcacattctcttgctcatttatttttcgttttcgtattctttttcattagttcatctagatgtctattttatccagctaatatttcatcacaaaactcatagtattcatgccctggcggagttaagatcacagtgtgtcctaactgacaacaaccacaatttcagcctagaaatatagagtaatgtttatgttgtttaatgcttgtataattacaatttgcgatagcttatgctcaatcgtcttgataacacacttctgataagctagactta

SEQ ID NO: 45205 - DNA, 425 bp, Glycine max
  unsure (1)..(425): unsure at all n locations
agctngtccttggttatacatgattgatacatgatttgggacttgtaggattcaatttgggcaaaattggatgagggaaagtgtgatttctaaaatctgcactttatgcagaattttgctgtcaaataggtgcagcagaattttggctttgtgtagaaaatgttgtgtatttgctggttgtggaaagagtagtacagattgtgttctggacgttttctatcagatcccaacggtcataatgtagatttatgtgctagagaattccagtaaaattttcgagtcgatccaacagttaacgaattggaacaaagagaatattactggggtatttgagtgtgaaaagctgtgatgttggtttgtggtttgggcagagttttctgcctctgccctcgtttctttggctgtgtagttcatgatgcttggat

SEQ ID NO: 45206 - DNA, 453 bp, Glycine max
  unsure (1)..(453): unsure at all n locations
ntctcntttctctttntntctctcaattgttcttcattcttctccctcttttcacttctgttttaccattttcttacacacaattttgatgagttttccattggtgatgatcatggagggctaaacaattaatcaatccaaggatccactccaagcaatgctgaatttgggttttggtttggtttttctactctatgtgaatgttcttctttctcttcaattctatttttatttttcatgattgtgattatgtttaggattgaaaatggattacgttatggattcatttcctaatttcaaaatttaatcacagattgtttggatgattttccaaactaatttgcaatctcaaacaatctaaggagattgattcgattgaactntctctaatgcatttgactgacctttcacactgaacatcattcgtagtaactgtgataattcgatttacat

SEQ ID NO: 45207 - DNA, 441 bp, Glycine max
  unsure (1)..(441): unsure at all n locations
agcnttgtccacaaaaatcactaanaaccgttttaaggtccaacgccttaaacgatcctctntgcttttatcggttaacatggaccgttcaaaagtataaaatcaacatgtaactttaccgcttttgcaagaactacgtaggtccaatttcctcatcgcaattgaggatacataggagcaaaaaccccgcttttgtcgaccaccccaagagatcattaatggtccaacgctttaacgtttctctcctttcaaaaccaagagatcgttaatggtccaacgccttaatgtttctctcctttcaaaatcaaaatattgtttaatggtccaacgccttatacgatntttgtgcggttaaaattgatcttgtggaanaagatcaaaacaacttaaccaacgtataattctctaagaactaagtaggtctgattttctcatctcaat

SEQ ID NO: 45208 - DNA, 436 bp, Glycine max
  unsure (1)..(436): unsure at all n locations
tatccttatggcttacctccggaattcactccccgtgccaccccggaagatttaagccaagcccctactttcgaggggcagctcccaccttatgacgactatcccgggcaagacgatgaggaaggagatacctatctcggtcccctgctccacctcaaagatccgtccccccatgaattaccccaaccaaacatagtccgccatatcccgacttcacccacacccgtaaaagaatctgttcccttcgtggaagataagggaaagattaaggcgcttgaagagaggttgagagcagtcgagggcctcgacaattacccattctcggatctagcggacttatgtctcgtacccaatatcgtcattcctcccaagttcanagtaccggactttgataagtacaaagggacaacatgtccgaaagggcatcttcggatgt

SEQ ID NO: 45209 - DNA, 346 bp, Glycine max
  unsure (1)..(346): unsure at all n locations
agctngtattgtcacttagatcttgactaattataactttctgaataaaatgagtttatcccatatttttactccaaagtcagtgtgaatcaaatcactccccattttatctctagcatgcattcatttttctttacctactcctcacgtttggttttttaggaaatacaccataactaaacgcgccccaaggtatgcctatcgcaccagatccaaatctagaacgatgggtgatcaagaggagacacaggaacaaacgaaagccgacatgtcggctttgaaagaacaaatggcttccatgatggaggccatgttaggaatgagacaaatcatggagaataatgtg

SEQ ID NO: 45210 - DNA, 463 bp, Glycine max
  unsure (1)..(463): unsure at all n locations
gaatcaagattcaagaataatcaagtttcaagatttaatcaaatttcaagaatcaagattcaagaataatcaagataaagattcaagaatcaagagaagactcaatcaagataagtactaaaaacgtttttcaaaacattgagtagcacaagaatttttcacaaaatcgtttaccaaagagttttactctctggtaatcgattaccagaaggtagtaattgattactagtagccaacattgttttcaaaactgatttacaaagctataatcgattaccataatcatgtaatcaattaccaatgttntaaaacattagatttcaaatttcaagagtcacaattagtgttaaaacattntcaaatcatttttaacttgtgtaattgattacacaatacttggtaatcgataccagagtatctannacgtttgattntcannaattannatgaagagtcacatcta

SEQ ID NO: 45211 - DNA, 458 bp, Glycine max
  unsure (1)..(458): unsure at all n locations
agctntgaaacattaaccctctaagaatggacacagaatcattgatcttgtttaatctaaagatacccaaattactattntgtattaaaaacatagtcagtattcatcggagtatttaccatgaggagcttgtataatacggattgtaatcctctccaacataacctgcctgtttgaaggtgacactgaggttagacatgtgatataaacatggcttccacagaacaaaaattaagatgaaaacatttttgaaagatgattataatcacaagagaataggaaagaaaatgattcccaaagtgccttgagggcactttgaatttgataatgaaatggtttggatataatctcaatttctctatgttcattatttgcataaaacgtttacaccttttgataacataagaatataggattgtagaatatgtcttttatgctgaanagttacaacttacaca

SEQ ID NO: 45212 - DNA, 444 bp, Glycine max
  unsure (1)..(444): unsure at all n locations
tggagaggatgcttcaatggaggaanagaaagagggagagaaagagagaggggggagcacgaanatgaaggaagaaaaaaggagagaagttaaactttgagttgtgtctcacaagactctcattcatcaaagttaccacaagtgttacacatgcttctatttatagactatgtagcttccttgagaagctttcttgagaaaacttccttgagaagcttccttgagaagattcctaaagaagctagagcttagctacacacacctctctaatagctaagctcacctcctggagatgagaagctaaagcttagctacacaccccctataatatctaagctcacccccattccaaaaaatacataaaaatacaaaaaaaacgtccctactacaaagactactcaaaatgccctgaaatacaaggctaanaccctatactactagaat

SEQ ID NO: 45213 - DNA, 407 bp, Glycine max
  unsure (1)..(407): unsure at all n locations
agctngtgtagcgataattctagctgggaaaagtatttctcacctattacccagatgtcggtgcagcttgataatagtttcctcctcttccttggtgtagtttcctcttttgaggtttggccttaggtaattcagccaccttagtctgcaactctttccacatctcgcaagacctaacaaattaataacaacaacaacaaagtaaaaccaattacaatggattcatatatgatttagctataagctgtgcatgtatataattaaatattgaatatatggctcctacaaattcatgtagaagttaaaccaaaccttgaaaacagagaagaagaataattgaaagccacattggcgactatattgatggtacatactctcacatacttaatttgtttctgaccaaacta

SEQ ID NO: 45214 - DNA, 463 bp, Glycine max
  unsure (1)..(463): unsure at all n locations
aacttggcttaaattgatgagtatcaagcacttaatatcaattgtcgtataaagattatgtcacaatggaaatatttttctccttttccaaggcatgaatgattttcacaatttagttggaaacatctaaattttttgaattgaagataattcgttttaaaattttcctaactcaatattgtttgtaaggaattttatatagttgattatcttgatggacttatggacactgacagtgggatacgaaacattgtttcaatgtttgaaattgctaatattctatccattttttaagtacatcatcaatctgaattctcaattaatgtgatgcttggtattcaacttttatttatcataattnttttcatgctaagtttggggagaaagaactatacaaataagttacatcattttatgtaaagctagaacagtatgcccatgcanaanagagaaagagagagaa

SEQ ID NO: 45215 - DNA, 354 bp, Glycine max
agcttctggtgggacatcatgacttgctatccattctgatattcaccacagattctgccttcttctattttcagattggtaatgcctctaacagcacctttgtcaatgattatcttcatgcctcttaagcgcagatgtccaaatctttgatgccatattttgacttcatcttctttggataatagacatgtggaggagcaactgtgttcttgaggtgttcatatgtgacacgagtccttagatctgctgcccttcaataggactttactcttttcattagcaccaagcattctgactttgcgaagattacattgaatccttcattacacaactgactgatgctgatcaagttct

SEQ ID NO: 45216 - DNA, 485 bp, Glycine max
ctttcgaagtccactgttgaaatcatagcacgcttctctctgtgaatagtttcatccaccacttcattgagaatcagaattccatggagaatgtgcctattttttatgaaggctatctgcctttcatcaattaactcatccagcagaatcctcaacctatttgccaagagttgtgctattactttatacatgcagccaatgagagagatgggcctgtgatcatttacagactgcggctgagatatcttatgaataagagccacttaagaggcattgctgcctctaggaaagcttccatgagcatggaattcatccacaaatcttcgaaaatcatgtttgagcagcccccacaactccttgataaatctaaaattaaaaccatctggccccgagcatttatcaccagcacaactccaaatagcatctctgatttctgaatcagagaaaggcgcagtcagctcctctctttgattatgatgaatcat

SEQ ID NO: 45217 - DNA, 431 bp, Glycine max
  unsure (1)..(431): unsure at all n locations
agcttggacaatctttatcttacaagctgcttttgtggtgctgagtcatgccctacgttcaattntaagaatttactctgtatgttttagctataagacactgtattgacttntctagctcgatacattatgaatactcatcacattttgagtcattcttatcatttttgagaacttatatgtatatagcatacattacacacactatgttaatttctttcaaattagtgatttttatcatttatgagaacttatatgtatatagtatacattacacaaactatgtaaatctttttccaattagagacttccgctatctactatttgctatcccgctatagtggtttcgaggctatccactatatgccgctatccgggatttaaaatattgaagcccgatatccactattacctattaccgataacgttgt

SEQ ID NO: 45218 - DNA, 458 bp, Glycine max
gaatactactggacataatgggtttcctgtcattgatgatccacctttctcagattcaccagagctatgtggacttgtactgaggtctcatttactagtgttactgaaggagaagattctttcaagggataggggttttgcaaatcaaaggatcttccaaagaatttctactttggattttggacaggcgggatcacgaaacgggatcaaactacaggatcttgatatccaagaggaagagatggatatgtatgttgatctccatcccataactaatgcatctccttacactgtggctgagacaatgtcactagccaaagctgctattcttttccgacaacatggactcaagcacatgtgtgttgttccaaagaaccaatgggtatgatatcttttcttttccctcccacaaaatgatattatatactccttcactcgaatctgtcatatgcattctt

SEQ ID NO: 45219 - DNA, 375 bp, Glycine max
agcttctagattagtgtaccagatgatcattgtctcaaccaagctatcttggaaacaacttctcatccctgaaatacgccccatcttgtgacaatacattttgagatggttcttaggacaagtcgtccctttgtacctatcgaaatcaggtaccttgaatttcggggggatgacgatgttcggcactaagcaaagatcagtcatgtctacgaacggatagtcgccaaagccttcaacaacctttaatctctcttcaatgagatcgagtttcctcttttcttctgctgccggaggtggccctcctgtggacgatggctgtgttgagggttttcgaggttctctcgttaggttgggctgatgtagtgcgttgggtgc

SEQ ID NO: 45220 - DNA, 269 bp, Glycine max
tgctggacatcgattaccatatatgcgtaatccatgacgcagaccttatgctgaattcaaagttcaatactggttgtaaataagtttgggacactggcaatcgatatacatcctctggtaatcaattaccagacagtaaatttcttgaaaaagactctttaacacaaatatcttggccagaccttttgatacttcaactggaatgtccttcctatataatatactcttactaagactctataggcgaggttgatcctccatcttgaata

SEQ ID NO: 45221 - DNA, 335 bp, Glycine max
  unsure (1)..(335): unsure at all n locations
agcttgtgagatagccttgagaantgtctatttcttaagtcttgatagggttgactggaattatttgttgattgctatgacaaaaatgggtgaccgagataaaacttgatcttgaaactattcagttttctatatgaccaatttctctagagagaagtctaagacaacgtgactcactatcactctaccttttcatacatgggcgtttcaaaaagcattcgagtaagaaaatacctcggtcttccctctattattggaaggaagaagacagtctttgggtgtctaaaagataaaatgtggcacgggatctaccattggaggggaaaacaattctc

SEQ ID NO: 45222 - DNA, 408 bp, Glycine max
  unsure (1)..(408): unsure at all n locations
tgataggccggcctatatatatgtatatatagttatattattttttggggaccaatatatacttatattattttttgggtacaattaattnttcttataactatcaaactttgattacacattactgctccataacttctattcctataatcaagtaagactttaattacaatttatgtgtgagtcatgtgtccctttatatttttcatagtttctattggctttcctatttctgttaatgtttccttttcctttaactctcctattacgtgcctactccaagagcaaagggatattatagatttaatgtaaagaagactcttaaaaaggcttttaaaaagactatcaggtcacgctaggcttttaaaaagtcacgctgagccaaaataaaagcctttgataggctat

SEQ ID NO: 45223 - DNA, 331 bp, Glycine max
  unsure (1)..(331): unsure at all n locations
agctntgccgattagattttgccggtgaaatgatcgaaatgggtctgagaagaggcaaagttgattatcctgctttgatgaataagaagcctgcggaaaatggagagaataagaaggagggaagaacccatgttgtgacttccattcctacatgggcaaatttcccaccagttcaacaataccaatactcaagtaatatcaacccttctcattacccaccaccatattagccaagaacacccatccataaaggccacccctaaatcagacacaaaacccgcctattgcacattcgataccaaacaccacccttaacatgaacataaacacc

SEQ ID NO: 45224 - DNA, 473 bp, Glycine max
  unsure (1)..(473): unsure at all n locations
tgaaggaatgtaacccaccatcttctcatagtagaacatcggttacgtgtctactatcattgttatcatctccctatccatcaatgggggcgctacttgagctaccagatcccaccacctttgggcatattctttgaaagattcatgctccttcttacacatgttttgcagctgcattctattcggagccatatcagaattgtactgatactgcctaatgaaagcaaccattatgtccttccaagaatggactcgggaaggttccagattagtataccacgtgacggctgccccagtaagattttcttggaagaaatgcattaataatttttcatcttttacgtatacccccattttcttgcagtgcatcttcaagtgattntggggcgagtagtcccctagtacttattgaaatctagcaccttgaacttcagaggaatgatgacattangcactatgcataactctttcat

SEQ ID NO: 45225 - DNA, 419 bp, Glycine max
  unsure (1)..(419): unsure at all n locations
tgctcgcatcatcaactggagtggatctttattatacataacacacttagtttatgtgtcatccagtgaagctagattacccggtggtgacctttacctatccaaaggactaggactgagccctgatactcaacgagtcatgctctatcttgctggttgttcgggaagcgtggccggcttacgtgttgcgaaagacatagctgataacaaccctggaagccgagtgctgatcgctatctcagacactacaattattgtgttcaagccaccaagtgcagatagaccttatgatctagntggtgtggcactctatggggatggtgctggtgcaatgataattggctcatacccaatattggagtatgagaagcctgtctttgagcttcacactgcagttgacgaggttttgccgcacactg

SEQ ID NO: 45226 - DNA, 339 bp, Glycine max
aagtgtaaattgagttgtcgaagactctttttgtttgttgctctactgtaattttcataataaatatttataaaaaaaattaatcgatgtcttaattaaggatactgattagcaagatattaaaaaatatatgattagggagagagacatgctaagtactaaaaatgattaacctcgattgtttaaattaatattatgtaattaaatgaagttaatcgtctttctttctttcttggttatataatagactttctcatggtatttccaaaggttgttgcttgatgaggtatttacttttagacaccattatctaacatttgttaccattggaggtatcta

SEQ ID NO: 45227 - DNA, 448 bp, Glycine max
  unsure (1)..(448): unsure at all n locations
agcttggtgtgatttaaacaaggatataacttatgacttgcaattgtaacttacctcttcatctcttttatgataaagnctgtgacattgtgcatggcacaataaacaaggaaataattgctgcctgctcgtacaaagatgctgcttccaaggattctgcagacgattctgtgatgtccccaccacaaactggtagacatgaatttttagcatgctaaaaattgtcctaccccaccccagcaactgcaagatttaagttctattggaacagtaaatacagggctgaaaactgtaaataagactgataaacttctgcaccctatgaagattntagtttctaacattctgttcaatactanatttcatataccagaagttaagtttgactaatctttctggattctatatggtgaggatgaccaagtaactgttaaatcaatcagcaagc

SEQ ID NO: 45228 - DNA, 430 bp, Glycine max
tactcagcttgtagtatttgttggtataattgcctgttccattaagcttttaatgtctctagaggatacttcctcgttgacatcttttgtcttgaatggaattgccatgacacgtttgttgttactgtctttgatatttggtagttgatattgtgttgtgggaggtaattccgactggattaactcaccatccttcacttgccaatttgttatgacatttgttgttggattacctatgatgtcttgtttccaagggtagtctatatcctttctgatggcataagcatgaaaccaatcaaagaaaaggacattaattttgactctttcgacaaattcgtagaacttgtcttggatttgtttctgtttgacccttgtaatgtgaaaaaccatctctttgggttcattctcgaaataaaattttctaaggttc

SEQ ID NO: 45229 - DNA, 445 bp, Glycine max
  unsure (1)..(445): unsure at all n locations
agctggtggagagaggcctccagctacaaaaaaattaatcataataataataattcaattagaaacatgaataatttcctagtctaaccggttaacaaaatggtctagatttttcatagaattaaaataaagtatcaatgcataaacagtacaagaggaaacgataactatagaagatattgataataacttttggttttcaaattttatatttcaatgcatcttgaagcgcttacatttcagtattaaaaaagaaaatataagtcttgttgtctccaaaatccaaatccaaatccaaataatagaaacatgtagaagaccagatcgctctgactatagtcaaatgcatacaatataaatcctactacctaagctgttanatgaaggcagcatgaaaacaaacccatatctctgttaaattattgagaattcttaaacaggcaat

SEQ ID NO: 45230 - DNA, 442 bp, Glycine max
  unsure (1)..(442): unsure at all n locations
ntgttgcaagccagtggctggatggtgaagttgatttgtggagtgcataatcatgaattggccaagtcattagttggacatccatatgcggngagattgactaaagctgaaaaaacacttattgctgatatgacgaagtccatggtgaagccaagaaacattctgctaattctaaaggaacacaattccaatagttgtatgactattaaacagatatacaatgcaagaagtgcattccgttcttccataagaggaagcgatcttgaaatgcaacatctgatgaagcttcttgaacgtgatcaatatatttattggcacagaataaaggatgaagacgtggttcgagatatcttttggtgccaccctgattcagtgaagttagtcaacgcatgcaatttggtgttttgatagacaacacctacaaacaatcgtatagactcca

SEQ ID NO: 45231 - DNA, 371 bp, Glycine max
  unsure (1)..(371): unsure at all n locations
agcntttgagcaattcanatggtctgaactnttcactcgtagctctgatttaggcacatcacatatatagacgctcgaaattgaacaacggaagctctcgagatattcaaatggtcataacttttaacttggaggtccgattcaggcacataatatatcgagacgcccgaaattcaacaacggaagcacttgagaaaatcaaatggtcattaattttaactcggaggtccgattcaggcgcatcacatatagagacgctcgaaattgaacaaaggaagctcttgagatattcaaatggtcattacttntcactcggaggtccgattcaggcacataatatatcgagacgcccgaaattgaactacggaagc

SEQ ID NO: 45232 - DNA, 471 bp, Glycine max
  unsure (1)..(471): unsure at all n locations
ctaagcttaacatcagaccacttccagggtgctggaactacttcacatggacttgatggggcctatgcaagttgaaagccttggaggaaaaaggtatgcctatgttgttgtggatgatttctccagatttacctgngtcaactttatcagagagaaatcggacacctttgaagtattcaaggagttgagtctaagacttcaaagagaaaaagactgtgtcatcaagagaatcaggagtgaccatggcagagagtttgaaaacagcaagtttactgaattctgcacatctgaaggcatcactcatgagttctctgcagccattacaccacaacaaaatggcatagttgaaaggaaaaataggactttgcaagaagctgctanggtcatgcttcatgccaaagaacttccctataatctctgggctgaagccatgaacacagcatgctacatccacaacagagtcacacttag

SEQ ID NO: 45233 - DNA, 420 bp, Glycine max
  unsure (1)..(420): unsure at all n locations
agcttgaatcggacatccgtgtganaagttatgtcgatttgaatttctcaagatcttccgctggtcaatttcgagcttctcgacatattatgcacccgaatcggatatccttgtgaaaagttatgactatttgaattctccgagagtttccgatgtttaatttcgagcgtatcgatatattataagcttgaatcggacatccgtgtgaaaatttatgaccatttgaatttctcaagagcttccgttgttcaatttcgagcttctcgatatgtgattcgcctgaatcggacatccgtgtgaaaagttataccacttgaatttctcaagagcttccgttgttcagatttgagcgtctcgatatgtgatttgcctgaatcggacattcgtgtgaaaagtattaccatttgaatttctcaagac

SEQ ID NO: 45234 - DNA, 445 bp, Glycine max
  unsure (1)..(445): unsure at all n locations
gcttacaatagagctgntcatagcaccactaattgttctccttttgaagatgtttatggttntaacccactaactcctcttgatcttttgcctatgcctaatgtttctgtttttaagcataaagaaggtcaagcaaaggcggactatgtgaagaagcttcatgagagagtcaaagatcaaattgagaggaagaataaaagctatgctaaacaagccaacaaagggagaaagaaggttgtcttcgaacccggagattgagtttgggtgcacatgaganaagaaaggtttccggaacaaaggaaatcaaagcttcaaccaaggggagatggaccatttcaagtgcttgaaagaatcaatgacaatgcttacaaagttgagctgcccggngagtataatgttagttccaccttcaatgtctctgatntatctctntttgatgcagatg

SEQ ID NO: 45235 - DNA, 453 bp, Glycine max
  unsure (1)..(453): unsure at all n locations
agcttaataaagtccttagtgatccatgttgtgtgtgtgtgaaattgcattggatgagatgatgtgcaaagttgggatgtgtaacttcaattgaatgggaatgaaaaccatccagctgaaacactttgattcttgattgaaacactagcagaagtgaaaatttttctacttattcattgttgagtgtcatgcttggtaatctcttaaacttataagtgtattctctttatgattncatcatgtaaaccatagcaagtgcgagctcaatgtaacatcacatttctcataaataaattataaagttttttatttaaaaataaatagttctagaaaaatgatgagggttttgtaattaaataaataaggagaaataactctattaattaaaataatggcttgaagaaaaataaataatgtattttatttattcatttgacaagaaataaatagagt

SEQ ID NO: 45236 - DNA, 404 bp, Glycine max
  unsure (1)..(404): unsure at all n locations
agctcgcccaggcgagcaaaggtgcttcctctagaagcaatagccttctggaggaatcttctggagggcccaagtgggcctggttgctatttacacccccctttttactaaatgcaccccccttatatatttttttgtaattctttttccgtaacgttacgaaactttacgaatttcgtaatgatacttattttccttgtgcaaggttacgaatccttacggatttatgcatttactctnttttggctttcaaagaagttacggaaactcacggattgcgcaaaaacacctctgttcgatttccgccacattacggaatttcacggattacgcaagcctgcttccttttggatttctgagacgtctcgggacttaatttattgcatgtcatcaagtaataatcc

SEQ ID NO: 45237 - DNA, 473 bp, Glycine max
  unsure (1)..(473): unsure at all n locations
agctttaaaaagggtttgtcaccattaaagaaggcgcgtgcatttgcaaaggaatttcgtgaccaatttttgaagctcaatagcataaatcttacaaaattaaagcagcagaaagaaagaaaaaaagtactaacacaacacaaattggacaattaataaacccaggtcccactaatatccatgttgatgctgttgtcttatgaaggccaggatcttgctgaataagatagataataaagcgaaatcatctccagaacctatcaggttgttgaaattgacctctaataagaacctaacctttctctttctagtttctcccaaatgatatccaaagaaccttgaatttcagggtttcattgatcacccagatcaagatgacaatgacaagagagataattcaactagacatttgtctaanatagctatatattctatggagagggactgagagggaggacccatataacattatt

SEQ ID NO: 45238 - DNA, 446 bp, Glycine max
  unsure (1)..(446): unsure at all n locations
acttatcttgattngaactatatgggtcttcctctagaaaaggtgaagaccaaaacgtgatccgtcttattgagagtatgttggtgcgttacactctgtgcaaaatagtaattcttcagtgaaacgtagtgcatcatcaattgagcaaccaatacagagacaaaatatttcaatgttggatgaatttcatccatgcatctaggattctattgaaaacattattgatgtcaaaacggatggtaactgttgttatcatgcaatagttgccttattgggtatgggtgaagattcatggtcattggtgcgcaaccatctgcataaagaactcacaagctagtcgaaagagtatatcaacttgcttggtgacatagagagatttgaggaattaaagcgttccctacttggtgacggattatntatggtgcgtacgtttattgttatgtcac

SEQ ID NO: 45239 - DNA, 437 bp, Glycine max
  unsure (1)..(437): unsure at all n locations
agcttgtattntgcaattgaagaaaataaattcttatatgcaatgataaagctggccaccaaaacaccaatggagaaaaagatacagctcttatttcttagcatacaaggtcatcccattaatgatttgatgaaagacatggtgcatttcaagtaatgtttttaggttcagaanagtaattcattatacttactcagacttagtcaccaagttaatatctctatgctagagggcaaagtacaattaaatttattattcattgtatgaaagttgactttttaattgatattcaagcactttctcattattgaggagtatgtaaccacatggatttttgccacaaatctacttgacctttnttgtaagtagttngattatgctactacttcactctactagttctcttagtttaatttcttaatggtaatgaacgtttt

SEQ ID NO: 45240 - DNA, 474 bp, Glycine max
  unsure (1)..(474): unsure at all n locations
atagctacatgtattctattggctcgtattggtttaattatgattntcaaagataggagaatcatactatgtgttcttccattatatatatatatatatatatatatatatatatatatatatatatatcttgatgttacctctgattgatgtgaagtttaagtcttgtctaatgccttatgttcgtgtatgaaacaacttcacacctgcatatgaactagggatttgttctctgtgtgtgtgcgtggagagtaagcagcttcctcaacatgtatatatcataaagaaactagtattggttcatgtctgtctccctgaccaaagcaattcggaagnggtcgctatatttctatttgttataattcatgcgtcatgtttaatttgacttggacttcatatatactcttgtagcacacctaagacgaatattctgagtgataatctatatattgtgagcgtaatcgcaaaataccg

SEQ ID NO: 45241 - DNA, 479 bp, Glycine max
  unsure (1)..(479): unsure at all n locations
agctntgattagacattntcagaagtataaatgcgagattaatttataaattaaaggacaacagttggacaaatttctctttagaatcacgattttaatatttgaatcattgaaattagcacaaaaattcgttcgggtcagaatntttacaggcgtttttatcaatacttgtttttaccagtcgtgcgtttgattntgtttcaaaataggttttagtgaggctcaatttgaagaggatgactcttcaaaactacaagtcactgaatntgactagcatttattgaagggctctctaatatcaggttgtatctcaaatccaggtgaattagtagtaccatcagcattatgtacgttatcatactccaagatcaagtgggctcttccaccanaatggagatagcacaattaatcaatgaacctcatactaattaatgtacctcagactgcacttcagattatttctgtanacacacgttatg

SEQ ID NO: 45242 - DNA, 447 bp, Glycine max
aataaattggttcatagctgtttcaaacaaaaaatataactatttgacctcttttttgtaaaaatgtataaaatgaaataaaataataccactaagtactgcaaaattatatttttggaagaaatagaataaaattaaagaaaaaatgcttaaatgcatgttagcgaacagtttctttaaatttattcatctgtgcttattgaatcatatattatcagtttaattattcatttattcattatcgtttttaaatttatttttttaatttttatagttaataaattgatttcttagtttttgaaatttaataactaaattttttaattcttaaaggttatattttaattcttaaaaggtattagccgctaaaattttttttaaaaaaaaattagtcctaggcttagtaagtgaaattttagtctcacggaattaaaaaaaattaacgat

SEQ ID NO: 45243 - DNA, 357 bp, Glycine max
  unsure (1)..(357): unsure at all n locations
agctngcactngttcacccaacctgactttggtttggcaattatggagtatatcttacatgatgtcgaagagttctgcgtaactcatgttatgcataatgccagtcgtaaagctgttttagttaaccacagttagttatataaggttctaacttctaaggttctggaatttgttgtaacagacttcagacacttacaaatctgacaaatgtctctgtagctatatgtggaacttatgtagtcagataccttaggaatcagttcagaaatacaaaatcacaaattaagtaactttccaaattctcttccaaaaatttctgtatttctaccacccctctccttttatctttctaatttc

SEQ ID NO: 45244 - DNA, 479 bp, Glycine max
  unsure (1)..(479): unsure at all n locations
ctaagctactcaattgctccaggttgctgcatggaaaggcatatgtctgtatggtggtcagcagaggagcataaaccacagactcttgcgacaggtacagatttctgattcaaggccagctgggttaccaagttaaccaatgcatctagtttgccttcaagcttcttagtttcagatgatgcagatgagtttgtagctacctcatgcactcctctaatgactatagcatcatttctggcgctaaactgctgggagttggaagccatcttctcaattaaatttttggcttcaacaggagtcatgtctccaagggctccaccactggcagcatctatcatacttctctccatattactgagtccttcataaaaatattggagaagaagctgccccgaaatctgatggtgagggcaactggcacantaatttttaaatctctcccagtattcatataggctctcttcactgagttgtctaat

SEQ ID NO: 45245 - DNA, 414 bp, Glycine max
  unsure (1)..(414): unsure at all n locations
agcttgactaggcgagtttattntaaccttagtttcactttagttattagtcaattcgattaagaatgagaaatgccaaagagaatacgtccgattgattttccgctttattctactaaaaaaaagatgttttttgattattatattatttttcatctctttttgttttccaacgtggttacggcacgaccgaacggtcgaaattcattttaaccgaagcttacggatcatacaattcaaacgttcgggggaaatttactttattcttaagttaagcgagaaatgacttaagtaaaatggcttaagcacgtcaacagggggtatgaaaagtaaatgaaacgagaacagatatacacataacacaatttggaccaccaccagtacatacaatgaatcgacaagcatggttcgagg

SEQ ID NO: 45246 - DNA, 442 bp, Glycine max
  unsure (1)..(442): unsure at all n locations
ccttgggctgaggacctatataacaacactagggttttagtttatgttntttttggaagaagagaataattctaggattntagaattccagtttttactgttcatgcacactgttcacgtagaataaaattcgtttcctgtaatttcgtttctgcttcaatctataatttcgttttctactgattaatggaagactaagtctccagcgttgttttctcttgaggatcaagcacaactactctctttgagggtttgttattactattgaattttgatcagattttcctcttcactaactactatgtatttgctgctattaatccatgcatgcttagtgcttgattaattgtctctgcgcttaatttacgttcatgcttaatgatcagtttcgttcatgattaattggtgtatgtgttgcttaatcacataatgacaaccttat

SEQ ID NO: 45247 - DNA, 424 bp, Glycine max
  unsure (1)..(424): unsure at all n locations
agctngtagagttgagtctcgtattggtttaatcaattacatatatctcacaatacattacactgttatttgagacaatgactaatttactcaagagtctctgctttaatcgactaccaagtggattaatcgagtattatttctctctcattaagttgtttagatgttaacaagaacacattactacaaaagtcatttactactacgtaccaacaaggacggtccacagaaaaatggcatagaatctttagaatgtatgttcaaggacggttattttaaaaaccccgctttgaactggtatgctgttttctctctcttatcttatcttctcgggacactactgacccttcattntcccctaacctttcattttcctctctcattgttgccttggatctccctctctctttgtcgtctctctctc

SEQ ID NO: 45248 - DNA, 468 bp, Glycine max
tgagtgagatgtccccagttatattatgactataaagctccatgtcattgataaaaaaaaagttgatagttgggcagataaaaaagtctaatgaatgactaataatggcataacacatttgtaccaattctatcgcaggggttaaactaaaatctaatagaagtcgttatgttaaaaattgaactacacacaatgtcaaggtatatgtgctatgcaaaagtgcaggtctgcagcatcaaatcaattgtagaactataagtaaatggaatgaaagcaatgtggttccactatgacaaggagagtaacacaaatcctctaacaatctcatgatgaatggaaataacaagaaataatgccattgatgaacaaatgtaataaaaaaaatatatcacgacttgaacatagaaatactacattgtatagtttctacaatagaaagagtcattatatatctagcatatattatac

SEQ ID NO: 45249 - DNA, 68 bp, Glycine max
cgaaggaggagaagatgaagagagggagaaagagagaaggagcacgaaatttcgtaccttataatgag

SEQ ID NO: 45250 - DNA, 321 bp, Glycine max
  unsure (1)..(321): unsure at all n locations
agctttaaaaattatgtttagnttatgagagatcactgttaatgcttanatacttagccggaactctcttactatttacttctctctctgagagaaatctctctaataaagtcaccttggtgtgtttttttttaattctaacttttaagttgttattcagcaattggggccttttgaaattcatcgaattttgctgggctactaatatattggatatgcttatcactgaggccctgtttggataaaactcttcacgaaacacttagtagaagaaaatatggaggtagaatgacttatgctctgtttggataagtgcctcat

SEQ ID NO: 45251 - DNA, 457 bp, Glycine max
caggctccctctaattcatcgagtaactcatcaatggttggaattgggaatctgtccttgacggtaatgtcgtttaaagctctgtagtcaacgtaaaaatgccatgatccatcacgttttttgaccaataatacatgggatgagaatgggctagtgcttggaattatgccactccggagcatggtttctacctaagtttcgatttcttatttttgaaaataaggatatcgatagggtcaaacattgatgggttcagagttgggtatcaagtgtatggcgggattggtggtgtgggatggtgggagggtcattggtgtgtggaatatggtcacgaattgtgtgagttaattgcgtatttctgggtattaagcattgtcgaacgtgggtagtggattgtcggagttgatgatacgtatgtggaagaaaatactaacactgtccatatgtactattcatc

SEQ ID NO: 45252 - DNA, 458 bp, Glycine max
  unsure (1)..(458): unsure at all n locations
agctngtggttattaaatcatttaatgcttgcattaaactcatatcctgcttcatgcaggaaaaccactatgattggctttcgtgttgatcactataacaaaaaatcagttccttttagtcaaagtagatctatcacagtaaaacacatcttttgatgttgtttggaaacttttagaacttaaacttcatttattcttcataggattcgacaaatcctgaaagaatgtcttgtgagacaatttctgccaaatgaacctcagacacaaagtactaaatgaagtcttaaatgtcatctttaatattgtatcagatcatgacttattcatacttctgtctganatatcaaatagaagatcatgaagcataatctgatatcacataagacaaaacttttaaccgttgtatttatttgtatctaataaaaataattaaggggtctcgatcatcttacaatatc

SEQ ID NO: 45253 - DNA, 452 bp, Glycine max
tgaacatctgaacctaagtagcatgttttagttaaatgttaaatgtatattttggtgattaaaaacaatcataaattacaaaataaaaattaaaaaatcaaatcacaatttgtggctgtacaaaaaccaccacacacgtccaaggcaagagattcagattgagggcccaattggtggctagaacaacggtgttgctggcaaagttcaatgtaatcactgacaacaccatcatagtcatccaacgcatcatcaagaagcttccaatagggacaaatttcaggctcacaaattgcaagtccacccccgcaaagcctccaccctacaccctcacagatctagttgtcgatgtagaggcatccatcggaggaagaggtagtggtgcacagtgtcagggttgagccaacagaggaagtggaagggccgacttgatgaggaggaagtcatcgtcggag

SEQ ID NO: 45254 - DNA, 312 bp, Glycine max
  unsure (1)..(312): unsure at all n locations
agcttcttagtttcagatgatgcagatgggtttgtagtctttctcatgcactcctctaatgactatggcatcatttctggcactaaactgctgggagatggaggccatcttctcaattaaatttctggcttcagcaggagtcatgtctncaagggctccaccactggcagcatctatcatacttctcttcatattactgagtccttcataaaagtattggagaagacgctgttctgaaatctgatggtggtggcaactggcacatagtttcttatatctctcccagcactcatacaggctctctccactgag

SEQ ID NO: 45255 - DNA, 491 bp, Glycine max
  unsure (1)..(491): unsure at all n locations
tactaagctanacgatgcccgagtcattcatccctatgagatgttgttgaagtattggcgatcagaattgccattccttggattacggngttgaaccaagctcatgcttttacaaaaaggttcatcaagtcaagttgaaatatggaagtaaccgtcttgcaaaattggggcaaaagatgaatcgagtcacatcactgcttcgtttactgccaaacatatttaggattgtttatgtccttggtacttccagtttcaccttgacaaagatgtcatggaccatgttgaaaatctaaattgattcaaccccatatcctgcgtaaaaattcgcaatacttcaactgtacatcattcgcatacatccatgcttttcattggttgcattgctcattgcattctttcgttgaaaaataaaataaaataaaataaaatgaacttaatcattgttatcannaagaaaaggacacgctttacggcacccttaccgaactcgt

SEQ ID NO: 45256 - DNA, 432 bp, Glycine max
  unsure (1)..(432): unsure at all n locations
agcttgtattangattccataggtcttgacatagtctggaaacagtgtatatatatcagtaccacttgtactaatcttattattataatacatattaattttgcggacaaaaaaaaactaattgttccaacctgtcaactcaaactaaccagtaaacacctctttaattggagacctatcatcaatttttagtttataaaatctcttcaagggacatggaaaaagttataggtaagcatatgatgaaatggtgtctatgacacaaaaagcacaaagtccagtatgaacacgtgggttaggagagggcaaagtagagaaaatatacaaaaagaataaattacctcgtcacccccagcaaacataaatggaactacatctncatgcanggccaaaatccaatggataggcctgctaaacacaacctatatatta

SEQ ID NO: 45257 - DNA, 474 bp, Glycine max
gtagattgaagaaggtaatgctagacataatagatgaaagacagtctgcattcataggtggaagacacttgttgcatagtgtattgatagccaatgaagcggtggaggaagcaaagaggtgccaaaagtcatgtttggtgtttaaagtagactatgaaagagcatacaactccgtctcgtgggatttcctatcatacatgatgcgaagattgggcttctgtcccaagtggattcattggatcgagggttaccttagctcagcctcggtttctatattggtaaatggtagccccacaaacgaattcattccacaaagaggccttatacaaggtgatcccctagcgcctctattgttcaatattattgcggaaggcctaaccggtttgatgagagaagcattggataagaagctgtttagcagtttcctagtgaggaaaaacaataaggcagtcaacatcttacaatacactgatg

SEQ ID NO: 45258 - DNA, 459 bp, Glycine max
agcttgtaatcgattacacacatactataatcgattaccaaaggagtttttcagaaaacattctcaacagtcacatctttttatctgtttcttaaatggccatcaaaggcttgtatatatgtgacttgagacacaaattttgataagagttttgaagatcaaaaaggtcttatcctcttaacaagcaaaattgttttatcctcttaaaaattccttggccaaaacacttgtgattcaataaggaattatttgagtgctcaaattgttcaatctatctctttcaagagagatttcttcttctcttcttctttattctgaaaagggattaagagacccagggtctcttgttgtgaaagaattctaaacacaaaggaaggattgtctctgtgtgtttagaactttgaaaaggaatttacaagatagtgaaactctcaagcgggttgcttggggactggatgt

SEQ ID NO: 45259 - DNA, 382 bp, Glycine max
  unsure (1)..(382): unsure at all n locations
ttggtcttgcaggaaggataatggggcttttatagcaaattgacatctactagacactgaaaaatggggcaatgaaaggtgaaaagaggaaaaccatgctggactgcattctatacgcaagtttccacaacccacaatgcattacttagcaataacaaacctctcctatcaccacccagtatcccaaaggccatcctaaataaccacaagctgttaccgacttcaatgacaaaccacctttacacaaccaaaaacaccacaaaggaatttgcgaaanagctgtaggtcaccccaattcatgcatatgctaaactgatcctatcctcatattatggagcataaccaccaagtctcacctctttttgagaacactgacacacgg

SEQ ID NO: 45260 - DNA, 453 bp, Glycine max
  unsure (1)..(453): unsure at all n locations
agcttagtaaacattgtttgctgtattgggctttattagggaacaaatatgaagatggttctttcatgaaacccatcttcgtttaagttntcaataattacagaaatgtcaccatgtcacattctaagacgatttccgtataaccatcttagaatgtgcatcataaaaaataagtttttttagtagtgtgtgtttaaaaacttttaattaattnttaatttcttgttcttttattattagtacatatatgtgtggcgtaaaagatgtcatagtatgcatagcacatagtttggtctagcatttgaattcaatttgtttgctcatgtatgacatccactttgtttcaaaattaattaaaagtacaacataatcatgttgagtgatctggtttacaaataatttgagagatctacccagatngcaatgaactagtggtaattcgggaaccgatct

SEQ ID NO: 45261 - DNA, 486 bp, Glycine max
  unsure (1)..(486): unsure at all n locations
agggtattaattgttctaacttctggacagacatacattcactacatcacccaaaaacaagaacagagtggaatgagattaatttctaatattatattacgttgaagtgtttctctcctcgataaataaatagtagtaaaaagtcgaaaagtggtacttataattataataaaaataattattaaaaattcatatttttaacacaaatttattcaataatctctgggaagtttcagttacagttacacttacgtttgttgacttgacattgagaaaaactagataattgactgcatatttttcctagtcttgctgtgtccatctcagatggtcccctacaatacaagtattaggtggntccttctttacagcttcatgatttgagttttccgttctcagttnttcctccttttcttgtaagtgtgaattcaacttggactnttagtaacgtttcctgatattnttctttataacccttgaataaca

SEQ ID NO: 45262 - DNA, 458 bp, Glycine max
  unsure (1)..(458): unsure at all n locations
agcttaatcgaatatgttntggctaatgtttatttgtttgctccaacatgattccaaaatttgaatccctcatcaaaanttggaaaaagtatgagactaaaaggtaaattatattgaaaataaaaaaacaaaaaactaataaactgaaataaaaatatctaaaaaagataactatattgattgattagtttgattgttctttctaacttntttcaaacacctatttatacaaaaaagatcataaataactaaggtcgtgcttgtccatgttaggccactaactagctagctaccatgatatcaatttcagctagtttacaaaggctntggctaatctcatcttgatcctcttactcttgaatccgattnttattcttatctttaagacacattcaattaaacttatctttcactaattaattgcttaatttgatcatttgacatttcttggatccatg

SEQ ID NO: 45263 - DNA, 467 bp, Glycine max
  unsure (1)..(467): unsure at all n locations
ntgcggtagctcatggtggcctgcacaggtaagttaatttttattcttgctggtttctatgcctgcacatgttaactaattgatgtttattttttttttgtaaaaaaaatgattgaatttgttgtagtttgttgatgacaatagtgttaataagagtgttaaaacgagcaaactaaccaaacgatttccaggagacatccttgttaggcattatggaagctatacatcctctgttagagcctactgttgcactttggttctgttttttgagtgacttgtttcaatggctaaaaaattggttgattcccctatggtgaatggcaaatattacttggattgatatactactattgatgtctggtttgtcagtcaaggtcttnttgagcatctcactaacaaggtagaggatattattgttattgagagagatgaatggaaacgagtgaattatcaacttgttatgatgt

SEQ ID NO: 45264 - DNA, 427 bp, Glycine max
agcttcagaattcaatttcgatcgtctcgatatattcaggtctcaatcagacatctgaggaaaaaagttattgtcgtttgaatttgctgagagcttcaacattcaattttgagcgtctcgatgtattacgggacttaatcagacatccgagttaaaagttattgttgtttgaatttgctgagagcttcaacattcaatttcgagcgtctcgatattttacgggactcaatcagacatccgagttaaaagttattgttgtttgaatttgctgagagcttcaacattcaatttcgagcgtctcgatattttacgggactcaatcagacatccgagtaaaaagttattgtcgtttgaatttgctgagagcttcaacattcaatttcgagcgtcttgatgtattaccggactcaatcagacatccgagcaa

SEQ ID NO: 45265 - DNA, 502 bp, Glycine max
  unsure (1)..(502): unsure at all n locations
ctattacggacctataaaactcagcttggtacaattctctcatcctatcctccaactcccatgtagaatcaccctcatcggttccccactgcaccttcaccaacgcgatctcctttcctctcaacgacttcatccttcggtcagtgatcttctgaggttgtgctctataggtgaggttatccttcacctgtacctcgtccactgcaagtatatgtgatggatctgggttgtaccgtctcagttgagagacatgaaacacaggatgcaaattcgataaactcggaggtaaggcgatatgataagctacaggcccaatcttcttcaaaatctgatatggacctagatacttgggtgtcaacttcctagccttaagagctcttccgactccggttacgggagaaaccttcaaaaacacatgttctccttcctgaaaatctagtggcttcctccttctatcataatagctcttctgcctatcctgagatgctnttatcttctctcg

SEQ ID NO: 45266 - DNA, 403 bp, Glycine max
agcttatccttatggcttgcctccggatttcactccccgtgccaccccgaaagatctaagccaagcccctacttgtgaggggcaactcccgccttatgacgactatcccggacaagacgatggggaaggagatacccatcttggccccctgctccacctcaaagatccgtccccccatgaactacccccaccgaacatagtctgccatatcccagcctcacccacacccgtaaaagaatctgttcccttcgcggaagataagggaaagattgaggcgcttgaagaaagggtaagagcagtcgagggccttggcaattacccattctcggatttaacagatttatgtctcgtgcccaatatcgtcattcctcccacgttcaaagtatcggactttgataagtac

SEQ ID NO: 45267 - DNA, 483 bp, Glycine max
  unsure (1)..(483): unsure at all n locations
cctaagcttctcccttatttgctataaataggggaagaagtgatgttataagggttcagccccttaagcacttctctctctctcgaaattgctgaggaaaattatttccgtgaagaaaatccaagccgaggcgcttccgtaacgtttccgtgaggaattacgcgaagattctcgtccgttcttcaagattcatcgttcgttcttcgttttctttagtcttcaacgggtaagtacctcaaaccaagcttttcaattcattctatgtacccgtggtggtccacattttgtttcatgtatttttattcttgttttcatttattttttatacccccttttgacgtgcttaagccatttatttaagtcatttctcgcctaatctaaaaataaaatatatttccatcaatcgtttgaattgtatcatccgttaattttggttaanatgaattccgaccgttcggtcgtgccgtaaccacgttggaaatc

SEQ ID NO: 45268 - DNA, 372 bp, Glycine max
  unsure (1)..(372): unsure at all n locations
agcttgactaggcgagtttattntagccttagtttcactttagttattagtcaattcgattaagaatgagaaatgccaaagagaaaacgtccgattgattttccgctttattttactaaaaaaaagatgttttttgattattatattatttttcatctctttttgttttccaacgtggttacggcacgaccgaacggtcgaaattcattttaaccgaagtttacggatcatacaattcaaacgttcggtggaaatttattttatttttaagttaagcgagaaatgacttaagtaaaatggcttaagcacgtcaacagggggtatgaaaagttaatgatacgagaacaganattcacaatacacaattttgga

SEQ ID NO: 45269 - DNA, 467 bp, Glycine max
  unsure (1)..(467): unsure at all n locations
ctgggctgaggacctatataacaacactagggttntattttatgttttttttggaagaagagaataattctaggattttagaattccagtttttactgttcatgcacactgttcacgtagaataaaattcgtttcctgtaatttcgtttctgcttcaatctataatttcgttttctactgattaatggaagactaagtctccagcgttgttttctcttgaggatcaagcacaactactctctttgaggttntgttattactattgaattttgatcagtttttcctcttcactaactactatgtatttgctgctattaatccatgcatgcttagtgcttgattaattgtctctgcgcttaatttacgttcatgcttaatgatcagnttcgctcatgattaattggtgtatgtgtngcttaatcacataatgacaaccttatgttaattntcgcttagtaatttaattt

SEQ ID NO: 45270 - DNA, 458 bp, Glycine max
  unsure (1)..(458): unsure at all n locations
agcttagcctatcatattatggttataactaagcctaacaaacttttagttagttagttaaaacagaaaattgaacagagagcaactaggtagaacccagtgcgtacactgtcattcccccgtcaaactcatggtggattcagctaaaaggggatgctaattcaaagtttttctcaggatggcgttagggaaaagaaggaagaattcaattgagatggatctggaagatggagtctatttagggattctggggttattgcttttgaaatttccagaatttatatggagatttttcataggagggatcctctacgccatttntagaggggctggattgaaatcccattttgtcagaaaaggctacatcgttagaaagacctttgtatgtctgcttttcttttggataaagataaagataaagctcctgggccggatgtctttcattaaccttttatttt

SEQ ID NO: 45271 - DNA, 459 bp, Glycine max
caatattgtaatatcaatcagtagtgttgtgatgtataaatttattggctgttgaagtgcatagttgtagcatttattctttgttgtcatgtttgaatagctgaatgggatagctgactctggcataagatatacttaatatgaacttgtctgaatctataaatccctaacgagaataatttatcaagcaagtttaatatgcaaattgcttgtgcccccaacaaggatctctcttctgaacaaaggagaggaactattttcctataatatgtgcatgtttgggaaaaaaattctgggagaatataacttcttttttttaaagctctctcaagtagatggccaaagtgggcgataatttcttctaaataagtaaaccaaacctgcatgtatcctgctaatccacaattctgaatacatcctcagcaacttgccaatttgcatctctacttatcttttcct

SEQ ID NO: 45272 - DNA, 448 bp, Glycine max
  unsure (1)..(448): unsure at all n locations
agctntgaaggtgcgtagcccactattntccatagtagaatactggtaatgtgtctactatcattttcatcggttttttttgtcattgaggtgccactttgagctgccaggttctccacctttgagcgtattctttgaaagatttgtgccccctttttgcacatgttctgtagacattatactgacactgcctaacgaaggcaaccactaggtccttccaagaatggactcgggaaggttccaagttagcgtaccaggtaacagctacccagtaagactttcttggaaggaatgtatcagtaattccttatcttttgcgcatgcccncatcttccgataatacatctttagatggttcttggggcaagtagtccccttgtacttgtcaaagtccagcaccttgaacttgggaggggtgatgatattgggttctacgaacaactcattt

SEQ ID NO: 45273 - DNA, 400 bp, Glycine max
ttgagccaaaatcctgactcaccatataccttgacccagggtgagaatgtcaatccttaccctcggaagcaaaaaagaatagaggggaaatttccaatcaaagaaaaagagaaggaaaatttccaatgaaagcaaaaaaagaaaagaaggaaaattccccaatcaaagagtgggagaaagcaaaaaaagaaaagaaaggaaattcccaatcaaagaatgggagaaagcaaaaagaaaagaaagaaaattcccaatcaaagaatgggagaaagaaaaaaagagaaaagaaggaaagaaagctcctgatcaaggatcgaaagaaaacagaagaaatgtgcagagaggtctttggaccggacgatatctgaacaatacagaattgtcaccaaatgaacaaaaa

SEQ ID NO: 45274 - DNA, 425 bp, Glycine max
agcttatgaacctcatatgaacttagtggattttgtaacaaattgtaggcaataacaatgcattgactaatagtttcatcctcgaaatcttatcaatcctccaaaacaagcatgagaacatattccagtacatccatgccttttcattctatttagaataattaatgaaaaagtcgatgctacctaagacaagcaaaatcacaataaaggccttcatctctaaagattagctcatttaagaatgtcaaaactggcatcaatcctttctttgtaagccaaaatatggcacaaaagctaaaagagcaaataacaacaaaacataaaatctaataaggctaatgatcacaattcacaaaaaaatagagtagatagatattatcttataaagaaactaaagagttgctcacacgatgaaatgtgtatat

SEQ ID NO: 45275 - DNA, 432 bp, Glycine max
  unsure (1)..(432): unsure at all n locations
tatntgactatntgataaataaacatttttagtaattgctagtattctttaaaacgatacttatgttatattcaacaaggcattttaactagcttataattttttttactaactaaaaaacttgtttgattgttcagtaaacaaacttttttggcattttttaatagcttctaactttttttaaaatgttacttgaagtagcattttttaaaagccagcttctaacttgtagcttttatattttatttcctatttatcgttaaaatatttattcaatttccttgttaccatttttaaataagccattgtatatttcttagctacttcaactgttaattttattaaacacttataatttaataaactaactttgtagcttccaactaattgtttagttttcaagcttttcaattgtcaattaacttttagact

SEQ ID NO: 45276 - DNA, 472 bp, Glycine max
agcttctccgaagggcatggttatttccagtttcttgataatatccaaaaatctcgccaaatgatggtccttttctttcttggaaggtaccacaggatatggtacttccttacaataattaggttatcgtaccccgattcctcgtgaaaatatgacaaactagccctgtcctatcaagttctaagaatcagaccagtttccactgttgaatgatcctaaaaaacacatgcatctacgtgatcaaggaaaaagcatggtataatgaagttttgatagcacagtgaacacacaaaacatcattaaatagataaaaagatatttacatcaagtacttacaaggaagatccaacagaggatttagctttccataactgggaagcttcctttacaacaaagagaagagaatgacagattgtagaaatacaagtagtaggaatgtctcctccacctctaggacctcataatcgctcac

SEQ ID NO: 45277 - DNA, 353 bp, Glycine max
  unsure (1)..(353): unsure at all n locations
cttgacttgtagagttgactcgtanactnttacataatagaanaaatcataataataagcctattaatgacatatacgcttaacaaaatactcttacaccaacaatatttaacatttcaacttcaaaataaagccaaataaaaaatcacaatagtaaagtgtaacaatacattagtactgagatcaaaatatgaccaaatatatgagttaaatgtttatactctgacaatttaaaacttttgacactgtcagtgtatagtattttttacactgtcagtgtataaattcataaaaatacaagttattaaagtgaanacatttacaaaaggagttcctttgttcaaactatttga

SEQ ID NO: 45278 - DNA, 414 bp, Glycine max
  unsure (1)..(414): unsure at all n locations
agcttatcaatgtggcagttccggtgaccattgacgaactggcgatcaatacaaaanatatactcaatccatgggaaaggaatgaaaatcacacactttgcctcaactctgctaaagcaattggatgtacagtagtcaacattggcacccaggacttcattgaaggaagggtatgcttgtaggcattcaagtttccacccataaaagcagaattattgtgggcgtgtacactgcagaacaacaaaatttaagattaaatttaatttataaatgaaatcctttgttaagttatgaaataggaatttttttattttaaaatcaaatcctttgttcagaaagttataagaaatctttttttttttttttttaattttagttgtgtatactacaaagaaatctggtcaaatctgatta

SEQ ID NO: 45279 - DNA, 471 bp, Glycine max
  unsure (1)..(471): unsure at all n locations
ntctgccccctcccgtggatgtagccttgatcaaaggtgaatcacgtaaatctgtgtgttctttctcatctctctctctctntcaccttgctgcaaaactttgtgcatgacatttctgttctgttgcatctcctgatgctattcttgtttgatcttcttcacttctataacaaattggtatcaagagctcaagttgcgatcaaggaaattcaagattctcgtttgaatacgaagatcaagctgtgggagtcttgtttatggtatctttcgctactttactgtgatcaagaacacttaagaaatcatgtcaaacacaatcaggattgagacattcaatggaaaaaacaacttcaatctgtggcgcattaagatgcgtgctttgttgaaggaacaacgtgtgtgggcttatgttgcttctgcatctgtgaagaaagaagtggcttctgaatcaaaagaaaaggtctttgtttc

SEQ ID NO: 45280 - DNA, 426 bp, Glycine max
  unsure (1)..(426): unsure at all n locations
agctntctcataagtcctaaatgacatttcaagctagaattaactcactttaacctccatttaccacagaatccagatttaaccttccaactctcaaagcctcactctttttccactcataacaccacattctcactttctaaccctaggttaattctacccttcatctctaacagttttccataagcaatttcagcacataagcatcacaagcatcatcataaaaaccctaaaactgaatgggtatgtttaactcatccaaacatggcaagttcaacatgctttccacaaatttcttcacaaataatcatcataaagcagaaacctagcaagactacccatcatatctcccaaaaccccatacccacgaaaatcagaggagaaagaagtccacccaaacctgagatttcgaagtcccacacgtag

SEQ ID NO: 45281 - DNA, 442 bp, Glycine max
  unsure (1)..(442): unsure at all n locations
ngagctggatggtcactntccgaaacatatattntctcttagatccaaatccagcacctgcagtgttcaaaaaaaggtcacatgtttagatgaaaaataacacattttgcaggaagaaatagagtcttgaattggtgattgttggcggcaaccaccctctccaaagaaatctccccaggaagagtctacttgaataaccatgtgaaaacaaatctatagcctgaagtacctggcctaatcctctacatatatctctactatccttcaggattctagacatatcacttaatattctgccggggtaatagtttagtaccttattatatatccctcattttccttanatggtaataattgaagtttgtanaaattatagataactttagtgcaagagactcgtgaaactntggataaaactcgcagtgacaatattatgcacgtg

SEQ ID NO: 45282 - DNA, 417 bp, Glycine max
gatgatgactttcctgacatcaagacacacatacgagctctatcttctaatcgatcactcacattactctccccctttgtttgtaagttaaagctttacttgagattaaggtatttaattatatgagctcttgatttaatcccaactttttctcccctttttgcatcaacaaaaagccaaagtgcgtatagagacataaaaccatacattcactgataatcatccaaacaaggaagataataatgcatacataaactaagcaagtatgataataattcattcatatactataatataccgccagataatttaaagagtcatccaagataaccaaattagaaatatcatactaataagggtgcaaaacatagccaatacacggctagaaatcaaatactataataatagtatatctaa

SEQ ID NO: 45283 - DNA, 314 bp, Glycine max
agcttatgtcagacagaataattcataaatgactaagaatcgggagttcacaacgcataatatgactatatgtgattgggttaacgatacaatcttggcagatgaggaggcggagaaactttaagatagctagcacatgggcctaatagaaatgttataacttggcaagcatatgacataaacaagtattcattttacacaaaagcacaagacaacaaaagtacaatgcggaccaatggggtcaccctaagagctgaatctgaacaccttgtaagtgtgcatgacgccaagacctgtgcaccttcatcccttac

SEQ ID NO: 45284 - DNA, 408 bp, Glycine max
atattatttcacatgacacagaattatcatacataataaggggtgaagaaacaataaatttgaagataaagaccataatgtgtatgaaataaggtgcaactcctaaagaatatacatgattgagttcatcataagcctttccacacaaacattcacatgctcctccttctatttatttgtacaatatagtaaaggacaaaatgtacagatgttataccagaataacaagactacctttgtactatttgtgctgcttaacattgagtgaagagagactacttccctgtataaatatgcgatacaaacattagaatatttacagccaaaatttggagctcaatctgcttgcatacaaccaaatggacttcaataggagtacaaaaataatacctattgagttttgcattc

SEQ ID NO: 45285 - DNA, 443 bp, Glycine max
  unsure (1)..(443): unsure at all n locations
agcttgttcttgattnttcctcagttctttaacaagctntgaacaatatacttgtccttcatttaactgtctttgggcttggcggccacgctcaacaaagtacttttgacacctactgtacgttgatttgaccaatgctgttatgggaatgttgtgacaatcctttaaaaccttattgatacattctgagaggttggttgtcatgtggccatatcgatgtccttctctatcataagccatcatccattttttctttgaaatgcgatcaatccatgttgctatggctggactcagttgacgaaatttttctaaattttgatcaaaaatgtgcttgcaaggagtgtaggctgcataaaattagttatgaataacaattctaagtatatatgaaagttaaataaacgtgaccatcaaatacganatcttacccaatttcttcaaca

SEQ ID NO: 45286 - DNA, 403 bp, Glycine max
  unsure (1)..(403): unsure at all n locations
atcttgttcatcaatggagtnccttgcttcttgaagattaatggtagcggaatggagatggaagaatactgattggaaatgccacttcaaggagaagatgagtcaagaagaagctcaccaccatatgaagccatggataagagcttgaaggtaggagaaaataacacgagggagagggagagaaggaacacaacattntgtgcctcaaaacaggtctgaactttgaagtgtaattctcaaatgatcaaagttgaaaaatgcacacacatgacctctatttatagcctaagtgtcacacanaattggagggaaaattgaatttctattcaaaattcacttgaatttgaaattgaatttgtggagccaaaatttcattaattatgattaagtgaatttcagtatg

SEQ ID NO: 45287 - DNA, 409 bp, Glycine max
  unsure (1)..(409): unsure at all n locations
agcttccaagaatcaagatcaagattcaagactcaagattcaagaatcaagagaagacttaatcaagataagtgtcataccctaatttcatccggggaccatctatttgttgggatgtgaccctcgtttgaccacttcgaggtacttggcacctattgttgcacaatctgtgaagttccgtgacatgccaaaagtcaaaaagaagcattgttgcacaatccgtgaagttctgtgatatgccggaagtaaaaaggaagcattgttgcacaatccgtaacatttcgtaacattccggaagccaaagaagggatgattgtgtaatccgtaaggtttcgtgacattacggaaagaaaacaagtatncgtacataattcgtaatgttccgtaacgttacggaaaaagaatcaac

SEQ ID NO: 45288 - DNA, 460 bp, Glycine max
tgcacctagctcgcccaggcaagcaaggttgcttcctctagaatgcaccgccttctggaggaacttcctggaaggcccaagtgggcctggttgctatttgcaccccctgtttactaaatacacccctgccttttttgctgattcttttttcgtaacgttacagaactttacgaatttcataacgatacttgttttctttccgtaatgtcacggaaccttacggattacgtaatcatcccatttttggatttcggaaagttacagaacctcacgagttgtgcaacaatgcttccttttgacttccagcatgttacggaacttcacggattgtgcaacaatgctatcttttgacttccggcatgtcacggaacttcacgaattgcctaacgatgagtgccaagtacctcgaagcagtcaagcaaaggatgcatgccatcaaacaatggtccccggacgaaat

SEQ ID NO: 45289 - DNA, 460 bp, Glycine max
  unsure (1)..(460): unsure at all n locations
agcttataaaaacaataatgcctcattcatttttagatatgcatgtgaattaagaagcatcaacaagaatcaagccaaggctattgtgcaagacatcaatggggcacaacacaccatatgattatgatgatggatggctcaaattctcataaaggtaaacttatcactttcaaattgagctttcaaaactatcatgacatgtataggagaatcaaggatttcaagtcacaaaatttccagaacttttattttcaaaacaattacccatttcttgaacatatcctataattcaaagaaaaacaagcaaagtcgtacatgcacacaaaatngacccanaatattaaactaaagatccgacgaaactaacaacatgtacaaattaacacaactaacaaattaacataaccaacagaactagtcaaaccaaagaacactctcccccatacttaaaccacacatt

SEQ ID NO: 45290 - DNA, 334 bp, Glycine max
gagaataatgtctaatctctgaagtctaatttctcaaatgatcgaagatgaaaaatgcacacgcaacggctttatatatagccttacagcacaccaattggaggaatttgaatttattgaatttccttggatttaatttgaggagcccaaatttcaccaattataattaatgaatttccgatatggtactacccactaatgcaagatcaagtacaagattctgcactaagtgtgcttaagtgtcatgaagcatgtatagcatgaacgacatgcacaaagtgtgactatatgatgtggcaatgacgtgtagcaagcaaatgttcaccttcccctt

SEQ ID NO: 45291 - DNA, 353 bp, Glycine max
  unsure (1)..(353): unsure at all n locations
ggatccttaagtcacctgcggcatgcaagcttcttcttccgcgctctgaaatttggttcccttctcctctacaagtattggcatcctccattgactagctntgttcgtttcttccgccattcaggttagtgttctaaccttgtgtcttcatttagaagcgttaatggccgtaagatagacgacaccagtgatgtgtggtggctgaggttgaagactaaggttcttccgcgagaagaaccttcttccgcgcatgtgggaggggcagttggatattgaagtggaagaaggagttcttccacgggaacccgcggaagaaaggggagaatgttcttccgcgcgttccagcgaaagaa

SEQ ID NO: 45292 - DNA, 438 bp, Glycine max
  unsure (1)..(438): unsure at all n locations
nttgagatggctntatactctatatgttcgacagtcacaaaatttcacatttcttataagtcgagattaagaataatttaaaaacatcttctttaaattattaaagaactttttactaagaacaaaaaactgcaacagtgtatggagcatctaagctaatagacaataccttagatataaaaagatttgaacaatgccaacaacttaaggtaaaaatattgatactaaaaaaagggtctagaccactcttattttttgtcataaaatctcacatcacttagaaattaaaacaaaggatcatttataaaaacactatagatattgttttaaattttgatatatatatatatatatatatatatatatatatatatatatatatatattttgaagatattcaataagtatattgatcgatgtttcactctgagaacacat

SEQ ID NO: 45293 - DNA, 392 bp, Glycine max
  unsure (1)..(392): unsure at all n locations
atatggagctgactggcaggtcaaaagcctcgagcacggaatatattaataagttctcggcatctctcctctcattctgacccctttggatctgtgtttgaagatgactttagtttttgttaatgttatttatctgattgtttattgaaacaatatacaactttagagcatagacctataaggtaccatccatgggtgtattggacatacgtgtagcttctagatgctattgtaacattctngttgaagatatgtaatatggaccagtaatggatcaatttcgtanaagagcttactcgttattatattaacgtttaccactctagttaagtcgcgtccatacttaatatggataatgattttattatgatatacttaccgtctaacggact

SEQ ID NO: 45294 - DNA, 413 bp, Glycine max
ggccacccagctcgcccaggcgagctcagctcacccaggcgagcatggttgcttcctccagaagcaacagccttctggaggaatcttctggagggcccaagtgggcctggttgctatatgcacccccatttttactaaatacaccccctgccttttttggtgattcttttttcgtaaagttacggaaacttacgaatttcgtaacgatacttgttttctttccgtaatgttacagaaccttgcggattacataatcatccccttttttgacttatggaatgttacggaacctcactaattgtgcaacgatgcttccttttgatttccggtgtgtcacggaaccatactgattgtgcatcaataccttcttttgattttcggcatgtcccggaacttcacaaattgctaatgat

SEQ ID NO: 45295 - DNA, 467 bp, Glycine max
  unsure (1)..(467): unsure at all n locations
agctntacanatgggtaaaaggctcacattcactttcttctacatcatattcaaacttgtccaaataaataataaagtcatctcgactcacagaaagtcatataagcctcatacaattaatatagaacctatatcctaatgtcacatcctatcagagcgtggtgttcccgcgccctctagcatgaggctcttcatagtcatccacctattcatctgctcccccgaacacaaagttcaaatcatcacaggatcgatacacaaacagcacaccgggagtgagctatcacattgctaactactagagagaaacaacacaacatatagttcccaaatacaatttacttagcatatttcacattatttcatcactgtgtcattcatcaatcacacttttcatacattaatcacaccgtttaatcatcaatcattatacacaggaatcacacactccgatcaagacataataa

SEQ ID NO: 45296 - DNA, 446 bp, Glycine max
ttaggaacggattgcgagaggccatattgtcttgaaaccaaattaggctggtatccaaccaggcctaaatagttcgattgaacacctgtacgacaagacaggatctgtggattcaagtaaaatgaccatatttcgttcacttcttcttcattgtccggatcaacagcaggaaaatagtcagtgaaccaggccgggccaacctctcgactaatgaatggagcatgttgaggaagaaacttgtcaaagctcagaaaaatcctcatgtactttaggaacaacttttgtgggttttgatctaaggtcttgagtgttaatcgaagtgctctatggccttcgatcgagcgaattgcaacttcttcagcataatcttgtgggattattaatcccatttcttgttcgaaagtggcattaagccacaattggagaagccacatatgcctcgacac

SEQ ID NO: 45297 - DNA, 182 bp, Glycine max
agcttctagccaaatagacttaccttgaattatattctttgatagccctcttgagccttgtttccctttccttgttttgaagctcactacaagccttatgtgaaaaaccatgatattaccatatccttaaggaattttggagctttggaattgttttgggaataagtgtggggggcttcccc

SEQ ID NO: 45298 - DNA, 438 bp, Glycine max
  unsure (1)..(438): unsure at all n locations
atgcgcctatttccttacatacgttctcttgcacaagacattttatccgaaaaatgcacccatatacaatcaaagcagcttcgttacctagattatttacacgtacctccaaggtgtagttggtacttacatcacacacatctncttggctaaattcacatacatgcatactcgaagcatattggggcaccaaaaattgcacctgtgcacatcttggcatttctaatacctatacatacgcaaacttcatgatgaatcttgactatctacacaataaggtgctacatttcatgctctttattcaagtttttgctacctaaagccgcatgcaaattcaagcatattntcctttgctgactaaaattgtattcaaattaaaagggatatatctctttggtatatgtcttcttcacataacatgcaacatatttatatata

SEQ ID NO: 45299 - DNA, 608 bp, Glycine max
  unsure (1)..(608): unsure at all n locations
naagatgagagcacctgcatgcatgcagcttanccctagaggggatggaccttttcanngtttggagagaatcaataactatgcctatangttggacctcccataagagtatggagtcagcaccacttttaacatttctcatttaattccttttgcangtggagctgatattgaanaggacgaactaactatattgaggtcacatcctcttcaaggggaagggaatgatgcaatcctccctaggaagggaccagtcactatagccatgagcaagatgctccaagaaggatgggctatagctgctgaagaaggccctatgattctcatgaacctcanggtagatttctgagcccatgggcaatgttggtccaattactttgtaatatagactagatgcatatattgaccttgattacggctcctaatgacgtacggaccctanaatatatgattatcaaccgtctatttacagcaccagactatgtttgtanacgtgttagtctgaattcacatgcactagtgatattgatgtgtgtgtggaataaaattaattgaattgtcgacgccaatccattaatttagaggtgagtgatctttgttactatccg

SEQ ID NO: 45300 - DNA, 383 bp, Glycine max
  unsure (1)..(383): unsure at all n locations
ttagttatcccaagtatagcaaccaagaaagtcaaccaattttgtgtggtctntattaatngtaggtgttaccatacatacaactaataaagatcaccactccatgtgtatnatntngaaagaaagaattagatattctacaacaattcatgcgcaatgcacccaccttggtagttaaccaaacatatttgccaatcaattaaacaactttagcattcacatgacttatgatatngatctaagggtccaaattaagctatgtcaccctggcattaatttaacatcctagtgacatgcacctaatatgatgactgtgtaaacatacctctcagttaaatacatgatagtctggacttcataacattggtccatgaaacatgtta

SEQ ID NO: 45301 - DNA, 267 bp, Glycine max
  unsure (1)..(267): unsure at all n locations
ctgcagctatacttatcagacgctcaaataaacatcgaaactctcagaattatatggcataactnttaccggatgccgatcggcgcataatgtcaagctaaatgacaccaacttgaaatcaaggctatttcaacgtgccatagcatatttcacctcaaaaccgaacttcaatcaagctcttaccgtgcggtgcctaatgtaagccaatgacacgatcttgaaaatactggatactttacacgtgccgatcagcaatacattcaaacc

SEQ ID NO: 45302 - DNA, 177 bp, Glycine max
cgtgtaatacacattcatagcatcgctaaagaatcgagaaagttgacttgatttcaagctcgtgtcatccacggtactatatgcccatggctctggaaggtacaatgtttcaagctcatataattacgctgttattatctgacgactcagtaatatacatcatttcaattcgtgtat

SEQ ID NO: 45303 - DNA, 595 bp, Glycine max
  unsure (1)..(595): unsure at all n locations
atatgatgagcaactgcangcatgcaagctntaggagataccattaaaactaaggtngttcctanacanatatgactttatgatacttcttcatgaatccgcatagatagacctgtattccttcctgttacatgtagagagatggctaacataatatttacggaacttagaagcactatatccttaatagaaggctgaagtgacaactcatagagaattactaaacaagaatggtagtgacttaaagtcattccagatacactccgagcctcgtgaaatacttacaggatgggtacaagaagcacctgctaacttagtcaatgtagtaatgaagatagtgaccagcactctgatcacacatctgagataggatcaattgcatagaagaatatatatacaattacttcgtacactggagacaccctcatatatatatctacgacgactgccctgcctctatagaggaagagggaatcatcttagagtctagtctacatcttatgatggacattatgccaacgatatacatatgatcactcacattgacatggtgtcggttatcactccctgatgtataaaacatgtcattataggg

SEQ ID NO: 45304 - DNA, 436 bp, Glycine max
gcatactcactcaaagcactcttcaattgatcagctaaaagcactagtctctctgcctacgcatctaccgtagggctatgattggtacctacagaagccttttcagacatgccactatcttatcagatcttctgactaccagaggagcctactatgctctactacagtggttacagaaggaaatagactatcaactctctaataccttgaatgaacgagagatatcaacaccacatggcgtctcgcttatactattgtccaagaatacactacagaacctactgacagttgtcattacccgttttcacaagtatccatctcacacaatgctcggtgaaagattctagagtgttgatatagaaaactgacatatgacactagacatgtcattagatggcgaaacacgtgccattatgagatgaagtataccgtgccg

SEQ ID NO: 45305 - DNA, 140 bp, Glycine max
  unsure (1)..(140): unsure at all n locations
tatcacttcttgcgaagcgctnttcaatatcagcgaggaattctttgactagttatatcatttgagacagtgcccctaaagacctcaggaatgccgcacttaacgatcataagactcatgcgatatgagtgatcccactt

SEQ ID NO: 45306 - DNA, 187 bp, Glycine max
  unsure (1)..(187): unsure at all n locations
gatgatgtcaaataagaatctaacaaggctgcttcaaatgataagcatttgtgtcgcaacctacccttcggcgggagggcgacacgagactcgcgggatgcgtgttccacgataggaatacgcgcggagtcgccaccaacgtntatttgatgaatacgtctgataataccagataagacgcgatcta

SEQ ID NO: 45307 - DNA, 185 bp, Glycine max
  unsure (1)..(185): unsure at all n locations
acgaagagggtgagaatganggagaagcccatgctgtgactgccattcctatatgaccaagttttccaccaacccaacaatgtcattactcagccaataacaacccatcttcttacccaccactcaattatgcacagaggccatccctaaatcataccacaaaacccacctaccacacaaccaat

SEQ ID NO: 45308 - DNA, 595 bp, Glycine max
  unsure (1)..(595): unsure at all n locations
agatgtgatctatgctacaccatngaggcctggatagatctanaggaatanggnatgaatgaagggtatgtgtagaaaaacanganantntgtgctctaaagagctctgacatctgaagttaatttacatgatcaaagtgaaaaatgcacacacatgacctctatttataacctaagtgtcacanaaatatggagggaaaattgaatntcaattcanatntcacttgaatttgatatcgaatntgtggagccacacattcactaattatgaatagtgaantntagttatggttcggcccactaatccaagatcaattccaagaatctccactaagtgtgctntggtgtcatgaggcatgtaaagcattaaggacatgcacaaagtgtgactatatgatgtggcaatgnggtctaccaatcanatgaattannttcacacacacataatactgactactgctgtgaatcanactccctatacaaactatcttgtcgcttatacaggctgaaatctatatttaggaccgactactatgacctaatcaggcaaatatgctctactatatgcagatatgacctcttgcctggtaaattn

SEQ ID NO: 45309 - DNA, 172 bp, Glycine max
  unsure (1)..(172): unsure at all n locations
taccctaaagttaatcgattatatgtaattgagccaatagcatcttcactaagattggtctacnngatggtgtaagtgacaattcatatcttggcgtgctgcttctaaatgatcaaccaacccaaggagatgagacaactgtagaagactcttacccatgcaacaagattct

SEQ ID NO: 45310 - DNA, 554 bp, Glycine max
  unsure (1)..(554): unsure at all n locations
agatgtgagtctatgcnnttgctgctgnggaacnttgcctantanttantattacagaanttaatggtattgctgtattatgtgttcgngagatgctaaccgnncactggagtggagttaatgatagntgttgcttaatgatcttggtgcaagaatctatnntatttgcttatttctggtatnttcgattcggcacgtggtagtggagatagttcacttggagtttcttataagggattatatgctgtctgcgtgttatggcgtatcactctatctttgttggtggtaatgctgatccgtggtggcatctgctgtaactattcttttatgcatgtataatcaaaccttcgcttaatctaccagtctatgagatacggtacgagtaaggatggctttcgttcttgatcttacactnggaatatattgcgacccnatcacggatatgatattagatctgctcattttatgcactttatgttatatttgggctatatgagatactctttttaattgttgaataagtgtagtgaacaactgaaatattgacatttttt

SEQ ID NO: 45311 - DNA, 259 bp, Glycine max
  unsure (1)..(259): unsure at all n locations
atgactgttngactatgccttgtngcttcatgtnntaatttgaacatctcgatatattatgcgcctgaatcgggcatcntgagtgaaaattatgccatatgagttagtcgacagcttcgntggtcaaattcaagcgtgtcgacatattattggcctgaatcggacatctgagtcanaagttatggcagtttaaatttccatgtgcttccatgtttaattntgagcatctcgatatattatgcacctgaatcggacatct

SEQ ID NO: 45312 - DNA, 676 bp, Glycine max
  unsure (1)..(676): unsure at all n locations
atcctttactcgatactatantganganagtgtaaattaannttttattttgtngtggttatantgtttttnnnntttntnnntnnnnnaatatgatcgttgagtcttctgtagctgccacttaacatattttaaaaccgtgttattatcatacttatctgtttctgtaaaactaatgtcatttatatgactttntaataagtatctatatttaactaccccacattaacttgtcaaattataagtagaaccacatcatataatcgttcttgtattatgaacacagntataccacaactccattgaatatatattatttgtgtacaatcactagaatacttaatgtaatcgacacatgaatagttactagtgttatagaacttatctacaanttcacaagtggctagacactgatgggtgtatctttaacccttcaaataatatgtatgccactagatgcgaaccaccttcaatctctctactgtaatggcnattctcattgaatactgatgatatataatctacgtaatatatatataccataataacaactgaatattttgactagcaataccatgtctaatactcttangcatcaagatatagagactccaggcatgcacatatcacactagggcttcttttgctataccatgatcatttaagttatattccg

SEQ ID NO: 45313 - DNA, 330 bp, Glycine max
  unsure (1)..(330): unsure at all n locations
cacttgtccacaagttacaaagagagtggccaatcaanagataatggtgtttcattcatcaaggacatcaaccatataaattgattaccatganatgctnanatcaattaggtctcacaagcctgcagcttttcgaagataagaacacaagtattagagtcacaactgatataagctagtaagcatgactgacatcaaggaaagatcatcaaccanaacctcacagtcattggttcactcatactcaagtgttanggcttatccatcatanacaaccagcaacaagtccaacctttgcatttcatctcctatcatacagtantgaacaca

SEQ ID NO: 45314 - DNA, 170 bp, Glycine max
  unsure (1)..(170): unsure at all n locations
gtgtgatttcgaatatctgcactttatgcnagaatttgctgtcaaatatgtgcagcagaattctggctttgtgcagaanatgttgtgtatctgttggttctggaaagagtaatacagatggtgttctggacgttntcttgcagatcccaacggtcacaatgtagacttat

SEQ ID NO: 45315 - DNA, 610 bp, Glycine max
  unsure (1)..(610): unsure at all n locations
nagatcatcgatactcaagcttgtccgcaccatcactannaaccgtntagggtccaacacctanacggntctctttgcttttgtcggttaacatggaccattcanaagcataaaatccatacatcactntactgcctttcgcgagaactacgtangtctgatttcctcttcgatggaggatacgtangagcaaaagccccgctcttgtcgacctcgtgagatggttagaggtccaatgccttagctttctcaccaagtaaaatggatcattttaaggtccaacgccttannataaccccttccaagtaaaaagaatcacttgattcgcccgttntgaaagaactacgtanngtctgattcctatcacanntgangntacgtaaagcangggaacaccttgtcgacacanaagataaaaatataataaggcttataaacatataaacgtatagggaataaaanaatgaagcatattgccacttgataaggctgcgtccttggaggcacatgggtgctatacttccgtgcgaatacactccngactttacactaaagtcgagacacgatttcggtttcgacgttctcataacgtgtgcactctnctttcttt

SEQ ID NO: 45316 - DNA, 92 bp, Glycine max
atgcatctcccgtcatatgcttggaacatccactatcgatgtaccacttctgatggaagcttgcttgtgtggcttctatggaggctggatct

SEQ ID NO: 45317 - DNA, 451 bp, Glycine max
  unsure (1)..(451): unsure at all n locations
aaatctaaattntataanatttaatnnaatattantattttttnnnnnnnnccaattgcgtattgcttgaacaggcctntctttcctcatttcctgttttttcctctcccagctagaggccctttacttactgttcctatttttgccattactgagtcaaactattgactcttagtgaactgaattactcctctcttctttaacttatagcacaatgaagggctaacttgacctgctgtgtgactctactgtgtcaatttactgtgctgccaatacggtagtgttctagtttatcaacgatttgtgcaactaagtactcatgcccaatcgttctataagacaaaacagtacgcttacaatagatccagacgatgatatcaatgatgttcttatcttaccaaatatttcagtgaacagttagtaatgcaatgcgctagctaacctaaagtag

SEQ ID NO: 45318 - DNA, 535 bp, Glycine max
  unsure (1)..(535): unsure at all n locations
gctaagctctgcttgccgcactaagcgctaatctttctttgtcttannanattgtggaattaggcttagcgagcacgcttcctaagcctattcttgcagaaaaaagattntatgtgttcttgcgctaagagcatggctatcacgcttatcttatgagtaaaatatcataaggcgcactaagtgcatctgctgcgctaagcgcccaatcttaattctaagtttattttttggctttcctttggaataattcttggctagtctcgtctttcgattctttttgttntcagatggcttcatgaaagaagaagacaacagctgcagtaccccaggccggatatgacatatctagnattacatcccangaggcatgtgactggctacacatatatgtactctgccggaagatccttttcgagagaatgtacactgctntcactgattngatgatttagagggatgganatagaattgcatatgactataacttgcgattgacctnatgtggcagatgatggattattgcatctcatacccg

SEQ ID NO: 45319 - DNA, 561 bp, Glycine max
  unsure (1)..(561): unsure at all n locations
tagagcatcgacagtgttcagcactctagtncaacagtgttttatggtcttcttctacccaagacatgtgggttctgtggngtccagcgangacaatgtgtgctcttcggcactgtaaggggctctgtggcttctaccaacgaccttgtgtgtgtcgagggagcggntntctgcatatttcacgcacgatgagaaagacgagcgatctcatgcatgatgatgacaatanagaatatggagggcaatggtttctaacgcgcgcggctngtgatatctcaattcttataacttataaacataacaacatcggtttgtaatggataaccgatgtactactagaccgatgttacatcaaatacattacatttattgtttaacgaaccgatgttaaatcagctcttaacatcgcttcttcaaaccaatgttactctatgagctaacattggtttgcccaacgatgtacctatcatctacatatgtacatngtttaaaccgtgtacatatagtacatgttttaacgagtagtactcttatcaaagcacgcttgtacttgtacatact

SEQ ID NO: 45320 - DNA, 220 bp, Glycine max
  unsure (1)..(220): unsure at all n locations
atcttctcaattaaatntctggcttcagcaggagtcatgtctccaagggctccatcactggcagcatctatcatacttctctccatattactgagtccttcataanaatattggagaagaaagctgtctgannatctgatggtggggcaactggcacatagtttcttatatctcttccagtactcatacaggctctctccactgagttgtctaatacctg

SEQ ID NO: 45321 - DNA, 633 bp, Glycine max
  unsure (1)..(633): unsure at all n locations
attgctatcagcacctgcngcatgcaagcttaaggntggaatactttacttgttggtaatgaataaaagcgcanaacggtattgtataatgcgtaaaatagagatcctacggccgcanactcgtaaattccgtgggtatgagctcttgaaagggagagaaaagaagttnctanatgcaaacacgtcctccctttcgtcacttttatattatggtgcacgggtggctcgcccaagcgagctaacctgcactttnntttttcttgagaggaacattaaccatgtccnctccttttcttatgggtagtgttntgcctatttgagcctactcaagttagaattacgcattaactactaaagaccaaaaatggtagtcaaatactgcgaatccaaaggatactgtgctgccttgtcggctgtctctgcttgttaccgcagagaaggagcaacgatcggttngttggaccccatccgcacttgcatccgttcctaagtacctgcaagtaagaaacaaccaggtatggccaatcttgaccgacgtcgtgcttaccttgatggtttctgctgtcatgtctgccctacccagaggtactaagatatcttgctctgttaccacaacatatcatgcgatgcgtg

SEQ ID NO: 45322 - DNA, 389 bp, Glycine max
  unsure (1)..(389): unsure at all n locations
catgttacttgaagtaacttaagtatttataacatataactgtgtattctatatntgttagatcgtaacactttaatacaatcccccattgttactttattaataatatattacttatcttaatcagaattctctgttactatcacattattnttaagactgcttcaggatttataatatctatgcttaattcttataaaacaatagttgattgtaataaagataaaagagctcttctaaacaaatatatatttttaaaaaattaaaactcagaccatattatctaatttgtgggacggaatggaaatctttgcataagatgtttaattacacaaataccctatgatttttattgtgcaatccacgatatctgcccgctatatcacaca

SEQ ID NO: 45323 - DNA, 126 bp, Glycine max
  unsure (1)..(126): unsure at all n locations
gtcatcaccagcagtactaacctgcttcaccaagggtcaccattcanaatgacccattatactctgtaagaccaatgataacataacaaatgtcaacttagatgacatcataccanaatgaacatg

SEQ ID NO: 45324 - DNA, 281 bp, Glycine max
  unsure (1)..(281): unsure at all n locations
ctttcactcggaagtgcgaatgagtcctgttatatatcgacacgctcgannattaaaccgaagctcatagcacattcgaacgacaataacttctcattcggaagtctcgatgagtcccataacatatcgagatgctcaaaatagaaaacagaagctcgttgcatattcgaacgacaataacgttntactcggatgtccgattgagccccgtaatatatagagacgctcgaaatttaacaccgaagctcgcagcanattctaacgacaataacttttcactc

SEQ ID NO: 45325 - DNA, 254 bp, Glycine max
  unsure (1)..(254): unsure at all n locations
ctcatttaattcagcgttacaagtacgactcattacttcagtgaaagtatgcgtcaattgtacagctcatntaattcgacgctcattatacggactaatcgcttcagtaaagtatgcgtcaattgctcacttcgttaattcacgctattatacagatatggcttcaggaagtatgcgtcgattgctcactcagttaattcagcgtcattgtaagactcatgactccaggaagtatgcgtgattgtcactcttta

SEQ ID NO: 45326 - DNA, 181 bp, Glycine max
  unsure (1)..(181): unsure at all n locations
cacctactgtacgttgattagaccaatgttgatatgggaatgctgcgataatcctctaacaccttattgatacattctgagaggtcggttgtcatgtggacatatcgacgtccttctctatcataagtcatcgtgcatctttccttngacatgcaatcaatccatgtcgctagggctagac

SEQ ID NO: 45327 - DNA, 615 bp, Glycine max
  unsure (1)..(615): unsure at all n locations
acgatgantgtatgctngtgaagactgngannacctctggantattctnacgatgtgtggaaccttctggaaccttatggtatgatatgaataagagtagaagagtgtacagactcctataatgtgtggagcattctagagacataatctccaccctangatacatgtaatctccaccattcatagaggaggtggagtcgtatgaataagggtacgagccttcattcctcatagatacaagtatagatacatatcttgggaagtctctatcctcaagctngagcgagccaccatacactgagacaactntgtacacacatcccttgaaccatactatcactttgtgtagtgggaagaatctcatattgganaatcatattcgcgtgctaccattactacctgtaatactaagcgcctatctcacttcacgaacgggatagccgagtttctcacaatggatcgagcagatggtcacttgcaccgctagacaataaatgcttgatgactcaccttgtgatccttgatcaaagtctctacagtgatcatgcacggtcacacatgactgcgagcagaccgangactgagctacgcttatgtatctcttgtagactctct

SEQ ID NO: 45328 - DNA, 235 bp, Glycine max
  unsure (1)..(235): unsure at all n locations
gagcttanctacacacacccgtccaaaactaagctcatcctcttgagaagcttccttgagaagctagagcttatctacacacacccttctaataactaagctcaccttcttgagaagagaagctagagcttagctacacacccctataatagctaagctcacccncatgacaaaatacatganaatacaaaaaaaagtccctactacaaagactactcanaatgccctgaaatac

SEQ ID NO: 45329 - DNA, 198 bp, Glycine max
  unsure (1)..(198): unsure at all n locations
atacaattgatgttgttctcgtgaccttcattgaaccccagccacattggcgtaatcataatatcaaaatgacgtctccttgaagtatataccacacacaccattttcgttcctattacaactgaatgggtatntgacccanatgttaatatcaaccttgcccttgaaatatatatgttagtgcttagctttactgag

SEQ ID NO: 45330 - DNA, 595 bp, Glycine max
  unsure (1)..(595): unsure at all n locations
tgcatatagatactaagnctgtacaaccggagaaaataaaccgaccatgaacanactgaagacgaaagctatatttctngananggagtaatagtctcggattcgaacacttacctgtngaagaacgaagaacgaacgaagaacgaatgaagaacgacgaataaccttcacggattcgctcacagaaacatctcggaaacgttacggacgcacctcagctaggattntcttcacggaaacaatctttctcacccaaaatagctgaaatgcatagctaggcggatctgggatccttaccctntcgcctatttatatgananatgaggaggatggtgtctcccagctctgccaggcgagctgcattgcttctctagagctaccctgctcctaaaactctaaaggccacgatgcaaatttgacaatttatttcatccccatgtgaaagtcacccacttcttctaattacagagagtacngatccttcggagctatangactgactttttngtttctttctctaccatatacggaaatctattaggtatggaattaggacatangagtccgagctggagcatttacaatgggagtgtgg

SEQ ID NO: 45331 - DNA, 234 bp, Glycine max
aaccatcaacaatctcttcagcgacctctgcaatatctgataaagccatgtcatgccaaaacacagtctctctcaagctcggatacggtgtcaacaacaccgaaacaactcatgcatgccatcatgagaacacacaaccatcaacaatctctttagcaacagcttgcaatagctgatagagccgtgtcagcagaatacaccgtagcttcaaagctcggatatggcaacaacact

SEQ ID NO: 45332 - DNA, 201 bp, Glycine max
  unsure (1)..(201): unsure at all n locations
gaacgtcgaagaacgaacganacctttgcgagattcctcacggaanacgttacggatacgtttcggaagcgcctcggcttatattntcttcacggaaaccaatttttccaagcaanttccaaagagggagaagtgcctaaagggctgggatccttttcttcttcattttctcccctatntatagcanaataggggagatgc

SEQ ID NO: 45333 - DNA, 182 bp, Glycine max
  unsure (1)..(182): unsure at all n locations
ctaccaactacaaaccctaagaaaactatattatctacacaaaaagtacacttctctatatttgcatagagggtggttttcctaaggactganagaacttgcctgagatgtcctaagtgatcatctaggctcctactgtacactanaatatcatcaaaataaacaactacaaatctacctat

SEQ ID NO: 45334 - DNA, 601 bp, Glycine max
  unsure (1)..(601): unsure at all n locations
atactgagcgaccttaagctaccgcngcatgcaanctaactcgtctattgattntcgttgcacaggattatatttcttttactncacncaccnggccggaagctttgctggatcgaaaaaacgaagattcttctacttcngcgaagtctttggattctcacgtggatctgctccatcaaatatagcagcagcagaagcttctctgngagagaggttatgcatcaaacaacggatgttgtntcatcggtttcagtttcagagaaccctctcttctcactcctaattgcgcaacagcttcagtagttggcgcggttccatttccagcgagttctactctcagtccaagcctcancttattttcctcagacacaatcttctactcctctcttgtgggttcactactctcattttccttttcttacacgttataatgactctttctttcataacaagcattcaggacctgattgtgttgagaacatattaaattgagtgcggtgacgattgggcccgacgtattctcttgagtgtgtgcgggtgcgcgacactactcgctcctgcccttcaccatcattatgtgacgccacatcntgtcacttcg

SEQ ID NO: 45335 - DNA, 272 bp, Glycine max
  unsure (1)..(272): unsure at all n locations
ttctgaagaaactnttctaacttacaaaattntctnttcacttactcatgatgatgcatgatgcataanagatatgatatggactataatgcaacatacaatataacaaccaatacaaattccatttaagagagttgtgcatgtaaaagacaaagcatcttcaagcttttctccaagcttcaagctctagtcctcatgttgtttatgtggctccccctatctctaacanagataacattagccacaacatcattcttagccaaatcaaatcc

SEQ ID NO: 45336 - DNA, 602 bp, Glycine max
  unsure (1)..(602): unsure at all n locations
gcatgtgcctatgatctcagctctgaatgccttctctatctatnggaggcttggtatanccactatcttctatatgacatcaccttngagtagtcaatgaattagaggcangcacaacatatggaatctcaatccacaaggcgacaacatttcagcataatgtcttcaattagcaatacccaattcatcttaatactttgatttagaccatanagaatntgcanatcatcatcagttacctgagcatgattgcttgaccttggtgtgagaatgtangtgatganggtataccagcattttgcttcagtagttaatccaccaactcccaggtgatctctcaatatccttgtaggatcaagaaacattttcttatanngtnnngcatcttgtgaaccatcaacggttcatcanactgcgggactcaccatgtcagactaatacttncttcacacagancatctatgacatgctactcattatagtaagaaagatacctcanggcacactacacatgtgagacaccttgctagngaactattctacanaggttataanatgtactagtgtgtactacacaatcatgacatacttaatctattctg

SEQ ID NO: 45337 - DNA, 282 bp, Glycine max
actgcatactgacataatttatctaaaacatcttaaaaaaaaaatatagtgattacacattccccagctaatttcttcccaacacttaaaattaatcacaataaatcttgaacataattaatccatcatatgaattgctttcatttgctactaaatgaccattattttcaacagatcctctttatttctcccccccccttttttgtaaatcttccacctagggtatttacatttaacattaattaacaataaagatctgcacattagctacttatgttaaaa

SEQ ID NO: 45338 - DNA, 104 bp, Glycine max
  unsure (1)..(104): unsure at all n locations
cccattctttctcttgtattatctgatngataattcttctatactanctacttgtgaggctaattgtacatttaaacatttatttattcaatatgcaaaatgct

SEQ ID NO: 45339 - DNA, 633 bp, Glycine max
  unsure (1)..(633): unsure at all n locations
agtagctgngcacctgcngcatgcaanctccaggaganaccatanaaactaggggnttcctanacaactatcaattgattgttacttcgtcaagaatccccattgaataacctgtattcatacctatcatagttagtgagaaggctcatagatatatacggaacttatacaaactatatccttaatcgtaggcgtaggtgacaaccatagtgaattactaaacaagattggtagtttacttanagtcattccagataccctccaagcctcggaagatacttgcaaaatggtgacaagaagtacctccaaantaatcaatggtattaatgaagatagtgaccaanactcatatcacacaactgatattggatcagtgtctgagaagaatataaattcaactaattccanacactggataacacccctcagattatattatcaacgtccaactgtcgctgaccttctagtagaggagagaggtgaagacaatctaatgagtttaagtgaaacaacatctatgaatggacatagatgacaaaccgagtatacatcatgatacactcaacatatgaccatgtactacggctacctacctccatgatggtatatataccatattatatntattgccgn

SEQ ID NO: 45340 - DNA, 129 bp, Glycine max
aacctgtaattctttatgcaggggtgtgctaattgacaaccaacctctaaaccgctggctatatcccaacacatcacaaatgggagcatgcatgtacatcacctaacattggtcttctgtccacacctt

SEQ ID NO: 45341 - DNA, 205 bp, Glycine max
  unsure (1)..(205): unsure at all n locations
gacaataactatttactctgatgtctgattgagtcccgtaatatatcgagacgctcgaaantgaatgttgaatctctgaacatattcagacgaccataactttctactcggatgtctgattgagtcccgttatatatcgagacgctcgaaattgaacgcggaatctctgaactaattaaacggctatactcttcactcggatgct

SEQ ID NO: 45342 - DNA, 614 bp, Glycine max
  unsure (1)..(614): unsure at all n locations
atactgcttaagcactgngctgcagcttagatangaagtgttaagggtgannactnnctgctttattgttgattatcagagtggacctggagatatgtncgcggggtcaggagaacctggggacgtcaggtggtgtgctatngcccannaccaagcttgaccaatcccgacccaacccgggcatagtcggtcagtgagaacctgtgatgtacctaagcaggcgagctcctggcagtcaacagataatatgaacanagaccacaaagcaaggaggcttgtggtggctggccagctgtgaattntgtgtgatatgtggattatggcctctggtaatcgataccaacggttggtnanntcgatacaggcttanaaattgaagacaggaggctangtatgtctctggtaatcgatcacnccggngtgtaatcgattaccacgctttgaaacgaagtcggaagctaagggacctctgtaatcgataccacctgtgtatcgatacacatgggatggtcactggtatcgataccngtatgtgtatcgatacacaatgcttnttgcatattatgtcctgggctgtgtattcaagttagcctctggtatcgataccaggctgg

SEQ ID NO: 45343 - DNA, 172 bp, Glycine max
agaaaaaagggccatgagaaaaggaagggttattttcgatttttcagtccggtcctttttttacagatctgactttgaacttgagtttgaatctgactactccccccttatctctctcgactctgaatcagactatatcccctttattctcctgagactatatcccccttct

SEQ ID NO: 45344 - DNA, 402 bp, Glycine max
  unsure (1)..(402): unsure at all n locations
ttcttctagacttagagagataacatgtaatcctcttgaacccttaccttccactctctcatcatgccgagactccggaaccctaacaggttttgccttttccatgtacttgaaacanaactcaatagcttctttctcaatgtacctttcaacaatagatgctntacgacggtgtagattatntgtataccattntaagatcgtcatgcatcactcaaccgggtacatccaccgcanataaacgggaccgcaacatttaatntctctcaccatatgaacaatttagtgaaccatgatgtcaaaacatgagagaggaatatatatctccaactgacatatgataataatagcctcattttctagctcatctaacttgagaggatcaatgactnntgcacatat

SEQ ID NO: 45345 - DNA, 198 bp, Glycine max
  unsure (1)..(198): unsure at all n locations
tactgattggatctgtgcangcctcttgctaatgctcctttattcttctttaatggtaagggtaatggccagtgccaatttctgccccatgtgcctcatcactcatgaagcccttaattgcctgctggttgagatgatcatcactaattgtcaaatcttctggcataataaatcatgaatgggtggaacatcttcatg

SEQ ID NO: 45346 - DNA, 560 bp, Glycine max
  unsure (1)..(560): unsure at all n locations
ataagacgttgnagcacctgaggcatgcacgcttgatgcttgagtgtcacataggtgcatgcatgaccagntctacataatttatttcctaatcatcatggtgcatgtgtatcatggaaataatgtggggcatccnctntatccncgaactgctggccaaaccctgacatatatcatgtccagccgttctaccagccttgagccaaaatcccaacttaccatataccttgacccanagtgagaatgtcaatcctcgccctcggaagaaaacaaaaaagaatatttcaatcanagaaagggagaaagaaaaaaggaagaatatcccaatcgagagtggagaaagccannagaagaaattccaatctatagtgggagaagcaaaaagaagaattctcatctggtcgaaatataaagaaatgcagaagctttgccaacatattgacaaacatatgcaccagtaaaataagaaaagaaggaacccaccaactgcctctcctgatgcaacaaatctggcgcgtactgtcgctcactacaaacaaaagaaggcaaacctcatcatn

SEQ ID NO: 45347 - DNA, 569 bp, Glycine max
  unsure (1)..(569): unsure at all n locations
tgaactgttaatctcanctngcacantngaantggtttggangaagaaggtanganatggtgtnttccatatctacttggactcaaggctcanaatgcacanatgactaatgctctcnganacggaaccgttcccacactccagatgtctgctcanagatcccaatggtcagatcatggacangtgttctgtgaagcgccagaccacatntcgagaaatccaatggtaacnaggatgggcagcgtntaccgtacagatcatgtacttcttgaaagctcataaaggctcctcanaagcttctcgtgcttcttgaaagcttctcagaggatatattatatgtgtacacaccactgcaccctcactcngatcagcatgcaccttcatcattctttcactttcaaccactatcttttgctaaacananggangatttatgaagaattttatcaacacagtcatcataatactatntgaaattattatgcttactcattatataacgtaattacatatngagtgagagatattctattaataaacatntgtagtaggtatattgcttatgaccg

SEQ ID NO: 45348 - DNA, 515 bp, Glycine max
  unsure (1)..(515): unsure at all n locations
gagaggatcaatatcactgcctatacgtngcacctcccagataatttatactcatcaccatctgtatcaattctaacttaattccttatgcaagtggagctgatattgaggaggatgaactaacatatttgaggacacatcctcttcagggggaggagatgatgcaatcctcccaaggattggaccactctctatagccatgagcaagaggctccgataggattgggctttagctgctgaataagccttatggttctcataacctcatgatagtctctgtcccatgggccaaagcttggctatttatctattgacatatacactatcaagccttatatctgtccttgcattacggtccatatgtaagacggaccctaaaaatatgatgtcacccctgttttaggcactaactagtttgattaaggaatttgtattctcatcctaatgatattgtttgggttggaataattaattgattgttagaccattcattctcttagagagggcgatttccg

SEQ ID NO: 45349 - DNA, 622 bp, Glycine max
  unsure (1)..(622): unsure at all n locations
atgatcgttactctangctngncatngctgctantagaagaagagcaagatagaaaccttggtacttgacatcttgcgatntatcaaagacaaggaatacccacaagaggcctctaacaatgacangagaacattgcggatattggcagcgacttttcctaagtggaatatcttgtcacgaggaccatgatatggttgcttnacgtgtggatgccaggaggctgacagatgctgttgaatgcatgangatcctttgaacacatccaatgaacatgccatggcccggaagatcctganggtanggtactattggctcacanatggaaatgattggtgtatcatgtanggaagtgccacangtgccangccttcgccaataatgtcacngctttgctcgtacctttgaacgtcttggcagcaccttngtcattctctatgtgagggatagacgtgatcagggctatttgngctatntagcannagtgggtgtgtgtaaataactgtacactctatttcatcnangaccatnngtgatgctcnganggctacactcatatggtggactcgtaagtntgtgngattagaagatacacaacacactaaatgggggtgctatcattag

SEQ ID NO: 45350 - DNA, 253 bp, Glycine max
  unsure (1)..(253): unsure at all n locations
cctactatatactatcttctctccatgtntcagtaggatgaagttggtggttctatcacatatagggcatgcatgatgtcntttgacactatatccacttaaatttccatatgtnggagagtcattaatagtacaaaacactattgaacgtaacctgaaggtctgttgcatattggcatcccatacatcaaccccgtcttctcacnaatttctcatgtcttcaatcaatggattgagatacacattgatatca

SEQ ID NO: 45351 - DNA, 244 bp, Glycine max
  unsure (1)..(244): unsure at all n locations
tatagtccctcataattntttactgatttgtagtcctataaaaaaaatcattccattcttagtccctcaattatttccattctggttttagtccctataaaattctatatgaggaaccaataacagaatataacatatgatggactaacaatggaattccacacaagatgagggaccacaaagataataaatccataattaaatattaagtggtgtgacaatgcgcttgcgtcctcgtgaaatg

SEQ ID NO: 45352 - DNA, 76 bp, Glycine max
gtttgcaggggcatttctgctttacttaacaattgcttgtgcactggctatcttaggcttatagctctcaaccgca

SEQ ID NO: 45353 - DNA, 581 bp, Glycine max
  unsure (1)..(581): unsure at all n locations
atacgagagtcacctganggcatgcaagctatncttatggactgcctncggacttcacccngcgtgccagcctggaatagttaagccaagctcctactgttgaggggcaactcccaccttatgaagactatcccgggcatgacgatggngaaagagatacccatctgtggcccctgctccacctcatagatgcgtcctcgcatgcaccagccgaacatagtccgccatatcccggcctcacccacacgcgtataagaatctgtttccttcgcggaagataagggaaagattgaggcgctcgacgagaggatgatagcactctatggccatcgcaatnacgcattctcggattagccggattatgtctcgtgcccacatcgtcattcctccaaattcaaagaccggactttataagtcaaaggtcacatgccgatgggctcttctgtgattgccaaagatgcggcgactctgcaacagaagtgtgcgcattcttcagacagtagccgacagtgagatgagaccactgagctacaatcgacatgcgactgactgcttttagagacagcaacgcatgtccacag

SEQ ID NO: 45354 - DNA, 586 bp, Glycine max
  unsure (1)..(586): unsure at all n locations
cctatcatgctatgcttngantnacatacagccnngncacgaagaccacatttatataatgtatcacatgttactttttattantnntatatactctcttctatctcagacgtttttatactnntaattccccctcatcatctcaccatacaanactaagttaacgatcgaataattaacaacgaatttatcattacactatcgaagctattattaattctactgataatactttctgtcacaaaatttaatcgcgcatatttagtagttctccttcaaatcacanatctcgaatcagaaactttcttatagaactcgaacccatntttactcagacaaaatgccttgtgttctttnttttatcagtgaagtaatgcatattcaatcttttggatatatatcactagttctcaacatntaataatttaaaataagactaactttcaactcaataaataaaaacacgtgataacttaaataataacttactacttacaatgtgtacctaaatacttcattataaaattcttgatgacttttatnttaattctaatataatatgtatacttctataataagtaaattn

SEQ ID NO: 45355 - DNA, 258 bp, Glycine max
  unsure (1)..(258): unsure at all n locations
attantatctaattatatgctanaggagtcctnctttatgtgtccatatgttatatataaggcatgnagacctggaacatatatacaactatcatattaatgattcctaatatgatgcatatgatcatatatttacgtcatattaccatgtctttgatttattaacatatatatactttctgtatagaatttcaagtagttaatggcatgctgtctaataagcagaatatattgtatgttatatctgcatgatcatgt

SEQ ID NO: 45356 - DNA, 328 bp, Glycine max
aacaatccatacatttaaatgatcatatagaggtttggaagaaaagtctattcctcatgtattatagccacaacactatatatacaataacatttaaaatctgcagacagcatgatgtgatggtgaacattactacctgaggaacttggaaagtggtctgctatcaagcccattcacggaaatgctcatatatgacatactccagatggaagtctatatctctctagtgcaagtactataatactgatatactctcactgatttcataaaatgaaataaagcttatatcataatgttcttacctaagtgaaattacctcgatgtgcaa

SEQ ID NO: 45357 - DNA, 417 bp, Glycine max
  unsure (1)..(417): unsure at all n locations
acactctgtccatattcggtcaaggtcacctgatgatntctagtgagcctatataactctctgagtnttatccatctagcaagtagagttgggctcaccagatcttggtatatgtgacaatgtgcatngtgccactagagtgtagcagatgccaagtaggctctagttcatccttccatcttatagcaaatgacctactaacttcaccttaaggctacatttaacaagcaaagtaatataagcaaaattattatatcatgtcatgtntatntgagaataatggtgaaatttctaacctggatccatacatgaatagtgttgaacatctcctatactnttntggtaatcttcatcatagggtaagccatttccttctatttctattgatcttttatccatggttctaaactacattta

SEQ ID NO: 45358 - DNA, 578 bp, Glycine max
  unsure (1)..(578): unsure at all n locations
ttatgaactagctgaatangagtgtnaggataacttctgctntatngtaccacgagtggtcctgatgatatgtcgtggggtcaggagaaccttgggacgtcangtggngtgctatngcccanaaccaagcttgaccaatcccgacccaacccnggcatagtcgttcagtgagaacctgtgatgtacctaaacaggcgagcttctggcagtcaacagataataggaacaaagaccacanagcaaggaggcttgtggtggctgcgcagctgtgaactntgattgatatgtgggttatggcctctgggtaatcgataccaagggtgggtaatcgataccaggcttannaatgaaacaggaggctangatgtctctggtatcgatacacngngtgtatcgataccngcttgaaacanggcaggaactangaagcctctgtatcataccagggtgtatcatacangctannanggactggagatgaaggccttgtatcatacacctgtgatcataccaangatggcactgtatcatacangatggatcataccatgctttgtattatgctgagtggatcagtn

SEQ ID NO: 45359 - DNA, 269 bp, Glycine max
  unsure (1)..(269): unsure at all n locations
gagtatatagttatcgtcgcttcaatctgctcaaagcttcaacattcaatatcaagcgtctcgatataatacgggactcaatcagacatcggagtaaatagttattggtcgttgaatgcctcagaagtcaacattcacttncgagcgtctctatatattgcgggactcaatcagacatccgagtttaaagttatcgncgtttcaattggctcacaggatcaacattcaattctgacctgcccgatatattacgtcactgaatcggacat

SEQ ID NO: 45360 - DNA, 278 bp, Glycine max
  unsure (1)..(278): unsure at all n locations
gcttaacctcatcgtctctcacagtctttagatttgngagccaattcaattcttgtgttcggactctcagccacttatgatagccgccgatgatcccattactgcttcgcctaagctctctgtcctttcttcacaccgcatcacatgccttgcgaactcctaggagtacctgtgcattgtggtcactgaaaccgcgtgtaatgaaaggcgtgatgctttcgtctaatggcgctcctctcatggtgtagctcagcctgcttatggcgaggacaggatta

SEQ ID NO: 45361 - DNA, 598 bp, Glycine max
  unsure (1)..(598): unsure at all n locations
ggtttcggtaattaatgatcttatttaatgttttatatataatattttgttatatttattnnttttnnnnnnnnttgctgctttagttactgttccttcntcttgtgatggttataaatcactttattaatgaatctttctttatatanttcttcagccttaaagatcctacattgcatgcacttgataggccactaacataatgttgataatccgacactcctgtgttttctgtggtcaagagatcagctaggagccaactggtgtgctggaaatcattgaatctgtgtgtgatcgtaatagatgggattgatgatggtggtaggaactgacgtgccattgtcgtcgacagattcctgcctaggtatcttgattgaaatttctgcgctacacttgtcacattgtttcgtcaaacactaatctatatttctcctctnttgctaaaccttacgtcttcaagcccggtggttggttcttttataattctgcttatttcactatctcttatatgtttctgttcagtgcatgtcgttgcagtcctccctcgctctattacatgtcatgttctactcactgtcctctcgctcatcccctncac

SEQ ID NO: 45362 - DNA, 477 bp, Glycine max
  unsure (1)..(477): unsure at all n locations
gattgatcttctctcacagcattncttgtaggcttaaaagtactattattttgtanatgctttatgaaccacaatcacattagtcctatttcaaataaacaataattcaatggtccnatatcaagaacaaagtaaactgatttgtgtaagatatancacaaatatacagagcatatacacgaaatcantgcatcagtgaatgccacacataaccttacaactaaatatatcatctcaaggaaatattctattagttttctttcgtaagactgatcatatggaaacattctacatttatagcttacagatgattctaccttagcattagtttaactctacactattcataggacatgcctgtatataaaagactattatataactagaatttctcatatcaaactatgatgtaatcaatagaggaccagaacaaactctatctataatgcgccttgacatatatacaagaatataaat

SEQ ID NO: 45363 - DNA, 608 bp, Glycine max
  unsure (1)..(608): unsure at all n locations
tgatacctctgactcacctgcangcatgcaagctatanagcttatataatagatngagacanaaacaantatttcattctatgatatatatacattacgtgatgttatgtaagttgcttttaataatggattgttcttttttaacgtgaccacattcacacagcttatctggtgtttgagaatatcgtttgaaagtcatctgtggtcctgtatatatattttgtctgcagtaagaatttatctcaattatccattgagagatgcgcgtgcagcaaatatacgacttccgattaanatgagtctccttcaggtcattctctcttataatcttatcaaattagtacatgtatcttaagaggctatcccctatgatctatcactgctcattcaaacatgaacactctgntgtgcatatttatgatgtcgctcgatgggtacgactcattgaacgagaatatctgtggacatgactgtatgatttctncctganctcttattcttggttgcaggaacacgtgagcaacttctatatacactgctgtcactccctgccttctatgaataggcatgattcagtagaagagaatcgccttcctctcctgctccct

SEQ ID NO: 45364 - DNA, 186 bp, Glycine max
cttaaactctaactactctcctccctatatattactctgaactctaaaatcaaaacgactactcaccactttatactatactctaataagctagtactccccctaaactactacccaacaaacataaaacaaaaaagcttatcaaactctaaatgccgaatcaagctaacctatctactaaatggc

SEQ ID NO: 45365 - DNA, 303 bp, Glycine max
  unsure (1)..(303): unsure at all n locations
tcttctctgatcatnngctggtcacaagtcaatcctgttctttnntgtatttcatttctgggattctctgagcattcaagaagaaaatgtgacttctntacctcatgtacttgatcttctagcagtgtaatgcattcctcctgtanatcattctgtggcataatcctactcanaactntgctgaaacgagtgcttttatngttttgtaaggatcgtcctctagcatttgtcatggatctgtcagtaaccaccattggctcattctcatctgctatagtaacagcagctggtgtcttctctttt

SEQ ID NO: 45366 - DNA, 292 bp, Glycine max
atttatagtctctcttataataccaggatgaatcatactcgtctgaagtgtccagatgacaaaacttgacataatcaattaacatactgtttaactttaggtgaaaacactttcataaaatatataatgatctcttaaaatcatatggcattatcatactgcattatgttcttttatgcactggtctacttacactccactatctatctgacatatgtaagagatacattggaacaaaacatcatattgtctgctgatacagtggttctactattaattgtatgtgtacatc

SEQ ID NO: 45367 - DNA, 249 bp, Glycine max
  unsure (1)..(249): unsure at all n locations
cgtgatggagagagagagctgtcntgaaagctntntggtcttanataaaagggttntctctntttctattattttaattaagcaatgccacatgtctncattngagtggagcananagggcccactttccctntttgactgtgacccatactcagccacanaagtgaggaagaatctgatctttganacgctaaaatcctgcctcggntngcgtgccatttctctggttccagttcctcgcgtttctct

SEQ ID NO: 45368 - DNA, 601 bp, Glycine max
  unsure (1)..(601): unsure at all n locations
acatgtggacttntnatctancttgtgattggtcttcgccgctaaggatcgatgtgtgtctgnactaaagcttantatntcgtnctgcttggacgaatgagaaaatctgggcacatgaagagggtgacgatgaaggagatacccgtgctgtgactgccattcctatacagccaaggttcccaccaacccaacaatgctattactcatccaataacataccttcttcttacccacctgccagttatccacagaggccatccctataatcaaccacacagactacctactgcagcttcaatgacgaacaccacctttagcacaaaccagaaacatcaaccaatatatgaaatttgcagcgagaaagcactgcgaatgcaccccactccccgtgtctatgctactngctccctatctactnataatcaatggaaccataacccaccaacgtcgtaacctcttatcgagatacactcgacgcatggtgctgcacgggaagcccgngcatcatgacattgaggcttgaactacgtcaggctactgaatgctgtgaattgaggatcctgtaatctacatgcagaatgcccatgggcattgatctgtn

SEQ ID NO: 45369 - DNA, 358 bp, Glycine max
  unsure (1)..(358): unsure at all n locations
tctgaagcttgtaatttttttcattgtatcttttagactatttattatggaagcttatcttgttacatatttcaagcaacaatattatttaataataagatcagatttttattggtcattatatacgaagtagattataatttagtggttatctaaatattttattataatttaaaaagtctaatcacagaatcaccactctgggattatcatctacaatggatacatgtgctactatatactttaattatatacaccatacatgttgaatcacccagtaccaaatcatatgntacacaaacactaccacccattctcggtgctaattaggtctgaatataaagctttttttgaaatt

SEQ ID NO: 45370 - DNA, 561 bp, Glycine max
  unsure (1)..(561): unsure at all n locations
acatgtggtatgctgtcccacgaagctcnantatctccacactnttagggtgagccattcttggatgtacgtgattntctcatggcccactnggaccncatatctacgcactacatgacctatgagaactatattatctacacagaatgtacacttctatatattngcatacagggtgtctttcttaaagactgaaagaactntcctgagatgtcctaatngatcatctacgctgctactgtatactanaatatcatcataatatacaacgacanatctacctatgacaccctctaagacatgatgcatcatcctcataaacgtgcatcgtgcactagagagcacaatggcatcagtncgcttgatactaccaccatggcgtgaacgagctgcacgctcctcttctatgcagatagggggactatctcacacagtttgaaaatatgtccatcactataacaatataattagatgaggcatcttcatatgtgtatgctnaataggacatgcatacatcttggaacaacgacaaatactagttctaacacttcgatttactgg

SEQ ID NO: 45371 - DNA, 690 bp, Glycine max
  unsure (1)..(690): unsure at all n locations
atttatactcnactactgaataaagngttnggtatatttggtatattttttttntgtgnntntntntttttttttnnnnnnnnnnnnnnnnnntaaattcggtcgatctgatgcatgcaccctaccnnacntnacantncannttcaccntgggccctgccatctattttctatgtcccttctgatcacctcagtctgggtataaaacaacaatagcatcatcctatgaatactctgaatctcggataacttgatgtcgctatatatttgtcgcgcaagacgacgacacagaatataatactaatcacgcactttcttattaattatcttcacactaataagatgaagtcacatgccagcacaatgatgttcgtcactatatagctggcttcgcaatcatgtattcggacgcgtaaagacgcgnctgcgtanggtatggtgacctaatctcatgatacacatgtgtttggccttctggaccacaatactcgatactgacaatgttgtgactactaacctatgacatactgactgtattgaatgttaactcgattcttggaggcttgaccaccatatatctttttttttacattactctaataccttttccttcattctcataatctatcatacaaatattactcatctatcctatactaaacagtttagtcatcacactcagacgcatct

SEQ ID NO: 45372 - DNA, 410 bp, Glycine max
  unsure (1)..(410): unsure at all n locations
cacgtgctacttaaacctgtactgttaactatcaacggttaagctaaacattcttttanttgcngactaaaacaaaaacattttgattgtataatatcatcaacactgatccatcgctaatatgttttaacctagttaacaattacatccacatgtaccaggttggaaagataaacgagctaccatggtgttcattgctgatacgtgacctacctatctagacacacctttgcttatgcaaccacattatcatcctactatcaattactatcagaaatattaatcatggagtaactttaagcactgcaaatacttaatagtataccatgtgttgtagtatgacgtgacaaaaaatactgtataataaaaatacataaaactcctccctctacaaaagacatatacatgac

SEQ ID NO: 45373 - DNA, 612 bp, Glycine max
  unsure (1)..(612): unsure at all n locations
tgtcacttgtatttattattattatttanttgtanactatttttnttgttataattttnnnnnnnnnnnnnnnnnnttgtgagagcagcgctgcatgcacttgnggngccatgaaaatgaagnggatngnaggctcgtttaactcctgatatatctacagtgtctttctgatatatttctcctatgaaaaatatcatcttgtgagtaagaatcaaggctaataagcctcgtcataaccagagatctgtgatttccacgtgacaaattgagttgaacatatgtaactgacattttgtatgtttatcttgacatctaatgccctttacataatctcataactttaatctaattaatactcatatagagtgataacctatctgtatttcactctatcttaaaacattgttatatcttaacatctattttaatgtcgtgtctatacaatgatatttatttctttattctcatccgtatatgaaatcatatggctacaggaattatatcttatcctgatattagactagatggtgatgattttaatatatataaaaatcatttgctacgtantgatattaactctaattcagagcttacggcaatgtttgactgtcg

SEQ ID NO: 45374 - DNA, 244 bp, Glycine max
  unsure (1)..(244): unsure at all n locations
tccctttctntggtatgaagctcattacaagcctttaagtgaaaaccatgatatcaccttacccttaaagaatntaggagctctggaattgttttgggaataagttgcgaataagtgtggcgcgatatgtctcattagaagatatgatttctggccatgcttaatgtnttattctggccatgctagatgtatatatatatggcctagttctttctttaatcttcaactttgtactgctcaataa

SEQ ID NO: 45375 - DNA, 592 bp, Glycine max
  unsure (1)..(592): unsure at all n locations
cggatgcactangctctattagaaaatggantgggcntagacaaccattaggggctatataagtgatgttgaccattaagtcctatntctaagtataataacagagaattggaacgaanattntcttttcatttgacaatntgagcttctttgaatnntaaagttctcatgaatatnnggaatgaaaataaaaaataaatgaacaaattattgaatcttttgtctcatgtctatgaatatagaatacatcaattcaagcatgcatcacacaattcanagccattctacagttatcagaagaaacannatactagctaggaaaattgatncaactgtgcantntgatactaaatatatcatctaacaacccacanaangataatatgcggcatggaacaccnnaagaaatcacttgaagatcaaataccatactctcttattccactgtccacctacctttcgtggaggcgacgcanactcgcggatgcgtgtcacgaagggatccgcgagtcgcacacgttattgagaaacgcnganaaccgaanacgcactacgactttagtgaagtcggagtgattacgccgngaagatn

SEQ ID NO: 45376 - DNA, 117 bp, Glycine max
gcatcagcacttgtcgcttcggatatacttgtcctgtcaaaccgtgcaaggatgtgccaattggctcgtatactaaaacagtggtactcctgcttttgttattgcgtaggtcgtgtg

SEQ ID NO: 45377 - DNA, 172 bp, Glycine max
  unsure (1)..(172): unsure at all n locations
ataccttgattatacggaacaataagttagacaatgccatgctagatttatgagcttctgttagtgttatgcctctgtcaatatttaattctctatctcttgagtctntgtagtcaactaatgtggtagatcacttagctagtagaagtgttacctatcctgctggcttcat

SEQ ID NO: 45378 - DNA, 298 bp, Glycine max
  unsure (1)..(298): unsure at all n locations
ggtgatgacaccaagctcaaaggtcaatcaaagaatgagctcaagatattcaagatagaatcaagaacacttcaatattcaagaggaaagttgatttcaagaatcaagattcaagaatcacgagatcaagaattcaagaatcaagattcaagagatcaagactcacgactcaagattcaagaatcaagagaagggctaattaagataagtatgaaacggtctctcaaaaattgagtagcacatgggntttctcaaaacatcgttaccacagagtatttactctttggtaatcgattac

SEQ ID NO: 45379 - DNA, 234 bp, Glycine max
  unsure (1)..(234): unsure at all n locations
cacaactcanagttcaacttctctccctttntcttccttcaatttcgtgctcccccctctctctttctctccctctttcttttcctccattgaagcattctctccaagccttntatccaaggctcatcttggtgatgaagctccttcttccatggcttattccctagtggatggcgccttctctcacctcttctcctttgtcttccgctacatctnncatggtggaaatcacta

SEQ ID NO: 45380 - DNA, 564 bp, Glycine max
  unsure (1)..(564): unsure at all n locations
tgagtcctctgnagcacctgnngcatgccaccttgaatgaggaangntaagggtgaaacttctgctttattgtttatccacattgtgacctgcagatatgncgctgggtgcacgacacctcgaggacgtcatgtggngtgctatngcccaccaccatgcttgaccaatctcgactcatcccgggtatatntggttagtgagaacctgtgatgtacctaaacaagcgagctcttgcagtcaacagataatatgaacaaagaccacaangcaacgatgcttgtggtggctggccagctgtgaactatgtgtgatatgtggattatggactctggtaataactaccaatggtgggtatccatacaatgcttataatgaaacaagacgctatatcgctctggaatcgataccactgcggtattcatacatgcttgaaactatcacgaactatgagccttatactgatacatctgtgaatcatacacaagatggcatggaatatacagtatttcaacatccatgatttgttatatgtctgcgcttataatctacctggatcaattcgct

SEQ ID NO: 45381 - DNA, 135 bp, Glycine max
  unsure (1)..(135): unsure at all n locations
actcttcctaaccctggtactgtcgctntagctttccttgccactctagtctttcaactctactataaggcttgacttctcactctctcaggactcaattcttcccacttggactttagctcggaccaagtatcc

SEQ ID NO: 45382 - DNA, 170 bp, Glycine max
tagaggactactcacatattggtgcctactgccgtttcagcggaacccgtctgcagtgatatagaacgcaaccgaccctagcgcgccggccctacatatagttgcgtatgaaatctggtcatcgcttattactactcgcgaaaacatcgaaacgcagaataacgctttaa

SEQ ID NO: 45383 - DNA, 233 bp, Glycine max
  unsure (1)..(233): unsure at all n locations
atgtaattccaacatcgattntcaatacaaaaccgatgtaacaaaatgatgctaacgttaacatctggtttcttctagaaactgatgttaactgatcatatgttaacatcgatgttcaaaaaaccaatgttaacgaacataggttaacatcggntctcttcacacccgatgttaactaagagacattaacatcgtattttccaaaacgattaacataattatgttaacatcaa

SEQ ID NO: 45384 - DNA, 362 bp, Glycine max
ctgtgtcgccttgtgattgagctcttcgatgttttatggtactttgcttgtgaactctatggatgagctatgaggatgtttacatatctgatctaaagtcttctcgtgacggacttgatcacagtcctaacaaataaatgggagtgctcttctagagggctgtgttccctgaaaggcgacgtcggtgatggaaaactaataaccatacatgcttgttatataccttgattcatacggcttgacgctgtttcccctgttgtatatattaccttagacggctgctaagtactctttcctccctagtagccaaacctactcacttctgtgatgcttatcaatttcttgggaattagaacgttctg

SEQ ID NO: 45385 - DNA, 232 bp, Glycine max
cattcacctattccctatatacctaacatacacttattcacaaccaccaaccttatagaattgctacacaggtgctctcaacactcatttctcatattgtatacttttaacaaaacttgtaacataataccaagaaatgtagctctggctatctgtgtgttgtattatatacccgccacaaatacccaatacactccccacatttggacaatttgtctgatccatataatgc

SEQ ID NO: 45386 - DNA, 148 bp, Glycine max
  unsure (1)..(148): unsure at all n locations
cacgagatctgcccttggtaaatgatcgtgccaattatgttgagttctcacaaacttcactgatatcacaccatgcatgaataacatccacaccatgtngtgtctcacacccaagtgtctagactcaccatgatacactngactatat

SEQ ID NO: 45387 - DNA, 256 bp, Glycine max
gcgggtgttgaagagacggcatgggcatctccttccttccttttgcccctggtgccccgattcctttggcgttcacgtttgtggaggaaacgtaatcaaactttcctctcttcaatcccacctcgattctttccccggcaaataccagatccgcaaagctggacggcatgtaacccactagcttctcatagtagaacactggcagagtgtctaccatcatggtgatcatctctctctcaaccatgggaggagctac

SEQ ID NO: 45388 - DNA, 273 bp, Glycine max
  unsure (1)..(273): unsure at all n locations
tctcgtntatttctctccatcttcttttccactgtagcgacatgttatatgtctgtgngtttganatggagcactgtccctcattgagctntgatattaatattctcgattatctaacttatagttgtatatgttatcacttaactaatattggtntgccaattntaccacacacacaatgagatataaatcctcgtcttcttcttactctacaatctcgaagccattcaacttaattcaattaatagaaataaaattctaanaataaatcac

SEQ ID NO: 45389 - DNA, 82 bp, Glycine max
  unsure (1)..(82): unsure at all n locations
gatatantattattagtttgacctttttgtggactaaccgagattacgatgcgaatgatcggttggattttatctttatagt

SEQ ID NO: 45390 - DNA, 264 bp, Glycine max
gaagatgaaagtttcaaaacacatcacatttgttcaagggttctaaattctagtcccagttactttgtatcatacaatctgtacatacatgcatattgtttaaagctcactgatacacgtcataattaaacgtgacgatcatatttggacattccttggtgacgtgaataatcatggaagccattttccaaacttctacatactattgtatctacacgtattatacaatcaaatgacctcacggttaatcttaagatactttat

SEQ ID NO: 45391 - DNA, 526 bp, Glycine max
  unsure (1)..(526): unsure at all n locations
aaactgcttagcactgngctgcnnctangtnagctgcttttaaacacaacggcattaatttttgaacctttgatagntagcggaaactcgatcttatatttgctttgatctaatataacacaccatttcctaataaagctcttttcaatatccttctatttttatcttacacctcgtataagacgatacacgtcgttttggtcatagaaataatatttctcataacacatattatatctccttcttgtgtcgtttcttctacaagcgccctcaattctttcatattattatggcgtgatgatgcctattcacctttatattcatatgtgatcatacactgaataaactcttacattgaattgtaaatattaagttgaactgtaaacattcaatgaaagactgaatgtacaagatatctgctttcttctttcattttaagagtttactatgcacacttaacaaactttatattttgacaacaacaatgaatccttcttactatttataaaatcagaatgtttctttc

SEQ ID NO: 45392 - DNA, 170 bp, Glycine max
  unsure (1)..(170): unsure at all n locations
aaccttagatggtcgaatccttcacaacatcaacaacaaccttatnttcaaaatgtggctggcccaagcagaccatacgttcctccaccaatccaacaacaacaacaacaacagcctcagatagaacaaacagttgaggcctctccacaaccttcccttgaagaacatgt

SEQ ID NO: 45393 - DNA, 187 bp, Glycine max
  unsure (1)..(187): unsure at all n locations
agatgaattcaagttccaagagaagaaatcaagaagacttcacaatgggaagtattgatcagattttttaaaaacacacctagcacatattttgggttttcacaatgagttntcatcacatatttctatgttaccagagtgtttactctctagaatcgattaccagtttctgttatcgattactagt

SEQ ID NO: 45394 - DNA, 615 bp, Glycine max
  unsure (1)..(615): unsure at all n locations
acatgttgactctcaagcttcaaaagaaattcgcctgtctacnctaagtttgtccagagacgtatcgtcgttgattctttgatccttgctagtngacttacggtctcgaatgccagttacagtgcatagcaaggaaccattcagtgtttcgatcangaatgcgaaatataccaacaaagatgggcanaacggtctnttcattgagcttcctggaccctagctcgcccaggctagcctctggctcacctgagccctcanagtacttcantggtaaggaaccagctctnctgagcgagccagttacttcatgagtaagcatcggctcgcctgagcaagctccagctacgctgtgcgagctgccatagccncaagtgcccattntccctataatatgcatgctaaggaggctgangagagagtcancatngagtattgaagatattgtagaaataaagagataataaaangagangaacaggctgagctttgcgaacacatcgngacaatnctatgtcgtctcgctccgttcttcatcgtatcgataatgttgtntataattgacatactatcacctacggtaccttgtgtgtgtcatatatctctcatttcatagag

SEQ ID NO: 45395 - DNA, 191 bp, Glycine max
actgagcgagctgtgcgcgcttagtgcacgaagagacacacgcctcattgagcgagctgatgacgcgctgagcgcacagaggcttctcagaatttcctccagattctcccaacttgctaagcgggctgagtgcctcgcttagtgcatgactctcgctaagcgcacaagcctctcttagcgagacaccagct

SEQ ID NO: 45396 - DNA, 255 bp, Glycine max
  unsure (1)..(255): unsure at all n locations
aacactcatgcatacgcatactcatgcatattngttatcttgggacagggacaggatcgttntaagcaatagtaaaataccgcgccaaatccaagacagagacgaatcgaggtaagcggttatactgccatgtattgctgcccaatgtcatttcctgcttttaggtacttgcggacgggcacgaatggaggctatgcccatgatcaacagatctgtgttccacatccagctctagacaagcaagaagcgctactg

SEQ ID NO: 45397 - DNA, 205 bp, Glycine max
  unsure (1)..(205): unsure at all n locations
gctcatatgtctgtgaggcactttaccgagcacttggtgagcgcatgtctatgcacgaatatcaagagaatggngacaatgtggcacgcgccattacttcataatacaccctatgccaatgccattccttacaaccgctcaattcaacataaacaagcaacaatttgaggataaatncctcacgttacttagcaaacacatgcaa

SEQ ID NO: 45398 - DNA, 343 bp, Glycine max
  unsure (1)..(343): unsure at all n locations
gtagcactgtgctgcagctgcgcgtctttcttcaagactctcgcacanaaaattttttgttttcttttctccctattaactaatttagagaaattattntcacaacgcatataacatanagaatnttntntatcttttcagcttccaaattcacaatccgtgtctcatgagaagttgagaacgatgatttctgggaatcattataaacattctattnagtataatatatgttctgacaatcattaatatgattatcttagataaatacaaactttctggaattcaagaaagttggaacaaaaattgtgagaaagtaacttanaattgattcttacgatcatag

SEQ ID NO: 45399 - DNA, 171 bp, Glycine max
  unsure (1)..(171): unsure at all n locations
taagctatgtattttgcacatggtctatncactggttggcaactaataacttctcacgtgtgatcaatcttatggcagaccactaactgtatctcaacgattnaacctctaacaatgatttagactagagtgtgatgttccagagggagacatattacatatgctcttttt

SEQ ID NO: 45400 - DNA, 549 bp, Glycine max
  unsure (1)..(549): unsure at all n locations
acatgcgcggccttaagcacctgngctgcaactatgtgagtanacgtggcntcacgcttactaatctcatanattgtgaccttttcatgatggtacacatatgcataatacatggcagtcacgcattgaagtaaacgtgcgtataacttgtaatgaccccaagaaggggacaagaagacatggacgtgagtaaaaacaacaatagaacttatattgaaagagaagtaaccctgctgacgaaaattaaatattaataacattaattaatatctagtaccaatgtcatgaattcatattagcgacctgaaaaaaatatcataaattttcattttgtcctttaatatatgagattcaattagtctccagttaaagaaacaaatgataatcgtatattaaaagaaacatntgtaacaaagctttacgaaactctttgagaaataaagtgagacaattgagacctattttccactaaattatctatccttttatattaaaacactatgttaaagcaattattaatttcaagtttttggtgagaatttctccaan

SEQ ID NO: 45401 - DNA, 455 bp, Glycine max
  unsure (1)..(455): unsure at all n locations
acactgtggacctgnatctcagctatctctctcattncacatgggggagcttaggggtgtgttctcctggtctatttgcccctcctccatctttcttcctactgatcttttctaggggcttgattctcatgccacagtggtagtttctcatttttggtaaacattcccatgtaccatgagaatcactttcactgagacaagagcccgaagtattttcttggctgccacaaccaatactgaatnttaagggtgaaaaaacagtttatctcttatccgagatatgatggtgttacctcaatgagctgaaaaaagagatacaactggtgtagtttaattatatatgatttagggattgttagaaattgagatattctgttatatgtgttgtagaaatggatgaatctagttgtgtctgcgacttcgtctcagttattaatgatggcatactgcatttn

SEQ ID NO: 45402 - DNA, 267 bp, Glycine max
  unsure (1)..(267): unsure at all n locations
ctcgagagcttccgttgtcaatttctagcgtctcgatatattatgcgcccgaatcggatctccttgtgananagtatgactatataaatctcacgagaacttccgttgttcaatttctagcgtctcgatatattatacgccagaatctgacatccgagttataaagtatgaccatttgaatttctcaagtgcttccgttggtcaatctcgagcgtctctatatattatgcgcccgaatcagatctccttgtgaaaagtatgactatt

SEQ ID NO: 45403 - DNA, 63 bp, Glycine max
  unsure (1)..(63): unsure at all n locations
gaatgagctagttccgctccggagtatgatagtcaccgatttangagtgctgtacaccagcaa

SEQ ID NO: 45404 - DNA, 105 bp, Glycine max
  unsure (1)..(105): unsure at all n locations
gctctgtttcattcaagttctcgtatattaccgactcaattgacatctgagtanaagtattgtggttgaattgctacactctatctcattcagcatccatatata

SEQ ID NO: 45405 - DNA, 261 bp, Glycine max
  unsure (1)..(261): unsure at all n locations
ctgatcatcatgctctgatagatgccatannaactagggcagatgaagacggtgagaatgacggacacacccatgctgtgactgccattcctataaaccaagtgttccaccaaccacaaagtctgtctacacgcacttacaatgacgaacaccacctttagcacataccaaaacaccaaccaagatatgaatctgcagcgagaaagcctgtagaattcaccccaattccagtgacctatgctaactcgctcccatatctac

SEQ ID NO: 45406 - DNA, 104 bp, Glycine max
gtgataatatatatggttacattctagacttggatgatacaacgcgaaattaatttattgtcattttaacataatgtcatcagagatcattaattatttagtta

SEQ ID NO: 45407 - DNA, 81 bp, Glycine max
gatatatatctcgatatgagtcatccaactatagagtatccacatcggtaagaacatgaaatcacaaacaaccctgctttc

SEQ ID NO: 45408 - DNA, 509 bp, Glycine max
  unsure (1)..(509): unsure at all n locations
tgaacatctatctcgtaananctanacanantcagancangctngtcacaccctcgtcgcgtgtntaattccatctcacaagggtnngaagatangagaccttcaatcctataacgcaacgtggcagaccaaaagtgccangtaactcgaatgggcattatagccaatgcggagagtattttgcgcttactatccatgtcacacattattgaacttgtggtacatatcatgactataccaattaatgtgttcacaatgaccattaatctactcgacatggtgctctggatgaacggcatctctctataccatgacactatctaccaactgatcatcaaggtcgcaaacacaggtaggatgatgatgctaacattgaccacaaatgataatgtgatgacgccacaactcatgcatgttctacgtgagtgtcatatgatatgtgtagaggactgtgtgagtattatgatattgactcataactagtcacatgtgtattcatatacagcatg

SEQ ID NO: 45409 - DNA, 205 bp, Glycine max
  unsure (1)..(205): unsure at all n locations
ccttttcttccctaattccgtccacaatggagtcaaccaattcaaaaattctctcatcagatttnccaatctaacgcatcaatngatttaatgaacatcgtctctgctggacaattcaaaaagaaagtgattaatcatcttttgtttaattctatctgtcaatgcattagaacataatagagcgtccaaatctttctcactactc

SEQ ID NO: 45410 - DNA, 434 bp, Glycine max
  unsure (1)..(434): unsure at all n locations
agtctgcagacctattcaagcaacaaaccaatatacttgttcgaattgctntcaagaactctaaaactntgatgtaccttcataacgtatnggttcagtggcatttnttaccgcatctntactatcaaaatccatgccaacatataattattgcccaacattaaaactggatggcatctccaaaccgcaaatgtactcctcatcaggatgactncannatgatattgtataatgcanagcatcattccaaatgggatttgaatccttgacacctactagtacaaatanattaggtcaaatacaatcgactattnaccataatacantgcataaatgataatgatcacctatnnttattaataatatatctcttgtggtgaacaatctactggtgatccatcggcactcattgctgatcagaataccgcacacta

SEQ ID NO: 45411 - DNA, 557 bp, Glycine max
  unsure (1)..(557): unsure at all n locations
acaatctgtgctgagtcgaccngangcatgcccagctatanntaaacatggaggggcggtnntttactccatantgaactcngtgtatgttcnttacnangncaccatcncaatcaagttaaaggcattctatacaggtggcatcttataaacgcaatccttgttcaaggttatgagtaatatcgggggtcttgctatttattcnttacaagaaatacatatataatctaagaagcgacntaatatgctgtttatagacttctatatgtaatcgctgccgctaaaccatatgctgtttgcattagatattatggtatcggtgcattgaacctcatcaacacaccgagaaggacgtagattttctcatcaatgtgatgattttcatgacatttatggaatattgcgttgtgtagtttatcttgggatgtaaagcccttaccactaaacaaattcttctttttataactcctttcctatcatggagacaatctaaataaatggattctgtcaacgtattataatgaataaaatgatcacaaactatgttaatgcatgct

SEQ ID NO: 45412 - DNA, 232 bp, Glycine max
  unsure (1)..(232): unsure at all n locations
gcgacacacaactcccaccgcatatagaatatcgggccttgtattggttagataccttaaactccncacaagactctngaagatcgnggagtctaccttctctccttcatcannaattgataacttctaagccaccttcataggtgtgttcacgggaatgcaatcaagcatattaaatntcttcaacacttcttttgtgtagctttcttgtgagacaaagataccattcttc

SEQ ID NO: 45413 - DNA, 480 bp, Glycine max
  unsure (1)..(480): unsure at all n locations
agacgtgagtctangcttagactgcccaantaatantnnaatgaactgaaggggantggactagtctgantctantcctacgccacatctatccaccaatcaaaatcaagctgaatatttgctgctangatctcgtaggcaatgacaaaatganatgaaacatcatgttgcattcggcgatcttgctgatgacatagtngacatctcgtactaatgtcggctacctacacatcatcgtcatattacatcaacattgtacaataaatacatacctaccgtcacggccgttcgtgcgatacctgcatgctctgatcatctacctcaccngataccctcatatatgccgtggcaatacagtatcttgaaatatacacttntatataataanntataaatanaaataatatagattatattcttgtgattccgtgttattcatttgtataaacactattatctacaaaactgatgtatggttat

SEQ ID NO: 45414 - DNA, 210 bp, Glycine max
ctcactgacaatctccttggatagaagcttctcttgattgaaatgacaatcaatctctatgtgcttactcctttcatgaaaaactgcgttcgaggcaatatgaagagcatcctgattatcacaatacaacttcaatggtaactcttcataatacctcaattctcgcagaagctgtctaatccacattagctcacaagtaaccatagccat

SEQ ID NO: 45415 - DNA, 88 bp, Glycine max
atcacctgacaagagtaatcttcacctagtatatagtctgacaatgactacccatgctgtggctgtcatgtgatgggcgataatatat

SEQ ID NO: 45416 - DNA, 264 bp, Glycine max
  unsure (1)..(264): unsure at all n locations
ctgcacatatgaatatcatgaggagtagtcacgtacgcggaacaaaatatagagttcgtgacataaaagtgtcaatatgtgtacgtgtatacagtgcggcatcaagtaatctaagagaagacaaaaaagacttcaacaagatgggaaggtcaatatatccagtataaataaaagcacgttcacacaattnttatgctgaatataaagaatcctaattcctaatgtacacacncaacacaagaacacatcaattgtacaacaaat

SEQ ID NO: 45417 - DNA, 296 bp, Glycine max
tactattataacattttttttgctgctaccctattgcctacgtttatgggtgatagctacaactgtcctaccatacgtatatcatccctacacaccttctaccatgtaacgtttctactaaaggcattctaccattcaaaaatttgctactctacctagatttatagcctacactactgtacccctgttttatttaactcttattataagactattattatgtcttgacatgtcaaaagaacctctcacctgctacttacagagtactaaactgatattcacctctacgctctcaa

SEQ ID NO: 45418 - DNA, 207 bp, Glycine max
  unsure (1)..(207): unsure at all n locations
ctttggaaacttttggtctgagngagcatttgtcttgngtatgttttcacacctatgagttaagtatgacaacccttcttcagatttatgtcaacattgaatgtcataaagtcacacggctgtcggcccatgttagaggccctttcaaattcaacggtccggctttcgtcacggagagtatgatacaacgttctactccagtgattc

SEQ ID NO: 45419 - DNA, 204 bp, Glycine max
  unsure (1)..(204): unsure at all n locations
ataacatatgttttataccggcttaattgtacttntctttcatgtaattatacaatctcacanattaccccanacacattttgcttctcaatttacagaaatgtcataaattgtaattatttatcatatttcactaaatgtcaaaggaanaagatgaacttattttatccttactgttttattntctcattgtcatccactcta

SEQ ID NO: 45420 - DNA, 406 bp, Glycine max
  unsure (1)..(406): unsure at all n locations
atcttcagacacaagtcacttgaagaattgtgacttttggaaatgtattttntgaaatcagtcactggtaattgnataccattaaggtgtaatcgaatacacatcaacagatgtgactcttcattntgaagtttgaaaatcagaatcgttagaaacactagtaattgatacaagtattgtgaatcgattacacgagtttaatatgattaaaactgtgaaatttgaattaacatttataacaccagnatcgatactccttctggaatcgatacaaagagtaaactcttggcatgatttgtgaaacttttggctctcatgtttgaaaattttatactatctgatgagctcgctgatctgaattgactgatatctgaactgaactgatctgaactgaactgatctgata

SEQ ID NO: 45421 - DNA, 152 bp, Glycine max
gagacaattgggaaattgtgcttgttcttgaatgaggttgaaggatgcttagctagtggtctaataatgggaagcacattgcctatccttgtatggaccaaaggcgccccaagtgctcggaatgctaatggattggctggttggacttgatg

SEQ ID NO: 45422 - DNA, 154 bp, Glycine max
tggcgcgtacacgctactgaaacctgcgaccactaatcgctgcgacatcccttcgcactgggtatacgaaaggccgaccgatcgccttccacattgccagctgaatgcaatggcctatcggatttctctaccattgtcggattcacaccgatat

SEQ ID NO: 45423 - DNA, 319 bp, Glycine max
  unsure (1)..(319): unsure at all n locations
cgcgggtctggnggaacaaggtcaagtggtcgcgatatactaatatgatgttccgggtacattggaattggtatggccatgccctcctgatttccagctgggaaaatggcgagtggaggaacgctccgacatttacgcaacgagcataatgtatacctttacgggtttaaaaactctatagttaggcccaggctttagaaagttctttcgtaaggctntgtgtcttttggtttgaatttataatacaaggatctctcttcatctgttcctacgtctctacccattctcatccatttgcatgtntacttctttatttcta

SEQ ID NO: 45424 - DNA, 242 bp, Glycine max
  unsure (1)..(242): unsure at all n locations
acaacacttctcatggcacgagcgtcaacatgcactctataaaataatcatattttgggtcgtgctatttatgacacatacgtatntgcacacataannaatttgtatgaagcattntacgacacctatccatgtacatatatnatttttttttgacaaaccttttcatgctacatcctatatatatacacacacacattnntttggaaggcttcttttgttacctactcacaaatacacat

SEQ ID NO: 45425 - DNA, 267 bp, Glycine max
  unsure (1)..(267): unsure at all n locations
aatgcctctaacagcaccttagtcaatgatnttcttcatgcctcttaagagcagatgtccaaatctttgatgccatatattgacttcatcttctttggaggatagacatgtggaggagtaactggtttcttgaggtgtccatangtaacacgtgtcctttgatctgctgcccttcattagaacttcactcttctcatattgcaccaagcattctgacatttgtgaagttacatttgatccttcatcacacaactgactgatgcttga

SEQ ID NO: 45426 - DNA, 246 bp, Glycine max
  unsure (1)..(246): unsure at all n locations
catcctcaccactnngtaatttacaatctttcatcttgttcttctctttgttgtaaagaacgcttcctttgtatggaaagctaaatcctctattggatcttccctgtacgtacctgatgtaaatatatttctatctatntaatgatgtnttatgtgttctatgtcgctatctgttttcactccagtatgtctttaccttgatcacatagatgcatgctttgttagggtcattcaacagtggaaact

SEQ ID NO: 45427 - DNA, 586 bp, Glycine max
  unsure (1)..(586): unsure at all n locations
tagacgtactatgcttgatgaacggattcaccgaccagaggatanacgtgggtctnaanagaggcanatctaatcatcttgctntgatanatgcanaannaaaacactagggcatatgaagagggtgagaatgatggagaagcccatgctgtgactgccattcctatacagccaagtttcccaccaacccaacaatgtcattactcagccaataaccaaccttctccttacccaccgcccagttatccacaaaggccatccntaatacaaccacaaagtctgtctaccgcagcttcaatgacgaacatcacctttagcacaatccanannacaccaaccaagaaatgaaatttgcagcgaggaagcctgtagaatcaccccaattccgtgcctatgctactcgctccatatctatngatattcaatggaccatagcccaccaagggcatacctcattctcgaatacactcgaccacgtggctgcatggaaacccggcatcatgacatgtgggctaactaaggaggctacgacngctgtgaatgagaaatcggaatctgcttgcaaggccactggcattgagctggg

SEQ ID NO: 45428 - DNA, 680 bp, Glycine max
  unsure (1)..(680): unsure at all n locations
gctttattggtcttttattgnttcgtttttngnttattangtnngtntanttttatttnnttgtgtagnttatattatttttttnnntnnnnnnnnnnnnnnnnatatttgatagctatagtganctgtangcctcgcatcttgantaatcccgaccaacactggcatantctgncagtgagtatctgtgtcgtacgtaagcaagcgagctncttgcagtcaaccaatatatgaacanagtncacgaaacacggatgcttgtgtggcggctgtccagctatgtatcttgtgtggtatctgaacactagcctctggtaatcgattaccattagtgggttatccattacaaggtttaaaaatggacacaggatgttagtagcttctgtaatcgatacctatgtgtgtatgataccaattgataggcctggcatgataccattgttttaacgagtacaaccgtacctgtactgtaattacaccattatgtgtatcgatactcttggactagtgatccaatggcaaagctgatattcgttttggcactgcaatcattactacttggtatccataccaaaaagaatccttaacatacatctgatatttaaccgtagggaccattgatcgtactgtgagtagattctgtgaagagttacctctcttttattcttgtgacgcaatgg

SEQ ID NO: 45429 - DNA, 145 bp, Glycine max
  unsure (1)..(145): unsure at all n locations
agctnggtggtcctatcaaaagaaaattcacaagtcacaactgcttgtctctatgtttgtagctgccaagcctgccttttgcattatcactcttcagtttgctgtctagccatgatggaaaactattgaagtgacaaanatacca

SEQ ID NO: 45430 - DNA, 123 bp, Glycine max
  unsure (1)..(123): unsure at all n locations
tctcttcactggtaatcgattataggagttcggtaatcgatgacatagatcanaattcanacacatttgtgtcattagtcagaaatatcttcacatactctctggtaatcgattacacagtct

SEQ ID NO: 45431 - DNA, 81 bp, Glycine max
acatacttcactaacgtcatttgccctagataccgtacctcgaatgaaacggagctgttcaatcaacacactctttactca

SEQ ID NO: 45432 - DNA, 602 bp, Glycine max
  unsure (1)..(602): unsure at all n locations
atctcgggcccttaagcacctgngctgcagcttctcctganaattatttcttggtggtgctcttggttagtgctatagggggngttcgtcattggaagtgcggtagacagactctgtggctgatatacggattgcctttgtggataactgcgcggtgggaacgagaatggttgttattggctgagtaatgacatcgttgggttggtgggaaacttggctgtataggaataggcagcacagcatgggccttctcttcatcctcaccctcttcattagccccagttttctcattcgtccaagcaggatgactaaattngcctcttttaagacccacatcgattctttcactggcaaagaccaaatccgcaaaagctttgaaggtgcgtacccaccattntcatagtagaatactggtantgtgtctactatcatngtcatcgttcttccgcctcgaggggccacttgagctgccacgtctccacattatgcngtttcttagaagaacccgtgccccttnttgacatgttntgtgtgcttctatcaagccttatctcacctgctacgacgcaccatttgtctccagaatggactggaaagtgcct

SEQ ID NO: 45433 - DNA, 294 bp, Glycine max
  unsure (1)..(294): unsure at all n locations
acggagtttccgactatgctcttgtgtggtggaacaagctacataaggagagagcaagaaatgaagagccaatgtgtgatacatggacgcagatgaaaaanatcatgangaagatgtatgtgccggctagttactcaagggacttgaaattcaagctccaaatactaactcaaggaagcaagggggtngaggagtatttcaaggaaatggatgtgctcatgattcaagcaaagatngaagaagatgaagaggtaactatggctcgntttcttaacggtntgactaatgatatct

SEQ ID NO: 45434 - DNA, 620 bp, Glycine max
  unsure (1)..(620): unsure at all n locations
tgcactggtgancatngantactcagcttctggaggaacgcctctantgaagcttctagagaaaactacatgaagctgctcggtaatacgctgccagcctttgtaactggtggatcttctcngaaattggtctgcaacttcaaaagacacttgtcaatgatcntgaccgtgggatcttttcgaagatctctgaagtgtgctagaagcttccgttcccgagagccatctcctatttagcatttcagcctttgcttttgtgtagcttaggaaaaacgccatttcttcttctttctttcttccanatccatttctaaagttccaagtactttcttcatcacccacatncaccattagccaccacanaccatcattnngtctcattgaaacccacaccgagaggaaccctcaaccgaacagaatttcaacttggcttgcggttcngagagaacgaaacnctatctgatcttcgtttctttcaggtaccatggtctatgctngttctgggtagttcatctgtcttgatctttctgctttgaacccgcatgatgtctatgcttctttgaaaccctaagaagagacttgaacgtatcttatgaatgatgtatttcgacctcatgacg

SEQ ID NO: 45435 - DNA, 153 bp, Glycine max
tttgctgttttaattgaacggacaggcatgtgttgaagtggaactttggattgggttccattcagcatggattggtgactgctactggattatgtttgtgatgcttaggtttcattgggtatggtgtaagcatatgtggactgtgaggattta

SEQ ID NO: 45436 - DNA, 231 bp, Glycine max
aatattttattatccatatgattttattgatcgagtttatatctatctaaattatttaatagtcaaattatttgtaatttaatccaactaataaactatatacctaaaccaattcgctcaaaaacattaacattacattttgtactttaaattagctttatatatcaaaattttcctttaagtcttaaacgcaaaatgtgtcgcagcaaagagattggttacactttctga

SEQ ID NO: 45437 - DNA, 453 bp, Glycine max
agctatttatcataggaggcgtagttgagggtggcactatgaaatttttcactaaaataagcaatagggtgcccaccttgtaacaatacagctccaacttccactccagaggcatcacattctagctcaaaagttttagaaaagtcaggaagagctaaaacaggtgtcttagtaagcttttctttgagcaaagcaaaggctcgctcttgtttttcaccctatgtaaatgccacattcttcttcaccagctcattgagaggtgatgcaattgtagagaaattatgaacgaaccttctatggaagcttgctaacccatggaagctcctaatatcttctaataaccgaccactaacctataatacataattaccattcttagaaccgcagtttcatgggtgtttgcattactttaattccatttatgtacaattccaacaaactatttagtctata

SEQ ID NO: 45438 - DNA, 127 bp, Glycine max
tattatatattgctcccttcagctttttaccatcttactattgtaaaactcatatttatggcgaaaaggagacaaaccttttttcttgatcttttgagaatgagaactgataggaaccaattaagcg

SEQ ID NO: 45439 - DNA, 425 bp, Glycine max
cttgcggattgggtcttcgccggagaaatgatcgatgtgggtctaaaaagaggcaaatctgatcatcttgctttgataaatgcaaaaaaaaaaaaaaactggggcaaatgaagagggtgaggatgaaggagaagcccgtgctgtgactgccattcctatacagccaagtttcccaccaacccaacaatgtcattactcagccaataacaaaccttctccttacccaccgcccaattatccacaaaggccatccctaaaatcaaccacaaagcctacctactgcacttccaatgacaaacaccacctttagcataaaccaaaacaccaaccaagaaatgaattttgcagcgagaaaacctgtagaattcaccccaattccagtgtcctatgctgacttgctcccatatctacttgataattcaatg

SEQ ID NO: 45440 - DNA, 436 bp, Glycine max
agcttcaacattcaatttcgagcgttccgatatattacaggaatcaatcagacatctgaataaaaagttgttgtcgtttgaatttgctcagagcttcggtattccatttcgagcgtctcggtatattacaggactcaatcagacatccgagtaaaaagtgattgtcgtttgaatttgctcagagcttcaacattaaatttcgagcgttcggatatattacgggactcaatcagacatccgagtaaaaagttattgtcatttgaatttgctcagagcttcgatattccatttctagcgtctcgatatattacgagactcaatcagacatccgagtaaaaagttattgtcgtttgaatttgctcagagcttcggtattccatttcgagcgtctcgatatattacgggactcaatcagacatccgagtgaaaacgtatt

SEQ ID NO: 45441 - DNA, 420 bp, Glycine max
  unsure (1)..(420): unsure at all n locations
agcttcccaagtctntaagttcttcctcanaactgtcctaagcaaagttcccaatgtcctattaacaacttctgtttgcctatcagtttgtgggtgacaagtggttgaaaataacaatttagtgcccaacttgccccacaaagtcctgcaaaaatggcttaagaacttagagtccctatcactaacaatgctccttggcaaaccatggagtctcacaatctccttgaaaaacaaatcagccacatgggaagcatcatcaacttttttacatggaataaaatgagccattttagaaaacctatcaacaaccacaaaaatggagtctctaccaccacttgtttttggcagccccaaaacaaaatccatggataaatcaatccaaggatactccggaattggcaatggagtatacaatccatg

SEQ ID NO: 45442 - DNA, 234 bp, Glycine max
  unsure (1)..(234): unsure at all n locations
gagtatgatgaactaagggatgtcaatatggccaccgatgaagccttggaatgagaaaccaagaaggcccgataggaagaacacgaccaaagccaattttgaggggctntatatggcagcaatagtgagctcaagcttcgaagatgtgaaaggaatcatcacgggtcaaaggcatgatcttgaaggacgagctaaaggcttgccttaggtcganaagaaatttgtcccaacagt

SEQ ID NO: 45443 - DNA, 423 bp, Glycine max
agcttataagcgcgggttcgggagacaaaggtcaagcgttcgcgatatgcgaagatgatattccgagtactttggatttggtacgaccatgccctcctgatttccagctgggaaattggcgagtggaggaacgccccggcatttacgcaacaagcataatatccgatgacgagtcccccgaaggtactaatacctgggacccgtctatcgacttcgagcaagaaatgaatcaaacggaagatgaaggaaatgaggatgtgggacttcccccagaactagaaagaatggtcgcccatgaggaccaagaaatggggcctcatcaagaagaaacagagctagtagacttaggaattggcagtggaaagagggaagtaaagataggtacaggtattaccgcacctattcgtgaagaataataatcct

SEQ ID NO: 45444 - DNA, 388 bp, Glycine max
  unsure (1)..(388): unsure at all n locations
agtatggtttgtgtctcccaatgtatgggattntagtggatgttaatgtatctttcttatgtttttgtaaaagacatatgagtcaagagaattgtattagtttgttcatgtaatgtatgttttaacttttaagttttagtttctgcgtaggttactctcataatttttatatgctaagttttataatttagtgatataagaagacaaatgtaatatcccattgggtgtgatagaccagtcaacatgcatgaagcccaacacggaaggcctcaaaggaaggtcacacctcttcaacgtttttgcaattacgtttaagtgctgattttcaaaagcatagctggacgttgttagaattctattatttagtgcatgtctttgtcaagtgatg

SEQ ID NO: 45445 - DNA, 478 bp, Glycine max
  unsure (1)..(478): unsure at all n locations
tggcgtgnatgaatgtgcctttcgaaccggatctnttagtcaaccgcacgcttcaactttatcactctttctttgtgttaatcaagactctaatgcctctaatctctctccgctaatcaactactcatctgacatcaattttccaattatggtcgatcggaatgccatttgttttgtactctaactgaatgcaaatgtatttcgaccggaagtatagcatcgtgcccataagtcagtcgaaatggggaatattagttgattcttaagagaatntctacatgcccatagaacttgatctaaacgtttattcccatttctttgcttttgggcaatgtgttttttaatcaaattaattacaatcttatttgctgcttcacctgaccatttgcttgcgcgtaatatggtgttgacgttataatcaaaagcaattttttggcaatttttcatttcgtcataaaactgacctgacagtgtattg

SEQ ID NO: 45446 - DNA, 479 bp, Glycine max
  unsure (1)..(479): unsure at all n locations
tatatacattaccacaacatattcatactgaatgtctcaagagattgggaatcacattccaatcccatgttaacataatttatgtaataagctggtagcaacacttgttctaatccttattntgtaacttcaattaaatttagtagaattaagaatgaatccttctttntctgataattattgccaaggttgattctttaaaaaaataattaagagagaatagcctatggatcaacagtgtaaaaaaaaattagagtaattaaataataaggtaaaattattttaccgtgtaaactcttataaaanaaattgatcttttcttganaagctgagacctatatatactttgtgactcttgaaaaaaaatataaaaaatgataaaccgtttttatataaattgaactttctttctacntttgagaactggatctttgaaaagatgacatttttaagacaaatgaactttaattaacatacaa

SEQ ID NO: 45447 - DNA, 260 bp, Glycine max
gctgatggattatagagaatttcttttttctatggaatccaccgtgtgaagcttctgtaaaacagctttattattatgatgcgacggttacaatggaaggttttagctttataagcttaagctttggaacgtcctcatgcataagttaatcaatgccattaatgagctgactgctgattaatagggaattattattggttcttgatatgtgaaagatgtgctattactttaatgtgaataaacatttctaagtctaacca

SEQ ID NO: 45448 - DNA, 236 bp, Glycine max
ggtggcatttttcagagctattatgcagtgtcttatcatccataacgagtctctgatctttctggtaccctaaatacttctacatgatcgctacacccccgaaattatgactgagacctgaattgaaggatttctacttctcttcatcaacaaaatgcctttatatatccatcttgctcgcgtcgtaatatttcgacggtaattatgaccacttatatttttctgtccaaactata

SEQ ID NO: 45449 - DNA, 420 bp, Glycine max
agcttgcttgtccgatgcagcagtaatgatggcccgagttatgttgaggaacggttacgaacccggaatgggtttatgcaaagacaacggcggcatgactaacctgataaatgccaaagggaatcgtgggaagtatgggttaggctttaagcccacttacgcagatataaagagaagcatcgcgggaaggaaaagcggtagtcaaagctcgcggtcgagacaggaaggtgaaggaagcccgccctgccacataagtagaagctttataagcgcgggtctgggggacgaaggtcaagtggtcgcgatatacgaagatgatgttccgagtacattggatttggtacgaccatgccctcttgatttccagctgggaaattggcgagtggaggaacgccccggcatttacgaaacgagcataat

SEQ ID NO: 45450 - DNA, 476 bp, Glycine max
  unsure (1)..(476): unsure at all n locations
gtgtgaatgcctttgatacatgcattctaccttanatctaactttgaagtgaggccaatctgatttaatggtatttgatgttaaanggaagtaatcctaatttgaaatgtcaattttgggacttatgagaanagttttgtggcttgtgcaaagagagaannaacaatatgacccaaagtgaagggcaagagtcatttctanggtaaattgggtgttaggagtcaattttgatcggcaaattttggcgtaaaccagtttgacagtgtaaatgatgtatagactgtgtgagatagagttgctccaatttccccatctcatttcactctaaacctgaaatcattaatgagggtttgatactaatttgagtgctatgctgagctgacttgttaactgatgaactgattggactgtggatcatttggcaaattgagaagtaaatgtttcgaactgccaatcaaatttctgtgaagtcacag

SEQ ID NO: 45451 - DNA, 381 bp, Glycine max
agcttgagaagagcctcctcataccctttatagaagtcaaagtaatcatctttcaaatcaacccttttatgggtctcaatccgttttcttgttttctctcaattttttcatttgcatggctttctctctcaccgtcgtgggaaaaagtgatgatctttttgttctattttttgcggggtgtgttgaaaagggtttatcgtttgtttgttgcgtctgattcgcaggttgaatgcacgattccaaaggatgatggaactctggtttcctatgtgggattcaagatccaacatgataatgctcgtggtcctatgaagggagggattacgtatcctcccgaaggtctcggggtttgaacctttatattgattttgtttctcatca

SEQ ID NO: 45452 - DNA, 251 bp, Glycine max
  unsure (1)..(251): unsure at all n locations
gcatcaattttccttcagagcatttgtaattcttttcttttgaatcctgttggttaaaacttaacatgatattaaattcctcattatttcattaaaagaaatattaaagtaaagaaattctaattattcttagtcaaaatcgactatcaatgaaatccaaatgtcgttgttatcaataatgaaaccaaaaagataacttccatccctatcgtaagcctttgttctgtgggaagatatacactctntcatac

SEQ ID NO: 45453 - DNA, 430 bp, Glycine max
  unsure (1)..(430): unsure at all n locations
gctgggatntacgcaagtagacccaatgtttccaaattatgttctttcattggttcaacgaatccatccattcttatctcggttattttggaaaataaactcttagcgtcaatttcttgtttccaaaagatatgtttgctctctacgaatgatttgtgcttcctatgaccataacatgccgaccttcgagggctttctttctcttttctttntggttcattttttcttatgcatgtttgcaaaaaactatacatccatcgctatctatgagaaaagcttcctttnttttctgtacacctacgttcctatacacgaaaaaacaacttttttctctatatacacacacatngaaaaactctttctctctataccgacatggtctatatnaaatctttactccttttcanagattattntcccctttcatata

SEQ ID NO: 45454 - DNA, 266 bp, Glycine max
attttcgagaagatccaaccgttaacgaaggctgggcagcatttttaccgaggcagctacatgtagctttctctagaagcttcattaagaggcttcctcgtggcttctttgaaaagctttctcaagaggcttctttgataagatagatccttatctatccacacccctctattaactaaattaacctccttaaaaataattaccagataaaataacacaacaaataatcaaacatcaaacataattactaataatatatagatata

SEQ ID NO: 45455 - DNA, 431 bp, Glycine max
  unsure (1)..(431): unsure at all n locations
agcttattacaagaaattagtttataggatatatttgtgattcagactattatagtaagtctcgttgaaaaatattntattttaatttgtattagtctattttagaatattatgttgatggtattaaatgaatcaattttactactttaagacatttgataatattatgttaattgtattggatatttggatgaatcatgatataaaataatagttctaaatcaaaacaaatatagatgggttatccgttggcccgaattgagtcaaatcgttcatgaatgagttgggttttcaaaaaaaaaattgtgaaaatcgagccgaattcaatcaatcaaatttgattgggttgtgtcctgaatntgatcaaaaccggtcagaaccagcccacaaacacttcctattgttgtaatgtttttgttgaagtgggtatg

SEQ ID NO: 45456 - DNA, 531 bp, Glycine max
  unsure (1)..(531): unsure at all n locations
tgattatgcngtgannncntttgattgcctncattggcannacccacncnnttnagtactcngccttgctgattagacttctgccgaccaaagatcatagtgtgttttaaagatggcaatttgtataatcctgctttgatgaatgatataactggtgcatatagagaggatgtcaaagaagaatgaacccatgtggtgattgtctttcctacatggtcaattttccaccagctcaatattgcttactcagccttttcataccttctttttacccaccacctattcatacactaaagccatccctaaataaccatcaagcttgcctgtgcacattctatatcctacactactaatgtgccattattatctcctatttcttaccctttttacacattttatatctgattgttttaattgcaaacttatgatgcagtttattatttggcccatcagctcatctgtgttttaatctatttacgattaagaagcttggcttaattataattgcttggcttgatctaaatcgtcttn

SEQ ID NO: 45457 - DNA, 144 bp, Glycine max
agcttacaaggagagatctcactggaagaagaatgtcacatgattgtgagttgaagaggtcggtttaaattatgacacggttaacagaaggtatatgactctatatattcccttgcaccttacatctttccttactcactcatc

SEQ ID NO: 45458 - DNA, 448 bp, Glycine max
  unsure (1)..(448): unsure at all n locations
agctntccccttcctctatgaccactggtgtcttcaagatagtgttgagggcgtcagcatcaaatttaattaggtgccctcgcaccctcacttgcttaggcgatttgtcttcagggtcatagaggttagcataaaattctttaacaatagaaacatcaatgcttccctctaagaagttagtgagctccttatgccaattcctccttgttaatatcacattttgttgcaaaatgattttccttgttaacaatattcttggaggaatccttttccttccccttggcctttgaagacaaggccttactatcctcctttttcttttgtttttctagtttttcttgctcatccctcttatctttcatagttagttgatctttggccacctgtgaaggtgttagaggatgcaacacanattaagtgccaagatgggtgaggataatttcattag

SEQ ID NO: 45459 - DNA, 389 bp, Glycine max
  unsure (1)..(389): unsure at all n locations
gactcaattcccgtggcatgctntngtttgtcatanatganatgatcaaaattcacaaggaaaggagagtggatcanagagaaagagccttactagtataacatgttagttcanaagatcaaattctggtgaatatatattcaacaaaaaaaaatcacctactagagattgagagtagaatgataagacatcatgataaaacatganaaacagactnttagtaattcaactgctntacatttgcttcatggttgcatgggagcctcatccagtggcaagaaaaaaaggtgataaatataaaagaaacaacaacatttcgttatcatcatgctaattagcagaaggtttaatatctttaagaagtccaactatttgctgcatgctcggtc

SEQ ID NO: 45460 - DNA, 449 bp, Glycine max
  unsure (1)..(449): unsure at all n locations
agcttgtgactctnggcaatttctttaaaactagtcacttaaattgttgtgacttttgaaaaaatcttcagaaacaagtcacttgatgaattgtgacttttggaaatgtatttttcaaaatcagtcactggtaattgattaccattaaggtgtaatcgattacacatcaacagatatgacttttcattttgaattttgaaaattaaaacatttagaagctctggtaatcgattacaagtattttgtaatcgattacacaagtttaaaatactttaaaactgtttaaacataagttataactcttgaaatttgaaatcttagcgttttaaaacactggtaatcgattactaccttctggtaatcgattaccagagagtaaaactctntggtaatgattntgtgaaaacttcttgtgctactcaatattttgaaaaacttttttagtactt

SEQ ID NO: 45461 - DNA, 261 bp, Glycine max
gagagaagtgaaactttgaagtatgtcttacaagactctcattcatcaaagttactacaagtgttacacatgcttctatttatagactaagtgactttcttgagaagatgtcttgagaaaacttccttgagaagcttctctgagagaactttcttgagaagctatagcttatctacacacacccctgtcataacttagctcaccttcttgagaagctttcttgagaagctttctaaagaagctagagcgtatctacacata

SEQ ID NO: 45462 - DNA, 407 bp, Glycine max
agcttaatataagctatcatgtgatgtgtcttaactttattccacttcactgtactcgcaggcgataaacatccatcatgagaagagaattgactcgccggttgacaaggacctgaagaacgactatgatgggattgaactcgatgaaatagctcaagtggctcttctatgtactccataccttccaagctacagaccatagatgtctgaagtggatgggatgctagaatgagatggtcttgcagagaaatgggaggcctcacagagagctgaatccacaagaggtagacgctatgaactctcatcttcagagcgctactctgatctcactgatgactcttcattactagcccaagcaatggaactatctggaccaagatgatctacatagtcactgcgacactgaa

SEQ ID NO: 45463 - DNA, 188 bp, Glycine max
tatccactcgacaggggatgaagtggacgataccttttatcctatcacgcaacgtggctgacaacattgtgcagttaacttgaatggccattattgtcaatgccgaatgtatcctgcgattcactatccatgttcacacattcttgcagactgcgagtacatgagcatgaactactacccatctatat

SEQ ID NO: 45464 - DNA, 402 bp, Glycine max
gcaagcttctatagaaggttcgttcctaatttctctacaattgcatcacctctcaatgagctagtgaagaagaatgtggcatttaactggggtgaaaaacaagagcaagcctttgctttgcttagagaaaagcttactaaggcacctgttctagctcttcctaacttttctaaaacttttgagctaaaatgtgatgcctctggagtgggagttggagctgttttgttgcaaggtgggcaccctattgcttattttagtgaaaaacttcatggtgcgacccttaactaccccacctatgataaagagctttatgccttaataagagcactccgaacttgggaacattaccttgtttccaaggaatttgtcattcatagtgatcaacaatcacttaagttcatt

SEQ ID NO: 45465 - DNA, 357 bp, Glycine max
  unsure (1)..(357): unsure at all n locations
ttcacgagagctttcgntgttcattntcgaacgtctctatatgtgatgcgccttaatctaacatccgtgtgaaaagttatgaccatttgaatttctcaagagcttacgttggtcaattatgagcctctcgacatattatgcgcccgaatcggacatccgtgttaaaaggtacgagcatttggatttctcgaaagctatcttgggtcaattccgagcatctcgacatattatttgcccgaatctgaccttcgtgtgaaaagttatgaccatttgaatatctcgagagcttcctatgtttaatttcgagcgactcgatatattatatgcatgaatctgaccttcgggtaaaagttatga

SEQ ID NO: 45466 - DNA, 175 bp, Glycine max
agcttacaaatatatatctcagtggtagaagaatgttgcatgattgtgtgacgaagaggaaggtataaattctgctgccggtttgggaaggtatatgactctcttccttccctagcaccttacatctatctttactcactcatcgccgttttataacgccagacccactctcacc

SEQ ID NO: 45467 - DNA, 363 bp, Glycine max
  unsure (1)..(363): unsure at all n locations
atgttcttaatactggactaatccatttgcttccagagtttcatggccttgcaggtgaagacccacacaaacatctgaaagaattccatattgtttgctccaccatgaaacccccagatgtccaggaggatcacatatttttgaaggcctttcctcattctttagagggagtggcaaaggactggctatattaccttactccatggtccatcacgagctgggatgacctcaagagagtattcttagaaaaaaatttccctgcttccaggaccacgaccatcagaaaggatatttcaggtattagacaattcaatggagagagcctatatgaatactgggagagattaanaagttatgtgtcat

SEQ ID NO: 45468 - DNA, 474 bp, Glycine max
  unsure (1)..(474): unsure at all n locations
gatcttaagtcacctgcggcatgcaagcttgtttgataaagaattataaggttggattggtggtgaaaaaagaaaagagagaagtcataagtttaaattctcatactaataaaaagtcaaaaactaacaactggtggataaaaaaaaaaaaaaaaaactcgcttgtttgactatattaattagtattgtttagtaaacaattttttaatgagagtttctatagtgcccctattttggagggttttgatattgttaattttttaaccaattaaattacatgtcattttttgttacaaaatttttaaattgaatcttttttaaattaaaaaatatgattaaagataattttagaagtttgaatcctacaatctttttattaactttgaagataactntttttaaattaaaaaaagtgttaaaagtaactaaaaagattatagggtttagacttctaaagtaattttttttatcata

SEQ ID NO: 45469 - DNA, 335 bp, Glycine max
  unsure (1)..(335): unsure at all n locations
tgtattgaatgtntaccttaggatttcatgactcctatgatgtgtgtgcgccttacgtgagcatgttcatttatttacagttgagcccaaattttctgtaaaataaaccggggaaaggaagggaaaaagtttgtctcctcaagatattgtaaaactccaattcatgaccatcttgaatntgtttttattttaccaaaattgctgagggaaggggtatcgtcgtgaaatggtagttgctttatccaagaagctcagcgcctgtgggtgagaggagaagaggtaacaacatttggtttgccaaaaggggaatttatttttgagttaaggatactttt

SEQ ID NO: 45470 - DNA, 447 bp, Glycine max
agcttagctacacacacccctctaataactaagctcaccttcttgagaagcttccttgagaagattcctaaagaagctacagcttagctacacaccccccctataatagataagctcacccccatgccaaaatacatgaaaatataaaaatagtccctactacaaagactactcaaaatgccctgaaatacaaggctaaaaccctatactactagaatggccaaaatacaaggcccaaaagaaggaaaaacctattctaatatttacaaagaagagaggacccaaccttggtccaggggttcatgagaaccccaaggccttctttagcagctctagcccaatcctcttggagtcttctatccaatacccttggggggtaggattgcatcaattagtatgtatttggtcatggatgacactatagttaagtgggttatgataatactc

SEQ ID NO: 45471 - DNA, 260 bp, Glycine max
  unsure (1)..(260): unsure at all n locations
gtactgcatgcccaggcaggcacagggccaggcaccacagcagcccgaggatggccagcagcaggcaactgcagacgcaccaccaccatctncaaagtccacctctactcacctgcggaggttggaacgctgtatacaacatgtggctgaccaataggcagccaatcatangggtcaggtacagctgaatgagagcttttatcagtacaccctacatcagtagggccaggatcccagcccttacacatgacctactcctg

SEQ ID NO: 45472 - DNA, 434 bp, Glycine max
  unsure (1)..(434): unsure at all n locations
agcttgtagaattatggngtacccatcacatgtgtgtactatgtggcggtcgggcgatggtgcacaacaagctttccacatccacaatgcgcgcataaacccaccatcccctgttgcccacctccaactgagctcacgtactcccacgtagcccatatcctcgtttctctcaacaccgggtccccatcaatcctctcaagcttccacaacatccaagcaaaacaacattcaaacagcacaagctatcacagccaagcaaaacagagccaaggcagaaaactctgctcaacacatcaaccaaaatcacagcttttctcacgtaaagaccacagtaacaattccttcgatccaattcgttaaccggtggatcgactccaaaattttactggaagtctatagtgtataagcctgcattttgaccgttgggatatact

SEQ ID NO: 45473 - DNA, 63 bp, Glycine max
atatatagcatggaccatacatgatactagctagagagaatagaaactattggatatagtaca

SEQ ID NO: 45474 - DNA, 437 bp, Glycine max
agcttaaagtatgcccgagtcattcatctctatgagatgttgttgaagtattggcgatcagaattgccattccttggattatagggttgaaccaagctcatgcttttacaaaaaggttcataaagtcaagttgaaatatggaagtaaccgtcttgcaaaattggggcaaaagatgaatcgagttacatcactgcttcattttctgccaaaacacatttaggactgttgatgtccttgttacttccagtttcaccttgaccaagatgtcatgaaccatgtggaaaaatctaaattgattcaaccccatgtcctgcgtaaaaattcgcaatacttcaactgtacatcattcgcatacatccatgtttttcattggttgcattgctcattgcattctttccttgaaaaataaaataaaataaaataaaatgaacttaatc

SEQ ID NO: 45475 - DNA, 399 bp, Glycine max
agaggatgcttcaatggaggagaagaaagatggagagaatgagagaggggggagcacgaaattgaaggaagaaaaagggagagaagttgaactttgagttatgtctcacaagactcttattcatcaaagttacaacaagtgttacacatgcttctatttatagactaggtagcttccttgagaagctttcttgagaaaacttccttgagaaagcttcttgagaaaacttccttgagaagctagagtttagctacacacacccctctcataactaagctcacctccttgagaagcttccttaagaagaatcctaaagaagctagagcttagctacacatacctctttaatagctaagctcacctccttgagatgagaagctagaacttatctacacaccc

SEQ ID NO: 45476 - DNA, 417 bp, Glycine max
  unsure (1)..(417): unsure at all n locations
agctgcttgtgggacttctatggaggctagatctttgagcttcaatgaggtcctctaatggtgattttccaccatggagatgcagcagaagacaaaggagaagaggtgagaggaggcgccatccactagggaataagccatggaagaaggagcttcaccaccaagatgagccttggataagaagcttagagaggatgcttcaatggatgaaaagaaatagggagtgaaagagagaggggggagcacaaaattgaaggaagaaaaagggagagaagttgaactttgagttgtgtctcacaagattcttattcatcaaagttacaacaagtgttacacatgcttatatttatagactangtagcttccttgagaagatttcttgagaaaacttccttgagaaacttctttgagaaaaca

SEQ ID NO: 45477 - DNA, 454 bp, Glycine max
  unsure (1)..(454): unsure at all n locations
gtcacctgcngcatgcaagcttgcccagagaatgagtccacggaggatattcttaccacctcanaagactggaaagcggtttctaatgattcctctgcggcttccacataaggcatagaggacgggcaactcaccaagaggtcttcctcgcctgacacgatgaccaaatgcccttccactacgaatttcaacttttggtggagtgtagagggaacaactcccactgagtggatccacgggcgccccaacagacagctgtagggggggttaatatccattatttggaaggtgacttgacaggtgtgagggcctatttgtactgggagatcgatctctcccctaacctctcggcgggtgccgtcgaaggcacgaaccaccattgaactcggctntaagtgggaggcattgaatggtaatntctccaaagtgcttttaggcatcacgtntaaactgg

SEQ ID NO: 45478 - DNA, 369 bp, Glycine max
  unsure (1)..(369): unsure at all n locations
gtctctatggcaggaatgatcactntaattaattctgttctgacagccttgcctctgttttacctgtctttcttcaaagctccttcagcagtgttaaagaggcttatttcgatccaaaggaattttctatggcgtggaggtgctgaagggaaaaagattgcttgggcggcttgggatcatatctgagttcctagaatacaatgagggctacgaatcaaagctctcaaggactctaatagagcccttctcattaaatggaagaggctgctgttccaccaatcagactacttgtggagcagaattcttacctcaaaatacaaaggttggagatggttggaggagaattcccacaagcagactcattcctat

SEQ ID NO: 45479 - DNA, 365 bp, Glycine max
gtggcgactttgtctgagctatcatgagtaaagatcgtttacccactcattaatacaactagcttattgctagaaaaatcgagtcatattcatagttctaatgctttcaatgataatttccttattgtggtaatgcttcttctgatgatgagatggcttttgatctgcggatgaatcttctccaccccgaaaaggatcctgcagtgcaagattgaccaaagttgacccaaaaaagtcattcgtgtccatttttttacaaaggagtacacttttttgaatggaaatgaccttctaacgagactgcattccctactagcaatgtgttgattgatattctagccaaactctattggtaaagggtaaaa

SEQ ID NO: 45480 - DNA, 486 bp, Glycine max
ctcgtccggatccttaagtcacctgcggcatgcaagcttatggctgtcttctctgcttcaagaacttggaatcattactagaatggctattgaattattagtagacagtaaatctgctattgatctagcaaggaatccagtctctcatgactgaagcaagcacattgagactaaatttcattttctgagagatcaagtggctaaaggaaaggttaagctagtacattgcagaactgaggttcagctagctaacataatgactaaggcgttgaaggctgacagattcaaggagctgagaaggaaaataggcgttcagagtttggaggattaagaagttttgttcagtaaatgttgttgtaatgttcttgttgttgattcactgtttttgaatcaaaggggagtgttagggataattaattccaaaatagttactagtttgttagtagttgatggtggttagttagttgttttagtctatatatagat

SEQ ID NO: 45481 - DNA, 436 bp, Glycine max
  unsure (1)..(436): unsure at all n locations
tatctctctacacccaagcatcaatntccagaaatattctaacaggatgtaaatagtagagtctaattacatcgaatcaagaatctacagtaagtggtctctgaatagtctatcataatctaaagatccaagcactgaaggaaagataagcttcatgaacagaattaaattttaacgagaaaaatcagtatatgatcatggtgaggaccaaagctcttatcaaagtcacatttctggattgcttttatcatagcggtaaaagaccatgcctagaaataacaaaattaagaaccacataaaaaaaaaaactgtacggaatgagacacatatactggtaaagatgcatcttcattcttccatcaactaactcttcaatatttattgatctcattcttcgttagtttctntcactcaatccaagacatctaatatagct

SEQ ID NO: 45482 - DNA, 440 bp, Glycine max
  unsure (1)..(440): unsure at all n locations
agcttttagaanacgtcgatgtcaagtgtatactatttttcttttatgtttcagttgtacatagcttgtgtcttcttcatagatatggcatgcacgatggttcttaacactgtatccactcaaattccgtatgctggaaagtcatttatggtacaaaatagcattgcgcgtaacttgaatgtctcattttgatacctaccaaacacgacaaccctctcatcccataacttgcttaagtcttcaatcaagggattgagataaacatcgatgccatttcctaggtgtcttgggcccgatatcatcatagacaccatcatgtattttcgcttcatgcacaaccaaggaggcaagttgtaaattactaacaaaataggccacgaactgtgttgagtgcttaaactgtcacatntcattagtagcaagttcaagcctaagatttc

SEQ ID NO: 45483 - DNA, 305 bp, Glycine max
tcctgctcactgtacctgaaaagtatgaaccgaagatattagcattggaggaatgcaaaatattctgtaatggcagatttatcttgaggaccgaacaaccatcccgagccagtcgtcagggatgttgcttctcagatcttcatttaagggccttaatgagtggcttgttgctacctgaaatgtagcaataggtttcaacactatgagctctaagacaaaagacaaacaaaaaaatgttacaaacatcacctttataatgtagacatcaattccaagtttttctatcattgcgacttctgatatct

SEQ ID NO: 45484 - DNA, 476 bp, Glycine max
  unsure (1)..(476): unsure at all n locations
gatccttaagtcacctgcggcatgcaagcttanaaagtgtagatntattaaaataagaatatatttgttgatcccatctcgacacttaatattgacattacaactagtcgtaattaaacaatcgaatcaattatcaataaattttttatgcaaattaactgtatcacaattattctatatatctttaccggtatctattgatgctatttgctaccagagggttgtaccactaagagaagctactgtattgactataattaataagtaaaatacataggcatccagaatcttctgttttctaacaaaagactacaaaaagggaatgcaaaaagacagagaagaacaattccactaagccgcccaaccactagtgatcaatggtagtattaattattgaacaattccaaattgtcattgaaataaggccgaacaaacattctattttaaatgttggcttcattatttatcgatctgga

SEQ ID NO: 45485 - DNA, 555 bp, Glycine max
  unsure (1)..(555): unsure at all n locations
naattgatgggatgtaccattgattacgtacactntccatactcaatctanagcagaaccttacttcattggctattgtcaatcatagaatatttatggttatgaacgtgttgtaaactaatgaagagcatgtgtaactcgcatgtatctgtctcagacaatagcttactaggaatggaggtgacttaaatccagagcaatcatttaaagtgtattttataacctatcgaatgaacagctttttttattcatgtctggagcacgtaccttcgcaattattacaagtcggatctctatgcacgatcaaaatattgcatcatcatcaggagatgtcatagcgttgaccagtctatgttagcccttcatgatgattcatggtcgtaccgtacattgatcatcttatgcaactctgagaagcaactgacctaagcctttnttatggacttgatgcatgatcacagatcattatatgatctcatctggaccaaactacatctttaatctcatgcacaccaccacatattctataaatcgaaacatgatcttgactanaag

SEQ ID NO: 45486 - DNA, 477 bp, Glycine max
  unsure (1)..(477): unsure at all n locations
gatccttgagtcacctgcggcatgcaagctagccaccattctcaacatgaatacgagcaatgcctcttgcagcacctaaggctattttcagtcgagtatcccaatctaaaggcaccctatcctctcctcttttgcctgaaatttgcagaaagcagaatggcttttacacgcaaggacagtgtataaatgtagtcgtgtaatgtactaaaatagcattttcaagacaaattatntatttacatagtttgaatcttgacttcttttgcaaaacagaaaatattgtgtgtaaggtacactaagagtgagaaattgcaagatgtttttaactatgggggcattaaagttatacaagcactcaaatattgaaaaggcacagaagtatcaacatatttactttcctcctgagtgaggctcctctgaagtaaagagatgtctaaagtaaaaaaaaaaaaagtaacgatgtattcactggtgatt

SEQ ID NO: 45487 - DNA, 541 bp, Glycine max
  unsure (1)..(541): unsure at all n locations
nggtgatgatcgatgattcnctgcactatccagtactcagctcgcagcaacctgcagagatgaagtagttatacctattttattctaataccaaagtgccataaaggtttctttcttaataaaggatattaaatcaccaccgagaatgatgtttaccaaaactccattaaataatatttctttattgggtaaaatgggtggtacccgatttttggcctctttgaaatcctgcatattcaatggccccanggttataactcttttctggttaacttcctcttcttcatctataacatcttgagtatttcctaatatggattgtgcttcctgactttcttggacatctttattcttgtccttggcagccttcttgtttatattcttgcccccgaacccaaaaatataaataaaaccaccttgagaagttaccttgtgacacataaatcgttggttattttangatttanaataatgagaaaccactatcacttgtattgaaaaatatttatacatcatctaattacatcactgttatgatagg

SEQ ID NO: 45488 - DNA, 448 bp, Glycine max
  unsure (1)..(448): unsure at all n locations
agcttttctttgtgggttgatgaactctgtcacgcagaatggcatgatcgctggctgacatattctcaattagctcagttgcctcttcaggagtcttcagctttatttttccccttgttgaagcatctagcagttgcttggtttatagtctcagcccatctataaacatattcaattgaattggctcagagaacccatggatgggattctttctcaataaaactctaaacctctccaacgcttcactcaaggactcgttagggaactgatgaaatgaagagattgcagccttcccttccgcattctttgactatgggaaatatttcttcagaaacttttctacaacttcttcccaggttttcagactgttacccttaaataagtagagccacctcttggcttctnctgccaaggaaaatgaaaactggctgagtctaatagcctcatc

SEQ ID NO: 45489 - DNA, 444 bp, Glycine max
agcttctcaataccttcactactacattgtgtacatccatcctctagaaataattagactatatcaaaatgtattcaatgaagtttaaaataaaaatataataggcataaaaaaacaccaaatagtccttcaatttgcccctttcaaggtatgtgccacaagatgtcagaatacagtggcattcagatgtactttttaatgttcaagcagggtaatagatgaatgatagctaagttttgccggaaaaaagtaagaaaatatgacaataagtcacaagctactctctaatcctactatataatataatgaaatcacccaaaatgtgggataaaagaagcaaaaataagacagttgaataactctaaactctgaagcacagtttaagatggttgactaataaatcagacttgaactacagtgattatctataaagtcaattaatta

SEQ ID NO: 45490 - DNA, 358 bp, Glycine max
  unsure (1)..(358): unsure at all n locations
accaattggtcactaaagttgacaaagtcaatggtgatttctccttatcgtaatttctctctcacaaaatgacaatttatctctgtgtctaatatgttcatggaagactagattggatgcaatgtgaagagtggtttgattatcacaaataagcttatggccatatgtttcttcaaattggagctgccggagaagttgtcatagccacgtaatttcacttacaactgctgccaaggcacaatattttgcttccgcactagatctaacaattgtattttgtttcttgcttctncagtaaagataagtacctccaataagaacacaaaaaccagaggtagatctcctgcttgatggtgat

SEQ ID NO: 45491 - DNA, 434 bp, Glycine max
  unsure (1)..(434): unsure at all n locations
agcttatacataattaataaggtttaaaagggatatatatacaacaaaaactttgcaaaaaagttttgcaaaaaaaaataataataataatttttcaactcgcctgngcgagcaaagtgtgacaaaaaaaataaaagagagaggggtgaagccaaatttcaccccatcttcccccattttcttcaaaactcaccaaaggctccccaagacccatgggaaccaccatttttgcaccaacttcaagctttttctgcacatttgtctcaattattcttgcattccattcatcccactcaagtaagtgccatctccatctatttttacttcttccttgtggtatttgacgctttatttgttgtttctttgcaatatttatgagataagttatgtgcaaacccatgatcaaaaggcttcgattggtggttgcaatggat

SEQ ID NO: 45492 - DNA, 212 bp, Glycine max
  unsure (1)..(212): unsure at all n locations
attacaacatattggttatcgatgaccacggtatctgaacgttggaattcacattccattgtgaagagtcacatcttgtcttaaattcattgtgtaatcgattacatggttatggtaattgattaccagtgacaagttgtgaataaaaagtcaagagatgtnactcttgacatgatttctaaggttataactcttccaatgattttcttgac

SEQ ID NO: 45493 - DNA, 409 bp, Glycine max
  unsure (1)..(409): unsure at all n locations
agcttgtggcagtgatgatttcccttnttaagggcgacatcgggcaattcgcccttcttttttatgtacatgtgtatgttcaaggtcttgagtcaagttctctcctggatcactttccagcatgctctgcttgagcacttgaacatggccccttctcaactccaccccaatagttgggccatggtgaaagcctttgagattttgtgccccttcttcaatatccgacccagtgtgtcggtgcttccatattttttttagatgaagttgaggggcacaatcggttgggtctccttgaacaacgtatctaagaagctattgactngaacatttttcgccgcttcaaggaccatntctccaagatcccggctattgtcattgtgactgatggcctgccattaacgttcaacag

SEQ ID NO: 45494 - DNA, 433 bp, Glycine max
  unsure (1)..(433): unsure at all n locations
atcggactntgtgtggttgaatattatggtagtttataaatggagcaacacgtaacactgatggccaagcaaaaagccattggctggaaagacactggcattatgatttaataagcagaagggtatcaagcaaaagccacaagagtatgtgtgctctcatagtcaattttgaaatgttaaagagatattttgtcatttgaaacaattttttctccttttatagtctaactgttaaagagatattttgaaaactgatgacagtatttgtgtctaattgtgtattaattaaatatttctttatcagtgaacaaccttaaaagactattatgtatgaaatggagagagtacaaaataaccgcacattttaaatatttgtccaatatatatactatataaagtagtagctagggaacacagaattccacacttttta

SEQ ID NO: 45495 - DNA, 188 bp, Glycine max
agcttctagccaaatggacttaccttgaattaattcctttgatagcccctttgagcctatgttcccctttctttgttttgaagctcattacaagccttaagtgaaaaaccatgatatcgccttacccttaaggaattttggagctttggaattattttgggaataagtgtgggggtgggggtgggggt

SEQ ID NO: 45496 - DNA, 414 bp, Glycine max
  unsure (1)..(414): unsure at all n locations
catgcaagcttagtgtagtaggcagacataaagagtgttttcatgtaagaatacatgctcgtcactttacacgtgtcacactctagtgcacatggtgccagtagatagtccagatgccacgcccatcaccatcgatcacttttggtactgctacattccttgggaatttacgtctcatctgcagctggagtggtttgaagacaacaatttttatctgggcatggaagtgcgtcacgatgctccataattcatagtgacccagtgaggtttgatgcgagaggtaatgtcctgagttggagattcgaattagtacgccctatgcaagtcacttaggattgggaagatcacactggtatgatgcccgaaggggangaanagtatcacnagcttttaccagacttataaccttcttct

SEQ ID NO: 45497 - DNA, 289 bp, Glycine max
  unsure (1)..(289): unsure at all n locations
actatttccgctccggagtacgacagtcaccgctttatgagcgctgtacaccagcagcgcttcgaagccatcaagggatggtcgtttctccgggagcgacgcgtccagctcagggacgacgagtatactgattttcaggaggaaatatggcgccggcggtgggcatcactggttactcctatggccaagtttgatccagaaatagtccttgagttttatgccaatgcttggccaacagagggcgtgcgtgacatgagatcctgngttaggggtcagtggatcccgttcg

SEQ ID NO: 45498 - DNA, 399 bp, Glycine max
  unsure (1)..(399): unsure at all n locations
agctntgcttatntagttntcaccgacaaaaggatcgaagtgggtatgaaaagaggcaaatctgatcatcctgctttgataaaagcaaaaactggggcaaatgaagagggtgagaatgaacgagaatcccatgttgtgactgccattcctatacgaccaagtttcccaccaaccaaacaatgtcattactcagccaataacgacccttctccttacccaccacccaggccatccctaaatcaaccacaaaacccacctaccacacaacctatgctaaacaccaccttcaacatgaaccaaacaccaaccaaggaaggaattttgcagcgaaaaagcctatagaattccccccaattccaatgtcatatgctaacttgctcccatatctactcgataatt

SEQ ID NO: 45499 - DNA, 408 bp, Glycine max
  unsure (1)..(408): unsure at all n locations
gattctcgtgttgcttactgtttatacccactgttgacgtgcttaggccatgttacttaagtcgtttctcgcttaacttaaaaataaaataaatntccaccgaacgtttgaattgtattatccattagcttcagttaaaataaaatccgaccgttcggtcatgcccgaaccacgttggaaatcaaaaagaggtaaagaataatataataatcaaaaagacatcttttagtaaaataaagcggaaaatcaatcggacgtgttctctttgggatttctcattcttaaccgaattgattaataactaaagtgaaactaatgctgagatcaactcgcctagtcaagctcgttcacataaatatgcttttgaagtttgtcatctcaatttctcactatagtaaatggatcatt

SEQ ID NO: 45500 - DNA, 209 bp, Glycine max
gcaataaaatttttgctaagtgtctgaaacacattactcgcttagcacacaactacgcttaagcgaggtcataaccattcattctttcttcaaaaaaataaaccctcttaatgggagaaggcccacctaacgagttcatctggaaatccaaatattcatcaaaaagtgatgaactcgcttagcgcagcaaggcacgcttaatgcgttca

SEQ ID NO: 45501 - DNA, 378 bp, Glycine max
  unsure (1)..(378): unsure at all n locations
gtgtgcaagctgccctcaccaccagatntctgagcaacttcttcttcaatatttctatgagggacttagcaacatggagaggagtatgattgatgctgctagtggcggagctcttggtgatatgacccctgctgaggctatgaatttgattgagaagatggcttgcaactcccaacaattcagtgcaagaaatgatgctattattcttagaggagtccatgaggtggccatggattcatcttcatctactgaaaataaaaagctcgaaggaaaacttgatgccttggtcaacctagtaactcagcttgccatgaattagaaatctacacctgttgcaggagtctgtggtctatgtccttctttacaacaatctggagt

SEQ ID NO: 45502 - DNA, 439 bp, Glycine max
  unsure (1)..(439): unsure at all n locations
cgcttacccataaatngttagccaataattccttatatatacacctttgcacaaaatgtcaaattatgttaccaaggaattagtataaataaagcaattgtaaggcacaatggagatatgaaaacttaagcttaccttccactcttaccttgtctggaggtgctggcctcgaatccaatttttctcttcgattttctgtatcaaatacacagcatcagtagtatacaataataccctagggtatatatattcaaaactagaagtgtataattgtcgacgatctggcctgtataatcgtcgacgacaaccatgacagtgctggtgtgcttcacgacggcaaccaacttagagagacaagcttaagggcgcaaaatgagtgaggtaatgcgggctaaagtagagtgcaagtatgctaagggaaaagatgaaaatttacttc

SEQ ID NO: 45503 - DNA, 339 bp, Glycine max
tgctgagaagattcatcaattattggtattgggccattgtgatgtgagacaacgaaggtggtggtggtggagtaatatcgtcctcaccagatgagccggaggtagccacaggaagatgaccgtgggaagcttataaggttcttgataccataacatacaactaatggagatgaggcatatagaattggtataaaatttttcgttcaataatagcaatgattacattattcatagtcggtataatgagaatacaatgacctacaacctatgaggataaaatggaatcacatcatattctcataaatgtaatatatatgcacataactataatatatatgg

SEQ ID NO: 45504 - DNA, 436 bp, Glycine max
  unsure (1)..(436): unsure at all n locations
agcttctagcgtacccgctattggtgctcagaatatccctaaaacaaatccctcttattactagctattttgaattctttagttcctgaatgtacaaccttcaaattgttgctcgttcccgtatttgttttttgcaaaaaagaaaattaatctgaaacaattcaggctgaattgttatcgttattattactcgaaccataaggaataacagctaaacaagtaatttaaaatgtaacttttaaattatgtggtatttttttaattacaattttacttcaatatctaattttgttaatctacttaggtcgttttttaaatataaatatgaatttaaaggtgatctactgataatataaagtacttgctaatcacaaattatgatacctatcantttaaattttaacttaattttataaatatntaataaattataata

SEQ ID NO: 45505 - DNA, 314 bp, Glycine max
  unsure (1)..(314): unsure at all n locations
cctgtttgcacctacccttcggcgggagggcgacgcgatactcacgggtgcattntccaagaaagaaaaatgtatggagtcaccaccaacttttatttgaggaaaacatcgaagaaaccagaaaagtgtggtctacgaactttaagtgtgaaaggttcaggagtttgttttatgcacggggaatgtattagcaccccacgcgtccgtcacaacggactgcagcctttaatcaaatgtgcaaatatgactgcgaattgcnttattatcccttctttaccgttttatgtctctttatgccttttggatattttatc

SEQ ID NO: 45506 - DNA, 413 bp, Glycine max
  unsure (1)..(413): unsure at all n locations
agcttgtcaaacctgataaaagtttcaaaacaaatatcaagcatagatggatgaggacttcaaggaattaggtgtcatcaattagccattcaacgcagatatctttctaattaacttctgacctcaatatagaaattgatttgtaagtttgcacaggtttcttgcaaaatggcataaagaacttggacgattaatcaaaattagaagagggtaaataaaatatgtctagaaaattacagaaggattaaaaatttgaatattctntgttaacaaaaatgaagaaaaaagattcacggatggttgtaaatatatctatctattcagaataatttaacacccagaaaagatcaagacacaaagaagcttattctaaaaaattttcaagagatggatgtgacaaaacatagaatatt

SEQ ID NO: 45507 - DNA, 418 bp, Glycine max
  unsure (1)..(418): unsure at all n locations
agcttcatcaacaacatcgatttcataataaaatagcattggttcttaccaaaaaccgatgtctgttatcagaaaacaacatctatttttagtgaaaatcgatgttgttttattaccagcaacatcgattttttactaaaaaccaatgttgtcttcatatattaacatcggttttggtaaaaaccaatgttgatatgaagatatatgacttttttttataattcttactatataatattgattatttaaataatcgatgttgtaattttatgttaacatcggttttagaaaaccgatgttaaccgtattactttcaacgtcgatactttcaaaattggttgaataaccaattggaaagtccttaataaccgatgtaaaaacctattntctagtaatgtctcacccctggtctttcatg

SEQ ID NO: 45508 - DNA, 498 bp, Glycine max
  unsure (1)..(498): unsure at all n locations
atcgataagagtatcttcaactcatcattagccaaacattcttaactcttcttggctaggacatctntagctcatccttggccgaggcagcttcagtttgacctcaactaggcatcttcaacttggcttctgttggaagatctttagctcaacttcaattagggaatctgtaagtcaacctaagacgaagcatattgaacatatatgacctcgtcaaaaacatatntaagttgaccttagctggtcaaatttttaaatntaaggacgataggttggccctaacctatatggtcttgtggcttttnttagtcttgaaccacatgagctaaataagatgggttgacccatattaacattgatgactataaattaacaaanaaggtaatgaacatatgacatacaatcgattagtataaattgacaaggcggaaatatataaactgtataaattaaagagcatacaatgtttttatctaatatttatacattttctttaca

SEQ ID NO: 45509 - DNA, 426 bp, Glycine max
  unsure (1)..(426): unsure at all n locations
agcttccacttgtatactgcatcagtaataaagaatagctctatgttttccctctcgtggatgtagccttgatcaaaggtgaaccacgtaaatctgtgtgttctttctcatctctctccccctttcaatttgctgcaaaatctgtgtgtatggcatttctgttctgttgcatctactgttgttgttcttgattgttcttcatcacttccataacaagaatgatattataacacaccacgttagaggaaagaagaagaaacaaaataggattataaaatagacgcaaatgattataatgaaaaaaaaaagtgttttacctatgatgaggatgaaggcaacttagattgagtttaggaaaaaggagaggatgtggtggtttccatatttacctagcaaaaanaaaaaaaaaaaaagaatagttcaaaa

SEQ ID NO: 45510 - DNA, 477 bp, Glycine max
  unsure (1)..(477): unsure at all n locations
tctcagcttatattgtaggcttcttcttgtgtaacttgtcaaaggtggcctcttatgaacaaagaggataggcttaaactccaactgtacctcacctcagaagtgcttgacagccaaatgctcttcctagtcattggtgagactcttgtagaaagcagaatactcctcctttgtgatctcctcaggctttgtcatctaaatggccttgtgcttgttcaccaatgagcattcatgtgacacttccttaatcttctttttattntgttctcccttgtccttctcttcatcaacatcctgcacctaagtacatgaaaaaattacttattgaagtaaaattgtaattaaaaaaataccaaaaaataaaaaaattacattctanagtacttttntagatgttattcgttatggttcaagtaataatcatgatgaaaatngatccatgtgtgtttgatttcttttatcagcaaatatgatatg

SEQ ID NO: 45511 - DNA, 435 bp, Glycine max
  unsure (1)..(435): unsure at all n locations
agcttgtaggaaattcaaacgataataactttttattcggatgtccgattgaatcgggtaatatatcgagacgctcaaaattgagactagaagctctgagcaaattgaaatgacaataactttatacacggatgtccggttgagtcccgtaatatatcgagacgctccaaattgaaaacggaaactcttagaaaattcaaacaacaataactntttactcggatgcccgacagagtgtcgtaatttatcgagagatgctccaaattgaacacaaaagctcgtatcaaattcaaacgacaataactttttactcggatatctgattgagtcccgtaatatatcgagacgctcaaaagttagatccgaagctctgagaaaattgaattgacaataactttatacacggatgtccagttgagtcctgtatatatggag

SEQ ID NO: 45512 - DNA, 328 bp, Glycine max
  unsure (1)..(328): unsure at all n locations
tgacaataactatgtactcggatgtccttcaaagttccgcaatatatgtagacgctccaaattgaaaatngaagctcctagcaaattcaaatggcaataaatttttactcggatgtccgcttgagtccggtactatatcgaaatactcgaaattgaaaacggaagctcgtagcagatgcagaccgcaataacatttaactcggatgttcgattgaatcccctaatatatcgagatgctcgaaattgataatagaagctctgagcaatttcgaactacaataactctatactcggatgtccgatagaggtccgtaatatattgagatgc

SEQ ID NO: 45513 - DNA, 413 bp, Glycine max
  unsure (1)..(413): unsure at all n locations
agcttgcttaatatgtattatatctggatccttttagttatatgaaccctaattntattttggggagaaactattttgatcaataaaattgtaaaacccctaaatttatgtgttatgaccataaattttttctcctctttagaattaataaaaggcttctacatttgatttacggngttgtacaatttttttttgtttgtgttgcatttgctggcatattattctatttgggataaaggttctacgtatctggtgttggcatttagtacgtggcacaatttcataaatatacatatttttttgtttatatgaataagtaataagacaatgatcttttgtcttatatgtttgtttcgggtgcgtaattagtttaccatgatatagtttttcaaacatttactgctatcacaatt

SEQ ID NO: 45514 - DNA, 512 bp, Glycine max
  unsure (1)..(512): unsure at all n locations
cgcgacgcagggattgattcgttgcaatcccgtgccgctctcgcnataancccaactgnacgcgtggtatctntcatactgaatccgcagatggttctccatattatatattctttgcgctcggtcagtttctccagtgcaccataggttctcagctaagtgtgccttctgaagacttccacttcaaacctgaggagggcctcttgccctctcccgatgtgaaccgaagttctagtctatcattgactgatcctctttgggcacttgtttcctgaagccttaactatagcatgtgactatattactgattttgcacaaagactgatactgtgatttctctccatcataattgtatttgaagtggacgcttttcagagtatcttatatgataattgtttcatttgtgctgcgcgatgacaccaacatgtctagtatctatggtgatcatgaccctatcactgcgtcgatgatggcacatcacatcttctggaattaatcccgatttgatcatg

SEQ ID NO: 45515 - DNA, 354 bp, Glycine max
  unsure (1)..(354): unsure at all n locations
ctttcgtaagctatttaagccaagtctattccaacaagagggatctgatgatgaagcttactttaaattagtctaaacctaagagggctgtctcaattaagcccagtccaacaagagggatcttatgacgaagcttatattgatttattccaactacagatcgaggtttatttatttacgctacaacatataacacaaaagcttgatcaattagagaaacatccttatatgcatcatccggtctgttagatagacccaacacttgtacctactattgtcaattctacttacttgcatatntatcgtgtttgactaaagctagttcaattctattttaaaccatcaattatcaat

SEQ ID NO: 45516 - DNA, 382 bp, Glycine max
agcttcccgtatctatacttggaaggatctgattactgccttcctaaggcaatatcagtataactccgatatggctcccgatcacactgagctgcagaatatgttcaagaaagaaggtgaaacctttaaagaatacgcccagcggtggagagatttggcggcacaagtagctcctcccatggttgagagagagatgatcaccatgatggtagacactctgccagtgttctactatgagaagctagtaggttacatgccgttcagcttcgcggacctagtattcgctggggaaagaatcgaggtaagattgaaaagaggaaatttcgattacgtttcctccacgagtgcgaatgccaaaagaatcggggcaacaggggcaaag

SEQ ID NO: 45517 - DNA, 153 bp, Glycine max
tgaacgctgtcttcccttcttcttgccaacactgatcatgttctaatgaactcccattcatggtgaactgtgtcgctacaaatctatctatattagacagtgcagtattatacatcatatggacatcttgcacgttttaacatatgcatctgc

SEQ ID NO: 45518 - DNA, 391 bp, Glycine max
tgcaagcttgatgccaacattggagaggttaatgaatcaacgagatgatgcgctccatgagaggttggatcaaatggagaacagagatcataatgattaagaaaggcggagaagagggaatgatggtgttcctagacaaaaccgaattgatggtattaaactcaacattcctccctttaaaggaaagaatgatccggaggcctacttggagtgggagatgaaaatagagcatgttttctcatgcaacaactatgaggaggaccaaaaggtgaagcttgccgccacagagttttccgactatgctcttgtgtggtggaacaagctacaaaaatagagagcaagaaatgaagagccaatggttgatacatgggcgaagatgaaaaggatcatg

SEQ ID NO: 45519 - DNA, 388 bp, Glycine max
  unsure (1)..(388): unsure at all n locations
actaccctnggttcgctaacatggaanactttaaggccacagaacaaccaccagaaggtataaaattccacaagagataaaggttcttcggagaagccaccaagtatgttcgggattaccctattcttttttgtattggtcctaacaatttgttaagacgatgtgtaacaaagggagaacaaactagcatattttcacattgccacaactcaccatatggaggcaacttcaacggagaaagaacaactgcaaagatctttcaagccagattctattagcctaaattcttcaaagatgctcataaccatgcacgatcatgcgacaactgttaacgaactgacaacatatctagacgacatgaaatgccattacagaacatgcacgagat

SEQ ID NO: 45520 - DNA, 438 bp, Glycine max
  unsure (1)..(438): unsure at all n locations
agcttccatcaagtggtaatcagagcacaagagcttcaagtaggtgctccttaaacctccattaattttttttctttaccttctgttccatttttgtttcttcatttttctccatatatctcctcacatgtcttgttctaaatgttgttaacatgattctttagagtttccaccgattaaacttgctatagaagttagatttgattttctatggttcaaatttcttgttcttgttcttgaaccatgaattgtgttgagtttaggttcctttgagttttgtcttgttattttttgtggctgaagcctaaaccataaaattcttacaaaaatattaaagtagaagaaaacctcaaaaatctagagtgacttgttcacctattgtagttntgtcatagaagtcatgtctagtcatgaaactcgtcacataagaattcttat

SEQ ID NO: 45521 - DNA, 386 bp, Glycine max
gtgtgaggattgaaaatatagagcgtataatataggacaaatcatctaattcttctcatggagaagatgaggggtatgaagaggatgagggaggaaaaaggaatgagaggtataaaaagagaagaaatcagagaagatatgaggtaggcaaagagaggaagggattgagggagtgaaggtgaagatccatacttttaaagggacttgtgatccaaaaatgtatcttgagtaggagataagaatggaaaaagcctttactggttccacctccatggagaagaaaagaatcaaatgggcctcactagagtttaagggatatgctttagtgtggtggaaccaagtgaggagtgatgttgagaggatgagaacacctttgattaatacgt

SEQ ID NO: 45522 - DNA, 524 bp, Glycine max
  unsure (1)..(524): unsure at all n locations
tggtgtccatgatcactgcctatcagtctattccgacaggacgctaacnactgttaatcaagtgatcatgtttcctcaagtctttgtggagaaaacagatgcacactacatctataatcaattgccagttgcttgcttgaatctggattgcacgcattggattgactcatcaagaatggggagagttgggactccattggtcttgacgttcgatgatgatcatgattgtgtgctgctaatgatgctcaccggctctctctgattgagatccatacagtgctctacatatcacgcacatcttcttgatgactcactagaatatattgtgggcaatgcctgtttgatgaccaatgcttggccatgcgatctatgtatacagcgtatttccaaggtatactctctggttataactaccagaggatgtcatttatgaccctcggcctcatctgttcctaacagctgtaatatttgtattccaattctcactctggatcactacacatgtccagctcgtttcactatca

SEQ ID NO: 45523 - DNA, 451 bp, Glycine max
  unsure (1)..(451): unsure at all n locations
agcttgtangattatggngtacccatcacatgtggtactatgtggcggtcgggcgatggtgcacaacaagttgtccacatccacaatgcgcgcataaacccaccatcctctgttgcccacctacaactgagctcacgtactcccacgtagcccatatccttcgttctttcaataccgggtccccatcaattcttccaaacttccacaacattccaaaaaaacaacaattcaacagcaccaagctataccggccaaccaaaacgaagcaaaggcagaaaactctgccaaaacaccaaccaaatcacagcttttctcacttaaagaccccagtaacaattccttcgttccagttcattaaccgttggatcgactcgaaaatttactggaagtctttagtacataagcccacattttgaccgttgggatctactagaacacgtccagaactcac

SEQ ID NO: 45524 - DNA, 447 bp, Glycine max
  unsure (1)..(447): unsure at all n locations
ctcatttaagcatttcagcctttgctttcgtgtagcttaaganaaatgtcatttcttctcctttatttcttccaaagtcatttataacatcctaagcactttctccatcaccaacagccaccattagccaccacaaaccgccattgttctccgttgagacccacaccgagaggaacccttcaaccgaagcgaaatctttcaacttggcttgcgatttcggtagagaacgaaaccctaatctgacctttcattntccttcgaggtaaccatggntctatgcttgttacttgttagtttcagcttgtcttttcatcttttatgactntggaactgccattgcatgttttacgtttcctctganataccctagagcatagagactntgtaaaagtatcctttcatgaaatgcatgttattttcgtaacctacactgaatcttggtcacat

SEQ ID NO: 45525 - DNA, 260 bp, Glycine max
  unsure (1)..(260): unsure at all n locations
agcttccatcaagtggtagtcagagcacaagagcttcaagtatgtgctccttaaacctccattaattntttttctttaccttctcttccattgttgtttcttcatttttctccatgtatctcctcacatgtcttgttctaaatgttgttaacatgattctttagagtttccaccaattaaacttgctataaaaactagaattgattntctatggttcaaatntcttgttcttgttcttgaaccatgaatngtgttgagtt

SEQ ID NO: 45526 - DNA, 397 bp, Glycine max
  unsure (1)..(397): unsure at all n locations
cagttaagcgagactgatggaatatgtgggccgtcatcgatgagtgcaaagagaagctaaatctagcggcgactcatgagcaaaggctagaggatgagtacgccaagatatcagcagaaagggaagcaagggaaagggtaattgattcattgcaccaagaggcaacaatgtggatggaccgatttgctcttactttggacaggagtcaagaacttccccgattgctagccaaggccaaagcaatggcggacacctactccgcccccgaggagatccacggacttctcagctattgtcagcatatgatagacttaatggaccatatgattagaaaccgcaaggaagnttgtattgtcgcttagatcttgacttgttattaacttntgaataaaatgag

SEQ ID NO: 45527 - DNA, 394 bp, Glycine max
  unsure (1)..(394): unsure at all n locations
agcttcctaagacattnttccacagtctggccgttgggattntgagaataataacttttggtctcttgctaagcaagaatggagcgctaagtgcaattccaaccaaagagggaatcgcgttgagcgcccagaggtgcgctaagccagactccaacagagagggaattgcgcttagcgactagaggtgcgctaagcgagccctagtgcagagggggctgcactaagcctaaattcttatgctaagcgcaagaagtggacttcggcttagcgcgacaggctcgctaagcgaaatctgcaacttataaatgcgttctcagtgtgaaaaacatgatttttcactctcttcttctccaaaacaccacccaaaccctaaaacctcattnttccaccaccc

SEQ ID NO: 45528 - DNA, 504 bp, Glycine max
  unsure (1)..(504): unsure at all n locations
cattctcttagtggtgaagctccttcttccatggcttattctctgaaaaatcgtatctcttttccttagtaatttaggcactactcatatgctccatttagagttttgtagcgccctataggtcttgcacaaggcaaataggtcaagtaagcacaaaaatttgaaaatatgcaacaattatcaattaagcccaattatttgcctaagacccatactgagttaaggagagaaaataagactccaagagaggtcaaataagctaagatgaatagaaaaatactaaactaaaaacatttaatcaaattcccccatactttatcttttgcactccagggaannagctanagaaagactaagaanaatcaaactaaagtaaaaccacaactaaaagaaatgaattaacaaggaatacatanttttcaatggatcttaacaatggcaaaaaaaaacgagaaagataanaatggaagaatgtatcanggaacaagcaatcatgaacataag

SEQ ID NO: 45529 - DNA, 431 bp, Glycine max
  unsure (1)..(431): unsure at all n locations
gaaaagtgctatttttcaccttctcgctaatccnatccgctggcttagcgagcgttcgctaagcgcaacactcatgggctaagcgcgaggaagactctagaagaagatgagttgtacaggttcgttaagcgcactgcttcatctcactaagcgcactgtttcagtccatctactaagcgagaaaggcacgcgctaagccgaaattcactaatgtgcgctaagaggtccaaaattacgctatgcgcacgagcacgaacaaggccacctatttaagcctaaaatcagattttgtgaagggagtttgggctgggattctatagagagaaaggtncaagttctagagaagttcgagagattttgctgtgtgaagacctgcagagactagagcttgaagcaggagccgttctgagagcttgagatgagtntatgag

SEQ ID NO: 45530 - DNA, 400 bp, Glycine max
  unsure (1)..(400): unsure at all n locations
tcatccgcaaactgaagcatgtatactgggaccttattctttcctaccaaaaagctgtgaaagaagtttgtagagactgcttccctcatcaaacctgataacccttcagcagccaaaacaaataaaaaaggggccaaaggatccccttgcctcannacctcttgaggcttaaactcctcagttggactaccatttacaaggatggatattgaagctgaagaaaggcagcctttaacccaaccaatccacctttcatggaaccccattctcctcaacatatagaaaataaatngccaggacacagagtcataagctntctcanagtccactntaagcactaaacacgaattcttttgcctctagcctcctcacaacctcacttcaatcagaactcatgtac

SEQ ID NO: 45531 - DNA, 343 bp, Glycine max
  unsure (1)..(343): unsure at all n locations
cttaatttaattcaactgtttgcacaaattcaagccaaatcatagaagacatgggttcatcattgttgcacatattcatgatcaaatagcaaaatgttctcaatattctcattactattntaatttcatgtgtgaaaatgcaataacagcttttatcttctatttgtataactgtttctcttcccctgtgattgatgccaggttttcatttgatcccactcagaaattgggtctggatattgcctcttgcatccttacaaggtgtgatagattgtcaataattaacatggttttgctattggtataatatatttctttttggttcactacaatctgtataact

SEQ ID NO: 45532 - DNA, 540 bp, Glycine max
  unsure (1)..(540): unsure at all n locations
tgcatgaaccttgatcactgcatatttgcacaattcctaanaagcccgcatngnnttgtggttatcaaataatacgattctgtgggtatttgtccggcctactagcagctacttctgatgaacaaagagtcagctgaaactcttgatctcttgctatgctctgagatcagaaacttactatggtcttattgacatttaagtatatttcgatgcatctcttgtttttgaaagcggagtggctattgcaaaactctctttctctttgaacacgttcaatataatctaattcagttgccttacgcacttgcgtcagaaatttctcatctctcgctcacaccgtgaaacgaccgatttccgacatgatactgctccatattattctgtcatggtcattaatgtcgctttacgcgctatgaacttggtctgccttatttcgaaaattcctttttcttgttgtcacttgctttggatgcactgacttttgcgttctgttagagtcacctcttgattcatctttttaatcttttatttggaattacg

SEQ ID NO: 45533 - DNA, 435 bp, Glycine max
  unsure (1)..(435): unsure at all n locations
aacctctctcttccgtgaatacgaattatgatacaacattntaacatagatttatttataactttnttccacaaaaaagtntggctttgttaattaagttntgaagcttaaccaggaacaaggcagactttaccacttggtttctttggtcataaaatgaanataatatatacgagagaaatgaaaactcttgaaatctatttggttgctcttgtaataagaatggaaagaattttttttattcatcataatttttattcgtccctaatagtaattgaaaataaagcattgggaaggttgctttntgtaaaatgaaaatatcgtgttagagatattttatatcattggatatacanttttttttctttctatcatatttcttatacaatcaaataagagaaaaaataactcttacattttcccnctcttatgttt

SEQ ID NO: 45534 - DNA, 451 bp, Glycine max
  unsure (1)..(451): unsure at all n locations
agcttaccaccataggaggccatggataagagcttggaggaagaaggagatgaatgaagggagaggaagagaagagcacaaaattttgtgttctaaaagagctctatctgaagtttcatttttaaatgatgaaaattgaaaaaatgcacacacatggcctctatttatagcctaagtgtcacacaaaattagagggaaatttgaatntctattcaaatttcacttgaatttgaaattgaatttgtggagccaaaatttcactaattatgattagtgaattttagctatggttaagcccactaatccaagatcaagtccaagattctccactaagtgtgcttaggtgtcatgaggcatgtaaagatgaaggacatgcacaaagtataactatatgatgtggcaatggggtgtagcaaacaaatgctcacctcccnctctaaaatttaattgg

SEQ ID NO: 45535 - DNA, 379 bp, Glycine max
acccatcgcatgtggtactaagtggcggtcgggcgatggtgcacaacaagttttccacatccacaatgcgtgcataaatccaccatcccctgttgcccacctccaactgagctcacgtactcccacgtagcccatatcctcgtttctctcaacaccgagtccccatcaatcctcccaagcttgcacaacatccaagcaaaaccacattcatacagcacagctatcacagccaagcaaaacagagcaaaggcataaaactctgccaaaacaccaaccaaatcacagcttttctcacttaaagaccccagtaacaattccttcgatccagttcgttaacccgtggatcgactcccaaatttactggaagtctataatacat

SEQ ID NO: 45536 - DNA, 342 bp, Glycine max
agcttaaggatggaatacttacttgttggtgatgaataaaagcacaaaacggaatcgaagaatgcgaatagtagagatcctaggggtgcaaactcgcaaattccgtgggtatggcttttgaaaggggggaaaagaagtttttgaatgcaaaaacgccccccttttcgtcacttttatattttggtgcaggggttgctcgcccaggcgagctcatctcgcccaagcgagctaaccaacactttgttttttggagaggaacattaaccatgtccccttcttccttatgggttaacgttttgcctaacttgaatgtacttaagttagaattaggcgttgattact

SEQ ID NO: 45537 - DNA, 296 bp, Glycine max
ttgactatcctacttcgatgaacacgaagactcgggccaatggtgagaataagtagggagatacccatgttgtggctgttgtccctacatggccaaatttcccgctagctcaccaatatcaatacttacgcgatattagttcttctcattacccaccatcctatgagggaagaacatccaatcatccatcgagggcacccctagaccaggcacaagacccagttgttgcacatgcgaggccaaacaacaccctttatacgaaccatatcaccaacctatgagatgagctgtgcggg

SEQ ID NO: 45538 - DNA, 145 bp, Glycine max
tatctaatattgtacaaagaataagtgagctcaatcctagcctatgagcccaaatctattcctaaggttcatgagaaccctagggccttcttctgcatctctggcccaatcttattggagtcttctatcccatggcccttggggg

SEQ ID NO: 45539 - DNA, 321 bp, Glycine max
  unsure (1)..(321): unsure at all n locations
tttctcatgtgcacccaaacccaatcttcgggttcaaagacaaccttctttctccctttgttggcttgtctagcatagcttttattnttcctctcaatttgatctttgactctctcatgaagcttcttcacatagtccgcctttgcttgaccttctttatgcttaaaaacataaacattatgcataggcaaaagatcaagaggagttagtgggttaaaaccataaacaacttcaaaaggagaacaattagtggtgctatgaacaactctattgtaagcaaattcaacatggggtaaacaagcttcccaagtttttaagttc

SEQ ID NO: 45540 - DNA, 317 bp, Glycine max
  unsure (1)..(317): unsure at all n locations
tctactggcttagcgagcatccgctaagcgcaacactcctgggctaagcgcgaggaagaatccaaaagaagatgagctgtacaggttcgctaagcgcaccacttcatctctctaagcgcgctgcttcaattcatccgctaagcgaaaaaggcacgctaagccaaaaatcactaacatgcgctaagcgcatgaacaaggccacctatttaagcctgaaatcagattttgtgaagagagtttggactgggattcagagctttgcatgtctagggtttctagagagagaaaggtgcaagttccagagagttntgagagat

SEQ ID NO: 45541 - DNA, 513 bp, Glycine max
tggataggtgtacatggttactgccttctatccatcccttggacactcctgagagctgagctagctgctataccctctatactaaactacgctctggaaaactgtcttgagaagattcctaaagaaactcgagcttaactacacacacctggtctaataagctaagcgtcaccttctttgagatgagaagcttgagctcagcttcacacccccttttattagctagctcaaccccatggacaaatcatgaaaatactaaaaggtgcctacttcgaagactacttcaaatgcctcaaaatacaaggctaaacccctatactacttgaatggccaaaatctagggcccaacgaaggaaaacctttctattttacagatagtggctatacttacccatgagctaaatctacctatgctcttgagaccctaaggctttcttggattctagccaatctactggagtgttgatccatgccttgctgagtagattgctcactctcatgacacgagatggg

SEQ ID NO: 45542 - DNA, 433 bp, Glycine max
  unsure (1)..(433): unsure at all n locations
agctggtattgggctatatgaagcgctcgtttttttntacccatctaaactttntctttccataaaatttctaaattacaccactttacaggttaaattccaaaatgcatgagttttaagtttcattgaaaagtcgggatttatcaccacgacttttgaacgatgatttttttaatttaaattttatttttaaatttgttttaatttaaattattaaaaatattttaaatattatattatataaaaattatttttaattgattttaaaaataatttcttattaaaataatttttatttgtttaagaaaataatgttattaaggataattatttttcttatattatttaatttatacaagacttagttgataatagactntgtttgataatatttaatttatataagacttttgaagaaattaaaattctcaaa

SEQ ID NO: 45543 - DNA, 383 bp, Glycine max
  unsure (1)..(383): unsure at all n locations
ctgtctntgcgcttgtcggccacgctcaacanagtactttcgacacctactgtacgttganttgaccaatgctgttatgggaatgtttcgacaatccttcaaaaccttattgatacattctgaaaggttggttgtcatgtggccatatcgacgtccttctctatcataagccatcgtcccattttcctttgaaattcgatcaacccatgtggctatggctggactcagttcacgaaatttttgtaaattctgataaaaaatgtgcttgcaaggagtgtacgctgcataaaaatagttatgaataacaattttaagtatatatgaaacttaaataaaccgtcaccatcaaatatgaaatcttacccaatttntcaacatttctt

SEQ ID NO: 45544 - DNA, 384 bp, Glycine max
  unsure (1)..(384): unsure at all n locations
agcttgtgcaaatcanatcactcctacatttcatctctagcatgcattntctttctttacccactcctcacgtttggttttttagggaaaaacaccataactaaacgcgccgcaagggatccctatcgcaccagatccaaatctagaacgatgggtgatcaagaggagacccaagaacagatgaaagccgacatgtcggctctgaaagaacaaatggcctccatgatggaggccatgttaagtatgaagcagctcatagagaagaacgcggccaccgccgccgctgccagttcggctgccgaagcagacccgactctcttggcaactacgcaccatcctccctcaaacatagtaggacggngaagggacacactggggcacgat

SEQ ID NO: 45545 - DNA, 368 bp, Glycine max
  unsure (1)..(368): unsure at all n locations
cctattgtgcaagctatcaatggcgcataacacacctcatgattatgatgatggatggctcaaattctcacaaaggtaaactcatcactttcaaattgagctttcaaaactatcatgacatgtagaggagaatcaacgatttcaagtcacacaatgtcaaaaacttttattatcaaaacaattacccatttcttgaacatatcctataattcagagaataacatgcaaagtcgtacatgcacacaaaattgacccaaaatattaaactaacaatccgacgaaactaacaacattaacaaattaacaaaaccaacagaactagcataaccaaagaacactccaccnccgcgcatacttaaacaacacat

SEQ ID NO: 45546 - DNA, 448 bp, Glycine max
  unsure (1)..(448): unsure at all n locations
cccgcaagctgttcaatacacatcaagtntaatttctttatctttttaaggactcatcctacactcgggccgagtaatatcaaattaattttaataatcctacccattcaaattgtggaatttcattaaaatcttttctccattgatcgagtcatttttcaatcaattcatttcacactttccaacactttttttattaaaccttgtattattgttaaggtcaaagagtgatattacgttcacactttatctggggaaggtgatttacagagaaggggcaaagacaaacgtgcgaagctgtttggtgaggtgattgcatatggaaattaatttgacaaacgtggattctacacagatggttttctcttctgagtcttgagcttaacacgtgaccatttgtgaagtgagggtataataacccctctatccatgtgtctttctattcttt

SEQ ID NO: 45547 - DNA, 435 bp, Glycine max
agcttgaatgtcaccaagtcttggtgaagatgtttcagattatgccaaaggagaatatccaggatggtgaggctgggattcaacaaacaaaaaatgtgttttggaaggaacccacatatgggagatacaagattaatttcgacacatcagtttctaagaatggtggaacatggatagtttttatatctagagataaggaaggacatgtgctagcatctactaccaaactacttgacttcgtccttgagccaagggaggtagaagcttatgcttttagatgggaaatttgcttagctgttgaactgctttttgaaaacgtaatctttgagaccgattgtttacaacaggtcaaacaatcgatacttaaggaaaagaatggtcatgccctctttcatggaatagtttatgactgtcaaagaacgattcatatgacta

SEQ ID NO: 45548 - DNA, 305 bp, Glycine max
  unsure (1)..(305): unsure at all n locations
tattctctagtagatntcgtctcttcttacctcttcttctttatcttacgctgcaactccatggctganaatcatcattgaaggaactcattgaagctcaaagatccaacctccatataagcttctcaagcaatcttccatcaagtagcccatcacctatgaacttcacatgtatgcatgcttcacttggagtaattatgggatgagtgaccttctgggaagtctctagaaaagcatgagtaacgacaaagcatgctaaaaagtcttattgtcggttgtgggaacaatcattgcttatgaaagca

SEQ ID NO: 45549 - DNA, 384 bp, Glycine max
gcttgccacccatctcgcccaggcgatctttgtttcttcctccagaagcaacagccttttggatgaatcttctggagggcccaagtgggtctggttgctatttgcacccccacttttactaaatacacccccctgccttttttgttgattctctcttcgtaaagttacagaaacttactaatttcgtaacgatacttgtattctttccgtaatgttaccgaaccttgcggatcacacaatcatcccctttttgacttacggaatgttacagaacctcactaattgggcaacgatgcttccatttgatcttcggtgtgtcacggaaccttacagattgggcttaatatttcttttgattccggcatgcccagaacttcacaaata

SEQ ID NO: 45550 - DNA, 354 bp, Glycine max
  unsure (1)..(354): unsure at all n locations
gctacctagtctatanatagaagcatgtgtaacacttggtggaactntgatgaatgagagtcttgtgagacacaactcaaagttcaacttctctccctttttcttccttcaatttcgtgatccccactctctctttctctccctctttcttttcctccattgaagcatcctctccaagcttcttatccaaggctcatcttggtggtgaagctccttcttccatggcttattccctagtggatggcgcctcctctcacctattctcctttgtcttctgctgcatctccatggtggaaaatcaccattgaaggacctcattgaagctcanagatccagcctccatagaagccccac

SEQ ID NO: 45551 - DNA, 387 bp, Glycine max
  unsure (1)..(387): unsure at all n locations
tagactatttctcttggcttttccatcttttctctttctntttcccttttaatattctcccttttttatatgtggtagagtttcttaagggttacaagtgggtggtccatttttccattntaagcatgtagaactgtggaaaaaaggtaaggggagtttttacaaatccttggggtctatgtgtgtttgcaatgcatagagctttaatttttatgttgtggaatgttgtgtatttttttcgtatttgccttcgccaatgcatctangacttctttgtttgttattntctgttttggatgccaaacttgggttccttgaacccaaaatcctaggaaagcatataaagtntgttgaatttggtttgtgtagcaatagtatgtaaaatca

SEQ ID NO: 45552 - DNA, 414 bp, Glycine max
  unsure (1)..(414): unsure at all n locations
tgtgtcatagtcatatntagacatgtgtgcggtccaccccattgtgtcactttccatgcatcagttttnttggataaaattgccctcatataaaaagggcaaggagactcttcggtgttgttgggacaacaaacgatatatttgtgtgatttcgtttcaacaaccttaaaagtttgatgcaccttcatcacatattgtttcagtgcattttttaccgcatctttactgtcaaaatccatgccaacatacaattcttgtccaacattaaaagtcgttggcatgtccagaccacaaatgtcctcctcgtccggatgactccaattgatattattataatgcatagcatcattcccaaatgggatttgaattgtggacacctaataattaaanaaaaatatgtcacaaactactcta

SEQ ID NO: 45553 - DNA, 255 bp, Glycine max
  unsure (1)..(255): unsure at all n locations
atgagttattacgcgaagattctcgaccggtcttcaagattcatcgttcgttctggcgtttcttcagtcttcaacgggtaagtacctcaaaccaagcctttcaattcattctatgtacccgtggtgggccacattntgtttcatgtatttttattctcattttcatttactttttatacccccttttgacgtgcttaagccatttaatttagtcatttctcgctcaatctaaaaataaaataaatctcgccgatc

SEQ ID NO: 45554 - DNA, 336 bp, Glycine max
  unsure (1)..(336): unsure at all n locations
tatgtagatcaaccccctggatttgaaaactcagacnagactaatcatgattttagattaaaaaaggctntatatggctcaaagcaatatagatactactcttttcataaagagaaaattacatgatattttattggttcaaatttatgttgatgatattatttttggatctactaatgaattattgtgcatggaattctctcatgacatgcaaagtgagtttgaaatgttaatgatgggagaacttaatttctttcttggattacaaattaaacaaaccaagactnggaattttgtcaatcaatccaagtactgcaaagagttaattcacatatt

SEQ ID NO: 45555 - DNA, 363 bp, Glycine max
agcttatcaccacactccttcaaaccactggcctcaccaccaacaacttcagcttcgtgaatctcacttgcgactcccaatttggcgtcatctcgatcctcttccccgcaccgtactctccctctaatgccaccatcctcttcttcataaagaagcgtgatggcactagaaaaccactgagcgccactacgctgaactttctcctcatcggtagggacacatcgttggtggcgctaagctggttcttctgactcttcatgaaccaccccatcgtggaagaaaagatcctcgcagagctaacgttggtgcttacttccactcatggcggcgaccgacgacactggatggaggaggcaatggact

SEQ ID NO: 45556 - DNA, 248 bp, Glycine max
atctagaataacattgattcttcaaagttcaaaaacttccatcctagctttcaaatatgctcatatggaaaaaaatcatttaattaagttattaaactaggccgtataaactttgaaacgaaatattggagatattgagatctttacctgcgaagaacaacagacaaacaatttctatgccagaccaacaatgatgctacaatgcacctcaagccttcaccttggcgaaagtcacacttgaatgtgtc

SEQ ID NO: 45557 - DNA, 434 bp, Glycine max
agcttgcatttggaattgcgaaagtcctcatccatcattaggatttgttcctgccatctcaaacaaacaaatcaaacgtaacaagacaattatagttgttgtttgaatacctcacccactcaagtgtatcacacaattatggcttttctctaatgaaacactcttgccttttaccactctaattccccttgagttcttaggcaattcaagagattatggccacaacaaagaacaattcaccaatatgtgtaaggtaaggctagagagacaaggaaaaggttaaccaagaaaaaggctaacaatgtttttaggcacaaatgaaggaaataaaattcagaatttaggaattcaagtaacaatccttcatgcaaccaatatattaccttaaagagattttttttaaagttcttcaagcatgaaccattcagcccaat

SEQ ID NO: 45558 - DNA, 389 bp, Glycine max
  unsure (1)..(389): unsure at all n locations
tttgctatagatagggggagaagtgaagaagataagagttcagccncttaggcacttctctctctctcgaaatatctgaagaaaattagttccgtgaagaaaatccaagccgaggcgcttccgttacgtttgcgtgagtaattacgcgaagattctcgaccgttcttcaagattcatcgttcgttcttcgaattcttcaggcttcaacgagtgagtacctcataccaagcttttcaattcattctatgtacccgtggcggtccacattttgtggcatgtatttttattgtcatttgcatttactttttatacccctttntgacgtgcttaagccattattttaagtcatgtctcgcttaatctaagaataaaataaatttccaccgatc

SEQ ID NO: 45559 - DNA, 423 bp, Glycine max
  unsure (1)..(423): unsure at all n locations
gttttttctcgcttttgaaggaaccangctcactcgctaatatgacaccctcactctaggatcgctgagcaccgnctgcgctatcgggccatcataagatgcgtcattcctactgaagagacctgtcctgctcatggactacaattatactgacttacactactagatatatggccggctgtgggcattgctggctaccctcatgcacaagttcgacctagacttgttcctgcagttttataccaatgcttgcgctacataggagggtgtgcgagatatgctatcttgggtgatgtgtcagcggatccctatcgatgcagatgccctcattcacatcttgccataccctctattgctggaggacggtcaccagtgccaatatggacacatgaggcacctggctcgtcggaatgaagaagacgt

SEQ ID NO: 45560 - DNA, 534 bp, Glycine max
  unsure (1)..(534): unsure at all n locations
aggatgatgncatagccttggattgactccattgctagaccagattccctgagtacccngcctngcatatatatttgaacgcctgtaaatatcttctcttgtatttttctaacagacacatcaagtactcagtgctcattttccacacatgaccataaccatacatgacaagaggagagctttcataaatatgttaaaggtgccacagaagctacctgatttcaaatcaatggacataatgcctgcatctcgtcttccacctttatgaacctatcaaatttttctccaatatatgatgtacctaacagttgagacattcgcttctggctcancttagctgtgttctctatacctgaccggagtggattccacctctgtacactctaatgcactatctaaattctatgtgaattcacgcataatcatgcattctgcctctctgcatctgaatacatttatggcacaggctcttgtcttctgccttagacagatattaatcgcatgatggcatcatatatcgctatcacaacttcg

SEQ ID NO: 45561 - DNA, 384 bp, Glycine max
  unsure (1)..(384): unsure at all n locations
agctntatgctgctaaatgactgcagattgctgttgagaacgacaaagatctatatggtgatctgcagaagaacatagaccacagactcttgcaacaggggcagatgcatatttctgattcatggcaagctgggttacaaggttgaccaaagcattaagttttccttcaagctttttattttaagtagatgaagatgaatccatggccacctcatggactccactaagaacaatagcatcatttcttgcactgaattgttgggagttggaagtcatcttctctatcaaattcctagcctcagtaagggtcatatcaccaagagctccaccactggcagcatcaatcatactcctatccatgttgctaagtccctcatagaaata

SEQ ID NO: 45562 - DNA, 551 bp, Glycine max
  unsure (1)..(551): unsure at all n locations
attatgcgnntnnnnttttngtgataccatgtattacgtgcactattatactcagccttggaggacatgccaagattgtcttattatttgtcaatgtgttctgcaagtgtggccttcacaccgtagaccctccgctgcaaaaaatagtggcgttgtccctatgataacctaaaattttgttcaacgaatgtcaaacacgtctgaaaattaaaaagaatactttgctagggattctccttgcattgacaacgtagaaagtcaagaacattcttcaagcgtgaatttgcatattgttagatcaaaatatatttatgtctcgaagaagaatcaggatgtcaaattatttatattagatactaacgaaatccgatggcaacaggtgtgtcttatatgcttccgaacatgatctatatgtgtgcatgtgaaggtttcagatgatgcgctcattaaatgaactgagatgtcactctatgtgtgtatcatagacctcttatcatactccttgttaagaatatttcctctagaacatatctctctgaactgtccatgct

SEQ ID NO: 45563 - DNA, 450 bp, Glycine max
  unsure (1)..(450): unsure at all n locations
agcttcacacctacaacaagaggaatctaaagcgatatggcggttagtacaaaataatttagctggtatactttggtgatcaaggaggcaaagaaagaaattgaagttttctggtaattgaagagaccagagccaagctttgcttcttgttgtagcagtagtgggggatcgggctcaagtcaaacaacagtatgcagatttagctgagtattctccatcacaagcattatcccaaatgacaatatcctccacattatcatttagcacaacactttcaagctcatgtttcagccaatcaggaataggagtagcctataagtttaaattgcaccctccatcctcgaagatattctttataagaagcatcgaatcctggatgtgaatataatgtaaagaagtcccaataacacttttagaagaccatttctcataccanacaaaaacatttcg

SEQ ID NO: 45564 - DNA, 437 bp, Glycine max
  unsure (1)..(437): unsure at all n locations
cttcattgcatccagccactntctattntcttcactntccatggcctctctaaagcactcaggttctccatcatctgttaggatcacatactcattaggagaatacctcttagaaggttgtctctccctattggaccccctgagttgaagttgagatggtttggtagcatcaccaagattttcatcttgtgacatgtcatgctcctcctcctcatcatcagaagaaacatctacctcgtctctaggttgttggacaccaacatcattctgagcatccatattcaaattctgaataggcggctgaactggttgaaaatcagccacatcgttgtcttccttgggtgtagacttctccaccttaccattgtcttcaatggtttggttttccatgaatttcacatcacgaattataacaagcttcttctcaacaggatcat

SEQ ID NO: 45565 - DNA, 445 bp, Glycine max
  unsure (1)..(445): unsure at all n locations
agctnggttcatatgacatatatgctccagcttgtgggggcatgtcaatgttgtctcgatgaacaaccaaaagaacgtccttattcaaataagcgttgaatattacatgtactattattcttctactacctaactaatatatactacaactttttttttgtcatgccatggttacctcagggttagtgactaatctcgttcgcagtactgtcgcacttgctgactcgaaggttttcatatatggtggggattgaacacgaaattttctactaaataaattgtccccacaatgtgtgagtgcaagatgcctaaactacaacttgtttatttcattattagttcactctttactaataataatttggacaatgaatcatataattagtaactaagttctggtttggcctattaataatgttggtcgggtttggtgagttcaaaattg

SEQ ID NO: 45566 - DNA, 269 bp, Glycine max
agagaagttgaactttgagttgtgtctcacaagactctcattcatcaaagttacaacaagtgttacacatgcttctaattatagactaggtagcttccttgagaagctttcttgagaaataattcttgagaagcttcgttgagaaaacttccttgagaagctagagcttagctacacacaccatctaaaaactaagctcaccttcttgagaagctttcttgagaagctagaacttagctatacacacccctctaataactaagctcacc

SEQ ID NO: 45567 - DNA, 449 bp, Glycine max
  unsure (1)..(449): unsure at all n locations
agcttantagggtatgctnngaattttaatggatataattttaaaatatgtttgagatcatattttgttgccttaaaaaatacatgtttaaaaataaaattttgtgaaagtaaaatatgaaacactattataaatttagtttgtaaatttaagtttaaccaaaacttaagtttacaaattttaatccatacataacttttgtccaacaaaattaatttacgtgaaaaatatgaataaataatatacaatcacaaaattctataacattttatcacagagtgtaatataaaataaatttatactattttctaatcacaaaacatacataatttcgttaacattttttttgtgctcttaacatttatcataactactttaaaaattatattaaaaattatttnttacattaacaatacatgtcaattaaacgaaaataacatacagaaaca

SEQ ID NO: 45568 - DNA, 329 bp, Glycine max
ctcgtgcatttgaatcatttgccatgcagtgtacagagagccaatccatgaaactatcaatattgtaacaccccaacacctaccaaatgcaacaaagaaagtgattactgattttttttttatccacaaatataagaatattagctctattataaatgttagtcacggaattcgaacctgctaccttccttatccctgctttcttccttctagatcaactttatccaaaaagtgattaagtgattactgatgatgtaacatgcatgatccaacataatttcttattaaaaataatattattattctgtccaaaacacataatcatttca

SEQ ID NO: 45569 - DNA, 448 bp, Glycine max
agcttgaactgtacatgcagcatagttgtttgtctctgacaacgttgaggaatctgtttttgcagacagatgaagtgatgatatataatcaataatggaagctaaacagtgaagcttcccccctcccccaataattgaggacaacacagtacatacacacaatttcagaggacagagatttgcatgagatatcttggaatatctttaaagaaatggatccttaaatgtgtgtcctacaaaatagaagctagaggacagcaaaggggaggaacctaatttaggatgtacaatctcataaaatagttaaaagcttatcaatattctttctttgatcattttgggttgtcatgtttgtttggatgtccatcagtcattggtttggatgcagtgaagaactatgggttcacgttttgcgcagaacaaaatacaaaaaggaaagttaattaat

SEQ ID NO: 45570 - DNA, 266 bp, Glycine max
gctttaacaaactataaaacgcattttctataattataataccactaagatgaagagaattatttacaaaggatttgatggatgaataatccttctcaaagtaagagaaaaaaacaagctaacaaaaaagaaactataagcattaacaaatgtgttaagcaagccaatcccccaagatatccaatatggaaagaaaagaaaagctttctcgcaacagtccacacaatagttcaacatataagaaatatgaaaccaaacaattttta

SEQ ID NO: 45571 - DNA, 397 bp, Glycine max
caccaccattaccaaagccagacgctcaataccatcaaaatcagcatgttcaatagccaatattcccgcatcagcaaagagctcctctggaaaattgtaaatcaactgtctgttaacaaaacagttgataccatgacctattatcttctgcaccttttctctcattttctctttctctgctgtttcaatttgagcaactctagccatagaatcaacacgaacacgtgcaccatatatcttcactttgtctgtgtccatggcagtgtttgccaccagtatctttgcattctctatccgcttgtgttgtccaataccaattttcttgtcaagaatgaatctgatcaaataattaaaacagaaagaaagcttactttctacccagagtaataaaatgata

SEQ ID NO: 45572 - DNA, 461 bp, Glycine max
  unsure (1)..(461): unsure at all n locations
aagaggaataacgttgaacgctgcatactgacaaattgctaaaagctgncctangctaagacatggagagagctgttatcttctatcgttangangcaagaagggtggtatactatatgaccttgttcctggttactataaaaataactttccaaagcttacttaaagtactacagtgtatttatttgacaatactattgcaaacatgaaatattgcatgccaaagcgaatatatcaacgtggttccaagtagttattacgaatatcatgattctatcggaatattttaatcaaaactctctattgcttgttagtgggatacctttcttctctgcagtcttcgtgcactacgtaccttgttcacctatcttctggctgctatggtaccggactttaagggtgactttttacctcttatcgcctggcatggaaacactttgagaatttcctcttcaccattg

SEQ ID NO: 45573 - DNA, 437 bp, Glycine max
  unsure (1)..(437): unsure at all n locations
agcttggcaaaacccaatggtcaaaccgtgtctgatagtccactgggtattacccgtagcagaaaggatcatggcctgngtaaagctattaccccctcaacggctgaaaatggaaaggagatatacctcgaagatggcaacctggacttaccagcagaagaaatcgtggaattggaaagtcaattcgtaggggcagaacgacaggttatgcaaaaagggaaagtttgccctcaacatctactggccaccacaggggagaatcaaaacggggagtttcataccttggaccaaggacttgtgggggagaattttcaaatatacagcaacgggtctctggagaagctttttaataagtcacgtgacactgtggatttatttgggcctaatcataatatgggccttcatagacctacnaaccccatgaaccaggaaatcac

SEQ ID NO: 45574 - DNA, 125 bp, Glycine max
gtttagacaatatttatttatcaaacaaactatatggaattatttataatttaataaaacaaatttccacaggcatttatttacttacttgtttatgtaacattacggaacttcctccacaatta

SEQ ID NO: 45575 - DNA, 328 bp, Glycine max
  unsure (1)..(328): unsure at all n locations
ttggtttcttggggcctgatttggacttaaaataaaacttgtgtttcttttgtcttggcatcatcaagaccatcatacacatacattcacaaacatcgctatattgtcgtaacaacccattgtcttttgaaccatggatccctnccactcaagttttggtgttatgcattgtaaatcgcaacgtgtctcatcaatcggatgccctctctcacactaaacgaaaagtctccattagaagtcttgtttcatcgtccatcaaattatagtaaactaaaagcttttggttatctttggtttccttgggtcactccatatacaactaacaaac

SEQ ID NO: 45576 - DNA, 354 bp, Glycine max
  unsure (1)..(354): unsure at all n locations
gtgagaaagcgtggaagagtcagtctttctatctttgttgtngaccacagagtggtacctggagatatgtcgcggtggtcaggagaccttggggacgtcatgtggggtgctattgcccaaaaccaagcttgaccaatcccgacccaacccgggcatagtcagtcagtgagaacctgtgacgtacctaagcaggcgagctcctggcagtcaaccaataaaagaataaagtccacaaagcaaggaggcttgtgtggcggctggccaactatgaatcttgagtggtatctggaaaatggcctctggtaatcgattaccaagggtgtgtaatcgattacagggcttataaatggagac

SEQ ID NO: 45577 - DNA, 430 bp, Glycine max
  unsure (1)..(430): unsure at all n locations
agcttggccaactaaaggagttcattcataagtttcagtcatacaggcccgagggaaggacccgaccaaagtctagttgggagagggaccgagaacatgcaggttggtcaaaaaggctgagaagctgaagctgcttgagggagagaaaggagaaacccctcgaccaaccgaggtgggtcataaacaccatcgcctgaggttttgttagggaggggccaccgcctccgcgtgaaaataacactttcaacaagtctgatccatcaacatgatctctcggcaccgagtacctaaaatgtcacttatagctntcacaacatatgacttcatagcaatagacccagtataggatgaccccatggttatcaatgttgagatatccaattgcatagtcaagaagatccttgtagaccaatgaaactcgaccgacata

SEQ ID NO: 45578 - DNA, 356 bp, Glycine max
ggtgctggcttctgcttcttttagttggctttctgggacaaatgtttaaaaaaaatcacgttgagaattgtgattgcctgataattctggtttaagaatctgaattctcagcgcttttgtagcatattattctcaaaattacagcgtaaattctgattcttctaatctgaatttacgctatcaataatagaattatgtgttggtgtcaatcataggggatatgtatattagtataaatatgtgttttatgtttctgaaaaaatttctcatttaatctgttcccagtcacataaaccatagtattctctatccatcgtcaagcaactgagcaagccacatatagggtagtactatta

SEQ ID NO: 45579 - DNA, 545 bp, Glycine max
  unsure (1)..(545): unsure at all n locations
tgggactgaggtgaacctttggttggtcgcatgcctnacgcgcaccattagtgaacaaacctntcacaagtctagcgattcggctgggagttgaatacattgatattcacataancgttgcgctgtcaagaggtacctgtaacacaaatcatgggttataacacgtaccatgcttgtgccgcagctttacaaagaatctctatcattccaactcttgcgccatcatgggttccaagtatcatcatgtgtgaaaactgatcactaaattacctaattatttgtttcatatatttcaactcctgaattaaaatttttattcttaaacttaaaattataaaagctaggcttatgggtaggggagctaaaaagtttatttggcgtgactaatgaaatgtcatgcaccactatttttcatcgagattgtgttgggttttcatgaccaaaaatttcaaggttgttaaaaagaattgaatctttttagccaatggtaacaactccggacggtaatctttgttttgggaaatgtaagtttagaaacatgtctt

SEQ ID NO: 45580 - DNA, 434 bp, Glycine max
  unsure (1)..(434): unsure at all n locations
agcttagaatggtcttagccactcatttctgcttgaggctaggtgctccaatctgaagtccaatacaccactagaagccaacatcactctattgcctaaaagtagagaatctaaaccattggttctcgtcccccatgtgaagggttccagaacactcaatggttattgggctcactcaatgctagaattactacatggttgtgcttggatgttgggactgtaactcacctgcatccaagccctatttaggaataagacacccaccacaacactgaatagactctntccatatgatgttaacctactggctcacatatcgatgtttgagtgcctttgcaagtagtatataccttcttcccctattngttcgaccaacattcttaccctctntaccacctaaatcacattcagaaggctggtgagcatacaggctc

SEQ ID NO: 45581 - DNA, 549 bp, Glycine max
  unsure (1)..(549): unsure at all n locations
tgnaatgaaaatntgctttttttgatactatggatgtcgcgctctctgcataatcagcgncgtactggtcctcctgctgtccgtgatgccgcacacgggagtcttctctatcgcttgggcataacccaggcgtgggtcaatcaaagaaatgcgcgctgttattgatgacaatcctccctgcctgcgttgcctctaaagagcttatgatgtgatgagggatatctctggcatagccttcgggcatgatcacatgaatggcggtgatcacgcagtacgagataccgatgctgacgtccctctacactctcctgaggattagatgctgtggcaggcccctctcaccgttcttacatgaccgacacatctcgtgcgacccattatagaatacgtattaccgtatgtcgcgtgtgacattcttataaaaaggatatcttgcgtatgaggcttgactctcactgacgtatgttactatgtgtgtangagtgacatcagccgcatgattgcagaacctgtgagtcgccacacatgaagatgatcacataccagatn

SEQ ID NO: 45582 - DNA, 418 bp, Glycine max
agctggcctgaacaagttcaacaagcaatcactctcttattctccttcgattaactatatgcaagcgcacaacaaatccttctcatcgcatggatctgatggttatatggtgccaaacaagtcctttttgcattcagatcctgagagtttttctaattctcgtggtggtggttttaacaaccgcggtggtggctggtgcgacagcaccggcggaagaggccggggtcgtggttggtttgctaactttcagtgccaagtctgcctgaagtatggtcacactacctcagtctgtcattatcgacacgagcaacattatcaaccaaattcaactttggtgcttcaggatcctactactatgcgagtccgtctcagaattctggttatcggcaaattaattctaattctgggtagcagaatg

SEQ ID NO: 45583 - DNA, 423 bp, Glycine max
  unsure (1)..(423): unsure at all n locations
ctgcaagcttaagttcaagttgtcattctcctccctttgcctttcttctcagnttccttgtccattangttagccttcaactcttcaatatcagcttttttctttttcaactcagcctctagctcacattccctctgacatgattcagattttatctggtctactaactcgtaggcattcctgatctgcaccgcgctccgattctgttcttctcgcgattaaatctcagcagtctctatagcagatctcaatcgttcaacctcggacttcaaagaaacaacttctgcttccagctgactaggatcctcaccctgtttcaatatttcaggttggtactcaaatttatgatcatctgcaacattntctgaaaggatgcatttattattgatggngtctgtctcaagattgctaacaagtgcctct

SEQ ID NO: 45584 - DNA, 450 bp, Glycine max
  unsure (1)..(450): unsure at all n locations
agctntacactccaagttgngtattttaatttattatatatantaaataattttttagcttataaaaaattataatatagaaatatattttttatataaaatttcataaattaatttgatatacatggttgcattggtaatatttaattcataaataaatgttattaaaaatatatattatttcatagtgtttaaaactgatatcaaatcctctaaaaaaaacatttttatcaattaatttaatttatctcacttacacatgtatatattgatatcataacgtaagagatggtaaaacttaattgtttttggtagagaccacaacttcttttttgtgaatggtagagacacaactagaaacaatcctatgagaaaacattntaattaaatttgatgataattatttatttcaatgatataataataataataataataataataataata

SEQ ID NO: 45585 - DNA, 439 bp, Glycine max
  unsure (1)..(439): unsure at all n locations
atcatgagaactaccaaggaaatgtatcccacttcaataaattccagaacgagctaaaacaacatgacacaaaaacatgttaacgaggaaaactacatttggctctttttgcaaccagaatgaattangatgcattttatttatcataattaatcagaagtactataacacgtggaaatcaaatatgaagagtaataaaacagcaaagaaaaagtaagtaaaacagtatgtaaaattgaatatataataaataaccgaagtggagccacaatacttgaccaaaatngtggccaagttttctggtgaaataaacatgttntctgccctctaagtcactctgnttttttttcttcagatattgtagtagaaaaagatatctaataatattttaatggtgtgtataataacatgaacttgatggattatacaaaatttacta

SEQ ID NO: 45586 - DNA, 440 bp, Glycine max
agcttcgtgagtgcaagtttaaagcgcgaagggtaagtcgccatgatatgcaatgaagactccctgaggaggtcggatttggtacaaccatgccctcccggcttccagctaggaaattggcaagtggaggaatgacctgaagtttatgtggcaagtgtcataccctaatttcgtccggggacctttgcttgatgacatgcgacttttgtttggtccttgtaaggtgcttggcacccatcattatgcaatttgtgaaattccgggacgtgccggaaaacaaaagaaaatattgatgcacaattcgtaaggttccgtgacacaccggaaatcaaatggaagcatcgttgcacaattagtgaggttccgtaacattctgtaagtcaaaaaggggatgaatatgtaatccacaaggcttcgtaacattacggaaagaaaacaac

SEQ ID NO: 45587 - DNA, 522 bp, Glycine max
  unsure (1)..(522): unsure at all n locations
tggggnatatgatgnncctttgngatgataccacttcattacgtcgtcnctttgagtactcaagcttgtctngctaagtgggagtccactctttggttgtgacatgactatttgcacttagcacaacttcctcagcactaagtctcgctcaatgcaacttcctcagcactaagtctcgctcagtgcaactccctcttttggtggaattgcgcttagcgcacccttcgctcttatcaagacatcaaaagttgttatttggcaaatcccaaccgtcagactatggcggattgtcctatgaaccttgactaaaactttaagacaaccaacggtaacaaatccggatcttatttactgaataggttacggaattntgaatttcatatttcaactagtcaacagactcactaactcacatcacatcagaattacaatgactattcaatatacctactcttcatgtaacctatttcataacctgatatacactaacatgattatatagtatattcagggttcacttcg

SEQ ID NO: 45588 - DNA, 444 bp, Glycine max
  unsure (1)..(444): unsure at all n locations
gctgttagtgtgtgtntaaatgtctattatattataaaaattatgtaataatgtttctttgaagaaaattttatcagtgaaaataaaatattttgaatatgaattttgtagtatttttttaattagattaggttggtgttaatgatttattagtgtgttaataattcatgaacgtttcaactttcatttaaaaaaattagtagatcatatttatttgaagaaagtattttgagtatgaaatttattttaatatgaagttgtagtatttttttaattagattaggttcatttttttgtgttaaaaattgataagcgttcaagttgaaagtgttatttgatgatgttttgttgtttcttgtatcatatttaatttaatatatnntgtagtaatttgtaattacctattttcattttgaagttattattggtaagaattaatatttt

SEQ ID NO: 45589 - DNA, 387 bp, Glycine max
  unsure (1)..(387): unsure at all n locations
cccggaatgggtttagggaaagacaacggcggcatgactaacctgataaatgccaaaggaaatcgtgggaagtatggtttaggctataaacccactcaggcggatataaagagaagcatcgtgggaagaaagagcggtggtcaaagctcgcggttgaggcaagatagtgaaggaagcccgccctgccacataagtagaagctntataagcgcgggtctgggagacgaaggtcaagtggtcgcgatatacgaagatgatgttccgagtacattggatntggtacgaccatgccctcctgatttccagctgggaaattggcgagtggaggaacgccccggcatttacgcaacgagcataatgtaaacctttaccggtttaanagctcta

SEQ ID NO: 45590 - DNA, 432 bp, Glycine max
  unsure (1)..(432): unsure at all n locations
gtcactaaagntattaaatttttttcaattcaatttaatattttttaaataaaattaagataattcaaatcaagtttattataaatactaaacttccattaaaagacacaacaaacggcgacggataaatacagggtattttactaatctatataaattagaaactggccagtggattttttacaggacttctaattatggttgatgaaaagataatttattttaaatttaattaaaatgtattgatagtataattttttttacaatgaaatctaattatgaattatcatatgataaaattattaattttatatctctggttgcttagtgtggaggtaaaataaataatctgtcaatggttgtcattgagataactaaagtacgaatttattaacgggcaattaagtatctatataaatactccggtatctc

SEQ ID NO: 45591 - DNA, 358 bp, Glycine max
  unsure (1)..(358): unsure at all n locations
agctngctctaaatntacattgatgttttgttttatgggaggaggttatatgccatttttgctttaagagtagtgtcccactggtaaaattaactttccaaatgtttgccttcgcaggaatggccccgaggaagcttgcctcaaagaggtccaggaaggacaaggcggccgaaggaactatttccgctctggagtacgacagtcaccgcttcaggagcgttgtacaccagcagcgcttcgaagccatcaagggatggtcgtttctccgggagcgacgcgtccagctcagggacgacgagtatactgatttccaggaggaaatatggcgccggcggtgggcaccactggttactcccat

SEQ ID NO: 45592 - DNA, 397 bp, Glycine max
  unsure (1)..(397): unsure at all n locations
atcaaaacaattatctaatcattccaatccactcaaatcatacaatngctcattcaaatcattctcaaacactcatttcatgcaaaacaatccactacatatcantttcaatcaattcattgttcaaacacgcttntggtacaaacaaacaactcaaagtgctgaaatttatataattgaaatttaaaaaaattgaaatataaaatctgaaattaaaatgactgaacataaatcataaaataattgaaaataaactaaaatgttcgagatgcacaaatttaaatgtcctgctcctgtggttgctcctatgcatgctcattaaggtccaacacctgagcagctggtgcagatggtgtggcataatcaagtatgggtgctaaggatggctntgggatct

SEQ ID NO: 45593 - DNA, 390 bp, Glycine max
agctttctgtccctctcttcttgttttttttgcttatacgttttccattcttcaaagtctcattattactatttgaccctccaagaagtttcaatctttttcggtcttttctccaccgcactgaaacccgtcttcattcgatccggtgagagagggttccccttggttgcgtgaatcttcagaaaagggtaagttctctgctttctctgaggttcactcatttgggatgctattgctatgataaatattcaataataaccatgactgcccagtttgacttttgaggttgatttgtgtttgtgtttgatggtgtcaatttccaggttgtccttgtaatattaatagtttgtgaattggagtttgtgtttatagcaagagaatggatgagtc

SEQ ID NO: 45594 - DNA, 510 bp, Glycine max
  unsure (1)..(510): unsure at all n locations
cgcaccatatgantttgtttcaattcagtaccatgtcggacccggganncnttnagccacctgcatgcatgtcagcttgtgaaagaacctcaactcttattttcctctaatgaaccattcaaaagagcattatcccattttttggaaaggcgctctccaaggacttttcattcttttgctcctcttttagcttgagcttgatcattaaagagcttcagcatgtgcctcccgtgttctgagtagaattgtttcactttttacatactcttaagaaggaggagggtccttggtaactttcatggccatattaacagccactgtatggacctcatcattataattcaccttttcaacgattagttcttcacggtgaaccaaaggtaaagtggagtctggtagccccaaagtcaatgagaagtgtgctcacctccacatataaatctctcttccttgacaaggagatttggaggtgaataccaacgactgggcgtaatttctccaatatacgcg

SEQ ID NO: 45595 - DNA, 296 bp, Glycine max
  unsure (1)..(296): unsure at all n locations
gcttataaacctaagtatcttgttagtcggtgaatacgactaactnttgtggtaaaacttgtgtatattgtatcaagctcctccaattntatggttatcttgtagagttataagtctttttagttaaagatatgtaataaatacttagtaattctattttgtgcgtttaataatcattctctctcaattttacgttaattatgcaagtttgtgaagtgctgattttcaccttctccgtaagctagcaacacacacaacacataagttgtgtgttaaaaaaaagaagaaagaaaaag

SEQ ID NO: 45596 - DNA, 435 bp, Glycine max
  unsure (1)..(435): unsure at all n locations
agctngctctaaatntaccttgatgtttgtatttatgggaggaggttctatgccatttttgctttaagagtaatgtcccactggtaaaactaactttccaaatgtttgccttcgcaggaatggccccgaggaagcttgcctcaaagaggtccaggaaggacaaggcggccgaaggaactagttccgccccggagtacgacagtcaccgctttaggagcgttgtacaccagcagcgcttcgaagccatcaagggatggtcgtttctccgggagcgacgcgtccagctcagggacgacgagtatactgatttccaggaggaaatagggcgccggcggtgggcaccactggttactcccatggccaagtttgatccagaaatagtccttgagntttatgccaatgcttggccaacagaggagggcgtgcgtgacatga

SEQ ID NO: 45597 - DNA, 320 bp, Glycine max
gagagagaccaatcacgagtacatagcatggtctttaaggaggagttagctgcttgctcaagatccaagaagagtttggcctgacacttagaagccacggatcaaaacatgctagctataatagggcagtacaaaaaagagttgaaccagtcgttgacccatgaacaaaagctagtagaggacttcgcacaagcatatgccgagaatgaagcaagagggagggtgattgatgcattgcatcaagaagcgaccatgtggatggataggttcgccttgaccttaaatggaagtcaagaccttccgcgactactagccaaagc

SEQ ID NO: 45598 - DNA, 402 bp, Glycine max
  unsure (1)..(402): unsure at all n locations
agcttgaatccaattcgttcagcatgcttttatgaaagttgctagtgtataattgcgttgtactggtgtcacataaattccaatcttttcaatatatttagtagcactgctctaataaaaaagatagtatactaattagtctataatatgagttaagaaaaatttaatatattagaaaattaaataaacttaagagttaagaatacatctatgtgtataaccacctgcaaagtcggtggagaatttcagcttaattggtattgaggcattgtgtcaagtatcagttnttgatacaacctctaagaaactcgaggttgcactcgaccagcaagatcacattgcatctaagggattcagctataacagaaatctcttaagagtttagactatgtgtattatagc

SEQ ID NO: 45599 - DNA, 410 bp, Glycine max
  unsure (1)..(410): unsure at all n locations
gcctctctaagagagaagatatatagcttaagaagtctctatcctcaagcttgagtgagccaccgtagagtgagtcgatctcaagacaagagtgaattcactccttggagtgaggaagctagaaagttagagagcctctttgagagagaagataaatattntgggaagtctctatcctcaagcttgagtgagtcaccatagaatgagtcaattgtgtaaacacatgcttgtaaccctactatcactttgtatagtggaagaatctccatattggagaattataatcgtgtgctcccattactacttttaattactaagtgcctatcttaacttcacgaagcgggaaagtccgagttttcacaacaaagtctgtatataaaaatacttcatgcatgtatgtgtacattatg

SEQ ID NO: 45600 - DNA, 410 bp, Glycine max
  unsure (1)..(410): unsure at all n locations
cgcagctttgcttatntagttctcaccgacaaaaggttctaagtgtttttgaatagaggcatatctgatcattctgctttgataaaagcacatatctgtgcaaatgaatagggcgagaacgaaggagaatcccatgttgcgactgccattcctatacgaccaagtttcacaccaaccacacaatgtcattactcagccaatatcgactccttctccttacccaccatccaggccattcctaaatcaaccacataagccacctaccacacaaccaatgctaaacgccaccttgaacatgaacctatcaccaaccaaggaaggaagtttgcagcgacaaagcctatataattccacccaattccaatgacatatgctatcttgtcctatatctactcgataattaaagctac

SEQ ID NO: 45601 - DNA, 455 bp, Glycine max
  unsure (1)..(455): unsure at all n locations
cgattcattctatgtacccgtagtggtccacattgtgtttcgtgtcttttgattctcgttatgcttactttatataccccctgttgacgtgcttatgccatgttacttaagtcgtttctcgcttaactcacacataaaagaaattaccaccgaacgtctgaattgtattatccattagcttcagttaaaataaatgccgaccgttcggtcatgccggaaccacgttggaaatcacaaagaggtctagaataatataataatcaacaagacatcttttagtaaaataaagcggaaaatcaatcggacgttttctctctgggatgtctcattcttaaccgaattgattaataactaaagtgaaactaacgctaanatcaactcgcctagtcaagctcgttcacacaaataggcttttgaaganggcatttcaatgtctcactaagtaatatggatca

SEQ ID NO: 45602 - DNA, 481 bp, Glycine max
  unsure (1)..(481): unsure at all n locations
agcttgaatgttcaaaataatactcaaattnttcttgactgtgtactacaattaagaagtcaatatgcttactagatgaagagaaaaaatcaattttgtatgttgcagacttgaagatccacccaatgaacatgacatgaagaacaatttttctacaaacactcaaaatgaaatttcgtcaacaagatgagttcattctggacattgtatatggagttcacaaatgcaattgagctattcttgatggatatagaaagcttgaataacgatcttcaactttcataaacaagttgtggtctggtacaacctgtatcatggacaaaattgagcctaaagttatagacgttgatttgcctagataacttgatatgaatgtagcaatttgaatactgttgagctacacaagttcatttaagatgatctcagtgtctatggaaatctaagagaaagatctatatctctaatgaagaagtcatgagct

SEQ ID NO: 45603 - DNA, 442 bp, Glycine max
  unsure (1)..(442): unsure at all n locations
gacaaagaaattaaagatattcaagatggatgatcatagtcagtctctagagtcttacgaagggtatattcaataggaagggaattcctaactgaagtagcaaaaggtttggccaagttatttaagttaaaaagtgtttntcaagatatttactctctggtaatcgattaccacaggatgttatccattactagtggccaaaaatgattaacaaccagctattaaaatgtgaattcaaaatttgcactgtgtcatcaattacacatatatggtgatcgattaccagcagttattgaacgtttcaattcaaattttaaagctagtcatagattacacacatactgtaatcaattaccacacgagatcatcagaaaatatgctcaactgtcacatctttctatttggatctttgatggctatcaaaggcctatatatatgtgac

SEQ ID NO: 45604 - DNA, 448 bp, Glycine max
  unsure (1)..(448): unsure at all n locations
agctaggtatagctagtattctttgtcctatgtatacgtatcaaactattcctggctctaacacaaattagaagatttattngtttgatcgcataatgactaacattcatcacttaattgtgcattagagcatatttatgcagtagaatgcttctattgatggtaattgaagaatttcagagtttgactntatttattcttcataggattcgatagattctagaaaaatgtctatgcaaaatagatctcagacacaaaatattaaataaaatcttaaatgtcatttttaatggtatattagaatatgatttgattttgctatcgtctaaaacattatacacagatttcaccaatatatgttatgatacacataagaccgaacttttaacatttatatttgtttatatctaatcacaataattagagatctttaattatcttaagatac

SEQ ID NO: 45605 - DNA, 486 bp, Glycine max
acacattgaccaaatctgtttcattatcatcctagacacaaaattcatcaccaaaatactccagtgccccattctcatttcgtatcaatttaccattgtggtgcaaaataagagtgatttcatcacacatcctacaggtaaacataaacatcattattttgtattttcacaaacctagtttatacaaaacatcagttactaaaaagtaaaaatacaattttgagaacccatatataagcctccaaacaaacatcattaaaaaaaaggaacatgaagccaaacgagaaacccaaaaaggaacaaacactgcacaaaaggaaatgacttcatctcttctacaaccaagcaaaaacgagatgcaacgcaaaagagaagataaagaaacgtgtacaaaaatgagtgaaatacatagaaatgcatacctggcggtgcaatagagaagactaatatgtgaacctcctacacgacgactatgatgatcatcgt

SEQ ID NO: 45606 - DNA, 308 bp, Glycine max
agcttcttaacgcttattcagggtacaactaattatgatgcaccctccatacgaggaataaactaccttcatcactgaagacgccaacttctgttatagggtcatgcctttcggactcaaaatgatggagctacatactagaggctcatggaccaggtctttaaacatcagataggccagaacgttaaggtatatgtggacgacatggttatcaagtcttatagtgtggcccaacatgtagcagacttgaaggaagtatttggagaaacctcgaaatatgacatatgcctcaaccctgaacatgcacc

SEQ ID NO: 45607 - DNA, 551 bp, Glycine max
  unsure (1)..(551): unsure at all n locations
aggcgccctagtgcatcgatngacgcacancatgaatacacaagctcgngagcaatccatccctcatatcgctgaaccagncaagagttatatcggtgaaggtacacacagacaacgcacattatatcatgtgagctcctccgcccagcagcacctgagcttggagaatactcataggtcgaacgagatcttcatctcgacaacctaggaaccaaggtaggcaaggatgcttgaagggtgaacaccaacgaaggcgagaaagagagagggggggagctcgaagctgaagaaagaaaaacggagagcagtcgaactttgagatgcgtctcacacgactgtcattcctcaaacggacaacaagtgttgagcatgcatctattgatggtctcatgcacgccattgagaagattgctttgaaaaactactcaacaaaccaccttggtagcttgagcctcctgcccacagccgtgtataactatggtcagttcgtgcgaagttccttagaagatcctacagaactaatcttagctctcacacaatcctatagctag

SEQ ID NO: 45608 - DNA, 425 bp, Glycine max
  unsure (1)..(425): unsure at all n locations
agcttacttcatctagctnttctctcctattatgaattttcttctgtttttcagcagtcttttttattgaaaattctgttgcttacctgaattttgttatataggggtctatgcaggcgatccttcaaaattaagtatgaaagcagcattcgggaaagtttggaagctggaaaaaaatggtggtagcattattggtggaactttcaaagcaatacaagagagaaatggagcttcaaaaccacctcgagatccgtaataatatatttgctctggatttttgccataatttattgagtatttcactaattcaattaatcatgtaggcgtctgccaaaaccaaaaggtcagactgttggatctttccggaagggacttaccatgttgcctgatgcaatttctggcaggtactacatgtngtctaatac

SEQ ID NO: 45609 - DNA, 433 bp, Glycine max
  unsure (1)..(433): unsure at all n locations
gaatgtntttggttgattgatntagacttatatcttaatcatgggttacggagttgtacaactgatggagatatattacacttagtcacggatgcttttgaaaatgagaatgagataaatgtttattttcatcatgaagtagatccaattctataaggagtcccacagatgttgtacttggaatgtgatccaattccagaagttgatgagaatgaggatgatttagatgatgtacctattgctggccatgaggaaggtaagttttaattcatctgtacttggtccaacatgggtaccataatgaattgatatgattaattattacttgatcaccattgatgcagatgttggtgctggtgagcatgttggtgctcgagaatagagagatgctggtgagcacagggatgcttatgctggtgagcatagagatggt

SEQ ID NO: 45610 - DNA, 451 bp, Glycine max
  unsure (1)..(451): unsure at all n locations
agcttctgataaaaaccgagcagttctaataagatttgtaatatgaatacccttacgctttgcagatatataaggtgacattttaggattccattttctagtaccgtggccaaaatgaactcctgcttccatcatctcttccaagattatgttccaatatctttttgtcatttatatttatccccacacttttctttcatttcaaaatcgaaattctataaattttttgaaatgaaagaaagagacccggtatactgaaatagaaataagtgttccaaaggaaccttctcttctaccgaagaatggcctttgataaatgatcgggccattttttctatttaatatttaatatgattattctctctattatctttcttttattatacaaaataaaatgaccgaagatgaatccgctcttaagaatcattattttanggaatattaaatacta

SEQ ID NO: 45611 - DNA, 403 bp, Glycine max
  unsure (1)..(403): unsure at all n locations
tctacaaagcatacggctntctggatgtagatgatgttatctatacagatggatcttatatatctatatatctatagatagatatatagatatagatatatagatatagatcatacaatgaagtaccgcacgagtgggtatataggaatccaaatctgccgaatcactcatgttatgatcttctacatcctaggtcttcccgttccttcatctggcttatgttcttcatgtagcattcagactgaatgactctatgaaattacgtcgctacttccacatggtacgggtaacgtatgagacatctctatttttcccggggggaatccttagaattaccacagcttagctttcaattcgcctctgaccatcaaatgaaatgtgaataacccgtcctcccctcttt

SEQ ID NO: 45612 - DNA, 470 bp, Glycine max
  unsure (1)..(470): unsure at all n locations
agcttgtaggattatggngtacccatcacatgtggtactatgtggcggtcgggcgatggtgcacaacaagtttccacatccacaaagcgcgcataaacccaccatcccctgttacccacctccaactgagctcacgtactcccacgtagcccatatcctcgtttctctcaacaccgggtccccatcaatcctcccaagcttccccaacattcaagtaattcaacaatcaaacaatacaaactatcacagccaagaaaaacagggcaaaggcagaaaactctgcccaaaacaccaaccaaaatcacagcttttctcacttanagaccccagtaacaattcctttgttccaattcgttaaccggtggatcggctccaaaattttactggaagtctctagtgcataagcctacantttgaccgttgngatctactnagtaaacttcagaactcactctgcactgctctttcac

SEQ ID NO: 45613 - DNA, 435 bp, Glycine max
  unsure (1)..(435): unsure at all n locations
agttctaagaaagcacagaatcctagactgacccagtttgtcttttcaatccacttagcccattcactagcctttcacttgactatgttcgaatagcacacacttatttgaatttctctgtttcttcttcttcttttctgtaacacataacattatatttatttgctatgtgtactgtagtttcttacctttaaatgtatccatccaacaaactcccccaaatttggggcgaaattatcttaaaccaatgtgctctcctaaaacctaagcaaggtaaatggagataatattnttaaagcttacacgtcaagttgacaattacaattcagctcaaagatggtgcaaatgatatcatcattaataaacatgtaagcttttggtcaagtggcttgtgtatacaacaataatagcgctcatcatatccaganttatgca

SEQ ID NO: 45614 - DNA, 452 bp, Glycine max
  unsure (1)..(452): unsure at all n locations
agcttcagcagtgcactccatcctttctcccatgtttcagtgtgcaatctgctactttcttctaagcacttcaaagnttgcatttgcagtgcacaactgcttcccaacttgtgacgtgggtatttatttgaaaaaaagatatatctattttttgctttagtgatttcaaatcagggaaaattggaagaataaaactggtatatattaaaaattttaattttatatgaaaataactacataaaatatatttgttacataagtaataatgataagctttgatgttgtagttaattttntaaagcatccatgcaaaatttatttcattatcaattacgtgactcctgtccgactatcccccgtntctatagcaaattccaactccttntatgcctccatgtgactctnctgcagcacacanaantcaatnattgtgcanantaacacactggact

SEQ ID NO: 45615 - DNA, 466 bp, Glycine max
  unsure (1)..(466): unsure at all n locations
taagcagctcgatctcttcatcaatcaganataccactttctctcaaatttcaataagaatatgacttgtgatcgatatcttaagttatgcacccgtacgtgcagtttgtacttaaccacaaaacaatctcacgaatcttctcttctcggtcgatcgcatatatgcatgtgtgaattattcagttgcaactgatgaactgttatctctgtatgtnttttagcctaatcatatacctgaaacatgacgttgcatgtgtttccttttattgagaatgctttggcatgattatttatagagcgtttcataagtctatattttaactatttntatgatgtattttctactttataccacgtggtgttttcatttgaaattaacatgagaaccattcactttcttagaaacaatcttagtttgtatgagtacttgtaaatatagatagaatataaagttagtggatttcat

SEQ ID NO: 45616 - DNA, 426 bp, Glycine max
  unsure (1)..(426): unsure at all n locations
agcttgactcatccaaacatggcaagttcaacatgctttcaacaaatttcttcacaaacaactatcatgaagcagaaacctagcaaaactacccatcatatctcccaaaaccccatacccacgaaaatcaagagagaaagaagtccacccaaacctgaaatttcgaggtcccacacgtagagatgcgcttcacgactccgaaaatgccctcctttcgcgaattggagcagaaatggtgaccaaaggttggagctttgttggagcctcaatggagaatgaagaagaaagacaaaagcaacgtgagggagagggagagagagcttctgaaattttggggctgagtgaggagagagagangtgctttatagtttttaanaaaaggctctttcctcttttcttattattntattataagctatgccacat

SEQ ID NO: 45617 - DNA, 501 bp, Glycine max
  unsure (1)..(501): unsure at all n locations
ctcagctgctgtgggctttatggggctgatcttgagtcttttggtgattttccaccatggagatgcagcggaagacaaaggagaagaggtgagaggaggcgccatccactagggaataagccatggaagaaggagcttcaccaccaagatgagccttggataagaagcttggagaggatgcttcaatggagaaaaagaaagaaggagagaaagagagagggggggagcacgaaactaaagaaagaaaaagggagagaagttgaactttgagttgtgtctcacaagactgtcattcctcaaagttacaacaagtgttgcacatgtttctatttatggactaggtagcttcctttagaagctntcttgagaaaacttccttaagaanacttccttgagaagctagagcttagctacacacacccctctcataactaagctcaacttcgtgagaagcttccttaagaagaatcctaaagaagctagagcttagctacacacaca

SEQ ID NO: 45618 - DNA, 462 bp, Glycine max
  unsure (1)..(462): unsure at all n locations
agcttaaccacttaatagaagaaaacacacttatcaacctataaggcagaagcatatccttgacaaatgcttaaccatccattgcagaagcttgacgcaaggcttaaccaccatggatagcagaaaaaatgtttaaccaccatattatgcaaaagcaacaaagcttaaccatcaagagtagaatttgaacatgatgcttaaccactcaagatagaagcaatacaatgacaagtgattaaccatcatataggcataatcaataaagcttataaatcaagagtagaagctaaacatggtgcttaaccactcaaggcacaagcgaaacacaatatttgaatgcttaaccaccatanaggcaagagcaacacaccaatgcttaaccgttcatgacaaaagcttgacccaatgcttaaccaccatggatagaagaaaacatgataaggaatgagtcccttgatagtg

SEQ ID NO: 45619 - DNA, 434 bp, Glycine max
  unsure (1)..(434): unsure at all n locations
ctttaaagaaaaaggagaccatatttttcttcttcttccaagttttaccaagtgttattgggcccttcttccgtcaagcttaagtaagtaacctccattttaaactctaagcttgattttcacttcattttcttgctctattctcacttgtagtttcaaaaccttattttgcactcttgaaggttggaaaattgaatctaaactccttcanttcttcattctaaatttgtggagcctataggaggtaagggggtctctccaacttttgaaccatatgcttgttgatgaatttccttgaacatgttgttgttttgaaatttttgagctntatgccatgtcctanatctgtgtgatgagctatttttcttgaaattttatgccaaanaatgatttctttgcatgttaaaacatagaagtagcctcanatatcactt

SEQ ID NO: 45620 - DNA, 263 bp, Glycine max
ctctgacacacaccaagtgagtgaagccaaagaaatcagtcttactttgattcattctagactgcgagcaaatgaggagccaagagcactactggaagcgatttctttttctcatcgcctcgataatgcgtatcgaaaaattatgttcgtctacagatatactatactatattattaagccaacttataatggtcaacgcttatcattttgaaatttataccatcaactttctctaatctgatattaatggagaccagaaaca

SEQ ID NO: 45621 - DNA, 505 bp, Glycine max
  unsure (1)..(505): unsure at all n locations
tataaaactcagctttgaatcttgtctttattggactggcttatgtgtattttttctggtactatagctaccactaataaaaaaagtactggtactttatacctcatatgcttatatttgaagtcatatatatcaacaaacaattttctttttcttattagtttaccgcgagtgcattcaacattaatatttctttaatataattgttcatatctaacaattagtcgaattctaattctaattctaaatcacttaataatcagaactcacaagtcactaagactgtgctaactattatttgcatacacaaacaaatcctacagctctaacaaacttattagtgtcttttccctggcaacaatgacaagtaactgagttatgaatgttgntaagccgagtcaattcaatctatatcacacagcttatacagacaatatcttttaagtaatctggattgatttaaaaatcattctatatacttttagaaataacatatcactcatac

SEQ ID NO: 45622 - DNA, 342 bp, Glycine max
  unsure (1)..(342): unsure at all n locations
agcttactttaagttacactaaacctaggaggtttgtctaaattaagcctagcccaacaaaagggatatgaggacgaagctcgtaccgattcagtctgactaaggatcgaggttcagtaacttaggctacaacatagatcaccaaagcctgattgattagagaaatatctttatatacatcatctgcgttattagaaagaccctacttttctacctagtgctgacanatttattaactggcattcctactgtgtttagcctatacttagttaaatcctattataaaacatcaattatcaatgcgtctttcaacattgccttattcctaaactcaaccctctc

SEQ ID NO: 45623 - DNA, 521 bp, Glycine max
accagtgtctctgtacgtgcattccggacacttgaaactcagctgggggaaatctggggccttgctcagacttgctatggatcttatacacgctctcactgcaagagactgatggctatgatcatgtgcgagacagcatacaccactctggactatattgcggcagattgaactctatgagcaacctgaagcttatgcttgaaacacttataggagaccccctcggtgacacagacaacagcagcggaatagatatggggttagcagcaacctatacaatgaaggttggagggatcttgcacatcggagatggtcaagtactacgaactatcacaggttgccctacttttggaatgttgctgtcctcagaaaccatatttccttctatcatcagtggagcatctgctgagactaatccatcaatattatgttgtgataagacacgcctccttctaaagcggtagttgtaaccatttttgcagctgggagaggcagtgcatagtcctcaataccagctcaag

SEQ ID NO: 45624 - DNA, 442 bp, Glycine max
  unsure (1)..(442): unsure at all n locations
agctntacagcagaatttagtaatggcccactatcttagatttaaaataacttaatgccattaacctagggaattaaaaaaaacttaatggctgagtgtaactgaaattgtggcaaccaaaagtcacccccaacagccaacaagtcagccaccatttggtctccccactggcgcctaggttgccaattgggcccttattacaacttgaactaaacctaactaaagcccttttaattgattaacccaaaacatatttttggtcagccaactttacaaggattgggccattatttagacaaactaaacactctaaaaattgagacaaagtggtgtcatttagtcctcctccatttgngccatgatacaactcacaaccttggactnttctccttgaaacttgggcttgtattcaaatagtatggacaacacttgttgaagatct

SEQ ID NO: 45625 - DNA, 444 bp, Glycine max
  unsure (1)..(444): unsure at all n locations
tatcttacctatctatctcccagatgtcnttgcaaagattcattagataaaaaacatgaagttctaattcaagatgttttctttgttgcatgggcataatgcaatcactctatgtctagcaatgattttattaagatgtccctacctttgagttctactaaaaattatcctctctcgagcgactaatccctaaaactgatgcatataaaaccttcaatgtatttctactaaggattaccctctntcaagcgccaaactcctaaagatgatgcaaggatgaagcatataatacatttgttggcattttaggcctgccaagccctaactaaaggggtttagcctttcattgtcatgagagactnttacactntatggggttgatatgaatggaagaagatggatggatagaggaagaaaagaggataatggacatatatagaaaga

SEQ ID NO: 45626 - DNA, 258 bp, Glycine max
gcttgctaacatttgtgttattacgaactttccttatctttatatggaaactcgtcatgaacatcttgagaagttggtatctgatccactggaccagacccatcaatctgatgaagcaactatttctcaacttcagggtgtgcagcacccacatagacaacagaacacaaagtaaaggacgaggttgctgagacatcaccgaagcgctcgcaagtaacaccacttatggactcatgtgcgaacacattctctgacaca

SEQ ID NO: 45627 - DNA, 346 bp, Glycine max
  unsure (1)..(346): unsure at all n locations
ctttattgaacgcataanatataatattgattatgtatgggattaatcttctttgtcatctgagaagatcaaacgtcgatagttgatcagaaatatatcataaaagataaaagaactaagtgtatatgtaaatataatatatagaagttcacacatatataaactgaagcaaaaatatgttaatgcatcatataaaatataggcaagtgtacatacgaatagatcttttgtcttgtgtagataggcacaatagtattaatgaatcgataattgcaaaatcaggttatgaaagatctgacaaaaaacagagttttaaatatatatgcgaacataagatatagaaact

SEQ ID NO: 45628 - DNA, 505 bp, Glycine max
  unsure (1)..(505): unsure at all n locations
ctttaatgcggtttcagttcanatgaactacaaagattagccattatttaggcatgtaacatgatataatattcctaggtggttttccttttgactagtgtgactaggggcatcaagaagattgttttaactatattatgggcttaagaggtttatttatctaacttatcttcaccttcaacacaacacaaacatattagcaacatcaattnttattcctgagtgctgttaattntaaggtgtatactgatgcgagacctgagaccagaaaggcataatgtagatgggagtttgatgtcatacccttacaatgaaattgctgataaataaataagttggcagatgtttgtcaaaacagccacaaaaggtggcacatgccaccttgctactgacaaatattcaaatatatatgtaacatggtgaggaagatgctggatggtgaatctctctccattgtagtggaggtgtcgcatcactattcaaccattcattcattcattcacca

SEQ ID NO: 45629 - DNA, 476 bp, Glycine max
  unsure (1)..(476): unsure at all n locations
agcttagagcatgccttgctaaacaacatgtagttactgattcatatgatagagaagagtcagaataacattaagaaatcagccatcatagcagagaatacataaaaagttatgtgtgcttgctttccaaaattttctatttgtatgaaatctcattcatatgaacagagagacagatcatagaggaaaaagaataaagcacagataggggactgaaaatcagtaaagatgttgacataacaaaaagttttaaaagtctccagttactgatatctctcatattacctaagttcatgatcactgttgcatgatgtaaagaccacataacctgagacataagctcttactgctacctatgacatttagactaaccctcagagatgtctcttcatatattatagcatcttattgcaatcataatattactcatttggatgtgctttatngatgtttcttatctgaacatatataactat

SEQ ID NO: 45630 - DNA, 485 bp, Glycine max
  unsure (1)..(485): unsure at all n locations
tgtccgngatttgtacattataaattccaaggtcattgtgcacactattatagagtctatagaccattactttaatcagcaaattatgctgataagaagaaaaaaatcacaatacactgatgaaatttgagatttatgaagtatctgtctgtattcgcgcctaagaggtaccgttggagttgacacttgacagcatcagaatctggcactttctttgtctatcatccatcaattatgctgcacgtagtattggttgttaaatgaggtacagttttgtttttttttaattgatgattgatatatttcacattgtcactctcaccggcacatatatgtaatatgtccatcctatcattgtttttttcacatcatcacattgtttttataggagacaattntgntcaatctgacatgaatgacaaagatctatgaatacttaatgtaattggccaaccacatattcagagattcatactcgagatcac

SEQ ID NO: 45631 - DNA, 480 bp, Glycine max
  unsure (1)..(480): unsure at all n locations
agcttcatgacacttaatcttagccttaactcatttttaactattaattctaactctgactaagtcttttaattaattaaattctttttaataagttttcataatatttaccaatatgtcattaatgagttaacaaattcaaccccttcccattgaccctagtattctatagttgaccttgttgactntctctaatttctactaaaaataagttattttcctcatttttctcatctttcccctaatcctaatctaatataactctaataatttaattacttccatgccgagttattattactattatttctaataataatatctctaaatttgtataattgaatttttaggatgttacatctcatgtgtatctctaggtcttaagtcactcattcccagatttgtgattcaactntaaatctatgtgcttcgtatgcaacgacatagaggcaaaacatcacatacttaagtatgcaatga

SEQ ID NO: 45632 - DNA, 435 bp, Glycine max
  unsure (1)..(435): unsure at all n locations
gtatggctgcattctactaatatatggaattgcccattgctttgcctgagaataacaattgcttgaccacaacagcgctgggggcagcaacggacaatggtctttcaaataaacctgttgtacatgaacaaacattatatcatgcgctgaccgtgccaaacgaaccagcgaagtcattgcataattgttacactaactatattcaatgtacctgaacaaaatgatttccaaacacgtgaccgacacatatgatgcggtggccagaagagtcaggtggtggttgacttctaagagggaaaaatgtcatgctntgttgttgggacaacgatacaaggattacgttataccgtgaagcaatcacataattgttacactaactatattcaatgtacctgaacaaaatgatttccaaacacgtgaccgacacatatgatg

SEQ ID NO: 45633 - DNA, 432 bp, Glycine max
  unsure (1)..(432): unsure at all n locations
agcttcttagtttcagatgatgcagatgggtttgtatctacctcatgcactcctctaatgactatggcatcatttttggcgctaaactgctgggagttggaggccatcttctcaattaaatttatggcttcagcaggagtcatgtctccaagggctccaccactggcagcatctatcatacttctctccatattactgagtccttcataaaaatattggagaagaagctgttctgaaatctgatggtggnggcaactgacacatagtttcttaaatctctcccagtactcatacaggctctctccactgagttgtctaatacctgagatatccttcctgatggctgtggtcctggaagcagggaaaattttttctaagaatactctcttaaggtcatcccagctcgtgatggaccttggagcaagggaatac

SEQ ID NO: 45634 - DNA, 470 bp, Glycine max
  unsure (1)..(470): unsure at all n locations
tcatgctgaagcatgtatggcanaacttcattagtgttgttcaacacatacaagtgagcttgtaacanatcttctacacttggagtgataacatgcagtcctcttgaacccttaccacccactctatcgtcatggaaagactcaggaaggccagcaggttttgccttttcaatgtagtataaacaaaattcaatggcttcttttgcaatgtacctttcaacaatagatgcttccggacgatgtagattcttcgtatacccttttaagatcttcatgtatcgctcaaccgggtacatccagcgcagataaacaagaccacaacatttgatttctctaactaggtgaacaattaagtgaaccatgatgtcaaagaaagcaggaggaaaatacatccncaactgacacagtataattgcagtctcattntccaggtcatcaaacttgacaggatcaaggactntgctacatat

SEQ ID NO: 45635 - DNA, 372 bp, Glycine max
agcttcaacctagaggagacgaaccattccaagtgttggagaagatcaacgacaatgcctacaagattgacttgcctagtgagtataatgtaagtgccactttcaatgtgtctgatctatctctttttgatgcagatggaggagccttggatttgaggacaaatccttttcaaggagggagtgatgaagacataaccaagggcaaggaccatgaagcacttgaaggtcccatgaccagaggcagacttaaacaagcccaacacatcatagagacaaggctggtcatttgtatagctgtcattgatgatgattgaaggcccaagtggagaaagatgaaggcccagaggcagaggcactaccaagactactaat

SEQ ID NO: 45636 - DNA, 399 bp, Glycine max
  unsure (1)..(399): unsure at all n locations
ggcctcanagaggtccaagaaggataaggcggccgattggactatttccgctcctgagtatgacagtcaccgctttaggagcgctgtacaccagtagcgcttcgaggccatcaagggatggtcgtttcgacgggagcgacgcgtccaactcatggacgacgagtatactgatttccaggaggagatagggcaccggcggtggacatcactggttacccccatggccaagttcgatccagaaatagtccttgagttttatgccaatgcttggccaacagaggagggcgtgcgtgacatgaggtcctgtgtaaggggtcagtggatcccgtttgatgccgacgctatcggccagctcctangatatccgttggtggtggaagaaggccaagagtgtgagta

SEQ ID NO: 45637 - DNA, 390 bp, Glycine max
  unsure (1)..(390): unsure at all n locations
agctntgagcanattcaaacgacaatatctnctgtttcggatgtgcgagtgggtcccgtaatatatctagacgctcgagattgagaactgaagctctgagaaaaatcatacgacaataaatctttactcggatgtgcgattgagttccgtaatatatcgagacgctcgcaatggaaaacagaatctctgatgagattcaaacgagaataacatttatctcggatgttcgattgtgacccgtaatatatcgagaggctcgaaattgaaaactgaagctctgagaccatgaaacgacactagttcttaactgggatgtccgaatgagacccgtagtatatcgagacgctcgtaattgaaaacagaagctctgagctatctcaagcgacaata

SEQ ID NO: 45638 - DNA, 413 bp, Glycine max
tgtgtttcaattacgagcgtctcgatatattacgagactcattcggacatccgagtaaaaagttattgtgttttgaaattgcttataccttctattttcaattacgagcgccttgcaatattacgggattcaatcacacatccgagttaaaagttattgttgtctgaatttacttagagcttccgttataaacttcgagtgtctcgatatatttcagggctcaatatgacattcgagatacaacttattgacgtttgattcttcttagagcttccggtttcaattacaagcgtgtcgatatcctacgagactcactcgaacatccgagtcacaaggtattggtgtctgacattgtttatagcttacgttctcaaattcgagcgtctcgatatattacaaggctcaatcggaca

SEQ ID NO: 45639 - DNA, 450 bp, Glycine max
  unsure (1)..(450): unsure at all n locations
agcttactaccttcaaggtagcatgaaagtcatttagaacacatcttccttgaagtttcaccttttagctagaaatttcataaacttcatgtaatctggaaagacattccaaatcatttcaagaaaggtgttagttattaaagaaagaatggcccttaaggtttcctcatgctctccttgccttcctttcttgtcagtcagttgatgaggaaggttattgctttggagaatattttcttgttggttttctacagttgagtaattctcccattgttgttgtgcttgttcctcatctttctcctcatctttttctcttgactcatgctcttttacagggattntcttttgagcttcaacctccacanaggatttttcttgtctaaccataaatngagtcactgcttctgccagcccaccaactngaatttctacacttttggagtgctcgtg

SEQ ID NO: 45640 - DNA, 460 bp, Glycine max
  unsure (1)..(460): unsure at all n locations
ntccgcanagcctatggtaagaattgggacctagctagggtataagtctccatggaaccgatcgcatccctttcccagtattatgaccagcccctaaggtgcttcacatttgaggacttccagctagtgccgacttgaaagagtttgaagaaatcctgngatgcccactgggaggaaggaagccatatcttttctctgggttctatccctccacgacaagagttgccaaggtagtgaaaacctcagcacaagagttggaccgtgtaaagcaaaacagaaatggagtagtcggagtaccaaggaagntgttggaggaaaagggcaaaggccttggcaaaatcaaggcgaatgggcttcttttattgacatcttggcgctttngatctttggagtagtcctctttccgaatatggaagggttggtggacctagcagtgatcgacgcttttctcgcctatcat

SEQ ID NO: 45641 - DNA, 473 bp, Glycine max
  unsure (1)..(473): unsure at all n locations
agcttaggaagtatcaattgaggttaaaccccgctaagtgcaccttcggngtcaaatcagggaaattgctaggtttcatcgtgagccagaaagggatagaggtgaaccccgtatcgagaggcaggtctgaggtttcctgggacgtttgaattatattgccagattcatatcacagctcaccgctatttgtgagccgttgttcaaactcttacataaaaaccaaaccgtccgctgaaacgatgattgtcaagaggcattcggaaggatcaaaaagtgtctcataaaccctctcgtgcttatgccgccggtacccggaaggcctctcatcttgtatatgaacgatttggacgagtcgatgggatgtatgctggagcaacatgacgagtccgggaggagagagcgcgctgtctactacttgagtaagaagttcacggcctgtgaaatgaattactcccagctcgaaagaaacgtgt

SEQ ID NO: 45642 - DNA, 425 bp, Glycine max
agatacaagtatcattcaaggtaagctaagtggtcaaaagagcttgcgtctatacaattcatggccttcatcatgttctgattaattcaaagatttatgcaaagatcattattcacagttagtcatttactcacagagtaaggtcacactctcatcggtttttggttcatgcttttctttcacaaccagtctatgtagtgactaaccattatattataagttcacactcttgttctttctttgttcaacatgcacatttgctcaaattcatgaaaggaaacacacatctcatcttaagcatgcattcaatttaaaacaatgcataccaccattttcacaaaacaaataaactacttcactgccataccatcaaaagttaagttaaactgttcacgatgcttcgagatgagaaactatactactca

SEQ ID NO: 45643 - DNA, 447 bp, Glycine max
  unsure (1)..(447): unsure at all n locations
agcttcggaagaaagtgatgaggtacatgccctaaaggcagagcttgaaagagcccgggtagtcaaagagaagttcaagtccatggccatcaaagtctgaagagagtatgatgaactaaggggcgtcaatatggccaccgatgaagccttggaatgagaaaccaagaaggcccgaaaggaagaacacgaccaaaacaagttttgaggggctttatagggcagcaatagtgagctcaaactccgaagaggtgaaaggaatcatcacgggtcaaaggcatgatctggaaggacgagctaaaggcttgccttangtcgaaaagaaatttgtcccaacagttaaagtaagactgaagggaatatgtgggccatcatcgatgagtgcaaagagaagctaaatctagcggcgactcacgagcaaaggctagaagatgagtacgccaagatatc

SEQ ID NO: 45644 - DNA, 396 bp, Glycine max
  unsure (1)..(396): unsure at all n locations
tcagatagctgggtgtatcaatatcaatgaggttgttatcaattaacacaaagagttgtttcctttgaagaaattnttctaacttggatacttttttcacacacattatgatgatgtacaatgcaaaaaagatataaaatgtactaaggtgcaacaaccaagataacaaccaatgcacatgccactgaagggagttgggcatgtaaaagccaaaacttcttcaagtttttccctgagcttcaagatttggccttaggatgttctccatgttgctcatgtttctcccctatctctaacaccattatgtntgtattggatactcaacaagcattggccctactcctatcaattatgcacaacccaccactgtcactcgtgatgaggttccagacatga

SEQ ID NO: 45645 - DNA, 447 bp, Glycine max
  unsure (1)..(447): unsure at all n locations
agcttgaagagacaaatgtttgaagatatatgttattgttctcagntagttatttggataaataaacagaccaacaatggggacagatcacagaaactccaacactggtttcttcttcttcttctgtttatgaaaaacgtgcaaaatctttatttgtagagagctatgctattgcttttttatatatattaaacacactcccagggttatgttaattngaaagaagctacttggcatcaagaatgggttcaggtgattggtttaagacaataattagctcaagaaaatcaaaagaaggcacatcaaagagagtaaaggtacaatacactgtctgtcaatgttagtttctttgactggaatttgcatagattaagttgaatgagttgaaacaattgattgtaaacctctttattcccattattctacagaaaagaacaaataaatctt

SEQ ID NO: 45646 - DNA, 651 bp, Glycine max
  unsure (1)..(651): unsure at all n locations
ccgatgctctggtatttcatatntacttanccangtcnannnnccaanncnnnnnnaagggagagtgtgcctctgagaccntacgcataacgtgacactatataagactcaagcatacgatggtgcctatattgcgcgctgctctattgatatgaggcttatatagctagcgaatctgctcccattaagggacttataagagactcgcgaaccctgtatgctcatcttagaacgacaataacaatggtgacgatatcaaaagataggcgaatggggtctatgcgaaccacctcatgtatgacatggagcgctatactatggtgcgcacaggtgatctaattcatcaacagacatcaagtttgtcagcgtggagtggctaacaatacaaacgagacgatggactctgatcataactcacccttatgcggcataatctaacatgtctaagaatgatgcagaatgaagaatncaaaagtcaacgctcaatcatagataagggcacatagttcatcgcgaacatgacaaagttaatcggttatcaggccatgatctcattccataagcgtacctgttctatccttgaacgcaattttatagccataatactccacatgaactaggatgatggatgagccctgcctaccaccaacg

SEQ ID NO: 45647 - DNA, 488 bp, Glycine max
  unsure (1)..(488): unsure at all n locations
gcgatcttagagcgacgcggctgcaagctgannagttgaacttaactcttcttcgatctaccactaccatggataggttgggaaaacgcgtccgtcatgggggaatcaagtttaggtcgaaggtacgtagatgtctgggagtcatgtggtggcaaaatttgctccacccttaccccatcttgttgtcagctgtcaagcctacttaaaaagcttattggtgttttgtttcctattatagaacaagccacacgcaaaacaaatataacaaatataatatatattccgcttaattaccgtgagttcctgaatttaggatatgtttttttagtttctgaaattaaaaaaatgtttttttagtctttanattttaaaaattgctttnttttttaattctatacataataaattgatatttcatganatattttttttaaatgcaatttctcanagcatttcaaaanaatgtaatntattacgtcagaaaacta

SEQ ID NO: 45648 - DNA, 506 bp, Glycine max
  unsure (1)..(506): unsure at all n locations
tcggattgtcaattgcaccatgttccaagaagagtaaagggtgtccaccttgttgagtgattntattagtattttgttagttgaaataaaggcccaaaattatgttaaagtgattgtcaattctctttggattttcaccacctatggcttgttttaatttaaagaaattaagatttaataaggtggaaactctatgcttgtggcttgttgagactntggcaagtgcaccaaatctctcttaagtagtaaaccttggaagtccgagtatcgtttccacagggattttattgcactttatcgaatacattctcaattgtaagtgatagtaaaataataaaagcaggaataagtgcacgaatatgttgctattactaaatcaaatggtttaaaaggaaagacaattaataaaaattccaagaccggacaaacccaattggcctacgatgcatgtaaatatgatattcattaccaatgcactggtattagttctacccacatctattaat

SEQ ID NO: 45649 - DNA, 451 bp, Glycine max
  unsure (1)..(451): unsure at all n locations
agcttgccacccagctcgcccaggcgagcagggttgcttcctccagaagcaacagccttctggaggaatcttctggagggcccaagtgggcctggttgctatttacacccccatttttactaaatacaccccactgccttttttttggtgattcttttttcgtaaagttacggaaacttacgaatttcgtaacgatacttgttttctttccgtaatgttacggaaccttgcggattacataatcatcccctttttgacttacggaatgttacggaacctcactaattgtgcaacgatgctttcatttgatttccggtgtgtcacgtaaccttacggattgtgcatcaatattttcttttgttttccggcatgtccaggaatntcacaaattgcctaatgatgggtgccaagcacctcacaaggaccaaacaaaagtcgcatgtcatcaagc

SEQ ID NO: 45650 - DNA, 415 bp, Glycine max
  unsure (1)..(415): unsure at all n locations
tgatggagggagttgagatgatagaccttggtttaatgaccttctttcttggcatggagatcaaacaaggagaacatgaagtcttcatttgtcaaaagaagtatgccaacgagattttaaagaagtttaaacttgaagaatgcaaagaaatgagcactccaatgaatcaaaaggaaaaactntgcaaggaagatggaacgaagaagatagatcaagcatattttagaagcatgactgggtatttaatgtatcttacaacaactcgacctgatattttaaatgttgtaagcattttatctcaatttatgaattgtgcaagtgaaatgcatctcaaggctgcaaaaagggtgataagatatgtcaaaggcacttagcaatttggcatcaagttcaagagaactgaagagttcaagct

SEQ ID NO: 45651 - DNA, 409 bp, Glycine max
  unsure (1)..(409): unsure at all n locations
gatatttaagatggatgatcatgacagtctctagagtcttagaaagggtatattaaataggaagggaattccaattgaagtagcaaaaagtttggccaagaaatttaagttaaaaagtctttttcaacaaatttactctctggtaatcgattaccagtggccaaaactgatttacaacaactattaaaatttgaattcaaaatttgcactgtgtaatcgattacacatatatggtaatcgattaccagcagtttctgaacgttttaattcaaattntaaagcttgtaatcgattacacaaatactgtaatcgattaccagagcagattttcagaaaatattctcaatagtcacatctttntatttggttcttgaatggctatcacaggcctatatatatgtgacttgag

SEQ ID NO: 45652 - DNA, 416 bp, Glycine max
  unsure (1)..(416): unsure at all n locations
gcagaatttagtaatgacccactatcctagaattaaaataacttaatgccattaacctagggaattaaaacaaactaaatggctgagtgtaactgaaattgttggcaaccaaaagtcacccccaacagccaacaagtcagccaccatttggtctcccaaaaggctgatgcctaggttgccaattgggcccttattacaacttgaactaaagcccttttagttgattaacccanaacatatttttggtcagccaactttacaaggattgggccattatttagacaaactaaacactctaaaattgaaataaagtggtgtcatttagtcctccatttgggccatgatacaactcacaaccttggactnttctccttgaaacttgngcttgtattcaaatagtatggacagcactttgt

SEQ ID NO: 45653 - DNA, 502 bp, Glycine max
  unsure (1)..(502): unsure at all n locations
ttgctcanagcttctgttctgaatttcgagcatctccatatactacgggaaacaatcggacatccgagtaaaaaggttttgttgtttgaattttctaagaggttatgatttcaattttgagcgtctcgatatattacgagactcaatcaggcatccgagtaaaaagttattgtcgttagatttttcttagagcttctatttccgattatgagcgtctcgatatattacgagattcattcggacatccgagtaaaaagttattgtcgtttgattntgctcaaagcttctgttatgaatttcgagtgtctcgatatactacgggacacaatcggacatccgagtaaaaagttattgacattngaagttgctcantagcattcgtgtcaattacgagcgtctagatatattanaggattcattcggacatccgagtaaaaagttattatctgtttatttngctcagagcttctggtttcaatttcgagcatctcgatatattaca

SEQ ID NO: 45654 - DNA, 482 bp, Glycine max
  unsure (1)..(482): unsure at all n locations
agctttanaagaatggctaagaatttgttaaaacataagcacttagactatgaaggaaagctggagttgctgcacatgatgtccaacgttatgtcaaagaataagatcgggctgcacaatgcacaaggcaagataaagtgtcaaatgaagaattgaagctgcaggattcacgatgccggatacaatgtccaggacatcctgcctgaaaatactggaattgctaaaagcattgaagctgcaggatccacgatgtcggatacaatgtccaggacatcctgcccgaaaatactggagttgctaaaagcattgaagttgcaggatccacgatgtcggatacgatgtccaggacatcttgcccgaaaatactggacatataaatctgttatatctttaacagattattgtgcagntagcaagagattagatgatctatctttaggaacgaattanaagataattaaagttcgaattacaaactagaa

SEQ ID NO: 45655 - DNA, 467 bp, Glycine max
  unsure (1)..(467): unsure at all n locations
cctcctcgctctcctcaggagtttcagcctcttcctcatttggaatctttggcttcaggagccaagttatctcttgcgttctagccttcaggcacttgtgataggcgctgatgatcccattgctgcttcccctaagtcccttatcctttctttgcaccgcattccatgcttttcaaactctttggagctttttcgcattggggtcactgaagcctcgtgcgatgaaaggtgcgatactctcttccggtagcgctcctctcatggngtagccaagttttcttatggcaagtacatgattataattgatacaacccctcgttcccatcaaggggacgtttgtaaacccttgacatatagacaaaactctggcccttcctttcttccatcggnggaaccaattaacggatgcccttaccataccagccaagaaagtgtcccaatttgctttccccttctcgacacacatg

SEQ ID NO: 45656 - DNA, 444 bp, Glycine max
  unsure (1)..(444): unsure at all n locations
agcttcgtgagtgcaggtttaaggcgctaaggtttagtcgccatgatatgcaatgaagactccctgaggaggtcggatttggtacaaccatgccctcccggcttccagctaggaaattggcaagtggaggaatgacctgaagtttatgtggcaagtgtcataccctaatttcgtccggagacctttgcttgatgacatgcgacttttgtttggtccttggaaggtgcttggcacccatcattaggcaatttgtgaaattccgggacgtgccggaaaacaaaagagaatattgatgcacaattcgtaaggttccgtgacacaccggaaatcaaatggaagcatcgttgcacaattagtgaggttccgtaacattctgtangtcaaaaaggggatgattatgtaatccacaaggcttcgtaacattacggaaagaaaacaactatc

SEQ ID NO: 45657 - DNA, 437 bp, Glycine max
ttgcacttagcacaactccctcagcactaagtctcgctcagtgcaactccctcagcactaagtctcgctcagtgcaactccctctttggttggaattgcgcttagcgcacccttcgctcttatcaagacatcaaaagttgttatttgcaaaatcccaacggtcagactatggcggattgtcttaagaaccttgactaaaacttttaagacaatccaacggttaacaaatccgggatcattattttactgaaataggtttagggtaaatttgaaatttcataatttcaacttagttcaacaagactccacataactcaacatccacatcaagaaattcacacatgactaattcaagtcataccttaactcattcatgtcaaccatatattcaattaacttgatgaatacaattaaacatggatttataattagtaata

SEQ ID NO: 45658 - DNA, 443 bp, Glycine max
  unsure (1)..(443): unsure at all n locations
agctttatgagcaatgntattcttctctgtttctttcatctatccttcactcttgttatttttttgttcttgctttttcttgcacaaatttcgtgactcttctactgatgatgatgttggaaggctaaacactcaatcaatcaaaggatccactccaagcaaggttaaacttgagatctagttagcatttctaatctgtgtgaatgttcatatttttcttcaatcctatttccgaatctcatgattatgaatatgcttaggattgaaaatgaattatgttatggattactttcttaatttcgaacctaatcgcatatcttttggatgatattcgaacctaattcgcgatctcaaagaatctagagattcatatgattgaactaactctaatgacagggagtgaaccttcacaacttaatcattctctgtagaactgtaataat

SEQ ID NO: 45659 - DNA, 514 bp, Glycine max
  unsure (1)..(514): unsure at all n locations
tctcagatccggtcatggaaagactnggcaattgctttcattatgcagtaccaatacaacacggatatggctcctgatcggaaccaacttctgagcatgaccaagcgggaacatgagtccattaaagaatatgctcaaaggtggagagacctagcagcccaagtcgttccgcctatgactgaaagggaaatgatcacgattatggtagtacgttgcccacgttctactatgagaagctaataggatatatgccagctaactttgcagacctcatcttcgccggagaaagaatcgagtccggacagagaaaaggcaagtttgaatatgcctccaacgttgcccccaacaacaatagaagagccccagtggtgggcacacagaataaggaaggagatacccacgcggtcaccaccgccccaacatggatgaaaacgccccanaatgcccaatactcataccaacacaaccacccgaactgttcaatccgagtcggaagttccctcccaactcaagt

SEQ ID NO: 45660 - DNA, 388 bp, Glycine max
  unsure (1)..(388): unsure at all n locations
gcaagctntaaataaagtgatcgggtatcaacactatcatctaaaactccctacaccttccttattgagagagagagagagagagagagagttttaagtgagtgtttctctaaaattttctcttctcaattaggaacatgttggggtttggtgtataggaccaacaaagcttatttccaatggatagcaaggtttttttcctggttgatgtgctttaaattatatttatgcaatcatagtagtacaattgtggattctgtaagtcaatttagattattggtaattacctaacgttttgttttaattcatacataattaactctgtcttaacaacaacaggcatctgactgagacaagtatgcgagcatggaattccgatgtgtatgga

SEQ ID NO: 45661 - DNA, 410 bp, Glycine max
  unsure (1)..(410): unsure at all n locations
tcggaagaaagtgatgaggtacaagccctanaggcagagcttgaaagagcccgggtagtcgaagagaagttcaagtccatagccatcaaagtctgaaaagagtatgatgaactaagggacgtcaatatggccacagctgaagccttggaacaagaaaccaagaaagcccgataggaagaacacgaccaaagcaaagttttgaggggctttatagggcagcaatagtgagctcaagctccgaagaggtgaaaggaatcatcacgggtcaaaggcatgatcttgaaggacgagctaaaggcttgccttaggtcgaaaagaaatttgtcccgacagttaagcgagactgaagggaatatgtgggccatcatcgatgagtgcaaagagaagctaaatctagcagtgactcacga

SEQ ID NO: 45662 - DNA, 437 bp, Glycine max
tgcttggttggcgaaacagacagccattgcaatttaatatggcgattgggatgagtcatatgcgaaactttcgtcgtggctaacacacatgcaaaatcattctcctggatcatattttcaagtactacatgacgattttatcgttgggaatacggttagtcgcgaacaccgtcagtttcatagagttttttggactcttgggcaatgtaaagaagcttccaagtactggaagccaatcatacaagttgacggcacacatttgtacggcaaataccgtgggaccctcttaatggccacatcacaagatggaaatggtggtgtccttcctctagcattcgcggtggttgaaggtgagacgttgacagcgtggtcatgtgttttggacacttgcgtgaccacaaacccttgcacaggtacaaccctggatggaggaatca

SEQ ID NO: 45663 - DNA, 415 bp, Glycine max
  unsure (1)..(415): unsure at all n locations
ttacggacactataaaactaagctggtatgcatgattggatgtttatgatcctcanagcttggatgttgngaaacataaacttcctcttcaacgtatccatttaggaaagaacttttgacatccatttggtataacttgaaacccataacacaagcataagcaagtagtaatcttacggcctctagccttgctattggtgcataggtttcaccanagtctataccctatcattggttatagcccttggctactagccttgcctcattcctaagtatcanaacatgttcatccaattaattcttgaacacccatttagtgccaatgatgttcatgacnttagaataaggtaccaattcccatacgtcaattcttttaaatggttcaactcctcatgcatggacattattcaaaact

SEQ ID NO: 45664 - DNA, 424 bp, Glycine max
  unsure (1)..(424): unsure at all n locations
agcttatatggaggttggatcttanaacttcaatatggtctttcaatggtacttttcagccatggagttgtagcggaggataaaggagaaaaggtgagaggatgtgtcattcgctagagaataagctatggaaggagatgcttcaccaccaagagattgccttggataagaagcttagagaggaagcttcaatggaggaagaaaatgagggagagagagatagtggcgtggaaattgaaggagaatagggagagaaactntgaagtgtgtctcacaagtttcccattcatcaaagttatgacaagtgttacacatgtttctatttctagcacatgggaagcttccttgagaagctagaggggagctactcacacctctccaatagctaagcttacccccatgccaaaatacattaaaatacaat

SEQ ID NO: 45665 - DNA, 438 bp, Glycine max
  unsure (1)..(438): unsure at all n locations
atcattagtcaaaactaacattcaaggacccatgatnaattgggtaccaaaatcaaaatatgattatatgaatgaaggactccttgaagaaaagttggtacattgatagcggttgctccaaacatatgacgggagatgcatcaaagtttattcatatttctcaaaaaaaatagtggacatgtgacctatggagacaacaacaaaggtaaaattcttggagttggaaaaataggtacaaatccttctacctccatagaaaatgttttacttgttgatggccttaagcatagtttattaaatgttcttcaattatgtgataaaggctttttggtatcttttgattctcataattgcttttgatgagactaactctnttatgccaagaaatggtactactctattaattcattataaatggctgaatgttnttcttctctc

SEQ ID NO: 45666 - DNA, 445 bp, Glycine max
  unsure (1)..(445): unsure at all n locations
agcttgctntctcatcagtatatgccacacctgttgtatttccttgtctatcaagttgttctgatagtaaagcaaccaaggctggttatagacctagtgctaattttaaatctagtgatgaatctctaatagagactagggctgaaggggaatttatgaagagaattgatcatagctgtgctgtgcttgcatcagcggcgcaaattgaaaatatatctggaagtggttcagtagtaagtcaatttgaagctagacaggctgatagtgcacaagatagtacaagagatcaaatgcataatgggttaatgagtatgcctaatggaggtccggaggagacagttggtaagtttctattgatcattcctttgtggttntgtctagcatgatacattaaatntaggttccacatccttgggggtntatgcttgctctagtgctctataac

SEQ ID NO: 45667 - DNA, 409 bp, Glycine max
  unsure (1)..(409): unsure at all n locations
tgagcatgaatcaagattaacttgcatgcactngctttatatgatgcanaatatactctatgttcgatttgatgtttttcttttaaaaacaatcataatctctcgattcaagatttaatgacacttaaaatttttcatttcttctcacaagtatataatcaaattcagatcatctcacactcaaaattgaaattgagtgtagatgaattgatatttggaccgtaatatccaaacataaaaaataaaataaacattagaaattgcggaatgtaaagatttcctggcttaagcagcccaagtgaccaaccatgtgcttagaactctggccaccaatttcttaggcaacttctacataatagacatttaacaactcctttgttcgtggcgccaaactctcaacatatatgct

SEQ ID NO: 45668 - DNA, 435 bp, Glycine max
agcttagccataacttgactaaagaaagttgctactgactgtagtaatacaagatcagaataagattaaaaaaaatagccaaattgtcccaaacaatgctctctcaagtaggatcaatatctgaaaaatgaaatgttaaatttagaaatctaagtaaatattgattcctaattttttaaatgttggaaagacttggaagacaaaaattgcattacaatagaaaatgcaaaacatatagtgggactgagacacattagcagcgtttcctcaactcaaaaattataagaatcagaagtaaagagtatgttaagagtgtggtaacatactctaacaagctttgatcaaatgactaatattaattggcaaaaaagatatttagcagatagccaaaccaacttcactattcctaagtagaaattcccatattctatatta

SEQ ID NO: 45669 - DNA, 469 bp, Glycine max
  unsure (1)..(469): unsure at all n locations
actcaagcttgtatgccctctcccctcggcggggatttcttcttcggcataggcgagatagttgttggcagtgatattattgaccagccctccgaaaccttctaccgagatgtcttgggccacatgggcctcgttcaaaaccttcactagtagagcccgatgaggctcggagctcatgagtaactccaacagcgagaccctggccggggtnttgttgtgctgttcgataaccttgaattcgctctgctgaattatacggaggaactcactggcttcctctagtgacacctcctttttaccatcctttntctccggaagacctttcgcctgaatatctttattcgaagtgaggggtgcttcgtcatcttgttcctccaccactcttgctttccccttngacgtttgcgggtggactggtaggtccgcgggtgcanacacacgaccgctacgggtcacaccactcagtccc

SEQ ID NO: 45670 - DNA, 458 bp, Glycine max
agctggcctagagaaggagtccacggaggaaatgcttaccacctcaaaagactggaaagcggtttctaatgactcctctgcggcttccacataaggcatagaggatgggcagctcaccaagatgtcttcctcgcctgatacgatgaccagatgcccttccactacgaatttcaacttttggtggagtgttgagggaacaactcctactgagtggatccacgggtgccccaacagacagctgtaagggggggttaatatccattatttggaaggtaacttgacaggtgtgagggcctatctgtactgggagatcgatctctcccctaacctctcggcggttgccgtcgaaggcacgaaccaccattgaactcggctttaagtgggaggcattgaatggtaatctctcccaagtgctattaggcatcacgtttacactgggaccattatcgatgagcact

SEQ ID NO: 45671 - DNA, 411 bp, Glycine max
  unsure (1)..(411): unsure at all n locations
agttatatcagttgttaagattatgatcgcttacaaacccactcattattaattcggtcaagctntgatcactgatagatccgtttcttgcaactttntaaatttgatgatagattatagttaaaacaatatgaactaaaaatatgtatataaatataaatgctttagcaatgaacaccattggagttgggaacttaagattgtgttaaagtaaaacttctaactagtagtgtatcattcggcattttaggcattaatagtatataaagtctggtgcacaactcatggcattccataaaattaaatgcaagtctctatagactattgaggtgaaaacccagtaaatcattcagatatcttgagaggggtcctgtggatgtgtcctctgttgagttgagacaataacataat

SEQ ID NO: 45672 - DNA, 436 bp, Glycine max
gcttacccataaattgctagccaataattccttatatattcacctttgcacaaaatgtcaaattatgttaccaaggaattagtataaataaagcaattgtaaggcacaatggagatatgaaaacttaagcttaccttccactcttaccttgtctggaggtgctggcctcgaatccaatttttctcttcgattttctgtatcaaatacacagcatcagtagtatacaataataccctagggtatatatattcaaaactagaagtgtataattgtcgacgatctggcctgtataatcgtcgacgacaaccatgacagtgctggtgtgcttcacgacggcaaccaacttatagagacaagcttaagggcgcaaaatgagtgaggtaatgcgggctagagtagagtgcaagtatgctatggaaaaagatgataatttact

SEQ ID NO: 45673 - DNA, 490 bp, Glycine max
  unsure (1)..(490): unsure at all n locations
ggattggctgagaagattcatcaattattggtattgngccattgtgatgtgagacaaggaaggtggtggtggtggagtaagatcgtcctcaccagatgagccggaggtagccacaggaagatgacggtgggaagcttagaaggttcttgataccataacaaaaaactaaaggaaatgaggcaaatagaattggtataaaatntttcgttcaataatagcaatgattacattattcatagtcggtataatgagaatagaatgacctagaacctatgaggataaaatggaatcaaatcatattctcataaatgtaatatatatgcacataaatataatatatatggaaggaaaaataaggaaaggaaagtaatgctccgctgtcaaataatttaagctaggattatatgtttcctctattatgtagcatntaagctaggattatatgtttccttattaagctangatatatgttnctctatagtctcatttt

SEQ ID NO: 45674 - DNA, 461 bp, Glycine max
  unsure (1)..(461): unsure at all n locations
agctntctagctnttcattggtgtattntgatcttcttttggtgctctaaaatgtgggaatgtgctcaaatatgtggggcaattttggtttgttttcttgcttgattgggttggattgggagtttgtatgggatggccctaggcctataatgcattttgaagcaatgggacatgccacattgtccccgttctcttgctattgatacctaaacgcgcgcccaccaagtgttcggtgaaatgcctcaatggcattagcgtgtgacctttgtaaggaaacaacccatggngcattttggtttgcacatattttccattnttttgggacatgcattcatttccgaaagggctagagtgattgccccacatatatcctatgcctaggaaccaaagttttatgcataagaacacaagaggaggtgcatgttgtgtaaaagtaccctttttggccagcaatcagctat

SEQ ID NO: 45675 - DNA, 442 bp, Glycine max
  unsure (1)..(442): unsure at all n locations
gctganatgtcttgcctaatatgaaattactaacataagcttgcttactaaatagtcaaacaagattcttagctagaaaaaagctaagaactagctaaaaattaaccacttttggtaaaagcaaatttaccatttttgcttactcatacaaaaatctttttaagatttgctaagagtcaataggcattatggcccctgtctttgtacccattctgcaaattagtccctatctttttgaaatgtaaaaaatagtctctatctttgcataagtgttgcaaaatagtcattgccgctaaatatgaaagtaacgtcgttagtgaggtgcatcggtggcaattataatgccacgtagactatccaacgtggcactaaagtgtgtgtgtataaagcttcgttcatggacgcacctcgtgaacaacaggtagctactcactctctcttc

SEQ ID NO: 45676 - DNA, 462 bp, Glycine max
  unsure (1)..(462): unsure at all n locations
agcttcaagctagttntatccacatagtggatatcttcccaaagacaaacttgggagtttactcaataatcatccaaaaacactttttccaataatttagttttctcattgaatttcaatgcatttggttatatgaattaataaaggagaataaatgaaataagaaaaaaattattgtttgatttgtaaatgaaactgaaatgaaataaatgtttctaataagttttaatattgttttaagcaaaagtgtgggcaacaaaaggatatactttntagaataaaaaatacattnttttaatttgtcagtatatctttatgagcatttanattgcaatattttgttctttaaggatatctaagttatttctattaaaaaaggatatctaagntatttaatgaacatacctcttctttttccttattcaactaaataggaagaagacaaaattactcttccttttt

SEQ ID NO: 45677 - DNA, 514 bp, Glycine max
  unsure (1)..(514): unsure at all n locations
tgcacatatgaggaaaactagaatatatgacaaagatgtcttgcatcttttattcatttgatgtaatgtaggccttcaaatatattagatttcaaaaactatttctaattggtttgtgttcttttattaatattntcagggttgaggatgctgttgttcgctacctgacccgaaaaaatgctcgaagtgatgctcctggaaacatctgagagataattgtgaaatagtaattgtttttcactagggtggtggaggtggttagttttctgataccactttaaggtcttgtcccaacattgctaaagtttctattccatccttcantatttatgtttggagtagagtactgacagtacgttgactcgagaattttctgatcgcccctggctcatatttggagtccctcaactgttgtatctgtacctatggtttctcatncactcttctactcacccattctagtttggtaaaatgagccaagaacaacaatatatgtagagcatcaagtcttcac

SEQ ID NO: 45678 - DNA, 461 bp, Glycine max
  unsure (1)..(461): unsure at all n locations
cgcttatcttggtttctatatattctattccatcgacgggacgcatcgccatgtgtcctctccttccacgtggccctttttcctccgcgtttcttatcctctgatctcgaccgttcgatgtaaagtcgtgactttttagtctgcttcttgcccaccccttcgtgtcgccttcctcacacctaaaatgacagcttttagtttcaaattaataagattaaaccatggaagcagactcgggttgaatggcctagtgaaactaaaagacacgtattaactcagtttcccaattctcaaatcccgagttgaagcggtgaaccaacattggagaaagatactcacgtgactcaagttnttaacttattcttttaccgttaaatttgaattaaatgaatggttaagattgtgattaactctttaaaattactatctctatatagaataatactgttataactcattta

SEQ ID NO: 45679 - DNA, 394 bp, Glycine max
  unsure (1)..(394): unsure at all n locations
attatgttgatgtttatcattgttataccagagacacaactttttccaaagtttgttaattgtttcattatcttcattggctgtgcatgtgaaaagggttcaattgtagcatatgatgaattttctctttaaacttgagagagcgtctcaataaatttatgtttcatgatgattgcattgcatgttgtcaaattgtcaataatgggtttgatgcttttataacatgtttgattatattctagctcaatttatcttatgtttaagatttttaccttggagtgatttgctcaacatcatgataataaaatgtcagtagttcttgggttttgatgcattctgtataatattctggcagaanactgtgaattatcttcactattctttgagccatatc

SEQ ID NO: 45680 - DNA, 410 bp, Glycine max
  unsure (1)..(410): unsure at all n locations
agctntanacttcagagaaatacataaattggtgatgtgttccacctaaaatataactatgaatttgattaaaatttaggataaatggacttaattatgtggtgatcataaacttatgaacatatatcagcagcggacagatcatacacgtgatccccagcatacaactaagaaaaacccatctgaaagtgccatcaagctatggcagcaactaatagacgcaaaccaaactaataccatacagatccaacaaaactgaatattaacatatacaatcgtgaattgcatacatagaagaatattcgaaacttatggtctgagataacatcaaagtgctcctcctttatattggtgattggcattaacaatccaccanaaaagcaccttcccagcacgggttaacgttgcgt

SEQ ID NO: 45681 - DNA, 416 bp, Glycine max
  unsure (1)..(416): unsure at all n locations
ngaaggagtttcatgcatcagggaacaatntcactntataagtgggtcccaattggcttcctaattntcagcttacctctttggatgtgagatcgtggcagtaaggtgccaattttccatcatggattcagtcacaaaacaaacttcaagatgttggactgtctaacacggngattttagattctattcccatacggatgtgagaagcactntctcaggttttgtatttaaacctctcttacaatcatatccatggtgagcttgggactacattaaagaatccattatctatccatactattgatctaagctcaaatcacttatgtggtaaattatcctatctttcaagtgatgtgtttcggttagatctttcaagcaattcattctctgaatccatgagattagaatttctgaat

SEQ ID NO: 45682 - DNA, 471 bp, Glycine max
  unsure (1)..(471): unsure at all n locations
agctngacaacgttagtactcagcataaccatttaatcaactcaatgggtatcttagtggataatagatgggagtggaagtttcaatggaggagaaacctttttgaccaagaagttgatatggcagcagcttttatggcagacattgctgagtttcaaattcaaccagcaagcagggaccttctgctatgggggcttgatactggtggaccatattccacanaggcagcttatagcttcttgaagaatggtggaaggacttgaggtctgtttttcactaacatcacagcaatagcctcattaacaatttcagatggaaggtgggtgatgggtcaagactcaagttntggaaagataagtggagggagggtgacttaagcctaaaggataaatacccaagcttgtacaacgttagtactcagcagaaccatntaatcaactcaatgggtatcttagtggataatagatggga

SEQ ID NO: 45683 - DNA, 481 bp, Glycine max
  unsure (1)..(481): unsure at all n locations
gtaatcttganattcaagacaacactctgatttctgaggtttttgngacaaaaatggtcattgaccagtccattttccatgacttaactaaattaaccagtgacggtgtaccatttgaaggtacactgaatgacgactagaaatttgatttctctgcccatgatgcccaccagttggtttgcaccaacaatgcggatatgaccggacgtcttcttaccgggtcattggcttttgaaagccgcatccttcactatttaattatgcgtattctgcttccacggtcttccaaccttgcccaggtttctgaggaagatctaattatcatgtgggccttccatacagggcgtcaactcgactgggcacacttagtcagatatcgcatgcataaggcattgcgattaaatgctccactaccatatccacagcttggtactctatntcttcgtcattttgaaattcttcttgattctgaatcttatat

SEQ ID NO: 45684 - DNA, 451 bp, Glycine max
  unsure (1)..(451): unsure at all n locations
agcttaatgaaacaaacaaaagcatatccctaatccataacaattcagaatttaatgagaagaanaagaaattaatgaagaattggttaacctgtgatgctaacaaaggaagaagaagagatgacgaaggatgatcggaaagaatgacgaaggatgattggaagcacgagagagaaattntgaggaagaagagagagaatatttgagggtttagaaaatgaggagagcatgctttgtcattntgaaattttttgaggacataattgtccaagcattatttagggaacagatttccgaaaagaaaatttcacaaattggaaatctgagcttcaaaaaaagatctgctgaaagcttatacttttataaaagctaaaaaaatttaataaaaaaaaataaaagatgtttttctagtagataagatggtaaaagaaatttttctagtagataagat

SEQ ID NO: 45685 - DNA, 516 bp, Glycine max
  unsure (1)..(516): unsure at all n locations
ggtgagatgtctctcaatcaagttcttgtganatgaaagatatcagaatgtgtgataaaaatactgagaatgtgacaccctctaaactaaatgtgacaccctctgcccttacaattataactaactaactaaataaatcatacaaaatttatttaaaagtttataaacacataaaagaaaagaagaaaaaaaacataataaaataattaataatttttctttaaacatatttaatttaaatcaattcaaaaggagaaaaggttcacatccacttagtgaaaacataatagaatttttttttgaataaaagataaaattatcccggcacaaaacaagatcgtccactctatataaatcataattacaaaaactaaaatagaaaagtataatgcaattatatcattcagtaaatcataatatgtgaagtaaaatcctatgccccaatgtcacacttatcagagcatatccctatcatagactaagtgtctncatctctaacatgtgactcatcatatg

SEQ ID NO: 45686 - DNA, 433 bp, Glycine max
  unsure (1)..(433): unsure at all n locations
agcttgtagaattatggggtacccatcacatgtggtactatgtggcggtcgggcgatggtgcacaacaagctttccacatccacaatgcgcgcataaacccaccatcccctgttgcccacctccaactgagctcacgtactcccacgtagcccatatcctcgtttctctcaacaccgggtccccatcaatcctctcaagcttccacaacatccaagcaaaacaacattcaaacagcacaagctatcacagccaagcaaaacagagccaaggcagaaaactctgctcaacacatcaaccaaaatcacagcttttctcacgtaaagaccacagtaacaattccttcgatccaattcgntaaccggtggagtcgactccaaaatttactggaagtctatagtgtataagcctgcattntggaccgtgggatatact

SEQ ID NO: 45687 - DNA, 497 bp, Glycine max
  unsure (1)..(497): unsure at all n locations
ngcttagtataataggaagcaccaatataaatatgttgatgcctactattgatatatagcattgaccatacatgatactagctagagagaatagaaactattgataatagtacactccataggtagtaaaccacaaaaaactttagtggcttgcataactttagttaaatttagcggcttttaatgcttatcctatatatattataatgacataagtatttctaacttgttacctcctaagagattccctttggagtccttactggtttgttaatcttttagctgaaacattgcattntggccatgaggttgatacaaggttgaatattntttataagctaacattgttggaacatcctaattgagcatttgagatttgagatcatacctcaatttacctatgactagaaatctggcctagacccctttttgttcaaggcatactttacatgtagttcactaaatacaatctatggagaagcagtaaacttctttat

SEQ ID NO: 45688 - DNA, 433 bp, Glycine max
  unsure (1)..(433): unsure at all n locations
agctngctcaatgttgattggttgggttaaaatcatgtgtggttggatggtgcagtttgtgttttatatggatgttggttcaagatggtgaattgttgggctatgaccaaaatccatatggaagtttattctgttattttttttttctgttttgtcctctacttatataaggcaatgatgccctgtattttcaaagataagcttccacttgtatattgcatcgataataaaagctctctattnttccctcccgtggatgtagtgaaccacgtaaatctgtgtgttctttctcatctctctccctctttcatttttgttgcaacatcggtgtatgacatttctgttctgctgcatctattgctgctgntcttggttgttcttcatcacttccataacaacatttgtaaatatcacatagatccattctcaacat

SEQ ID NO: 45689 - DNA, 435 bp, Glycine max
  unsure (1)..(435): unsure at all n locations
taggtcatggttcagtgtatggtttccttgagcctcggcctatacacaatactaaggatagacgtcaagaatgtcatcattacattgaagcatgggtgaaggattcgcaacggcaattgtacttaggagcttacttgaattagtaagttaaaattatgtagtacattctaaaaatatttgcattataagtacctaattataattgtcaactttagggcacattggcaacttgttgttctgtgtccacgggataatattgttgtttggttttgttctttgtgaaagaagcctgatattaacatcaaagttgcaattaacaagtcttttaaaaatttataattgatttagtgtataactattgtactatgtaaaatgggatttgatgttatatatgtttatgttatntttggaacaagtgcaatgaagacaataacc

SEQ ID NO: 45690 - DNA, 410 bp, Glycine max
  unsure (1)..(410): unsure at all n locations
agcttaggctgagttctacttaccacccacagactaacgattagaccaagcgcactatcaaatccttagaggacctcttgagagcctgtgtcttagagcagcggngtagttgggatggtttcttacccttgatagagtttacatataacaatagtttttactccagtataggtatggcaccttacgaggcgttgtatggtagaagatgtangacacctctatgttgggtagatctaggtgagagcattgccttatgacctgaggtggttcagcagaacactgaanaggtcaagttgatccaatagaggatgagagtagcccaaagtaggtagaagagctaccatgtaggaatagaaagggaccttgaattgttgaggtgatcatgtattcctgagagtcactccatggac

SEQ ID NO: 45691 - DNA, 439 bp, Glycine max
atatacttaaattaagactacatccaataacaattaactaatctattgcctttgaaacctagatcttaatttcacataataacaattttcaagtcacatataaagaacatctcatgtacaattatcttgattcacaatagatattaacatcataagtcaaccattcaaatagtcatcattataagtttataaatcattaccactactcataccaatcataacaccaaagacagactctattccatggtgatttgacaccaatcataattctcaattatcatcaacaacatactttcatcaccacttatcaccatgaatcatcaattaccatgggtaaaatatattcatcaaccacccaaaattcttatcatacttaatcatcacaattgatatacaccaataagtcaacaaccaactaggcaacattaacctcaaacat

SEQ ID NO: 45692 - DNA, 450 bp, Glycine max
agtcttgatgcaacatttggagaggttaatgaaacaacgagatgatgcgctccatgagagggtggatcaaatggagaatagagatcataatgaagaagaaaggaggagaagagggaatgatggtgttcctagacaaaaccgaattgatggtattaaactcaacattcctccatttaaaggaaagaatgatccggaggcctacttggagtgggagatgaaaatagaccatgttttctcatgcaacaactatgaggaggaccagaaggtgaagcttgccgccacggagttttccgactatgctcttgtgtggtggaacaagctacaaaaggagagagcaagatatgaagagccaatggttgatacatggacggagatgaaaagatcatgaggaagcggtatgtgccggctatgtactcaagggacttgaaattcaagctccaaaaactaacc

SEQ ID NO: 45693 - DNA, 464 bp, Glycine max
  unsure (1)..(464): unsure at all n locations
cttcttatttntcttctcttataaagaagtttatttaaccaggcgctttattccattttagctagctatccaagggatttggttacagaacaaggcaacttaccctgttggaatgtttattactactaatatagtgtagcggcatctcatttgtcagggtattgttgattttagatcatatagaattataatgaacattggactntgatatctggtgaatcatatttacgcaggtgtctgaatgtattatgtatgcacatgttcattatttgtccttatatttgtattacttgttttccataacctaattagttttgctttgtagcaggtgtgggcgatacgttttgcgtaaaagatgaaactacggacagtgatgtttgtgatttgtgaggttcacctggtcccgtgccccaaanaatcatcaattgaagtttcctttgagttcacagatgaaagatgtcatc

SEQ ID NO: 45694 - DNA, 457 bp, Glycine max
  unsure (1)..(457): unsure at all n locations
agcttcttccttggtcactgtaacccaagatggttattacttatcattatcaggaatgttataaaatgttcttttatttattcttgagtctaaattgggtatcaatgttatgcacgccattttttatgtctgcagatgtcacacattctttaataatacacatatttaaactcaggcctctaatactcccccagaataccaaaattgtttgtttttttttaaggcaaaagtatagtattattaatatataaacataacagtaccagaagtactgagtataacaaatacaaggcactgaaaatgccaccttccaaaacaatacccaacaaaaaaaacccaccacgaaaggaaatattacaagttaaccaaaggcctccagaagattggagaccaatggtaaatggaaattaaacctttcttgtacttaagccagacaacatgaatnagcatatcatac

SEQ ID NO: 45695 - DNA, 439 bp, Glycine max
  unsure (1)..(439): unsure at all n locations
agatccctcttgttggactaggcccgatgtatacaaccctcttaggtttagactaacttaaactgagtttcatccgcagatccctcatttaagactagacttagctcaagtagcttatgaaagtttagcctaatttagcctaagcttcatccatagatccctcatttaagactaggcctaaactaaatagcattattgtaacaacataattaaaaccaaaacttaatccacagatccttcatttaagactaagtttcgatcttgcatcaatcaagttctaaggcaacagtatatttcctaatgctatagtcacctaactgtgcatacaaatgggtgatcagaccaaaagcatacaaacattaagcattgaatgaagcattgaacacagaanacacaatcaattagatattatgtatatacattagttgttcattagaaa

SEQ ID NO: 45696 - DNA, 481 bp, Glycine max
  unsure (1)..(481): unsure at all n locations
gcttttatccaggcacattctntgtggtgaagctccttcttccatggcatattccctagtggatggcgcctcccctcacctcttctcctttgtcttccgctgcatctccatggtggaaaatcaccattgaaagacctcattgaagctcaaagatccagcctccatagaagcttcacaagcaagcttccgtcaagtggtaatcagagcataagagcttcaagtaagtgctccttaaacctccattcattnttttgctttaccttctcttccattgttgtttcttcatttttctccatgtatctcctcacatgtcttatgctaaatgtttttaacatgattctttagagtttccaccgattaaacttgctataggagctagaattgattntctatggntcanatttcttgttcttgttcttaaagagatgaagcggtgtgcttagcgaacctgtacagctcatcttcttctgaattcttcctc

SEQ ID NO: 45697 - DNA, 457 bp, Glycine max
agcttctggaggaagcctcttaatgaagcttctggaggaagccccttaatgaagcttctggaggaagcctcttaatgaagcttctggaggaagcctcttaatgaagcttctagagaaagctacatgaagctgcctcggtaaaaacactacccagctttcattaaccgctggatcttctcgaaattttggtctgcaactttgcaagacaattttccatgatcttaccgttgggatctttgagaaaatgtttggagtgtgctagaagcttccgttcccgagagcatctcttatttaagcatttcagccattgctttcgtgtagcttaagaaaaaagtcatttcttcttctttctttcttccaaagccatttctaaagttccaagcactttcaccatcacccacagccaccattagccaccacaaaccatcattggtctccattgaaaacccacaccgag

SEQ ID NO: 45698 - DNA, 458 bp, Glycine max
  unsure (1)..(458): unsure at all n locations
catgttaaggtggccctaccctttgtgccatatccacttatcaatttcaaaggctgctaaacaatattggcttggtaaatattctagacatatcctatagaggtttctctcccttgtaccaaagaatagaacatttcatgttgatgcttctttaatcagacaagcattgggttcaaatttaacttcatagcctctgtcacacaattggcttatgcttagaagattatgtttcaaccttttacataataaacattntcaatttaagaagagtttggtttacctattttacctaacttctttgatgaaggcttttctgttatcttcaaaagcaagaaacccttcatcctttctcttctcaaggcaaaggaatttgcttttgtcttctgtcatatgctnggaacatccattgtccaataaccacaactttntcctcttggtgtggagtatacattcctaca

SEQ ID NO: 45699 - DNA, 476 bp, Glycine max
  unsure (1)..(476): unsure at all n locations
agcttgtcaaacctgataaaagtttcanaacatttatcaatcatagatggatgaggacttcaaggaattaggtgtcatcaattagccattcaacgcagatatctttctaattaacttctgacctcaatatagaaattgatttgtaagtttgcacaggtttcttgcaaaatggcataaagaacttggacgattaatcaaaattagaagagggtaaataaaatatgtctagaaaattacagaaggattaaaaatttgaatattctttgttaacaaaaatgaagaaaaaagattcacggatggttgtaaatatatctatctattcagaataatttaacacccagaaaagatcaagacacaaagaagctaattctaaaaaattttcaagagatggatgtgacaaaacatagaatatttccattccccttttctaggattccttatggctaataagaatgctataatattataacaataaa

SEQ ID NO: 45700 - DNA, 424 bp, Glycine max
gccaccggactggattgtctctggatggccagaggtgggactaaagtagtctcggccgatagacactgaatctttgacaaggggtgcagatgaccatatttgtttccgtgcgtcaatgggctcgcttaccttgagttagtggaggggagactaaatagtctcagtcgatagacattgagttttcgacaaagggagcaaatgaccatattggtctctacgcgtcatcggacttgctgtctctggatgaggaagggagactaaagtagtctcggtcgatagacatcgagtcttcgacaaagggagcagatgaccatgttggttgctgcatgtcatcggacttgctggctctatatggcgaagggagactaaagtagtcttggtcgatagacgttgcgtcttcaacaaagggtgtagacaaccatgt

SEQ ID NO: 45701 - DNA, 431 bp, Glycine max
  unsure (1)..(431): unsure at all n locations
agcttaatgaccctcaatctttcaatgattatatatccatctcccttatagggtgtgtctataaaatcgtggctaaagttctggccaagaggctggcccttgtgttacctcatcttatagatgaaagacaaacggattttatgaaggggaggcacattcttcatggtgttttgattgccaatgaggttatagctgaggctaaggctagaaataaaccttgcatggtcttcaaagaggattttgaaaaggcgtatgattcggtttcttgtggttttcttgactacatgttgatgaggatgggctnttgtgaaagatggaggaaatggattaatggtttcctgtccactgcaaccatatccattttaattaatggaagtctgtttttggagatgccactcaacataatggtagaaccttataatgtatttgag

SEQ ID NO: 45702 - DNA, 467 bp, Glycine max
gctgatgaaactgatgcttggtaacttggaacctaactgtccttgaatcacaaatctatacctgatgcaaggtttgtggtttgtgctcctctgctgaccaccatacagacctttgcccttccatgcagcaacctggagcgattgagcagcctgaagcttatgctgcaaatatttacaatagacctcctcaacctcagcagcaaaatcaaccacagcagataaattatgacctctccagcaacagatacaaccctggatggaggaatcaccctaacctcagatggtccagccctcagcaacaacaacagcagcctgctccttccttccaaaatgctgctggcccaagcagaccatacattcctccaccaatccaacaacagcaacaaccccagaaacaaccaacaggtgaggcccctccacaaccttccctcgaagaacttgtgaggcaaatgactatgcagaacatg

SEQ ID NO: 45703 - DNA, 466 bp, Glycine max
  unsure (1)..(466): unsure at all n locations
agcttgtgttatgttnttgtgaggttgagctattcgcgtcggtcgtgctaggctcaaatatctctctgttttcaaaaattgtggatttaggctaagcccagcttgctgcgctaagcctaatctgcaaaaaaatattntttgagtactcacgctaagcgtgtggctatcgcgcttagcccatgagtgaattntcataaggcgtgctaagcccagccttctgcgctaagctcccagtcctattttcagttctattnttctgtttttggtgagaataatcctgttttaaccctgttgtttgatctaattcttttcagatggcttctaggaagagaaaggcccctgcctcagcatcccaggcctctatgattgctctagattcacatctcaggaggcctgggatcgctattctgatattgtgattggcaggaagattctttctgaaagaaatgtcatgatctaccacaca

SEQ ID NO: 45704 - DNA, 424 bp, Glycine max
actcaagctgaggaaactagatgccttgggtaacctagtaacccaactggccatgaataaaaaatatgcacttgtcgctagactctgtggtttatgctcctctgccgaccaccacacagacctttgcccttctgtgcaacaatctgaagcaattgaacagcctgaagcttatgctgcaaacatctacaatagacctccttaacctcaacagcaaaatcagccattacagaacaattatgacctctccagcaacaggtacaatcccgggtggaggaatcatcccaaccttagatggtcgaatccttcacaacagcagcaacaacaacaacaaccttattttcagaatgttgctggcccaagtagaccatacgttcttccaccaatccagtagcaacaacaacaacagccctagaaacaacaaaca

SEQ ID NO: 45705 - DNA, 440 bp, Glycine max
  unsure (1)..(440): unsure at all n locations
agctagacaaagtttgattgaacagtgcatttatattatcaagtggttgattcttgattntggaattcagtgtttgtgattggtttgaattgatcaattgtatgatatgagtgaattgaaatgtgtaaatcatatgctttgaatgagtatgcagtcattagaagagaaagaacatggaattaggattataactaaaaatgttagttggtttgtcaggttgattgtgaaggaacacgttagccacaacccggtgagagtgtgatctttaattgtgagagaacgactagtagtaagtaatgggttttgcatgaatctctggatatggaatgaatgcgtgagtttgaagataatgaaggtcaggttntaattgaaagtagctacttagccaaaaagcttaccttatgtattgaataattatccctcgcacccagtttgagcta

SEQ ID NO: 45706 - DNA, 478 bp, Glycine max
  unsure (1)..(478): unsure at all n locations
gaacatagattcaattatatgtagtactagggtcagatatagtcataaacaaattgtctttnttttactttggtagtagatcactgcttttggaatgttttttttttgtcagcaaaaataatatatattgatatatgagggactaccagaggtaccataaatacaagagtatgtaagtaaggctggtaaatcctcatatcaggctgaatacagactgataggagcttactagcctactacaaagcggcaaaaattacaaaaccacaactggtgttaccctagtttacagaaaactagctggtagattgctagaccaatagttgaaatgcattgtaaaattttcctccattgttctgaaccatgtccatgccananatagtgcaacttccagcaagttactgccattgaatggagcattcgtgaaaataaccttatttctatgttgcaaatagaccaattagagctacccaccaacact

SEQ ID NO: 45707 - DNA, 465 bp, Glycine max
  unsure (1)..(465): unsure at all n locations
agctaggacaatcctcaccttacaagttgattntgtgggtttgaggtagggtcttaagtccaaattctaaaataatatcagagcttatcttagatctattctttggtcacctgcatcttagccctggatgtaacagggtgtgttggaaagccgccttttttttttttgaaaggcagaaaatatatatatatattaataagaaaaaactacagtaccaggggtactgatgataaacatacaaaggcagctgtgctgccagcctcccaaaaagagaacaaaaacccttcacaaagcccaactacaaggtatgacacctgattaatcaaaggcctccattagatgggatgaccagtgattaaaagggatattaaaacctttaactctagctttagaccaggaccaagccaaaaataaggcatcatccataactttggaattaataaaaggaaagcccttgaaaatgag

SEQ ID NO: 45708 - DNA, 502 bp, Glycine max
  unsure (1)..(502): unsure at all n locations
ngcanaccgacttcaactccaatggtttctaatctcaaactcttggcacaaganagccttcctcatctaatctcaaactcactacttttggtgactcaaattaggcctcttgctcagattcttgaaaatcagtcattggattctcaatattctttggcccttctcttatttcatggagatcaaagaagaaatctactatatgctgatcctccttcgaggaagattacaaggctctcgcatcaatgatatatgaaacataatggatactttacctccttgaagatctacataacctcggccaatccggtgtctttatactgttgagtctatggatcaattagaacattcgtagtacgcctttacatccatcattgtctcactctttcctttcanagttggacatgtatgatatatatagctcagcttgcaggagggtgtatctgatgatacatanaatagtactaaaactcaattntaatagatatgtcaataatcaacaata

SEQ ID NO: 45709 - DNA, 435 bp, Glycine max
  unsure (1)..(435): unsure at all n locations
agcttcggaagatagtgatgaggtacatgccctttaggcagagcttgaaagagcccgggtagtcgaagagaagttcaagtccatagccatcaaagtctgaaaagagtatgatgaactaagggacgtcaatatggccacagctgaagctttggaacgagaaaccaagaaggcccgaaaggcagaacacgaccaaagcaaagttttgaggggctntatagggcagcaatagtgagctcaagctccgaagaggtgaaaggaatcatcacgggtcaaaggcatgatcttgaaggacgagctaaaggcttgccttatgtcgaaaagaaatttgtcccaaaagttaagcgagactgaagggaatatgtgggccatcatcgatgagtgcaaagagaagctaaatctagtcggtgactcacgagcaaaggctagaggatgagt

SEQ ID NO: 45710 - DNA, 497 bp, Glycine max
tgtctcagcgtttatgcgagacagagaccaacatgttagctatcatcgccaagtaccaagaagagttaggtctagccacagcccacgagcatagaatcgcggatgagtatgcccaagtgtatgcggaaaaagaggctagaggaagggtgatcgactctatacaccaagaggcaaccatgtggatggatcggtttgctcttaccttgaacgggagtcaagaacttccccgattgttagccaaggccaaggcgatggcagacacctactccgcccccgaagagattcatgggcttctcggctattgtcagcatatgatagacttaatggcccacataattagaaatcgttaggaaacttgtatggtctctcagaccttgactagatacgacttcctttttgaaaaaaatgagttggcccatgtttactccaaaaataactggtgagatcaaatactcctacatttatctctagcatgcatgttctttcttacccactcc

SEQ ID NO: 45711 - DNA, 365 bp, Glycine max
agcttaaagtatgcccgagtcattcatccctattatatgttgatgaagtattggcgatcagaattgccattccttggattatagggttgaaccaagctcatgcttttacaaaaaggttcataaagtcaagttgaaatatggaagtaaccgtcttgcaaaattggggcaaaagatgaatcgagttacatcactgcttcattttctgccaaaacacatttaggactgttgatgtccttgttacttccagtttcaccttgaccaagatgtcatgaaccatgtggaaaaatctaaattgattcaaccccatgtcctgcgtaaaaattcgcaatacttcaactgtacatcattcgcatacatccatgttt

SEQ ID NO: 45712 - DNA, 488 bp, Glycine max
  unsure (1)..(488): unsure at all n locations
tggagaggatgcttcaatggaggaaaagaaagagggagagatagagagaggggggagcacgaaattgaaggaagaataagggagagaagttgaactttgagttatgtctcacaagactcttattcatcatagttacaacaagtgttacacatgcttctatttatagactaggtagcttccttgagaagctttcttgagaaaacttccttgagaagcttctttgagaaaacttccttgagaagctagagtttagctacacacacccctctcataactaagctcacctccttgagaagcttccttaagaagattcctaaagaagctagagcttagctacacatacctctntaatagctaagctcacctccttgagatgagaagctagaacttagctacacacccnctaaaatagctaagctcacctncatgacaaaaaacatgaaaatacagaaaaaagccttactacaagactactcaaatgccccgaa

SEQ ID NO: 45713 - DNA, 692 bp, Glycine max
  unsure (1)..(692): unsure at all n locations
accacctcacccaccatcacgatgatctattattcactcagttatctatatgtggaagtataatctctntcatatgacgacgcagtgancctgttatcgtcgcgatcgaagacctagccgacgcacgcacgccntaccactgntccgagaccagcgatacaatataacaactattctctcntctaacagcgacacatgtatacagcgtgtagatatgacgcttacagtcactctgccgcgcccacatagacacgatttcaaagaactaatatcactgcgcgatgcacaacgccacacattcacattacgacgtgtgagcacgcgctcgcatatatgcagttcttctgcctcttatttcatcgagcagtatgtacgaatcatctataacacgcactgctcgagggccgcgaacctagcatcgcttctaacagcattattacagaacatatacatgcagcacgacattgccgctcgaccataacgacatgcactctatatatactgctcagcgacgacacttcctagccacctgtgttgtatctaaatccacaccgagggtcctagtctcgactgacaacactgaggacgagatataattatctgctgatgacgggtcggtagacaaaatatcctctctgatacagtgatcataacccagctcgccacatctccactaccagtctctgactacg

SEQ ID NO: 45714 - DNA, 291 bp, Glycine max
cctgggctacctggcagctccgtgaccgcctatgctcgcgctcccttttctctctgtatctattacgtctctctcgtccatgatccacgacttctatttctctcgtcagtctataatatatctctgccgccacacctaccaaccttcagtatctcctccgccgctttactccttccttaactcatcctccctgcacataccagcatgtctcttcgattccctgctcacattccgcgtgctatacatcgctcgccctattacgatcgaacattcttcatcttcctcccactt

SEQ ID NO: 45715 - DNA, 441 bp, Glycine max
  unsure (1)..(441): unsure at all n locations
ctgtttaattaattattaatggattcattggttgttaaaaatggtcngcacatatcatatgacttcgcaattccatgcacatgcaaaatcatagcccatgtttcataggctcttaatttgatgctatgtatatcaagccttttggggagttatgtccttgcaattcaacactcttgggtgagtatttgtttcgtgacaatccttttatttcttttacctcnttgcttggattgtcacatgaatattgacattaatttaattagatgacagtagtgttacattcgatctttggccttcatataatcaatcttattataaaagagtaaaactttattattgttactagatcattcttattgatcaatggatttgaagcactacaatcaagtattttttttttaacattgtcagaacatatgttagtaatatattcttatgaca

SEQ ID NO: 45716 - DNA, 525 bp, Glycine max
  unsure (1)..(525): unsure at all n locations
ctaagcttatcaacatgagttggcanatgttaaagctnttctagctagccgatcagtcaccatgtgatcaagtgtatcttataggaattaattgctcacagtaagaataaaattgtacatatgctagatagacacatgcatttactatggagaatcacaaatacagtggtatagagttgctttgtattgtaaaaaatagtaacaaataatcaaaataattatggtttgaatcagaaaaaatgtaagagagcgcaagagaaccaaaaagctgcaaaatataatgagattaagagggaaaaaggttaaggcattaaatagtatgtattacaccaattaggatttgccaagtcttactttgaatccaactttactgaaataaccattaaaactgacacttgttccacactaacaatagataatttaatagcatatgtatgccattcttttccaagtgcctatgctttctactagcagcttcaatattcttgcatatttcttggtctgcaggaaacatgaacttactat

SEQ ID NO: 45717 - DNA, 471 bp, Glycine max
  unsure (1)..(471): unsure at all n locations
agctanaggagcactcaaaccgggtgtacttaccctcaaggcctattctctgaagagtccatcagggtctctcccttctgattcaggttcaacctagaaaacattttagcacacaaactctatctatgaattgtacaaaacacacgactcctcaattgttctcaaaataattttatcttgtcgtgcttgtgattaaattcgtcgagtccccatagtggttctcatcacaatactcgttgaacattaactcgtcccccttaaagggtcttatagtcgtttgattgtacgattcatagctcacaactcagtgcatacaacatctcaatgcacatatatattacaagtcaatacatactcaatttatcacatacactcggtctcaatcacattggtataatcccaatttaacatgttatcacacctcatgaaccatatacactntacctatgaactatgcaatacacacaacta

SEQ ID NO: 45718 - DNA, 455 bp, Glycine max
  unsure (1)..(455): unsure at all n locations
tgtatctatgggaggaggttatatgccatttttgctttaagagtagtgtcccactggtaaaattaactttccaaatgtttgccttcgcatgaatggccccgaggaagcttgcctcanagaggtccaggaaggacaaggcggccgaaggaactagttccgctccggagtacgacagtcaccgctttatgagcgctgtacaccagcagcgcttcgaagccatcaagggatggtcgtttctccgggagcgacgcgtccagctcagggacgacgagtatactgatttccaggaggaaatagggcgccggcggtgggcaccactgggtactcccatggccaagtttgatccagacatagtccttgatgtttacgccaatgcttggccaacagaggaaggcgtgcgtgacatgagatcctgtgttaggtgtcagtgaatcccgttcgatgccgacgctatc

SEQ ID NO: 45719 - DNA, 413 bp, Glycine max
  unsure (1)..(413): unsure at all n locations
agcttgagcnattcaaacgacataacttttactctatgttcgattgagttcagtaatatatcgagatactagaanatgaaaacggaaactcgtagaaagtgcataccgcaatcacttttaactcggatgtccgattgagtctcgtaatatatcaagacgttcgtaatggacaacagaagctcaatgaaaattctaacgatattaactctttcctcgaaggtacgattgagtaccgtcatatatcgagatgctacaaattgagaatagaagctcctagcaaattcaaacgacgataactttttacttggatgtccgattgaacacggtaatatatcgagacactcgcaaatgagatctgaagctctgagataattcacacaacaataactgtatacacggatgtccgattgagt

SEQ ID NO: 45720 - DNA, 422 bp, Glycine max
tatagatactcaagcttcaacatcagaccacttccagtgtgctggaactacttcacatggacttgatggggcctatgcaagttgaaagccttggaggacagaggtatgcctatgttgttgtggatgatttctccagatttacctgagtcaactgtatcagagagaaatcagacacctttgaagtgttcaaggagttgagtctaagacttcagagacataaagactgtgtcatctagagaatcatgagtgaccatggcatacagtttgaaaacagcaagtctactgaattctgcacatctgaaggcatcactcatgagttctctcgagtcattacaccacaacaatactggttagttgaaaggaacaacatgactgtgcgagatgctgctagggtcatgcttcatgccacagaacttccctat

SEQ ID NO: 45721 - DNA, 414 bp, Glycine max
  unsure (1)..(414): unsure at all n locations
tcaagcttgcannattggtcttcgccagagaaaggatcgaagtgtgtctgaaaagaggcaaacttaatcatcctgcttgagcgaatgagaaaactggggcaaatgaagaaggtgaggatgagggagaaacccatgctgtgactgtcattcctatacggccaagtttcccaccaaaccaacaatgtcattactcagccaataacaaaccctctccttacccaccacccagttatccacaaaggccatccctaaatcaaccacaaagcctgtctaccgcacttccaatgacgaataacacttttagcatagaccaaaacaccaaccaagaaatgaattttgcagcgaataagcctgtaggtacaccccanattccggtgtcatatgctaaacttgctcccatatctacttgatact

SEQ ID NO: 45722 - DNA, 499 bp, Glycine max
  unsure (1)..(499): unsure at all n locations
aagttcctcagctgacttgagtagattgagacatattcttccacccaagacttgatatcatcccatatctctagcccatcagaagcataaggatagtcctcgatcaaaagtcaaactccatggggagcagatggatccttaacagcaactcctctgaattaaaagcacccaaataacattgattagcataagagttatatcaagcctgaagccttttttcttcttatgtcattgatgactttgtatatcatgcattcatgtgccactactctgtcaaagccatgaactgtcaaagccatcatttatgatgaaacagtctttgtctttccaaaatctgaaatacgagccacttgagcatctgctaaacgatatttcgtgccaccaatagtaacctcagatgatacagtctgcacatccaacacaatataatccaccaattgtctactagtaagtaatgacttgaaggatgctctncagtactgatcaacatctatgaaac

SEQ ID NO: 45723 - DNA, 412 bp, Glycine max
  unsure (1)..(412): unsure at all n locations
agctntctcactttaaagaactacgtatgtctgatttcctcatcgcacctgaggatacgtaggagcaagggcaacacccttgtcgaccccaaaaaatataaaaaaatataaaaaggggaaaatacacaattttgaagtcatgttttgcacactcgatcaaaggctgtcgtcccttgtgatgggcgtgtggagtactaataccttcctcatgcgtaaacaactcccgaactcttattttcaaaattcgcanactttctttttggtttttctaacattttcctcgaataaacgttggtggtgactcccacgcgttttcctttttggaagacgcacctttnggcatttgccttgccttcccgccgaatgggtaggttacaacaattggctatgaattntcgtaatcttaacaatg

SEQ ID NO: 45724 - DNA, 431 bp, Glycine max
tcttgcttctacatcgagtacttaacgcttgtgatattgctacgctaataaccagaatacacaataccctttagctaaccgacaaacaatttatggatgaaatttacgaccggcagccattcacagatataggtaaccaatttttctttcaatgtatgcaattgaaaaatgatgatgatgttaacacaatgttaatgtgtaatcatgaattttcatgtgttggtccgattgagttattatgcaccattgatggaataccacatggaatattaaacttacttgaaaccactatgacccctactcatgatgcccttctatattacaacgggaggtggaacatgccacgccaacacaactttgtaggttactcgttcacaggacaaaatccaaataaatttgacattccttcatgatgtaccatcgatgaactg

SEQ ID NO: 45725 - DNA, 425 bp, Glycine max
  unsure (1)..(425): unsure at all n locations
agcttgtgantgtgatttatttcagcctgtgtgaagagtttagtgcagaccttgcgctaagtgtcatctcttcatgcgctaagctgagcttactcacgctaagcgcaaagacccctgattgattggctgaatggttcagctaagagcacatcgctgcactaagcccaacatcttcactgtaagttgcaccttaagcaatgggcttagcgtggatgaggcgctaagcgccacttcctctntgtgaaaatttattatagctgcgctaagcgtgccatcctgcgctaagccacagattcattctgtaagttgagctttgaagctaggcttagtgggaaaggacacgctaagcgccaacatcantttgttttgaaatcattggaagtgcgcttagcgcatgtagtggcgctaaacttgaatcactcact

SEQ ID NO: 45726 - DNA, 392 bp, Glycine max
gtttcacgaatgtcatgtgctcatgcaacaattgttaaccgtggctatacgagacatcttgccaaacaaagtcaggttcacgataactcgcccgtgctttttcttccatgctatatgtagcaaagtgattgatccagtaatgtttgatgagttggaaaatgaggccgcaattatactgtgccagttggagatgtattttccccctgctttctttgacatcatgattcacttgattgtgcatctggtcagagaaatcaaatgttgtggtcctatttatctatggtggatgtacccggttgagcgatacatgaagatcttaaaagggtatacaaagaatctatatcgtccggaagcatctattgttgagaggtacattgcagaagaagccattg

SEQ ID NO: 45727 - DNA, 421 bp, Glycine max
  unsure (1)..(421): unsure at all n locations
agctntataagcgcgggttcgggagacaaaggtctagcgttcgcgatatgcgaagatgatattccgagtactttggatttggtacgaccatgctctcctgatttccagctgggaaattggcgagtggaggaacgccccggcatttacgcaacaagcataatgtaaacctttacggttttaaaagctctatagttgggcctaggctttagagttntcattntgctaaggctttgtgtcttttgtggttgaatttataatacaaggatctttcttcatctgttcctggtctctacccattctcattcatttgcatgtttacttctttttctaaaacggcagattcgatgacgagtcccccgaaggtactaatacctgggacccgtctatcaactttgagcaagaaatgaatcanacggaagat

SEQ ID NO: 45728 - DNA, 447 bp, Glycine max
  unsure (1)..(447): unsure at all n locations
taccctgatgaggatgtcccatatgttcttatnactggactaatccatttgcttccagagtttcatggccttgcaggtgaagacccacacaaacatctgaaagaattccatattgtttgctccaccatgaaacccccagatgtccaggaggatcacatatttttgaaggcctttcctcattctctatagggagtggctaaggactggctatattactctactccatggtccatcacgagctgggatgacctcaagagagtattcttatataaaaatttccctgcttccaggaccacgaccatcagaaaggatatttcaggtattagacaattcaatggagagagcctatatgaatactgggagagatttaaaaagttatgtgtcatttgcccacaccaccaaatatcagagcagcttcttctgcaaatattttatgaacgactcagt

SEQ ID NO: 45729 - DNA, 395 bp, Glycine max
  unsure (1)..(395): unsure at all n locations
agcttaacatcttgatatgtgggattatctaaatttttacaattcaccattccattttcttcaagaataccaagagcatagtttattgggaaatagtaattccagaccttgattaagcaacttcaattcccagaatatctcaattggcctgagtatggtttaccaagaaaaatgtaggaatcagtttataattttgtaagttcagatatctgtactaaagaaagccatgcacgtgtatttgatattatgctgaaaaatttaaaatcttttcacctgcaacaaggatagtggtatttctgtgttgctatgatgctactagtatttctactaactagttcgagaattacaattgacatntaggtagatcagtgaggattttgcaagtggatcatacc

SEQ ID NO: 45730 - DNA, 501 bp, Glycine max
  unsure (1)..(501): unsure at all n locations
ggtatagttccncaatttatggttatnnttggagtaaatttttatataaacttgttttatggttaaagctgtctctagaacatttccattggatttaatgatgaaatctgtgcattttcaggtgaaaaagaggccaagttttgaaatgcaaaaagtagcagttgggctaagcgcatatccaccgctaagtgcagcttcagcgtgcttagcgcaaaggagaatctggtagagcatcagcatcaaagccgcgcgctaagcgcgagatgagtgcgctaagagcagcaagtgccttcagccaggctcagcacaagactggcgctaagcccaattccacttactggcgctaagcgcgagggtggcgctaagtacaaggtcgcgaattctgagcctatttaaagcctggtttatgcagaattagggtacacnaactttgagaatgacacagaatttatgaggacttgtgccaacattcacagtgctatcttggaaagagcctatagt

SEQ ID NO: 45731 - DNA, 273 bp, Glycine max
  unsure (1)..(273): unsure at all n locations
agcttctaatatgcattntacaatggtcttctcaatagacaaaccaaagccctgatgcagttaagaaggctgaagatgtaatgagcaccatgcttgctaagggtttcattntatgaaaggatgctatcaacaaggcaaaagcctttgatgaacatcatcaattaacctcaaatgcttcgtccacagttgcttccattgatcgtaaaataaggttaagtgataactatgttttggaacagtgtcttaatggaaaggtagagagatggatgaaag

SEQ ID NO: 45732 - DNA, 393 bp, Glycine max
  unsure (1)..(393): unsure at all n locations
ctaagtactaaaacattgcagttctaaggcattgaaagaacaaaaatatactctaacgatacagatacagattacataggaaaagtgaacctaaaagtgaaaaaaaaggtcaaatacatgatgaaataaaatgataaattatgttacagggaatgttacatcacctcgcatgattgataaagctaaggtagggctatcatgaatgatatattacagaatcagttntggtatggctagaagaaaggacaagcttcaatttgatgcttaactataagatttggaatcatgtatacgatggaagtggaatagatattcatagaaggataactttagagaccattccacaatactgaaggataacttaagaatggatatgtaattaatatcttttca

SEQ ID NO: 45733 - DNA, 463 bp, Glycine max
  unsure (1)..(463): unsure at all n locations
agctntgtcgttattcgttaacacattcctactattgganaatgcatgcaccggaatactgcccatgaattgatgaacctttcaaaactgttgttcttaaactttcataatttatttactaaactataggatttctttttaagaatgacagtaataagtataacagaaaaaaaataatatttaaatttttggtatttaattagtatcgaattgtatgtcgaacaggattgttaggaaaaagacttgtgaaaaataaaaaaaacaattacacaaataataataataattntatataaaatgtcattaagttgtaaaaactaaaaacaccaaaattggacctgtaaatttatgcctaaccaaccattattcagatttaaacccacatgtgtacgatgatatataaagattattctttctattanaataatcatttctgtcagaagtgaacanaagcctcgtgttc

SEQ ID NO: 45734 - DNA, 362 bp, Glycine max
tgcatgcacaattgacattaagtgtccactggcattggctacaaatataactaagtatattaagtgatgataactgctttgaaatcatgtcagactaaattacatcaatattcaatggtcgcagatacaaattaacaattgaagatccctccaacatcatataactacaatgaatcgtgtcagcaaacgaatgaaatatcagcaaacaacggatacaaatcacccacccattggagaacagaaataaagtagtagcccagaaacaacaacagcactaccgtacgtgatgtgtcccagtctgtatgctgatccatactcggtaaaccacttctcatggcgttcaatgtcagcctgagaaacac

SEQ ID NO: 45735 - DNA, 365 bp, Glycine max
  unsure (1)..(365): unsure at all n locations
agcttaaaccaagtagntatctggtttttttaattgnggnngaagcctgaaggcatccattatccctaactatcctggatggttgcaaatactgtcctaagtactacagaaacaagaagactgacagtgtaacgaagtaccacgtctctcaagagaaataacaagcgttgaagactaaactataaataaaaacattatttcattgtacaaagcatacctttcttggccttttggctaagatcaagtgtagtatctgttcttatcagtttaatatttgatatgtggaccattggttcacacgatattaaattaattttttgagggggagggtccattatagtagctggctactggggctctcacgt

SEQ ID NO: 45736 - DNA, 392 bp, Glycine max
tgctgatgtcattcataggacactatgtcgacttactttaagactaaacatgcactggttatgtaattgtattcattatgcgacataatttgttagaagccatttataaccaattaatattattaagtactcgttgtgttaagcaaaaaaataggtggtccaacaaaaatcaattatgcgtgtatgatacatcattgtcataattgacaacacataatgacatgcatgcgtattaaagtttgagcgcgacaccacattgactgacttgcacattctgaaggaaacataaacacgatacatgttcatgcgtgtctattgttttgtaaaaaaagtgaagcaatctgtcggtgacaaccatgtatatatatgagacacggcttataaatcacaca

SEQ ID NO: 45737 - DNA, 504 bp, Glycine max
  unsure (1)..(504): unsure at all n locations
gtgaccttatttgtcgcattctaaacnttcccgatgcacgacgctcctcattaggcggagacctgagttccaaataagatttttatttatacaggantatgacacgctgcgaagtactcctatgactagcccgtcaccgatcgtagcatgtataatcactcagatgaaaagctaacagcacttataatgtgctcggtcagcatttctatctcctgggttcatatccaaaagattagcactacgaaactatgtccggtctgactgcttggtgtctgctttcgagacacaaatacactgcaatgcgttggcaaaaacaaccgcatccctacattagcttaagatgacataccctgtgaccgcgatcctatattagccaccatgagagtcctagtgccaacagatgacactgaacacgagacttattataactattcatgcgtcagcgacataatgtgactgtaatgtttcaccgtcaccatacacattactcacctttttattccg

SEQ ID NO: 45738 - DNA, 473 bp, Glycine max
  unsure (1)..(473): unsure at all n locations
tctacctctcccctttccnctcccnctcaccattacctttctgcctctcttatttcccaacttatatcccagcatataattaaatatggagcttcattgatattgcaagaatgttggaatattccttgccgaaatcctctaaattgttgaggacatgtttagataggtaaaagtattaaaactttgggaaatacctctccgaaacattaagttagggtaccactcatcttggctaaacataagttgtaaaaagctccacaaattatatgttaacgattgccctcatttgacaacatatctaactgtcccaacttggtgtaattgtttaagtctttagtagtagataatttattgaaacttatggtgaacacagtccaaaatagtagatcactgaaagaaataatggaagaggaaacanagtacttcggagacttataaatttaaaactttatcaatatngtacacagggattg

SEQ ID NO: 45739 - DNA, 438 bp, Glycine max
  unsure (1)..(438): unsure at all n locations
gcttgataacaaaatcagcctcctccatccttgtattattgtatacatgttgggcgagcgttgtgttacccaccccactcatgcccacaatagaaattattgatagctgcttatagttgccagtttcatatgtgagccaattaatgatcatttctttgccatcatctctgacataaataacactttcaaccaccaaagaagttgatggcattttctgtgacacttgactgcttgatcctactcttaacatcggtaccttntaatatacagcttttcaaagtgggcaatctttccccagtcttcgccttctggtctctggcaacgctgtttgagcaatggacaacccgaaattccaagagttcaaatggaattgggcacaccctcctctggtaagcattggaggctgcggcagttttcaagcctcaattccttgagaga

SEQ ID NO: 45740 - DNA, 474 bp, Glycine max
ctaagctcctactcattgcgctattatgatacgcttcctaaagatatttctgagagccatgttcttctcatggacccagtactagggacatgtgagttattatctttttgcatgcatcatcttcgttctttatttgtacatccaacttctccatgctcataaattattaatttattcaaatttccaaaatttcattatagcatttgttaaattgttggtaatcttttattgttgaacactgttgtacaaccaattactccgaggtactaggtgcatagtagcaaagattataggaattgaaattggtatctttcggttcacagaacaaaattttagtttcacattagactattgtcaacttacgaagcttcatctacgagattcttcatttacctcttgtttctgttcatttatgcatgactcggccacttcttttggctggcaataagcaccttaatgattatcctagtaaca

SEQ ID NO: 45741 - DNA, 491 bp, Glycine max
  unsure (1)..(491): unsure at all n locations
gtaattcaacattcanacaacacanactatcacagccaagaaaatagggcaaaggcagaaaactctgcccaaaacaccaaccaaaatcacagcttttctcacttaaagaccccagtaacagttccttcgttccagttcgttaaccgttggatcgactcgaaaatttcactggaagtctctagtacataatcctacattntgaccgttgggatctactagaaaacacccagaactcattctgcatcactctttccacaaccagcaaatacatagcattnttctgcacttatgctaaaattctgctgcacctatntgacagcaaaattctgcataagtgcagatttcgaaaaaacacacatcccttcacccaatcttgcccaaatcaattcctacaagtcccaaatcatgtatcaatcatgtctaaaccanagtcaagcttcaaaccacagcaacacanaatctaggtgtccanaacccctcaatttaatgga

SEQ ID NO: 45742 - DNA, 445 bp, Glycine max
  unsure (1)..(445): unsure at all n locations
gcaagctngagtgaactntgaataatatgaaaacttttatctttctctacgatctcacttttaatgttgtgatatgcctacttatacgtaactgtacattttatttctagtaagcaattatgtatttatcacttaggtagcttgattagatattggcaaatatgttattaatttcgtttgaactttgtagtctattcactgtaatcagtgttatgtatgttatatttcatgaaataatgtatgtattttacttctagactctgttgacatcatttatttggtatgggattttataataatattaaataatggtgtcttttatgttcagatgtctggtgagnttccatgtgctacttctgatgctcaatctatgcaaactacatctataggtcaatccgaaaaggttcactcactttcatatgctgatccacagcaaccaggtatt

SEQ ID NO: 45743 - DNA, 455 bp, Glycine max
  unsure (1)..(455): unsure at all n locations
gacacccgaacttcacaagccatctatatatatctttgaatgaagaataagtccaaacctatatagatgatcaacttgaanagggagatgaaatctcaccagcactcaccaaagccatcgaagattctcatgtatatattctaattttctcagagaacgatgcttcctcaaaatggtgcttgggtgaactcatcaagattatggaatgcaagaatgaaaaaggacaaatggtaataccagttttctacaacgtagattcatcccatgtgaggaagcagacagggagctgtgagcaagcctttgaaaaacatgagggagaacctatgtgcaagaaatggaaagctgttctcactgaagcattcaatttagctgggtggaactctcgaacttataggtaagataataaaatggaatgagtgattaaaatttctgaaagaaaaaatgagaaagacaat

SEQ ID NO: 45744 - DNA, 251 bp, Glycine max
gactcaattaaactccatagcccaacaacttcccacgtgttttggacatgttaacagctgaagaaaatatggaagttattctcaaaattgtcataacattaacaacaagtagaagagcacgtgactcccttggtctgaagcctaacacgagtaagagggaagtttctaagaacacaccataagaaaatgctctaccttgggttgaacttgtaatttcatgatgaggttccaatttctagctaccttttagt

SEQ ID NO: 45745 - DNA, 504 bp, Glycine max
  unsure (1)..(504): unsure at all n locations
ggtaaaggctcacattcactttcttctacatcatattctaacttgtccaaataaataataaagtcatctcgactcanagaaggtcatctaagtctcatacaattaatatagaacctatatcctaatgtcacatcctatcaaaacgtggtgttcccgtgtcctctagcatgaggtttttcatagtcatccacctattcatttgctcccccgaacacaaagttcaagatcatcacaggatccaaacacaaacagcaaaccgggagtgagttatcacatttctaactattagggagaaacaacacaacatatagtagccaaatacaatttacttagcatatctcacattatttcatcactttgtcattcatcaatcacacttttcatccatcaatcacnacctttaatcatcaatcactatacacaggaatcacacactttgatcaagacataagaacacatcaatntcataataaacaattaacaagcgtatgcgacagttatgct

SEQ ID NO: 45746 - DNA, 468 bp, Glycine max
  unsure (1)..(468): unsure at all n locations
agcttgggctcttagcctcactcatcgccttttgttttcatttctagctatcttatacttatcccaagtttcagaatttctacacctagaccactccttgaaacactccttttttactctaactttgctctgaacattttcattccaccaccacgattctttacccctaggtccaaaacctctagattcacccaacgtctctttagccactttaataatctcttgggacatcttgttccacatatcatttgcacttccttgtgattggccacaccaaccctcccatatctnttgttggaagattccttgtttctcacccttcaagtgccaccatttgatccttggtgctaccataggacttcttctctttgccctatctctaattcttacatccataaccaacactctatgttgggtagtcaagctctctcccgggataactntacagttcaagcaatacttcctatc

SEQ ID NO: 45747 - DNA, 450 bp, Glycine max
  unsure (1)..(450): unsure at all n locations
ctcagctanagtatgcccgagtcattcatccctatgagatgttgtcgtagtattggcgatcagaattgccattccttggattatagggttgaaccaagctcatgcttttacaaaaaggttcatcaagtcaagttgaaatatggaagtaaccgtcttgcaaaattggggcaaaagatgaattgagtcacatcactgcttcgtctactgccaaacatatttaggattattgatgtccttgttacttccagtttcaccttgacaaagatgtcatggaccatgttgaaaatctaaattgattcaaccccatatcctgtgtaaaaattcgcaatacttcaactgtacatcattcgcatacatccatgcttttcattggttgcattgctcattgcattctttcgttgaataataaaatataatataataaaatgaacttaatcattgttatcaaaa

SEQ ID NO: 45748 - DNA, 449 bp, Glycine max
agcttgtgtattgctgcattctactaatatatggaattgcccattgctttgcctgagaataacaattggttgaccacaacagcgctgggggcggcaacggacaatggtctttcaaataaacctgttgtacatgaacaaacattatatcatgcgctgaccgtgccaaacgaaccagcgaagtcattgcataattgttacactaactatattcaatgtacctgaacaaaatgatttccaaacacgtgaccgacacatatgatgcggtggccagaagagtcaggtggtggttgacttctaagagggaaaaatgtcatgctttgttgttgggacaacgatacaaggattacgttataccgtgaagcaatcacatatcccatgtctgttatatccatccacttgtccacactaacctgaatgaaccaaacatacacatgtaagtaatttaaaca

SEQ ID NO: 45749 - DNA, 434 bp, Glycine max
  unsure (1)..(434): unsure at all n locations
tcttcttcttcattatgcgacgatgaagcatgttcttctccggcgtggacacccacacctcattctctgatatcgggccactgacatgggctgcggngggtccaaggtggaggacttccccgtggtggttctgtgcagagagcgaaaggcgttcctcaaagccgcatcagagcaacgctacgctctcgccgctgcacacgtggcgtatttccattcgctgagtgaaattggcgacgcccttcacaagttcgccgaacaagacctcaccaccaccaccggttcctcctctccggttctcacattaccctcggaaaccaaaagcatcaacaataacaaactctcatcctcttccccttctatagcatctaatgaaaaaaaaactatngaaaacaaaatgaatggcttaattcactagtcagcctatagttgttcat

SEQ ID NO: 45750 - DNA, 443 bp, Glycine max
agcttcctctatcaaatatcaattactttttttcattcagaaacctcgagtctaagacttgcttgggagtttcaagcccatcttttctccaacaaacataatattggttaattaattacatcaatttgagccaactttgagaaagaatgaaacacatgattataaacttaaatgttaaatccatgcattgataaatgacgaattctaacgtttttcgcacgaaagtaaatatgaaccttatccgatctttcaaatttactaacaagttgggagatggggttgttgaggtaccttatccaatctctcaaaagaatctgttttgagtgggacccacccttgaatggcttccccagcaacagaagtaagccaaggtggccacccagccgcattctgctcagcctccacaaacctacacgacaaccttaaagacaccgacccagtcc

SEQ ID NO: 45751 - DNA, 458 bp, Glycine max
  unsure (1)..(458): unsure at all n locations
atatatgcatatntataatacatgttaaattntcatgaataacatgattatcacaattctttgttaagtacggatgtatgaatgagttagtatgtattggggttagactcaatctttcccaaactcagcctaaacacgggtgtttacatgcattgaatatgcattgtttaatgaaccgtttaatatgcactcaactctgtaatgtatantttattttactatatatagacccatacaaccaaacaatagaactaaaccttacaaccaagtgtaaacaagttgagtaatttgtttaaactatggctnttacattcctctctaacatagtggctgtgagaactaattggaagttgaaggttcgtgttattagattatggtttttaccagaagttgaaaatccgaaagtcatttagagtcttgagatgatatngctagatgtaaaggtaactaanactact

SEQ ID NO: 45752 - DNA, 443 bp, Glycine max
  unsure (1)..(443): unsure at all n locations
agcttgacatacttagtagataaatgagtggtctcttaaacatgttaactaagattcaatttctagtagtatatattcagaaagctcaattggaagaaacaactcttaagctatatttggcaagacatttaagttagcttctagtttttttttactaactgaaaaactcatttgactattcggtaaacaagcttttttttagtaattcttcaatagcttctagcattttttgaaacatgttgaagatatacttttgtaactgcataatattttatttttcagtttttaaaataggatttagtaaataagttgatttcctatattttaggggtaagtcagttttaatggattagcctagtcaataagtggttcttatctttaaggagcaagttagttntaatattatgttntactaatatnctggtatctaattagtttatctt

SEQ ID NO: 45753 - DNA, 478 bp, Glycine max
  unsure (1)..(478): unsure at all n locations
gtggtaatcagagcacaagagcttcaagtatgtgctccttanacctccattantttttttctttaccttctcttccattgntgtttcttcattnttctccatgtatctcttcacatgtcttgttctaaatgttgttaacatgattctttagattttccaccgattaaacttgctatagaagttagaattgattntctatggttcanatttcttgttcttgttcttgaaccatgaattgtgttgagtttaggttcctttgagttntttcttgttattttttgtggctgaatcctanaccataaaattcttacaaaaatattaaagtagaagaaaacctcanaaatctagagtgacttgttcacctattgtagttntgtcatagaagtcatgtctagtcatgaaacttgtcacataagaattcttatagtgngctgaatttaatttcttggttctttgctaactcatttgtcatgagtga

SEQ ID NO: 45754 - DNA, 429 bp, Glycine max
agcttcttatccaagacacattcttggtggtgaagctctctcttccatggcttattccctagaggatggcgcctcctcccacctcttctcctttgtcttccgctgcatctccatggtggaaaataactattgaaggacctcattgaagctcaaagatccagcctccatagaagctccacaagcaagcttccatcaagtagtaatcagagcacaagagcttcaagtatgtgcttcttaaacctccattgatttttagttttacattctcctccattggtgtttcttcatttttctctatgtatctcctcacatgtcttgtgctaaatgttgttaacatgattctttagaatttccaccgattaatcttgctatagaagctagatttgattttctatgggtcaaatttatgggtcttggtcttgaaccatg

SEQ ID NO: 45755 - DNA, 439 bp, Glycine max
  unsure (1)..(439): unsure at all n locations
agctnggcaatactgtataatctgagtatggacagtgagaaccattcagcacttgtggctgctggagcagtgcaggtcttaaaaagaattgttctagctaatagaacacactgngaacgagctcttcttttactcaggactttgcaaccgtgatgagttcaagggtgtaaatcttgaaacagtttcctcgttgtataatgcactntttttttggtacaattgtataatctacttaatttatgtgtaaaagaaaatctttacccttgtaagttattttataatgcaatacacaaaagtctataatcaatattctatccaaacaagttccctttcaaatatcaatttcaatttcaagtatcaaatttaagacctgatacttaatatcaatttcagttccctttcaaatattctatcaacaagttatattagcatgtatcat

SEQ ID NO: 45756 - DNA, 433 bp, Glycine max
  unsure (1)..(433): unsure at all n locations
tcatcagatgttgcatttcggtatcagctcctcttattgaagaacgatatgcacttcttgcactgtaaatntgctntatcgtggtgcaactgttgccattgtgttccttcaacgttagcaatatgttttttggtttcaccatccactttgtcatatcagcaataattttcttttcatccttagtcaatcgcccaacgtatggatgtccaactaaggacttggccaattcatgattgtgaatcccacagatcaacttcaccatccaaccttcccctccatgcactggtttcccacgaagcctgaaaggacaaccacatttcctactcccagtgtcttttctaatgaattctttattcctacactngtacgtaccactcctttcacacccaattaagacaaatgaacttcttcctctcctaccggtatctgtgtc

SEQ ID NO: 45757 - DNA, 401 bp, Glycine max
  unsure (1)..(401): unsure at all n locations
agctntacatatagaagataataaatattttctatacataatatttttagatactaatttgtaaaaaagtatattttactttgataagtggaaacagttatttttttgcaataattgaatataagttaatattaaacattcgcattgaatttgactctaagcataatatttttttgaagaaaataaataaatgacaatcaaacatattttgtaaaatttcttaagaatatntattgaaatgtttactctgagaaaagtaatttagtttggaaatattttttgcatcaaacataaaacccaacttacaactaaactaaagaaattcatgttataataaatattcaattacttgattntaagtttgtatttctatatcagttgcatacacaaattacaattat

SEQ ID NO: 45758 - DNA, 338 bp, Glycine max
ttgagaagtaagaagtatggtaaagcaatatctgctgcgttcagttcgttatatataggatttaaaggatgaaaggatgagtggtagttttattccctactaagtgattattgaactctcgagtaggagccattgtatctctcatgtcattatcttccaaacaaaataaaaacaatgcaagtatagagcttatagttgtctatcatagacacgtacaactgttgtatttccataactttttgtttttggcatatacttgttatatatacccaattatattttccaccagaccaccatcatttgatgaccctaaccttaagttatcaaatcaaatatac

SEQ ID NO: 45759 - DNA, 246 bp, Glycine max
gcgatcttagaccttctgatgcacgcagcttttcggagccgcgagaattacattaacgttcatgtgttcttcatcacgagattggagcgatgcgtactgattgattaaggcaactctacattattaacccttgttcagataccgagagaaaagcatgttcgtgcatgtaactaacactcttataataaggatgccaggcacagtgattgctctacacacttttccatgcttaatcgatagaaatga

SEQ ID NO: 45760 - DNA, 364 bp, Glycine max
tgaacgaaatgtagatgaaagctctaaaacaagaaatgaatggaaagtctcagattctaaaacttacccgttgaataatgaagaacgaatgaagaatgaatgaagaacgacggataaccatcatggatttgctcacgataacgtctcggaagcattacagaagcacctatgcttggattttcttcacggtaacaattttttttcaccagaacagctgagatgcatagccaggggatccgggatccttgtaacaaccccctctttctttttttataggagaaggggagaggaggttgctgcccagctcgcccatgcgagctgggatgcttgctttacaagcaaccatgctatcgaaatactctgg

SEQ ID NO: 45761 - DNA, 450 bp, Glycine max
  unsure (1)..(450): unsure at all n locations
catgcacaaagtgccagtgagttcgacttatcgtgtgtcacaatggccagagaagtggccagcaagactaaccaacataccttattggttgacaaattctcaagttggagtttatggaaaacctgcccctgaagattttactgctgattatggacactggaaacgtatagtgtccaagtcttatcttaatgggataggaattaattggtccaatatgcggaatgtcatggatatgagatcagtctatggagggtgagtgaaatttgttgcttcccatgttactctgaattatattaaccggccattntgacatacttcactttgtttttgggctacaggtttgctgctgccttgaaggatatgaatatttgggtcatgaatgtggtttcagtaaattccgcagacacactttctcttatttatgagcgaggtctctttggcatgtatcat

SEQ ID NO: 45762 - DNA, 492 bp, Glycine max
  unsure (1)..(492): unsure at all n locations
tctgataatatctgtgagttctacactctaacctatcaatatcttctatgtttgttgacattttttgctgctatcatatttaatggatgcatttcatgtctgaatgccaacaaactgtacgttcttgccagaacctgngaaatgtttgtctgggcattctaaatggctctgaagtagggttggaggaactgaatctaattggaggtaggaattttgttgtgttgttactatatcttttcttctagttcccattttagataatggatattacgattcgttaattcctaacttcttcagcagttttcgtcgaaatgttgtgtaaactctgcactatgtaaatcttggtatttattgtttatgcagacatatccatgcaagacaaagtgatggtgtttgaaaatgagaagcaagtgattggttggtgacctgcagattgcagccgtatccaaaatccggagatgtcagtattngatcataaaatatgcatagttc

SEQ ID NO: 45763 - DNA, 455 bp, Glycine max
  unsure (1)..(455): unsure at all n locations
gtaattcaacattcaaacaacacagactatcacagccaagataatagggcaaaggcagaaaactctgcccaaaacaccaaccaaaatcacagcttttctcacttaaagaccccagtaacagttccttcgttccagttcgttaaccgttggatcgactcgaaaatttcactggaagtctctagtacataatcctacatnttgaccgttgggatctactagaanacacccagaactcattctgcatcactctttccacaaccagcaaatacatagcatttttctgcacttatgctaaaattctgctgcacctatttgacagcaaaattctgcataagtgcagatttcgaaaaaacacacatcccttcacccaatcttgcccaaatcaattcctacaagtcccaaatcatgtatcaatcatgtctaaaccanagtcaagcttcagaccacagcaacac

SEQ ID NO: 45764 - DNA, 483 bp, Glycine max
  unsure (1)..(483): unsure at all n locations
agcttgcttgagaagctagagggagggttactctcacccctccaatagctaagctcacttacatgccaaaatacatgaaaatacaaaaaaattctatactacaaagactactcaaaataccctgaaatacaaggctaaaaccctataccagtagagtacccttaacttgtacccttaatttgtagggtaccctacaaacctaaaatggccaaaatacaaggcccaaaagaaggaaaacatattctaatatttacaaagtggactcatacttagcctatgggctcaaaatttaccctaaagctcatgagaatcctagggccttctcctgcatctctagcccaatcttcttggagtcttctatccaatgcccttggggggtaggattgcatcacataacctctatggagacnagatntggaactttgcatatctcctctaagcgtctaagttggtcgacatctattatattagactgattagcat

SEQ ID NO: 45765 - DNA, 386 bp, Glycine max
  unsure (1)..(386): unsure at all n locations
gtcttatcatgtcgttgctagctctatacaaatcanacanatttgttgacagcttgcacaatgattaactcttaattgtcttatagaaggatatacaacgctatcactttagtcttttctttcaaggtgttttgagagctttttagaactatacaaaaatatatagaaagctttttgcataaagaatttgaatgagagcgtgtaagttcgtatccatgtcttcaaagattctagtatatataggctntcttcaacaagtgtctgttgtttataaatgaataaatttcttcacttgagctcgtgtctaaagattgtggtcattggagcatttaatgcttgcattaaatgcacatactctagtgaactttcgtgtngatcactacaac

SEQ ID NO: 45766 - DNA, 281 bp, Glycine max
  unsure (1)..(281): unsure at all n locations
agctntgagccaattctaacgaataataacttttactcggatgtccgattgagtctcgtaatatatcgacacgctcgaaattgaatgttgaagctctaagcctattcaaacaacaataacgttttactcggatgtccgattcagtgacgtaatatatcgggacgctcgaaattgaaagtggaacctctgagccaactcaaacgacaataactttttacttggatgtctgatagagtgccgtaatatatcaagacgctcgaaattgaaagaggaacctcttt

SEQ ID NO: 45767 - DNA, 435 bp, Glycine max
actattatactcagcttaacattatactctgagcgtctcgatatattacgggactctatctgacatccgagtaaaaagttatttggcgttgaattggctcataggctcaaaattcaatttcgagcgtctcgatatatttcgggactcaatcagacatccgagtaaagagttattgtcgtttgagttggctcacaggttcaacattcaattgcgagcgtcccgatatattacgtcactgaatcggacatccgagtaaaaagttatagtctgttgaatttgctctgagcttcaacattcaatttcgagcgtctcgatatattacgggactcaatcagacatccgagaaataagttattgtcgtttgaatcgtgtcataggttcaacacttcaattcgagcgtctcgatttatgactggactcaatcagacatccgag

SEQ ID NO: 45768 - DNA, 469 bp, Glycine max
  unsure (1)..(469): unsure at all n locations
agcttctgtagaacctataaaaacacatatatttgacttgacgaatattatatgtatgaacttaactttaaaagtaatcaaagttataatntatttcaatagtttcaattaatggaataaatcatgtatgtgcacctaacgaaatttttattagaaattgcttgaaagagtgcattttctacaaacttttttaggctttcttgagagaaatgatttcgaccactcacaaatcgtataattactctccgtatttacaagataattttagctacttattatttatataatatttctgaaatacttaaattattattcaaaatattcgatatattatttctgtacgtatcaacaaacgtgtacatataagttaaataatgcttanagtgataatagcataattttcttttatgtaacataattngctcaacacagaaggtttttttntagaggaacacataagtattattta

SEQ ID NO: 45769 - DNA, 488 bp, Glycine max
  unsure (1)..(488): unsure at all n locations
nngacattaaatntccctctaatattaaaagccaataaataattaaattagccaaaaattaaaanaattaaattttttcttaatatacatttgattaaatattaaatttccttttaataattgaaaacacttaaaatatctttaaatgataaaatgctagtcaattattctaaaataaaaattattaaattaaattaattntaatcttatccaatattatattttttactaaacacttttcattcattcatgaactaatctactatccaaaattattaaatagcattattcaatttaatcaattcattaattaatcatgatactataagtgagacaattttttatttaaaaataattataattntttaggtatgacattaaataattaataattaanaaatgattcaagactaanaggattcattacaatattcanaatagtccatcgaatcttccatgacannatagtcaatgactaactcaatatc

SEQ ID NO: 45770 - DNA, 461 bp, Glycine max
  unsure (1)..(461): unsure at all n locations
agctntgagagttccncgtgaggcatcatgatgggaatgtcctaatatataatgccatacggtatacatgcttacttttctagaatttgaaactctcaactcatttcatggtttcaactggttagttttcataatgaagcaaaaatttggcgtcaagaatgactagttttatgtttaacttggagagttttaaagcaagaatagataattagattatgcattaaactttntacagtctaaaatacaataatacattcagcaagatgttgcatgtccctctttcattttttttttgtatggttgccaagatatattttaattnttattgatgcttttgatgtgcattgattagatgtatttatgatggatgaattggtgtttaaatgttgataggataatttagtgtggagggtggatttgcatgagaatcgtcttgatgaagtaactctcgtatctgatat

SEQ ID NO: 45771 - DNA, 440 bp, Glycine max
  unsure (1)..(440): unsure at all n locations
ctccaacacttaagatacttagctcgcacttccttagccaatcttatgtcggctaaacggacttcatacttgacttgattgttcatcgtcccaaacttgaaccttagggattgctctacgattatttcatttgggctttctatgatgacaccagtcctactccctttttcattggatgaacccatctgcatacaaattccaccactcggattgtagctctgtagttgttgtcaattcgacgatgaagtctgctaagcattgagccttcgttagatcccttggtttgtacttgatcccaaactcgaacaactagaccgactaacatatcattcggtttgcaagttctggtttcatcatgactgttaagatatggtggttggcttaaactatgatttgatgactntggaagtatggtcttagtctcctagcaactgtgacta

SEQ ID NO: 45772 - DNA, 410 bp, Glycine max
  unsure (1)..(410): unsure at all n locations
agctntcataactgaagtcaggtgcatccatctccctaagagtcctctcatgaggtggagattgagtcatgttctcagtatgaaaattagcagtcgaatgctcaaaatcagaatgttcaaaatcactagcaacagaatgctcagaatgctcaaaatgatcaggatgcacactatgcctaactaatctttgaaaggttctctctatttcaggatcaaagggttgtaaatcacctggattgcccctagtcatgcactatatgcagcaattcatgtatttctcaaacaagcaccaaagggggtaaaactacaactatactcaaatgatatccaaatgagctgaaaatttgtgagcaacaccctaaaatcatgaaaagatagcacanaaattttcatacaaaaattcaaagtct

SEQ ID NO: 45773 - DNA, 391 bp, Glycine max
  unsure (1)..(391): unsure at all n locations
tccttaatcacctcattaaggactagaacaccatgtatgatgtgtctgttttttatgaaagttgtctgcctctcatcaataagaccagatatcacttgtctcaatctatttgctaataacttagctatcaccttgtacatacatccaatcaaggagatgggtctgtagtcatcaaatgactggggatgtttaattntgggaatgagagctatgaaggaagcattactgcctctagggaaactgccatgtacatggaattcatcaacaaatcttctgaagtcagctntcagcatatcccanaattctntaatgaatttgaagttgaaaccatcaggtccaggacatttgtccccatcacaactccatactgcttctttgatctccaaatctg

SEQ ID NO: 45774 - DNA, 458 bp, Glycine max
  unsure (1)..(458): unsure at all n locations
agcttcgatgtgatgacatgaaatctaatactgtggtgcgaatgtgagaattgagggtgaattcttgctgaaatcatctttaaagtgagttggttaattcgtggtgagtgaaagaataaaatccaaatgatttgtaggacatagggccttttataagccttttgaaccttgccccatgtgtgtttgtctcacagagtgcttttgggccttccttcgtaatgggttagtccatagcctaggtgtataccataacaaatgtgtagtaagaaacacctactacttcacttcaagacttgttcacacttganattcataaagcaaatataaagagaaacgtcttagtaaaagatctaagcaacaagaacttctagaaccatgacacgtgaaaattaagaagaagttgtcccttaacctttttatttaacannattgtaggttcactaaaggaaagcaacaag

SEQ ID NO: 45775 - DNA, 469 bp, Glycine max
  unsure (1)..(469): unsure at all n locations
ctattacggacctataaaactcagctttggttataaggatcgacataactttctgttaaaaacaatattgaatcaatcacccgaacatagtactctntcattaaagtgcatcaatttgaaataaagggtaatgagagttaaagaaaagatagacaccaagatttatactggttcactctctatttctggagaagttaatctagttatctaattcaacctgaattagattttcactatgcagtgtgagttttacaagtaatcacatcaatttcaaattctacctagaaaatgaaacttaggcagccaacccttgggtcctttgtgaatctaagcctaagagaaacctactattagcttcaaactagaaacacttattctagcatgaagtaaaactcatgcacatgcagtaacaatgtgtaataaccatatgatacagagtcaaggagagatacaacctttacattcaaat

SEQ ID NO: 45776 - DNA, 351 bp, Glycine max
  unsure (1)..(351): unsure at all n locations
agcttctacttgcatggcttatacactattagattgcgcctcatctcagctcttatactttatctttcgatgcaactccatggccgaaaatcaccattgaaggaccttatcgaagctcanagacccacaacttcatagaagcttcacaagaaagctttcatcaatattatacttagactatcctaaagaatgatagctctttctattggaaacccaagattgctaaccatacctctaagtcaaatcccatcctgtattgcttctagtagagcacgcattctaccttctgtgcggattaaaccacaatgggctaaggagattccttcgaactatcaagagagttgcctatga

SEQ ID NO: 45777 - DNA, 294 bp, Glycine max
aagagaatgagagagatatagtgatgcgtgcgctgcccattaagacagagaatagctaagtgcggaaaagctagtatatagctggaatataaagaaataggctgatctaaagatgaatgctctcctataacctaagctcttgcatcctagataaaccatgaattgttgcaggccagcctcgttacaagcctacaaaagaccttcgaattcagtttgcgtgttcttgactgtatggcatgagatgaattgcaagattgagacttttgtaactgtggatagcgataaaccaaacac

SEQ ID NO: 45778 - DNA, 416 bp, Glycine max
  unsure (1)..(416): unsure at all n locations
agctgtcaaggacgtaggtgctcacgaatatcttgacactagcagccctaagccaccattcttgtgttttagcttacatttgtagcgttnttgagcttccctataagttagtattgctattcttcaaatttttgcttcccattgtggagctttagtactttagttgcttgcttcttgcaaaatttgtgaatcaattcatatgagaatccatgctgtgatttgtttaattgcggggctagaggggatggccatacgcctatcttgagttttgatatgaatggcgatgtcacattgcccccgttcctcattttttntcatgcttaaacatgcgcccaccaagtgtttggtgaaatgcctcaattgcatttacgcgtgattntgtgaaacttagcttgtggaacgaatngtgcacatat

SEQ ID NO: 45779 - DNA, 364 bp, Glycine max
  unsure (1)..(364): unsure at all n locations
ngaaggtgtgtagcccaccatctatgcatagtagaatactggtaatgagtctactatcacgagtatgctctccctttccatcattgggggtgccacttgggctgatagatccctccaccttttggcgcattctttgaaagttctgtgcccccttttttgcacatgttcagtaattgcatcctatgcgaagccattatactgacactgcctaacgaacgcaaccactaggtccttccaagaatggacgcgggaaggttccaagttagtgtaccaggcaacagctaccccagtaagactttcttggaaggaatgtatcaacaattcctcatcttttgcgtatgcctacatcttccgataatacatc

SEQ ID NO: 45780 - DNA, 464 bp, Glycine max
  unsure (1)..(464): unsure at all n locations
agcttccacaacatccaagtaattcattattcaaacagcacanactatcacagccaagaaaacagggcacaggcagaaaactctgcccaaagcaccaaccaaaatcacagcttttctcacttaaagaccccagtaacaattccttcgttccagttcgttaaccattggatcgactcgaaaattntactggaagtctctagtacataagcctacattttgaccgttgggatctactagcaaacatccagaactcattctgcactactctttccacaaccagcaaatgcatagcgattttctgcacaaaaccaaaattctgctgtacctatatgacaacaaaattctgcataagtgcagatttcgaaaatcacactttccctcatccaatattggccagatcacatcctacaagtcctaaatcatgtatcaatcatgtctaaaccaaagtcaagcttcaaaccaca

SEQ ID NO: 45781 - DNA, 418 bp, Glycine max
tacggacctataaaactcagctgtcaattgtgagcagaatttggagatatacacaatagtctaacttcaatatctgtaaattccacaatttacataacgattctggaagagttttgaagccacccctagaaagatttaagtatcttagatgttttaaatgaccaattgatgacgacaattttcctcttcgttcacaatgaagcacacgcaaagaataacatttcaatacatgaggagaaagttcatcagtataggccagaggccaagttcgacgaatatcaagcaaaggttgcaatatataggtcctcagagatttgacttgatgcatctggattgaatcggctcgctcagatgataaccacctataatatgagagatggtgacttctttcggacaaagttgttacaccattgtcatt

SEQ ID NO: 45782 - DNA, 457 bp, Glycine max
  unsure (1)..(457): unsure at all n locations
natacatctatctacagtgctcgaccaagccttgcggaagtacttattatctgttgacgctgcctcgtaccgcttctcaagctcttcacgtgtaaaagcttattcaccaaagatttctatgagggagtgctaacgaacaaatgctgggggctggatctatctggtctaaaacaagcggtagaataactatctgacttatagagccttctcataaagaagaggtgctcgtcaccatcgactactgggagctaatctacctcaaatacaagttgaaggttgaggaattcacaccaccttcttgtggtcgttaagtgatgtcacacattgagggtctatcgataacgaactggctaggccaattttctgagagctgatgtacgacacctaaaaaatcaaatgtttattctttaagctacagtgacttggcttgtaacattgcggatctttgagcacttct

SEQ ID NO: 45783 - DNA, 307 bp, Glycine max
gattttttccttaatactctgattcctctattatggatttggtatttcagcttatgtattattgatgacttcagcaagagcaagagatcaagtggctctcttggatcaataatctctgatgatgtgtatgatatgctggatcttgcttatcatcacgtactacataatctcgtccctacacgggtcacaaggtgaagtattgtgatgttatgtagctagactcgtgaaccagtgatcaattgtttgtttaagaaaatacattctaatatggttatcgtgatgatcgtcttagaatgttagacatact

SEQ ID NO: 45784 - DNA, 269 bp, Glycine max
  unsure (1)..(269): unsure at all n locations
cacataacatatggtcgaggggaccaatattccttaccttagacacctgaacattgaatgaatttagaaaaatcccctgaacgcattaactngcttgcatcatgcttgcggtntaacttattctaacaacgatcttgctgattagtgttttagaatattggttagaaataaagagaaatatttatatataaatgataagaaatcataaaaaaaacgtcacaagtgtttactgttcaataaaatattttattttaagtatttctccatgt

SEQ ID NO: 45785 - DNA, 271 bp, Glycine max
  unsure (1)..(271): unsure at all n locations
gtgctgtgtgactaagaatgctagaaagccatatatttttgtatgagtgtntatgaatctgtcattctagcgtatgactgcttatggatatcatgaacatacaaaccacgtttcttngaatgtanggattgtaagtgactatgtatntcaatgacattgtgcatagcacaaaccaaaatctctaattaaattcgacaacaaggatggtgtgacaggtactatatatggcactactacaaaatatagatntaacatcgcacgattaacatcg

SEQ ID NO: 45786 - DNA, 262 bp, Glycine max
  unsure (1)..(262): unsure at all n locations
gcgagacttacgtcatcttctgcaccttcgtcaacctgaccagtgatgtcaggtgacatgcggagatacccaaggcgttatccgtatanacactatnttgctatccgtcanactcagagtccggtagcatgcagagactaacgtcgtcttttgcacnctttgacaatcangggcaagcaaaccccgtgacaagcagagacttacatcgtctntagcacctttgtcatcctgacccatgaagtcnggtgacatgtggagatac

SEQ ID NO: 45787 - DNA, 665 bp, Glycine max
  unsure (1)..(665): unsure at all n locations
ttccgtgacactantaaactttngnanannttgantanttttttttatttttgtnantntntgnnnnnnnnnnnnnnnnnnnnnnnccagtcaggatactatacttgctcgagctctatnnnnnngcnaagtagtccatcctctctaantctaatcnatttctgatgtcaacacataaagtacgatcatctttacacggtgcatatattcttatagcaacactcatgtaatctatgacgactaataaagtcgcatactatggaatgaatctggtgctataaatagcgataccattacagatcgttctcataccatgtactgtagcaccgaatctgacattgcgctctatcataatattcatctcgggataccacaatcactgtcacaaggtctcgaggtgagaggcacgatcatcaccgcctctgttgcatcaataaaaacttataagagtgttatgattttgggagaagattcttgacattacaaggttcttgactactgcgaaagctttggctccagggaatactagttagaccttaattgatcctttcaatgttggcctggtgaagcgatttatcttgcactactttttgttctctgttcatgtcatgttgaccgtctgtagtgacaactctggaagtatatgactatctgttagactattt

SEQ ID NO: 45788 - DNA, 146 bp, Glycine max
  unsure (1)..(146): unsure at all n locations
tgattcctctgcggcttccacataatgcatagaggacnggcaactcaccaagaggtcttcctcgcctgacacgatgaccaaatgcccttccactacgaatttcaacttttggtggagtgtagagggaacaactcccactgagtgga

SEQ ID NO: 45789 - DNA, 454 bp, Glycine max
  unsure (1)..(454): unsure at all n locations
nagtcttctctagctagctaatcncaactactagcgttcctgacctnctaatatggtctgcgcaagctaattaatagttaacctacaggctgtaataacctcatcacagaggattgagacaaacttgattactacctaagagggtcagaattatcttagctcacataaaacaaagctgatgttagagaatatcttattgttcactgttgtagaagaccacattttactactgtgcatttactacttcatatactgttttactatactattaattcatctaaacatatatcatgttttcacatgctatttgattaccctgcatctagtcctgatcatactcgtcatcgttatttatactgaattgtgtgctcggataattccttactttgttagaaatgccaagtatgtggaatcaatactatgacgtacaaatgtttctcttatgttttcatct

SEQ ID NO: 45790 - DNA, 322 bp, Glycine max
aacagtaagcggtggcctttggtggaagcaacccagctcgcctgagcgagctgtgcggcaaccacctctctcttttccctataataggggaaggaggcagaacacattattcacccttcaggtcatgagatcacttataatagggagagaaatgttccgtgaaaaaatcatgccgggcgcttcgtacgcttcgaacgtttcatagcgattcgagaaatttccaccgtctcatcgttcttgctgtctcggtcttatcagtagtcccaaatcaaccttcattcatctatggcctgatgtctcactgttccatctttagtatatt

SEQ ID NO: 45791 - DNA, 365 bp, Glycine max
  unsure (1)..(365): unsure at all n locations
ctctaataactaagctcacctccttgagaagattccttgagaagattcttaaagaagctagagcttagcaacacatacccnctataatagctaagctcacccctatgccaaaatacatgagaatataaaaaaaataaaattcatactacatagactactcagaatgccctgaaatacaagtctaaaaccctatactactagaatggccaaaatacaaagcccaaaagaaggaataacctattctaatatntacaaagaagagaggacccaaccttggtccatgggctcagaaatctaccctaaggttcatgagaaccccaaagccttctntagcagctctagcccaatcctcttggagtcttcta

SEQ ID NO: 45792 - DNA, 554 bp, Glycine max
  unsure (1)..(554): unsure at all n locations
nnnaatgatatcgatctcattgctttcgtgaagcaagttcactgttggctcaacattatntatgatanntattngtgatataattttacanaactttgagatcaaatcatatcagatatattatttaagttagaagaacagatacgtcttacattattataacaaaaaactagtttcacagggataatatagatattaatataatctgaagtaaattctcatctatgaaataaatgaaacattcatattactgatgatatacatatatatatatgttgcattatctatattatctctctagtccggagcttggcgaattttcatggcaaagtgtaaccatcctcgcgattatcctggaaaaaagtgcttgtggtatgatttcactctctgatggtatctgggaggcgatatgtatatgttaaggttgctgaacacttctatatgacagagtgtctttatattttgctaactattgcgttctaatagtttatccctttctgttcatctagtatatgttcatcatagatctggccgttgtgagttagttggcttcg

SEQ ID NO: 45793 - DNA, 163 bp, Glycine max
agaccaatttgcttatagctacttaatgatctacatgatcaattaaaaatgccccgagctctttatgctaggtatcacatgaggaattgattaattaattatcgattaatagtgaccaattggaccaaattcctattttgtccaactaccttgcggaggcacc

SEQ ID NO: 45794 - DNA, 324 bp, Glycine max
atttataatacaaaataaaaacccgtcccaaattacagaataaacactccgttctagcttgaggagtatataaaaaaaacttgagtatctaacgatttggttaataaacatcgatggtggaaccaaatcccgagggtcagactcccttagctcatgactcacagtttacccttataaaatatcaatataccaaatttattaaaatcaacctgtcataaaaattgggacggtttaaattccggttacaatgttaactatataaccttcaacgatttgttaatttttttatgttgatggacgcttaaatattgtcatataatagga

SEQ ID NO: 45795 - DNA, 598 bp, Glycine max
  unsure (1)..(598): unsure at all n locations
attatacatctagctacttgacacccccctgtctctatcctnggtagaatgggaattccatcctangtcattgtatggcananagtcnatagttggctcanaaggcctacacatggcanaacataatgtacgtggcgacatctattnggtcaatgattcanaaagagggaatgcccagatcattccatgaaacgatatcatgatactagaaatcatgcaaactaatcctagcacatatccatgtggacactcaaatattaggctntgtggccacacaaacactaaggcttatggctcatttncaaattcaggccanaccagtgtttcaaccgttttatcangtcatgcanaatgtctgagtccattcttgcattcgggaaaagtcttctttgtntcaccctctacgtgcacatttctttnctttcannaaaactttcgtgttttgatccgtgaatnntnncaagaaaatngcgatcatntcttttataacatgtagtttagtttttatagaaaagttgatccaggcaagtataccgagaaatactttaaggcaaggcgctgaaaaaaacataccatcccctttttttgttgacaccat

SEQ ID NO: 45796 - DNA, 233 bp, Glycine max
  unsure (1)..(233): unsure at all n locations
cacgagcatagaatcgcggatgagtatgcccaagtatacgcggaanaagaggctagaggaagggtgatcgactctntacaccaagaggcaaccatgtggatggaccggttcgctcttaccttgaacgggagtcaagaacttcctcgcttggtagccaatgccaaggcaatggcagacacctactccacccncgaagagattcatgggcttctcggctattgtcagcatatgat

SEQ ID NO: 45797 - DNA, 123 bp, Glycine max
  unsure (1)..(123): unsure at all n locations
attctataagcatatgcacatatatagaaagtgatcaatatagcacaacttgtggtcatacgttacggatagagagagatcaaacagacaactgcttcatgaatngatcgaacgtttcggata

SEQ ID NO: 45798 - DNA, 545 bp, Glycine max
  unsure (1)..(545): unsure at all n locations
tgggatttcagctagctctatatagctgaaccatctatcaatanacacaagttgagtttattcagaacatagatgttatctcttcttatctagtgagagtgattctcctanattcttgagtgattcaagaacaccctggctgtatcanaggactntcacaacctttgtgtgttgccctcgctggaaagagtgattctttcctttctttcatcttcaccctttgtctttcagaccacaattccagattattcacctctgcccagaattatctcgtggcattactcccttntacgcactcaatttagtgattcttgacctaattgaattcaaacagaccttccctcttttgagcacctatttgagccttgactcagtattgcattctatttctgcaagcaccctaactacgttcctccatcatcttatgcaaaccactttaaaccacaattaccctatgtctcttctaacattcgcttctcaggtaccaacaactgaaccctgctgagtgcttctggatcaatcagttgtccctccttcgaattttg

SEQ ID NO: 45799 - DNA, 153 bp, Glycine max
  unsure (1)..(153): unsure at all n locations
tgacttatcgntnngatacgaagctatggattttcttnggggttagttgtatgtatcatttgctcaacaatccgtgtttcatttcatgttggcatcgtttctatctgctgactcgatcattagtcacctcattgtcatcttgctttcaccctg

SEQ ID NO: 45800 - DNA, 264 bp, Glycine max
  unsure (1)..(264): unsure at all n locations
tgactacctgaattaattccttgtagcccttttatgctcttgttccctnntcttgntttgaagctcactacaagcctttaagtgaaaaccatgatattaccatatccttaaagaatattggagctttggaattgtttgngaataagtgtgggggggttttgttcattggacaactttgttttgtggctatgcttcatgatgtattttgggccatactcgatatacattgtatacttggtcaatgttggacatgctgaatgaaat

SEQ ID NO: 45801 - DNA, 409 bp, Glycine max
  unsure (1)..(409): unsure at all n locations
ttaagctaatcttgtgtcttctgangactcgtgtaatacttgttatctattaatgatgtttatgtggtctctgtgctatcagtacatcatttcagcgtgcttcttccttgatcaagtagatcatgctttgtagagcttacagtaaatggctatctaactgaatggtgcttactttcaactagtgcattgtgaatttgtcagctctgctatggggcctccaccctacaattaatccgatatccatctgtatgataaagatgcactatagaactgtaagcattacatgcaacatctaacccttacatgtccctcatctgatatcccatatgctcttgactattcttcttaaaatatttacatcactaaactctgcaataggctatactactatacctgggcctgcttctct

SEQ ID NO: 45802 - DNA, 247 bp, Glycine max
cggtatgtatgaaatcatgcattttgatatgtcatgaagttgtacaactcgcaaatttgttaataaccctatagttaactacagatgatcttaatccgatagtttggaaatgtatagatattatcacaattgtgcatcatatacgcagaatatgtataaccatgctaatttactaagttacatgaagcttgttgtgtcaatatatcacataacacatcgatgataccttatagatctagcctcagaa

SEQ ID NO: 45803 - DNA, 176 bp, Glycine max
  unsure (1)..(176): unsure at all n locations
ctcatgcgcttagcgcagatctagatcgcttagcgcgcataagtggatattggcttatcgcgcttgnttcgcttatcggatgagctaaagcggtgcgcttgatgacttggagcggtgcgcttatcaaacttgacagctcatcttgttctggattcttcctcgtacttagccactta

SEQ ID NO: 45804 - DNA, 238 bp, Glycine max
  unsure (1)..(238): unsure at all n locations
gcttcttgttgttctacatgatctgcctcggtaanaacactacgcagccttcgttaaccagtggagcttctcgacatgtggtctgcagcttcanaacacaantttccatgatctgaccgttgggatctttgcgaagatgtctgaagtgtgcgtgacatttccgtgtccgagaccatntctcacttgagcgtttccagcctttgctttcgtgtagcttaagaaataacaccatttcttc

SEQ ID NO: 45805 - DNA, 170 bp, Glycine max
  unsure (1)..(170): unsure at all n locations
catatctactgaatcttggagctatatatggaacgagatgaaaagatgtgagtgtactggatacgctgttcctctgatgagaacaatgatccagagggaatggaggaaggaattggtgntcctgtgacccggaatgtcgttgactccgactcgtggatcatttatgcttc

SEQ ID NO: 45806 - DNA, 264 bp, Glycine max
gtcactctttcatcttagagcagatgacctaatcacttcatcgcaatgctacatttaacaagcatattaatataaggcaaaagtctattatatatcaagtcatgcttaatttagaataggctggaataatctattacctgattataacatgagtaatgatgacactccatctaattctttgtaatctcatcattgtgttagcattcctccagtctgttgtgtcatcatcgttctaactcattatatataacatacattattgct

SEQ ID NO: 45807 - DNA, 155 bp, Glycine max
  unsure (1)..(155): unsure at all n locations
aatcgacgtctgaaatcactggtgctggcaacttggacatatgaactcgtacaaactactgagaattggtcactggcgaatttgagctgaaacttttactgaattgtcaagacatctggaanaaagttgtaaataaagaaacaagtgatttggat

SEQ ID NO: 45808 - DNA, 193 bp, Glycine max
tttacatataatgctaccattaattgatattaataatctatctatcttttctctaatctctaattttaactaatctataatattaactcacaaatatcatataatctctcttagatattgtttatattcatgactatcagcctttattaaattgctataatttttataatattattttaacattctatatcct

SEQ ID NO: 45809 - DNA, 160 bp, Glycine max
acaagctggactatgataactataataccccccccccacactaatataatggtaaaatgaaaattctaagaacatactgatgggagggtataaagtgcataccactactaaacatgcccttctacaaaaatgtcctctaccctacctcacatctaaagaa

SEQ ID NO: 45810 - DNA, 351 bp, Glycine max
  unsure (1)..(351): unsure at all n locations
atatctatgtaactacagatanatataacttctgctgatcatacaaaacctatgtggatcacgtcatagcatacgcggatcaagcttaacgagttgtgtgcacaacaacaattnttataatacacgggagtatttttgtcttttcacgtaaggtgctgggtgcacctagcaactcccgtattggtaatgttcaagcatgacatttaaagaaagtnattgtatcgactaacanaatgaaagtaattggatgttacatatatttaagggttaattntattcggtcctataatttaatcctctaattattaaaaaagttaagtaagacttataatctttataagcataatatta

SEQ ID NO: 45811 - DNA, 106 bp, Glycine max
actatatcttgtcttctatttcccattttacataatggatattacgaaatcgtaattcctaacttcttcagcagttttctccgacatgttgtgcaactctgcacta

SEQ ID NO: 45812 - DNA, 277 bp, Glycine max
  unsure (1)..(277): unsure at all n locations
gcgagactacgtatcttctgcaccttcgcatcctgactgatgatgtaagngacatgcggagatacccaaagcgttatccgtatatacactatttcgctatccgncaaactcagagtccggtagcatgcagagactaacgtcgtctttggcaccctttgacaatcaggtgcaagcaaacccgtaacaagcagagacttacatgcgtcttagcacctgtgtcatgctgacccatgaagtctggtgacatgtggagatacccaagcggtatctcgtacaa

SEQ ID NO: 45813 - DNA, 177 bp, Glycine max
  unsure (1)..(177): unsure at all n locations
ccgtcgcttcgacgtcgtccatcggngtcactcacagccgatgtcgccactgcatcgagagcacgtggacctcgaacccgacgtgatcaagaggcagcagattgttctgcaccaagcgtcgtcgacgtaaaaccacgcgatgtaggagatggagtgatgcatctgcctcatgtgtgc

SEQ ID NO: 45814 - DNA, 189 bp, Glycine max
  unsure (1)..(189): unsure at all n locations
gtcacactctagtgcacatggggccagtagatagtccagatgccaccccctcaccatcgatcacttttgtgactgctgacattacttgggaatttacgtctcatccgcacctggagtggcttgaagacaccaatntttatctgggcatggaagtacgtcacgatgctccataattcatatagacccaac

SEQ ID NO: 45815 - DNA, 244 bp, Glycine max
  unsure (1)..(244): unsure at all n locations
ccaacataccttattggntgacanattctcaagttggaagttatggaacacctgcccctgaagattatactgctgattatggacactggaaacgtatagtggtcaagtcttatcttaatgggataagaatatattggtccaatatgctgaatgtcatggatatgagatcagtctatggagggtgagtgaatattgttgcttcccatgatactctgaattatattaacgcggccattntgacata

SEQ ID NO: 45816 - DNA, 150 bp, Glycine max
  unsure (1)..(150): unsure at all n locations
tttttttaataagtagttacgataagatatcttactcagcgangatcgaatacagagtgaatgagtgacttacaatcaacaatctttaccgagttgatgggcgtcattgaactaaaaaagggacttaccttcacacatactttatcgtgt

SEQ ID NO: 45817 - DNA, 222 bp, Glycine max
  unsure (1)..(222): unsure at all n locations
ggggggagggaggaaaagaagattttatgtgaaggaaaaaaaaggagaagtgnnaaaagaaaagacaggagggcgatgaagaagacaaagaaaaaggataagagaaaagaaagaacagaagagggagagaaagaggaagagaaagagggtggataaaagaaagggggggaggaaagtgaatgagatgggagaaaaggaatgggaatagggtgagagaaaaaa

SEQ ID NO: 45818 - DNA, 588 bp, Glycine max
  unsure (1)..(588): unsure at all n locations
nnaacatacatctcagctgaccgacaccacatctgaatctataccnaagaaatctcaagatattctatatgtcacatctctcatttggtctcgaatggctataaatgcctatatattgcgactcgacacacgaatgtgctaatagttnttcagaacagaaaggtcttatcctcttaaaaagcataatcgttatatcctcttacaaagttccttggcaaaacactagtgattcaataacgatatatgtgagtgctcagatagatcatctatctgtttcaagagagatgtcttcttcacttcttctgtattgtgaagacggattaagacaagggatcaagagaccgatgttctcttgttgtgaataaatctaacacaacggatgattgttgcttgcgtcataacttgaagaagaattacaagaagtggactctcagctggtgcttgtgactggcgatgcacataggagggccgaccattatattgagttgacttctctcgctacctctcattatattgttagatcaagcgattggcttttcgacaaactctcaaccgttctatgatgaaactgataaactattagcttcg

SEQ ID NO: 45819 - DNA, 249 bp, Glycine max
  unsure (1)..(249): unsure at all n locations
tcttggtgataagggtctcatacaagtcttcatagagaagactattgtcngagtatgggcaaagtttgataggtngtacatgaccaaatccctagtaaatgtctctatcttanacaatgaatcaagaaaaacctatagtagaatagttagatatggttaataatttaattcttggattgganaacatngatgttactatagatgatgaggatcaagctntgttatttactaaaaacacatgtacacttc

SEQ ID NO: 45820 - DNA, 178 bp, Glycine max
  unsure (1)..(178): unsure at all n locations
aataagtgtctcgttaattgatagatacagctatacgaccacgatcacctcatgattaatanaagaaaaaaaacatgcagaatctaggttgagagaaacagtangcaacacagtggcagactctgaagttggaagctaatgccattacgtttgggatcctatatcacgactgcaactt

SEQ ID NO: 45821 - DNA, 316 bp, Glycine max
  unsure (1)..(316): unsure at all n locations
acatagaccacagactctngcaatangtgcagacttctgatttatggcaagctgagttacttggttgaccaaggcatncaagtttccttcaagaattttcttgcactngaattttaggagttggaagccatcttctcaatcanattcttagcttcagaaggagtcatatcaccaagagctccaccactggcagcatcaatcatactcctctctatgttgctaagtccctcatagaaatatcgaagaaggagttgctcagaaatctggtggtgtggacagcttgcacacaatntcttgaatctttcctagtactcat

SEQ ID NO: 45822 - DNA, 175 bp, Glycine max
  unsure (1)..(175): unsure at all n locations
tgagcctatacacttgagctngagtaaaacactgactgtgacggctttggtgatgattctttccttaatatntgccattctcactagcttatttcagttgtgactctaatgcatatgttcctatctttganaagctacatggttgtaaaacgcaaatgagtgaagcatttcatga

SEQ ID NO: 45823 - DNA, 442 bp, Glycine max
  unsure (1)..(442): unsure at all n locations
ttttctaattttgtttttaaaataananttttaatttatnnnnnnnnnaatttctttgttagaacannccnnnnnnttttttttngnnnnaaatanttttttaaannaaaggggggttttttttttttatcttaccccccccnagnnnnttaatatttgttatattttatatttgtttttattttaatttaattatttaaattttatttttaatttttgttttattttttagatgttttatttattttttttttttttaatgattttatttttttattatttttgtttgtgtgattttaattgaatttttttttatttgtttttttgttgttttttattgtatttttattttttattgtgaattgtgtttttttttatatttatgtttggtgttgttattgttttcgttttgattttgttgttgtgtatatgttttgttttt

SEQ ID NO: 45824 - DNA, 68 bp, Glycine max
  unsure (1)..(68): unsure at all n locations
tttttcgcgggggagcgggagggggaaaaaaagaaccccccccccccccccccncaaagaagggaagg

SEQ ID NO: 45825 - DNA, 452 bp, Glycine max
  unsure (1)..(452): unsure at all n locations
ngcatctgctgnctccgggcacatcgtgtnctatgtaagaattatcgcgaccttccactctaaatttgtcctctanccgagatggtgcaggcatctgataaatcgatgaaatacttccacctttctgaaacctcatgatttggaggagcgaagattcttgctatctaaaatggctctgaggcctacctcacagtagctcaagcttcctcccctgagggattgactgtgtgaggcaccttcaattttagagactacccttaccaacggggcttcttctctactgtgccactcacctatagtcataacaggcactattatgatatataaaggaggatgcgtaccttttacaattttctcacacagatcctactgatctcctatctattttagctcgacctcgtccgcctaacttccccacattctactaaacgtggatgtacacgacttgagct

SEQ ID NO: 45826 - DNA, 238 bp, Glycine max
atgatagccgccgatgatcccattactgcttcctctaagctctctgtcctttcttcacgccgcatcccatgccttgcaaactccttggagtaccctcgcgtttgtggtcactgaaaccccatgcgatgaaaggcatgatgctttcatctgatgacacttctctcatggggtagccaagctgtcttatggcgaagactgtgatataattaatacaaccccttgttccatcaagagaaca

SEQ ID NO: 45827 - DNA, 237 bp, Glycine max
  unsure (1)..(237): unsure at all n locations
tatcttagtgagagtgattctcctacattcttgagtgattcaagaacaccctggctgtatcanaggactntcacaacctntgtgtgttgccctcgctggaaagagtgattctntccttcctatcatctccacccttgttctntcaaaccacaattccagaaaatccacctctgcccaaaattatctcgtgaccatatactccatttcacacactcaaattaagtgattcttgagcct

SEQ ID NO: 45828 - DNA, 291 bp, Glycine max
  unsure (1)..(291): unsure at all n locations
ttatgatcccaacatgggtggttcatggtgcctaacacatgcaactaagaatgtagtgtgaagtttcacgcttccccttttntgtttttgttttgtagaggaaaacgcaaggatgagcaacatngaaacaaatggtatgtcaatttgcagatcanaaagtttgttgacccatatgcatgatgatgccatgactcatgcaaaatatgaagctggaatatgataacggacaaatgcanngaatgatatgttattatgatgttatgaagagatgcttatgcgatgcatgatatg

SEQ ID NO: 45829 - DNA, 268 bp, Glycine max
  unsure (1)..(268): unsure at all n locations
gacttcttccaccccggataccaaggatgtttcgaatcactntccaatgtattatatatacgggcatgtgcttactaaaaagactcttgtccaagatcatgaatcatatcctctaatcgatctcccatntctacatcaattggtttagtttgggacctcctttgcatgtctgtcaattcaccatgtcatatccatgttgtagaattcttcttcatcccatcacatagaagttcttcccgtatgtctattactngtcatctattaaaac

SEQ ID NO: 45830 - DNA, 470 bp, Glycine max
  unsure (1)..(470): unsure at all n locations
gttaatagggggacaaccgacccttctaaactaaactgaaaccatatatataattcgacaaatatggggtgccacgttaagggtaaagaatctacttcaatataccaaagaagagaaagaagaaattatgatctatgatttacatttataatgatgatgtacagatgtttagggttagatacactgtcctgccaaactgcatgaacataatatactaatctaagccttctctgattnccctctctgttggacagtctaatgactaggataccataccaataagcattaagaacgctattgatgccacaagagagacccatgtatgcgatntcaactgatgctatactcatttcatcataaacaacacataataggtacttccaacagactatagatgatatatcattgtacacggagatatcaaatatatccactaatgacaaatataagatcatgccgatgaatactgt

SEQ ID NO: 45831 - DNA, 173 bp, Glycine max
  unsure (1)..(173): unsure at all n locations
gtgtactctcaatggaaatacacttatgagaataacctctaatattttntatcagtgaanaactctataaaaaaagggtaaaccaaaagacagaaactccaaggaccttataagtccaatcagctgagcccactgagcatcaacagtactccattgatcccnctcaataacca

SEQ ID NO: 45832 - DNA, 568 bp, Glycine max
  unsure (1)..(568): unsure at all n locations
aagattacattgctttgtganntgaccgannataatgcctactcttagactgtgatnctttgctttaatcttgactgaaaacctctttaagagaaggtgcctgactcatccatgttcactccactcgaacaaaaccatgcgaattaaactccacatctatatgggtggatggatgaatctttagaaatcatatgactcacatgcactntataatactggaccctggaaattgtcgcctcttataacaacattttggctcatggctctcccacatgtatttattaatgcacaccgacctacctctgttgatacattgctgggtatatcacacatactgactataaagtaatgccactaacgcctttcctagatctcttattctccgatatccacctctatcttatatgataactgttcatctctgattctatgacttagccagtanaatcagatcgatcattgttcacaatatctattgctagaacccttttatgtgcttgtacgactctcataataactacatcccagattacacatactttgcatataacgtacatccatctacgcg

SEQ ID NO: 45833 - DNA, 539 bp, Glycine max
  unsure (1)..(539): unsure at all n locations
agagatgacgattctcatagctgaataccctanntctgtngagtaggtcttcttcatatattaataatgccattctttttactctattagttgncagtaacttgccatcaactgttttagtctatcattatgaacttgcactcccgctattgaagacncttcacacgtgttgcttcgttcaaatgtcttcattctgaatgatgcgatgttatcacttggctaccaaaactttaatgaacacactatgacttcacataactctactctattgtgcagttttggaaccaacctcctttaatagaataaaactcttattgattcttaagtcattaagagtatactcttccaacggaattgagctcttcctatttcatcctaaactaggcataatcttttactcttcttttaacttgacctatactcgaattatcatttatactcctcatttttatatgtgatcgtcactgtgcacatttcatcatattttattgatcagtttccagatttaacgctactcaattatatatttcaacgtaact

SEQ ID NO: 45834 - DNA, 155 bp, Glycine max
  unsure (1)..(155): unsure at all n locations
ctgatcttgactcatgangccttcatttgtatttccctggaatgcacggaagcaaggaaagatgaaaggagccctccctccggataaccatgaagaagaacttcccaccaaaatgcctggataaaagctgaagagagcttatggagaaaaagatg

SEQ ID NO: 45835 - DNA, 214 bp, Glycine max
  unsure (1)..(214): unsure at all n locations
acattatntccatgacacanatgcaanaatgatgaattggaaactntatgcacaactggtcatgtatgcacctatgcggacactcaagtgtcaatatnttatggtcatgtgatgctacggctcaggattcatttcctctattatagtcaacccaatgttctcaaatatgttcgtctatcaatatgngcattcatcctaaacgaagaactctaca

SEQ ID NO: 45836 - DNA, 284 bp, Glycine max
  unsure (1)..(284): unsure at all n locations
ataatatcccanncatccaattccaactatcatgaactaccctaatccaagattacagggcataggcatattactctgcccataacacattcacatattacaactgttcttactcatatacctcacgaacattcttcttcagtctaattcgtctaccgtaggtctgactncaaatgtgactggagctgcgcgtacatatatctacattatgacctgtggagctacttataatgacttaacccaatatgtctaccttactataacacttagttaacttgccatac

SEQ ID NO: 45837 - DNA, 236 bp, Glycine max
  unsure (1)..(236): unsure at all n locations
atattcatatctatactttttaacatcatttgttatgaaaaaaatagtaaaataaaataacttatttttctttttctgactntataataaatataaattaattattatctacaacttgatataataagaatataaatgcgatataaaatataagactcgactctaaggtgtgatgcatgctctctgcgaattnttccatgatatattattagtcatatgcctaagattaccttctt

SEQ ID NO: 45838 - DNA, 189 bp, Glycine max
  unsure (1)..(189): unsure at all n locations
taccttaatntacaattgtctttaccattatcgctatttttaattccganggatcaactttattaatatgtgtgtaaccaaagttagatgtatatcactctcaatacatcaaccttttcagaacgctcatatgtttagatgcaaatgaatgggcacaggcagaactcagagtgatntagctattatctt

SEQ ID NO: 45839 - DNA, 629 bp, Glycine max
  unsure (1)..(629): unsure at all n locations
aaggtgtgcagtcatcttagacacanntgcccaanatanaccacaanaccgacanaaaaatgctatctcttttttctactaataggatgaatatggcaagaggaccataatataacatagaatatgcaacacacacggttttgaaaccttcaacatgaagagaaaggaanatctaaggctgcgacacgtgggacnntttttcagtttttggtcattntgccccttccttntttgcaccatnttgttntgttgccaccaccatgtgtcgcgttgcatatgaagtntcaaacatatgtcactccctgattggcagattcaactcccccattaatnntcactctatattcgaaanntgtccctcctctcccccgttctctgccaccttnntatatatcatnnnatatanntatnngtgnnngtgtnngcgnntnntgttgttgtgtcgttgtngctattattattatcattattattactatccacanccancatcacttnctgtaangtacgcgaatacctggtaggtcatttaatctcgtactgcgtatcgtcgttctattcttattacgttttacgtaataccagtgttcactagtatacgtcttactaacatctgtcactgtcacaaa

SEQ ID NO: 45840 - DNA, 413 bp, Glycine max
  unsure (1)..(413): unsure at all n locations
ttttttcaattttgcttcaatattccttcaaagcactagaaatcttcttcttttaacttctgctaataaaaaactgcaaagatattaatntctttattatttcattaaanacaacaatgaagtaaagaacttgcaatcattcttagccaaaatngactatcaaattaactcaaatntcgtagttatcattgtgttatacagaaggaaaacacatcaaactcaacgttaaatattcaattntatagatatagaattctgtgttgatcaaatggtgatcgatcttcccttttgtttaactatatgtataaaaaaataatttatatattaaattatatgactccctaactataatctacttntgaatgggaaaaaaatatgaaatactatccactaactcactaccctttcatcaa

SEQ ID NO: 45841 - DNA, 61 bp, Glycine max
  unsure (1)..(61): unsure at all n locations
gcatgacggtgctatgcttaaagctgaaaggttgcaccttatcctcaccncacagtggctg

SEQ ID NO: 45842 - DNA, 250 bp, Glycine max
  unsure (1)..(250): unsure at all n locations
ttcacctcatcctcaaatntaatctgcactgattccaactgggcaagaatagtattaaattcattaatatgatcagttacagagataccttctcgcatcttgatgttgaacaactggcgcatcaagtatactntgttggctgccgacggcttctcgtacatatctgataacgccttcattaagcctgcagtagtcttcttgttcacgatagtgaacgctacggtcttggcatatgtcaatctaatcatgt

SEQ ID NO: 45843 - DNA, 168 bp, Glycine max
agaaaatataacaaatgcatctattcgttaatttgtatgtggtaatgaaagagcctatgtgacacaaagactacaaaatatcacatgaataatgtgcaacatgattacagaatataatgattcacagtgtcatacatttttattagactaattttgagactccaaatt

SEQ ID NO: 45844 - DNA, 611 bp, Glycine max
  unsure (1)..(611): unsure at all n locations
nnnaatatcgtatgctactgtgatcggaactcctnnctctnctaancataattcactccattgagtatgggtttctcatttgtgtttggtgccaaatatgggacagcataacttggttgtcctaattcctctcctaacaaggataacatannaagtgatatataaaacaagtgaataaatacaagctaggctaatngtntattagcaaggacanaagtgtgcttaaatgtgacagtaccaacaatatcactaatggntcttccattggtgaaacgtcctgtgggatgttctncagaagccttganatcatattcattggagggaacgtctgtcttggaaaaagttgaaagaatttggtcgtttctgcatcaaccaatgagtctcaangatgaataaagctgttacttancgatctgactactactattccatgaaacatatagtccaagccaagcaaagggtaaataatatgattttcaatgcctgatttatgatcacgacgtctttccgccacatcactatagcccgtcttgcgaaacctatctatgtaccctaagtgctttatctcctattactattacttgtattctattatgacctccatactatct

SEQ ID NO: 45845 - DNA, 284 bp, Glycine max
  unsure (1)..(284): unsure at all n locations
atacccttaagctaaccgacgaactaattttggatgaaatntactaccggcgacctttaacgtatgcaagtaatcaatttcggtttcaatgtatgcaactgaaagatgatgctgatgttaacacaatgttaatgtgtaatcatgagatttcgtctgttggtccgatgagttattatgtagcattgctagaaccccagatggtatttaaacttacctgatactactatgaccnctactcatgatgctctactatataacaatnggaggttgaacatgtcatgtca

SEQ ID NO: 45846 - DNA, 130 bp, Glycine max
actttactcgatgctgatgagtctgtttattttatactctcgaaatgaatacggaagctctgagcatattcatacgacaataaccttctactcggatgtctgactgagtcccatcatatatcgagaagct

SEQ ID NO: 45847 - DNA, 163 bp, Glycine max
  unsure (1)..(163): unsure at all n locations
tagtttgaaaagaaagtgtacctgtggacgccaactacaagactattggcagtacgccatatagatatccaactatntactgatgatcgctcatccatttggcaagtacatgatcacaccacgacataccctcttcgtctacatanatccatggcagctgaca

SEQ ID NO: 45848 - DNA, 388 bp, Glycine max
  unsure (1)..(388): unsure at all n locations
tatacttaacagaaatacatataacattacataataaccacatatcgcgagagctcgatacaatntatacaagttttatacacaaaagttagtcattttcaccgactaacacctggctagcccagaaaactcctaatcttaataacagaattaggactctcccactcaagaatggcttctatcttagagggatctacaactatacccncttgagatatcacatgtcctagganactaactntctctaaccaaanatcacactttggacacctataaataaagttgtcgtgtcctaaaggtatgcagcataatcctcaagtgttcttcatggtcctctctagtctgggagtatactaaaatatcatctatgaatactaccacacaacta

SEQ ID NO: 45849 - DNA, 631 bp, Glycine max
  unsure (1)..(631): unsure at all n locations
atggagaatactatatgantactaagcctcacccgatcacgccatcgaacatntcctaaccgacgtcatgcaaatntcgntcatgtatttgattgaannactcgtaggcgacatctgtcgtgaagtatcgaccgatatttttcacccgacatcgcacaattctttctagaaaagctcgctggtcgattatggtctttttacagcagagtaagttntctcgttttggtgtcgcataanaaagttacaatgtacttccgctatggttttcgtgcgagttcaaccgacattatgtatcggccaggagaacattatcccacctcttgcaaaaaaatattngctaaccgtcttcatgcatatttcatgctaacgaatgantatgaaacctcantagcccgcaaccggtcgtgaaatagtcccgactgatatntntcaacccgcattgcgccattttgtttataaaaccgctcgctggcgaattatgttcttcacacatcgaggaagatttcctgatggttattcgtataaattaacaaagaggccgctaggttttttgtgcactcaaccacgtcttttccgcgaactggctgtatttgcctgtaacatatcccactcgcagaactatattgcgact

SEQ ID NO: 45850 - DNA, 262 bp, Glycine max
  unsure (1)..(262): unsure at all n locations
tgcttatatatcaactgctgaagaatctagtgcgtgtctcttagctcaagataccatatactacactganagggcagntattatctaagtatgctatttatatgatgccacatcaatatatacatatatagagaaactcttcttggcactatgtgatgcttgcatcatactggaaatgtgatttatgattgtatgctgattaaaactgatattgagagagacattgtttttcttaatgataaactaatgaaatggaccatca

SEQ ID NO: 45851 - DNA, 589 bp, Glycine max
  unsure (1)..(589): unsure at all n locations
nnaagatgcagatctgatactagcttgacagtgctgtttaccnttcgctagccatctgctggctatctagcgtcctgttatctcaacactcatgggctaagcgtgaggaagactctataagaagatgagtngtacaggttggttaagcacactgcttcatctcactaagtgcaccgctntagttcatccactaagcaagaaaggcacgcgctaagccgaaattcactaatgtatgctaagcggtacataagtgcgctaagcgcacgagcacgaacaaggccacctatntaagcttganatcagaatttagagaaggagctttggactgggattcanggctttgcatgtctagggcttctagaaagaaaaaaggccaaacttccagaagagttctgagagatttgctgtgtaagatctgcnagacagagctanagcagtaccggttgaagcttgaatgagttggatgatgtatatctattgtgaagaacatctcacacttgattttgcatcttcatctgactctcttgtgaagaaagctctgtatgaactaatcttgtgactcttgagactgagaaatattactattaag

SEQ ID NO: 45852 - DNA, 231 bp, Glycine max
  unsure (1)..(231): unsure at all n locations
acataaggcatagaggatgggcagctcaccaagatgtcttcctcgcctgatacgatgaccagatgcncttccactataaatntcaacttttggtggagtgtagagggaacaactcccactgagtggatccacgggcgccccaacagacagctgtagggagggttaatatccattatttggaaagtaacttgacaggtgtgagggcctatctgtactangagatcgatctct

SEQ ID NO: 45853 - DNA, 232 bp, Glycine max
  unsure (1)..(232): unsure at all n locations
cagctgattgtacaaacaatttttctttttaatctcccttctgctctccaatttttttttgatcagcacaggtaatctatatattaattggagtaccagaggtacttaatagtacataaaggaccatacaaatggttccacaatcaaacattgatattctgaaagggaaccagagtatggatatatattngctatganatntacattanatagcctcgtaactggtgagtgt

SEQ ID NO: 45854 - DNA, 216 bp, Glycine max
  unsure (1)..(216): unsure at all n locations
aacaatatttcttggatacttctccccganataaaacatgtctgataatgagagatcacatcnggcatgacagggtttaaccgattaactaagatcttagttaagatcttataagctatgctacacaaggagatatgtctgaattgactaacacacttatgctttgcacacttaggaattagacagatgtcagtcatatttaccgtactaacctca

SEQ ID NO: 45855 - DNA, 140 bp, Glycine max
  unsure (1)..(140): unsure at all n locations
ctgagctcacgtactcgcacgtagcccatatnctcgtttctctcaacaccgggtccccatcaatccttccaagcttncccaacatcaaagtaatacaacattcacacagcacaagctatcacagccaagcaaaacagagc

SEQ ID NO: 45856 - DNA, 397 bp, Glycine max
  unsure (1)..(397): unsure at all n locations
atgttacttcctcgcngaccatctttggcttgaatggaattgccatgacaagcttatacgtactgtctctgatatttggtagttgatattgtgctgcgggaagtaattccgattggataactcgccatccttatcttgccaacttgttatgacatctgttgttagatcacctatgatgtctttgttccaagggtaatctatatcctttctaatggcataagcatgacaccaatcaaagataaggatattaattttgactcgtacgacatattcgtagaacttgtcttggattagtttctgtctgtccctagtaatgtaggaaaacatctccttgagttattcttcgaaatagaactttctaaggttcctttaagctaagtgcaatacatctaagtca

SEQ ID NO: 45857 - DNA, 197 bp, Glycine max
  unsure (1)..(197): unsure at all n locations
gtgtctttgatgcactgacgtaaagcataagtgtgtctaacacactgacataaagcanaagtatctctgacgcactgacataaagaanaagtgtctctaaccttgggttagattaaggttagtggtcattgtttaaggacctatggttanggttagtggttagtgttacggattagagtgtacgttcagttattata

SEQ ID NO: 45858 - DNA, 234 bp, Glycine max
  unsure (1)..(234): unsure at all n locations
gacaattacagaattgcagatntcctaaatccttacaaggtagacaaataatgtntctacaggatgcaacaatgacagcgacacagcatgttgtagctgtgacatcaccaaacagccctccactttgtgttctatgctgtcagaaagatccttataagccacgtgtatacttaacactaacaaaatactaacaattaacaactaatatttccggagaaaaaaatacttgacact

SEQ ID NO: 45859 - DNA, 198 bp, Glycine max
gaacaatggaagctctcgagaaattcatattgtcataacttctcactcagaggacccattcatgcggataatatatatagacgcttcaaattgaacaacggaagctctcgagatactcagatggtcattacttttcatctggaggtcctattcaagcgcatcatatatagagacgcttcgaatagtcaacggaagctc

SEQ ID NO: 45860 - DNA, 251 bp, Glycine max
  unsure (1)..(251): unsure at all n locations
tgtgcttatgaataaattataagggtatataaatctgtngtatatacatganaatatgataacacattttccattttttctactaattcatantttaaatctattaactccatcttanattaatttatanattggtcatntgtacaatatttgtctntaatattatattgaatagacatattgctatatagtactttaattaccgtctgtaattacccttaactannactaataaaatataaaccttatct

SEQ ID NO: 45861 - DNA, 623 bp, Glycine max
  unsure (1)..(623): unsure at all n locations
nnaagtcggtctgatacaaccttcttccctntnnttgctttacgttactatntctgacccttctatattttctanacngncnctgtngccgtggcggcaactacctctatntcttattctcggacgctcatctctttnctctcgaccattactagtttatcactctcctgacttgtcatatgtaatacctnctctttctgtttcttagttccatcctttacaacaagttggttctccgaagccaccacatccttatcctcaactaccaaacgcttcttgtatcaggacattacaacattacattcctctttgggattcatttctgtgttcgccccatagctataggatgactgntctactaaatcgtntggcttggtgacgcacctggacctcagggtcttcaatgctgacttattgcttgtgcgattaacatgggcacctgcatgaattgaatcagagtctactccaactcggatgtcctctgaaaaatgttatagaccttgtggaagctgcatgttggatagacaccactgacctatgtcgattgtcnacacggtggaacacactgtcttgtcgatgtaggacctatcggaatcttacaatcacctcgtatggttctnccg

SEQ ID NO: 45862 - DNA, 216 bp, Glycine max
  unsure (1)..(216): unsure at all n locations
atggaatgagcctatacacttgagcttgagtcacacaatgactgtgagggctttggtgatgattctttccctaatattngccattctcactagcttatttcagttgtgactctaatgcatatngtcctatctcttgaaagctacatgtttngtaaaagcaattgattgaagcattccatgatattcatntcatatgattgaatttctctatgaagc

SEQ ID NO: 45863 - DNA, 261 bp, Glycine max
  unsure (1)..(261): unsure at all n locations
gtctctgcattgacattaagtaaccagtgactcaacgaacttagtggagggtgaactaactacctgccanataccaccaataaaaacgtgaaaggcaatgctatctaatactaatatgctaatataaaantattgggttatcnntttagtnntttctttatatgaagntagaccananannattttataaattattctaaaagtaaaggtaactntnntaataaataattttntattaaactntaaaagagagacagaaac

SEQ ID NO: 45864 - DNA, 178 bp, Glycine max
  unsure (1)..(178): unsure at all n locations
ctccaccactggcagcatntatcatacttctctccatattactgagtccttcatagaattattaggagatgatactgttctgatatctgatggtgaggcaactgacacatatgttcttatatcactcacagtacctcatacatgctctctcctctgagttgtcttatacctgagatat

SEQ ID NO: 45865 - DNA, 363 bp, Glycine max
  unsure (1)..(363): unsure at all n locations
tcgattacagctnttngaanataattagaacgttgtanattcagtttgaaaactttntcanactcattttgctactggtaatcgattacaacaatatggtaatcgattaccagagagaaaatactctttggtaagaggttntgtcanaaactcatgtgctattcanagttntgaanaactntttaatacttatcttgactaagtcttttctttattcttgaatcttgatcttgattctagagatncttgaaccttgaatctngattcttgattctaagctttcttcttaagtcatgaattcttcttgaatcttctctcgagctcttgacttgtacttgattcaataagaatgtacttaatcac

SEQ ID NO: 45866 - DNA, 578 bp, Glycine max
  unsure (1)..(578): unsure at all n locations
tatattgttatcttcatntttgtgtattatttttnntttaaattatntntntttnnaatatccaaccctggtaanacctncccnnaattatnattatgtnttgatttttttttttttanaanaattatgagggtgaattcttcntgcaatacaccactttaacggaatgcacgtatctatataaatgctatataaattattggttatctttatatatttttatataagtagaccaataatatttaaaataatgctatagtataggaactttgtaataaaaatatcttataaaacttaaagaagaaaaacttaaatatagttatcactgcaaatgttcatactcaccaatagagangaatactgaaatatgctatatattacgaactacaaatatcatctgccttgcacatacataagacaacattactaattaatagaagatcttctgagtgattacgatgtaaatatcatgcttatagtatataaataggaaactacaatattacattatcattaatctattaataaaatattaattgtatgaatgataatatacaacatattaactaaaagaatgt

SEQ ID NO: 45867 - DNA, 323 bp, Glycine max
agggttttaatttttttgaaggaagagagaaaggagagggaaagagagtaggaaaagaggagggagggaatgagagagggagaagggggggaaggggaaggggaggagggaggaggagaaagaaaagaagaaggaggaaaaaaaggagagaaggagggaggggggaaaaagaaaggagagaaaagaggggggggagggggggggagaaaagggaagaagaagagggggaagagaagagagtgaaagagggaagagaaggaatgagagaatggaaggaaggaagaaggaaaaaaggagagaggatgggaggaaagggagaaaaa

SEQ ID NO: 45868 - DNA, 353 bp, Glycine max
aatcatgagtcaacacataaagaactttatctttacacggtgcataaatccttatggcaactctcatgtagtcaatgacgacaaagaaagttgcatactatggaatgaatctggtgctatgaagagcagtaccattacagattgctctcattccatgttctgtatcaccaaatgtaacattgcgctcttcaatagtattcttttggtgatctccatatgatttcaacaaggtcatgagggaagaggcaagatctacaccgccactgagtagaccaagaagaaccttaagacgcgcattcagattttgttgagacagatctcttgtaacattagcagggttttctggagtgtat

SEQ ID NO: 45869 - DNA, 373 bp, Glycine max
aacaagcacacctggatgtgccaagcgttccatcactttatgcagaggatcagaacgcacacacatttgacatctttgacttctaacgctatagggactatatgcgtcctgtcccatctgcacagcctggacaatacaggatgcaaatgttgtcatattataaacatttaataaagccattcatatctatagataaacgatgcaaacttggcttataatacaggctgacaaagacgctaacataggaaaggaattcccttattccaagagtatggcttgtctgactcactccattcaataccttattattgacattgaatgtcatataaccacatcctggatcgagaactctcatgtaatacatcacgtctac

SEQ ID NO: 45870 - DNA, 547 bp, Glycine max
  unsure (1)..(547): unsure at all n locations
agacctgaaccactcgaanancntacctatatttgcataagctccctaaatctcgatacatagcgcgaataaagagacattcttgaattttttggagattctagagatatgtcccgagaccaagtgactccaatggttattgcttctatcctcgcacaatgtcttaaacacaaggaatggctaaaactatgaggttgaagtgaaactgtgttgcactccacgttccagtgttcaactattcgaatgttacaactatcaaccatacacgaaatatctatgtccatcacaacatgttgcacttccacagtatgattgaactaaacaggactacccaacgcaatgctgacgcactaatattaccggaagtgaaactctaaactgtatagtgacgtctacacacaccgcatcgtagatgagcgcagtctcatgataacctacattcgctaccttaattaccaatgcacccactaatattaatgtgttctccttgaacgaaataatgtgaacggaacacatctttctggatctcttaacgcacatattccag

SEQ ID NO: 45871 - DNA, 404 bp, Glycine max
  unsure (1)..(404): unsure at all n locations
gtatggtggtcagcagaggagcacanaccacanacccttgcgacaggaacatatntctgattcaaggccagctgggttaccaagttgaccaatgcatccagtttgccttcaagcttcttagtttcagatgatgcaaatgggnttgtagctacctcatgcactcttctaatgactatggcatcatttctggtgcttaactgctgggagttggaagccatcttctcaattaaatttctggcttcagtaggagtcatgtctccaagggctccaccactggcagcatctatcatacttctctccatattactgagtcccttcataaaatattggagaacaagctgctcttgaatctgatgggtgcggcaactagcacatagtttcttaaatctnctccagtactcata

SEQ ID NO: 45872 - DNA, 484 bp, Glycine max
  unsure (1)..(484): unsure at all n locations
gctcgtctcagcgcttatgcgagacagagaccaacatgttagctatcatctccaagtactaaggagagttaggtctagccacggcccacgagcatagaatcgcggataagtacgctcaagtatatgcggaaaaagaggctagaggaagggtgatcgactctttacaccaagaggcaaccatgtggatggatcggtttgctcttaccttgaacgggagtcaagaacttccccgattgttagctaaggccaaggcgatggcagacacctgctccgcccccgaagagattcatgggcttctcggctattgtcagcatatgatagacttaatggcccacataattagaaaattgttaggaaacttgtatggtctctcagaccttgactagatacgacttccttnttgaaatacaatgagttggtcccatgtttctactccaaaaagcttgtgcaaatcaagtcactcccgcattntatctctagcacg

SEQ ID NO: 45873 - DNA, 557 bp, Glycine max
  unsure (1)..(557): unsure at all n locations
agacggacggatgagcattgatgacttcatgcactgcancncncgatgcagctaaaatgattactgaagagcncaaggattatttgaaatctttattgttcacgcaacgcacttgataccgaatattgtaaatgcaattcaatgcaccacgagaacttatcatagagtatgtgatccaatgctagacactagacattctcaaaagctaaacatactcagccaccaccagtgtgagaaatttccactctttccaagccccagatgacaaaagacctcatataacatataacatccatcctacagtaagaanaagcaaggggtaacaacgtcagagcanattaacactatccttcaggggagcagaaattagctcgggaactagactcaggatatcatatatgacacaacaatggctatcacatgcggaaacacatcatttcaacgtcttaagcagaatgagaagagactaaatataaacaaaggagcgacggaaggtatagatacactacatattacgtgagctctcaaagttcataaactaggaatagatctgcatg

SEQ ID NO: 45874 - DNA, 144 bp, Glycine max
atatgttgcaacttacgggcctgtcatgcatatgcacaatatgaggagcatggaacactcatgagccttacgacaacagtatcaaatgggagggatcatagccacgacgcagctaatgatacaggatcagccgcctgattatca

SEQ ID NO: 45875 - DNA, 522 bp, Glycine max
  unsure (1)..(522): unsure at all n locations
gagatgccgaatgcacctgaggcatgcaagctgtaaatataacaagattattcgttccctcatatctctaatcagcctttatgtacctgacacgcacctgattttcaatcatttgatcctaacaagttgattaatgaatatatacaanacacgaaaactaatagaagaaaactttggaaaattcctaagcattaataagcttcaaaagatatgaaaatatgctactatcaagcttctaatcaaatctttttttggaaccagattcgttattttaaactgattcccctctctgaatgtaagctntggctaataaaatcttctcgtactacttcatttcgtggtcacaagaccttccaacttttggcaattcagattccctaattagctacaacccactaccctgagcaatatataagcatagcttcacttgcatattcttacacaacctttcccttcaattaagaaataaaacactccttgttctttcttccccttatcattaatctttctcttcctttctag

SEQ ID NO: 45876 - DNA, 408 bp, Glycine max
tgctctattggttggcgagttggtccattctctctaagtctattcgaatcatgagtcaacacataaataactttagctctacacggtgcataaatccttatggcaactctcatgtagtcaatgacgacaaagaatgttgcatactatggaatgaatctggtgctatgaagagcaataccattacagattgctctcattccatgttctctaacaccaaatctaacattgcgctcttcaatagtattcttttggggatctccatatgatttcaacaaggtcatgagggaagaggcaagatctacaccgccactgagtagaccaagaagaaccttaagaggtgcatttagattctgttgagacagatttcttgtaacattagcagggttttctggagtgtatgtcggaagt

SEQ ID NO: 45877 - DNA, 330 bp, Glycine max
  unsure (1)..(330): unsure at all n locations
agcttcatgccacactnggcatatgcatgtnaattactatcatgtangcatggcaccggcgcggngcggngtcgtggagtacttccccgctctctatccccgaatcttaccctacttctcgtccccgctttttggggtggaggtattntattggcccatctccgtttcccggctcctggcggagacatgtgaaaacccgttttatattataaaatgtcataaattataaaaaaaatctataattgtcttttatctctatttttcaacaaataataatcaatgtgtcaattctaagttaaaacatgactaaaatatcaaaataaataatat

SEQ ID NO: 45878 - DNA, 434 bp, Glycine max
  unsure (1)..(434): unsure at all n locations
atgcgagacggagaccaacatgctatctatcatcttcaagtttctagaagaggtaggcctagccacggtccacgagcatataatcgcggacgagtatgctcaagtatacgcggaaaaagatgctagaggaagggtgatcgactctttacaccaagaggcaaccatgtggatggatcggtttgctcttaccttgaacgggagtcaagaacttccacgcttgtagccaagccaaggcgatggctacacctactccgccccgaaagatcatggcttctcngtattgtcgcatatgatatactaatggccacatattcaaatcgtaggaaactgtatggctctagacctgactaatcgacttcttgtgaataaatgagtggccctgttctactcaaagctggcaatagatactcctacattatttacatcattttttc

SEQ ID NO: 45879 - DNA, 462 bp, Glycine max
  unsure (1)..(462): unsure at all n locations
agctntngcataattggagagttctagagagagaaatgtccaagttccagaaaagttgagagaatntgttgtgtgaagatctgcagagaccagagctggaagaagaagctgtcctgagagcttgagatgagtttatgagcaattgtgaggttctagaggtggaggagacattcccactacttgtatttctgcaatctgtcattctcttctctttgatgtaaaggaagcttcccagttatggaaagctaaatcctttgttggatcttccttgtaagtagttgatgtaaatatctttntatctatttaatgatgttttgtgtgttcactgtgctatcagaacttcattctaccatgctntcgccttgatcacgtagatgccatgtgttttaggatctttcaacagtggaaactggtctgattcttagaacttgataagacagggccagtttgtcatattttcac

SEQ ID NO: 45880 - DNA, 378 bp, Glycine max
  unsure (1)..(378): unsure at all n locations
tacttatgtggcagggcgagcttncttcacttccttgtctcaatctcgagctntgaccaccgctcttccttcccgcgatgcttctctttatatctgcctgagtgggcttatagcctaaaccatacttcccacgatttccttttgcatttatcaggctagttatgccgtcngtgtctttgcctaaacccattatgggttcgtaaccgttccccaacataactcgggccatcattactgctgcatcggacaagcaaggctgcccagagaaggaatccacggaggaaatgcttaccacctcgaaagaatggaaagcggtttctaatgactcctctgcggcctccacataaggcatagaggatgggcagctcaccaagatgt

SEQ ID NO: 45881 - DNA, 455 bp, Glycine max
  unsure (1)..(455): unsure at all n locations
agcntttaatagctaggtagggtgtggtggtttatatacatgtaacagtcttaggggtaatagcttgtgtctctgtattcacaagatccacatgcttattttctatcaatagttgtatctatagtacctctggtacttcttcataataatatatatctatttctgctgagcaaaaaaaaaaaaaaaaaaacgtagagccagcgatcaaatcgcacaagctgtagcgatttgtggttaatgttgtcgttccttcgcgttacctcaccgaagacgatcgcatcgttgatcgagttaatccagaatatgaaacccctgggaggttcaagaccaaacgcttcttgtttgggtacaatctacactttcaaagtctatattggcaagagttcttggttccaatcactcgtatcaagtgtgggacanaatccttgagtactttagccttcactccaaatctc

SEQ ID NO: 45882 - DNA, 410 bp, Glycine max
  unsure (1)..(410): unsure at all n locations
tgaagactattttattcctgccttccctagacttccagtgtatcaaaatatagtcattggctataacagatatgtagcatacatgagtgtgctgataatattcccctccactttgaattgtgcttgttaaaattataattctcctttgaacatgaacattntttcattccaattgagctctttattaagaagggaaacatgtaagtgattttctgaaaactcccacattcaccaaataatataccagggatatcaaagattatcatggtgaaagaatcctaagtttaagctatgcataagataaccaatttttagtgctgaagcactttcaaatatttaaaacccaccgcatatattgccactaaacctggcctcactaagctgtttatatattttcactctataccaca

SEQ ID NO: 45883 - DNA, 447 bp, Glycine max
  unsure (1)..(447): unsure at all n locations
agcttcaacacgatcatcagatgcattcagtctttgttactgttatgcatcacaatcacgaaggtgaaattgatggtgccaatagaatgtggagagaaggaatgtcctcggttacacaatcaggtacaaaacagcaaacacagggagtcgaatgcaccctttcatcgatggaatcatgaaagtacatttaccacccagatggaagacgctgaacatagaccgttatgatgggctatcagacccagacgagcatgtaggcgcattcatgatgcagatgaatttattcaccaatgaggatgctcttatgtgttgagtgttccctaccacattgaaaggtgcaacactccattggtataattgcctaccacacaactcaatagactttnttgcgacgctcattgcgaaattngaagcacaatatgcgatgagacaccacaccaccttact

SEQ ID NO: 45884 - DNA, 378 bp, Glycine max
  unsure (1)..(378): unsure at all n locations
tgtggggctcaactcagattgaatgagacaaggagcttaactaacagagcaagccaaagaggaggaggtggtgaatcgagaggagctntgaacttgttaggcatgggactgagttctgggttgtcacctaggttcctctctggattatttacgaaagaaaagccagagaagactagggagcataaagacgaaaatattattttgatgggttccttaccaagtacctctttatgatcacaacctgtaccgtctatatcttaagttgatcagctataccatccatattacatcttaggatgtttcttcaataatcacaaatgtccatgtattcagtttttgaatttgtcattcgttgtacaaaagaaatatattcatgta

SEQ ID NO: 45885 - DNA, 450 bp, Glycine max
  unsure (1)..(450): unsure at all n locations
actaaatcagtcagacacacacatgtatccttaacacgaaattctatgattaanaacatataacttctgaatataaattcatacatgcatatatgtcacaacacaaagtttcctttgttaatctgagttgtaattgtttagggtggtacaactctaacttaatttaattctacatcatataattagagactntaattagtcaccaactaattaaactaaaattctacttttaaaccagttatatagttatntacaaaaatggtctccactctaaactcttatgagttcattaccccttttctaattcaatggaatctagatcaccattaatcaaccttaattatcctcagttaatttctaagtttacttacattaatntataattntctttcaagcttctaatttctatttctagaccaaaatccaattattaacatctaggtcattaat

SEQ ID NO: 45886 - DNA, 385 bp, Glycine max
  unsure (1)..(385): unsure at all n locations
tctagccaaatggacttacctggaattaattcctttgatagccccttttagcctatgttcccctttctttgttntgaagctcattacaagccttaagtgaaaaaccatgatatcacctcacccttaaggaatattggagctctggaatcggtttgggaataagtgtgggggggtatgtttcattggaagatatgattattggccatgcttaatgttntattttggccatgcttgatgtatctatatattgcctagttcttgctttaatcttcaaattcgttcttcanaaaaaaaattcagaagaaaaattcaattgctgcagattcgtactgttaaaaaaaacggataataaagaaagatgaaaagaagtgaagttgaataaatg

SEQ ID NO: 45887 - DNA, 388 bp, Glycine max
  unsure (1)..(388): unsure at all n locations
agcttctatcagacctggcggcataagtggtccctcccatggtcgaaagggagatgattaccatgatggtagacaccttgccagtgttttactatgagaagttggtaggctacatgccttccagctntgtggactnggtatttggaggggaatgaatcgaagtagtgttgaaaagagggaagttcgattacatttcttccaccagtaccaatgctaagagagtcggagcaaccggtgcaaaaaggaaggaaggagatacctatgccattacttcggtgcccgcatgggtcaagcctccacagacctcttatggtacgcatcagtacgcgcaacatcttccgagcttttcagctcgcgccgggaacttctccaattctgcacccgtaca

SEQ ID NO: 45888 - DNA, 209 bp, Glycine max
  unsure (1)..(209): unsure at all n locations
cttcgacgntcttcattcgttcttcatcgttcttcagacttcaacgggtaagtacctcagaccaagcttttcgattcattctatgtacccgtggtggtccacactcggtttcgngtatttntattctcgtttcatttactttatatacccccttttgacgtgcttaagccattttatttaagtcatttctcgcttaacctaaaaataaa

SEQ ID NO: 45889 - DNA, 483 bp, Glycine max
  unsure (1)..(483): unsure at all n locations
cacatgagccaaccatgtngggatcatatacccatttcacttataaacaaaatgattgaacagggtacctaatgcatggttaactaagaaaagatgtttcttcaggcatctcaatctcataattacatntgccatgcatagcttaagtatgcttgagtcattcatctctatgaaatgttgttgaagtattggcgatcagaatngccattcctttggataccgggttgaaccaagttcatgctnttacgannaggttcatcaagtcaagttgaagtatggaagtaaccatctttcaaaaaattggggcgaaagatggattgagttacatcgctgcttcgtctatggccaaacacatttagaactgggtgatgtcgttgtacttcctgtttcaccatgacaatctannatgattcaaccccatatcatgcgtaanaattcacaatacttcaactatgcatcattcgcatacatccatgcttttca

SEQ ID NO: 45890 - DNA, 543 bp, Glycine max
  unsure (1)..(543): unsure at all n locations
attattaaggatgaaccatgattcgctgactcactgtctaagctccatagattcctcttcaaccatggagtatactttggagagggtggtgtgatgggtgaacgacttatcctctctgctctatagctatgcaagcctactttggccgactccttcacttttctctttctttgactcggtcttgggtgcataggacatgtgccttatcgacttcatgagtatgatcctttgtcacctatatatggaggatgaggatgaattgtgaccatgagtatgtgcttgacgcggtgaagactggataagaagatgtgtacaatagtcgagggttcgcaaacgtgtttgagtgtgacacatgatgtctatgttcagtgacacagggtatatatctcagaccaagcggtttttttgatctgccatatgtgtcaagctggcgtgatcgattatgatacgtcataatccgttcgagtatacccagagtgggtactaaagcctctatatgcactgtggtccactaccatccaggtgtcatcactcacaactccn

SEQ ID NO: 45891 - DNA, 457 bp, Glycine max
acaacattcaaacagcattatctatctcttccaagcaaaacagagcaaaggcagagaactctgctcaacacatcaaccagaatcacagcttttctcacgtaaagaccagcagaacaattccttcgatcgagttcgtgaacccgcggatcgactccagaattttactggaagtctatagtgtataagcctacattatgaccgttgggatctactagcatacagccagaactcattctgcactagactttgcacagccaaccacacacaagcatttgtctgcactggagcaaaatactgttgcacaatttcacagcggaaattctgcataagtgcagatttcgaaaatcacccttactctcatccaatcttgccgatatcagagcctacaagtcgcgaatcatgtagcatacatgtctaatccaaagccaagcttcgaaccacagcaacacagaatcta

SEQ ID NO: 45892 - DNA, 477 bp, Glycine max
  unsure (1)..(477): unsure at all n locations
tgtcctcattagaaggagacttagatntgtatgaaattagaatttagctaagtgctaattgtgagaaaattattgtctcttggttcttatgtagaaccctaaattcttatcatagaattcctattctttatcatgaattctcctcaacttatcactttttcttttcttctacaaaattnntcctttaatttgggtcagttaagatgctgaattatgatccatganaaaaggttcttatcatttgatatcagagcaagaattcaacattattcttgaatttgttggttcatatttttttggtggctattgaaaacgggtgttnggatttgatatgggaacttgcttgctatttgtgttacaatctgttcaatgtgcatcaaattcaacccctatcaaatataaatccaaagcggcacanttcaatttattttcagtctnttccattctaatatctaagtgtcaaggtgcttaacattg

SEQ ID NO: 45893 - DNA, 390 bp, Glycine max
  unsure (1)..(390): unsure at all n locations
tagtagagtaccgataatgtgtctactatcacgattatcgnctcccttttcattattgggggtaccacctgtgccgccagatccctgcaccttttgggcgtgttctttgaaagatccgtccccctttatgcacatgttctgtagttgcatcctatccgataccatatcaaaattgtactgatactgcctaacacaggcaaccattaggtccttccaagaatggactcgtgaaggttccaagttagtgtaccaggtaacagctaccccagtaagactttcttggaaggaatgtatcagtaattcctcatcttttgcgtattcccccatcttctgacaatacatctttagatggttcttgagacaagtagaccccttgtacttgcgaagtcc

SEQ ID NO: 45894 - DNA, 342 bp, Glycine max
  unsure (1)..(342): unsure at all n locations
ctgcagctcaacatgaattagagcgtctcgatatattatctgactcaatcttacatacaagaaanaagttattatcgtttgaaaatcctcagagcttcggtattcaatttcgagcgtctcgatatattacgggactcaatcagacatccgtgtaaaaagttattgtcgtttgaattagctctgaggttcagaattcaatttcgagcgtctcaatagattacgggactcaatcagacatccgagcaaaaagttatttgccgttgaattagctcagagcttcagaattcaatttcgatcgtctcaatatattacaggactcaatcagacatctgagtaaaaacg

SEQ ID NO: 45895 - DNA, 314 bp, Glycine max
cgacaatatcgttttactcagaagtctgattgagacccgttatatatcgagacgatcgaaattgaattctgaagctctgagctaattcaaacgacaataactttttttctcggatgtctgattaagtaccgtaatacatctagacgctcgaaattgaatgatgaagctctcagcaaattcaaacgacaataactgttttactcatatgtctgattgaatcccgtaatatatcgagacgatcgaaactgaattctgaagctctgagctaattcacacgacaataccgttatgctcggatgtctgattgagttccg

SEQ ID NO: 45896 - DNA, 490 bp, Glycine max
  unsure (1)..(490): unsure at all n locations
ctaaggtagttcctatacaaaaatcaattgatgaagcttcgccaagtattcccattgaaaaaccattattcaaacctttcaaagttagtgagaaggctaaacgaataattagggaacttagaaaaactaaatccttaattgaaggcgtaggtgacaatcatagtgaattaccaaacaaaattggtagtttacttaaggtcattccagaaactccccaaacctcggaaaatacttccaaaatggtaacaagaagtacctccaaattaattaatgttattaatgaagatagtgaccaaaactcagataggatcaatatcagaaaagaatataaatccaattaattccaaatactgganaacaccctccaaattatattatcaacgtccgactgcccctgatcttctattagaagaaagaggtgannaacaatttaagagtnntagtgcaaacaacatctatgaatggaacatagatgcacaaacggagtata

SEQ ID NO: 45897 - DNA, 444 bp, Glycine max
  unsure (1)..(444): unsure at all n locations
tcgtcgctctagaagagacaatgaacatgctatgtaaaatcttaataccgaaataaaaaaacgcatacaaatgccaaaagaggtaaaaagaaaacacagaagaagacggggagggaaaacgaacttgtaatctatccaacataccatgatctgtggcttttgtcttgcaaaggaagaagaatacttaaccacggtcaaataagattgaggaacacaaaaaaatcaatcttttgtacaaacagaacccagaaatcaaaaggagaaatgaaatacatcacaaacctgtcttccaaatgccagagactatttgttgttttcgttgttgttgtcggtcacaaagatactcaatgctacagatctgaacccaaaatgcaagagaatcaagagaaagcaacgtcgaagaaggctcaagaacaganaaatatttaacctttgatagagaaa

SEQ ID NO: 45898 - DNA, 485 bp, Glycine max
  unsure (1)..(485): unsure at all n locations
agcttgcttgcctctagctgacataatgtgcggatattcataangtatctccacatgtcatcggacttgccgtctctatatgacaaaggtgcagatgaagacgttagtcactatgtctcanagggctcgcttgcctctagctgacaaaaggtgcagataaccacaaggtatctccgcatgtcatcggacttgccgtctctggatgacaaaggtgcagataacgatgttattcactacgtgtcaacgggctcgcttgcctctagctgaataaaggaatggataaccataaggtatcttcgcatgtcattagacttgccgtctctggatgacaaaggtgcagatgacgacgttagtcattgtgtgtcaacgggctcacttgcctctggctgacaaaaggtgcagataaccataaggtatctccacatgtcatcggacttgccgtctctggatgacaaaggtgcagataacaatgttattcactacgt

SEQ ID NO: 45899 - DNA, 472 bp, Glycine max
  unsure (1)..(472): unsure at all n locations
acaacatccaagcanaacaacattcaaacagcacttgctatcttatccaagcaaaacagagcaaaggcagaaaactctgctcaacacatcaaccaaaatcacagcttttctcacgtaaagaccacagtaacaattccttcgatccaattcgttaaccgttggatcgactccaaaattttactggaagtctatagtgtataagcctacattttgaccgttgggatctactagcaaacatccagaactcattctgcactagactttccacagccaaccacacacaagcatttttctgcacttgtgcaaaattctgttgcacaatttcacagcaaaaattctgcataagtgcagatttcgaaaatcacccttcctctcatccaatcttgcccaaatcaaatcctacaagtcccanatcatgtatcanacatgtctaaaccaaagccaagcttcaaaccacagcaacacaaaatct

SEQ ID NO: 45900 - DNA, 431 bp, Glycine max
  unsure (1)..(431): unsure at all n locations
agctnttagaaatcttcggtgtctggtatataccgtcttctntccatgcttgagttggatgaagcttgtgtttttctcaaatataggacatgcatgatgccctttcccactgtatccacttaaatttccatatgctagaaaatcattaatagtacaaaacaccattgtgcgtaacctgaatgtctactgcacatttgcatcccacacatctacctcttcttcccacaattgtttcaagtcttcgattaatggcgtaagatacacatcaatatcattccctggctgccttggacccgcgatcatcatacacaggataatgtatntacgcanaatgcacaaccatggnggaaggttgtaaatcatcagtaaaacaggccaggaactgtggttgctgttaagctaccataaggattcattccatcagaagcaag

SEQ ID NO: 45901 - DNA, 474 bp, Glycine max
  unsure (1)..(474): unsure at all n locations
ctttaaactagtcacttataagtgttactcttgaaaaaatcttcagaaacaagtcacttgaagaattgtgacttttggaaatttatttttcgaaatcagtcactggtaatcgattaccattaaggtgtaattgattacacatgaacagatgtgactcttcattctaaattntgaaaattaaaacgtttagaagctctggtaatcgattacaagtattgtgtaatcgattacacaagtttaaaatgatttgaaaatgtttaaacacaagttgtaactcttgaaatttaaaatcttaacgttttaaaacactggtaatcgattactactttctagtaatcgattaccagagagtaaaactctctggtaatgaatttgtgaaaacttattgtcgtactcaatggtntgaacaactttnntagtacttatcttgattgagtcttctcttgattcttgaatcttgagtctcgaatcttg

SEQ ID NO: 45902 - DNA, 455 bp, Glycine max
  unsure (1)..(455): unsure at all n locations
agctagtaaagaacttagatattataagaacatgtttgttagaacatcgatcgcgtgtatgacatccactccacaaggtttgaagtagaggagaccttcaattctattacgcaacgtggcggacaaaaatgggcagttaacttgaatggtcattattgtcaatgcggaaggtattctgcgcttcactatccatgttcacatattattgcagcttggtggtacgtgagcctgaactactaccaatatatagatgttgtntatacaaatgagcacatcttaanagcttactccccacaatggcggcctcttgagaatgaagcggctattcctccttctaatgacgcatggacacttattcatgacccaactacaattcgtgcgaaaggtcggtcataatcaacaaggataatgaatgagatggattggatcgaaccatctgaccaccgacaaaaatg

SEQ ID NO: 45903 - DNA, 424 bp, Glycine max
  unsure (1)..(424): unsure at all n locations
aatcactaatgaatgcagatgaggaattccttacttttcaattntatttaattgaacttaattaacttttgtttagaaactntaccattctgcaaaggtttaatcctctaatgagcttgtttatattagtggaatgaaattattatgtaggtttctagtactttttcttatgtaaaaaaaaaacttaagtctttgtgttcactagcttaagcacatttgcaattgtttatatcaacctttagcaacattctaacagtaggattaggatcaatcaggatacaaggccattaaaaaatggtaaaaaatatatatactaggaaaatttttacttatatcttttcgtttaagtcatattatattatttgttgattatcatttaaggccaaaatataaggtaattctaacaaatattcgtactattaat

SEQ ID NO: 45904 - DNA, 441 bp, Glycine max
  unsure (1)..(441): unsure at all n locations
agctagaaaggaaacaccattgtcgttgtgaacaatggatccatatggaanaataaaacctaatgtggagttcacaactgtctgactgcttgtccctcccaagaatgccatagttttttgtaagagttgggttacgactganacttgtggttntttacagtgttaggttgtgtcatatatatagatgagttttaatatcagtgctgcattntttaaagattaaaaatatgcatgcacatgctttctgtatgtgttgtcaactacaccaatgacatgacatgttttagcttgcatcaaatctgcatgtgtagtcacgctgtgcaaggtcctttcacgcgctntatgttaatgcagacaacaatntatcatacacantttttcataatgtgttgtcaactcagacaacgatatatcatacatgtttttntagaattaagtaat

SEQ ID NO: 45905 - DNA, 412 bp, Glycine max
  unsure (1)..(412): unsure at all n locations
agctngaggnggtgttaagagttgttagtgtcaagatttaagactcaaccttaggctattgagattcgagaatatatggatatattacacaaatgtattttgtactattttttattgcactgttaacctagtggtatatatcatacctttaatgattcagaaaggtattggcttcattagtggatctagctagcatagactcatgccataagttgatacaatttcaaggagttagctntattcatttctgctattttttatgtatatatgaaagtttaactcanaatatcaagttgctgcgaaaaaagcctgctgaagcatggttcaagcagatagcattaaaggggaatgaagcttaattgcttctgctttttaacagttatcccaagtaccatattcaggcattgtaact

SEQ ID NO: 45906 - DNA, 482 bp, Glycine max
  unsure (1)..(482): unsure at all n locations
gcatatggatcttnttggtccttctagaactatgagaattggtttaaattattatgctcttgtcatagtagatgattattctaggtttacatggactctatttcttgctcacaaaagagatgcatttcatgcttttaagaaacttgccaaaatcattcaaaataagaaaaaccttaacattgcatccattagaagtgatcatggaggggaatttgagaataaaaactttgaattatttagtgatgaaaatgggatagaacataatttttctgcacctagaacccctcaacaaaatagagtagttgagaggaaaaatagatcattagaagaattagccagaatcatgcttaatgatacaaatattcttaaatatttttggaccgaggctattaatattgcatgttatataatgaatagagcattaattagaacctatttaaagaanacaccatatgaactataagaggggagaaaaccaaata

SEQ ID NO: 45907 - DNA, 410 bp, Glycine max
  unsure (1)..(410): unsure at all n locations
agcttcctctaccgtttataaaaacattatcggcctttgagcgttgttaaaaagtaattgcgcaatgtcaactganaaatatcagtcgggctacttcacgaccgatgtcggctattgagttntctattcaatcctttaatgaaatatttatgatgtcggtaaggaaatgttcgatcggcgtcatgcggtgatgcttcttttatagacctcgatcggtcatctttcctagcggacgtcgactgacatttntttcaatcaatatcggtgaaaaatattnttttgccgagatgggctaatgttttcgtggccgaataaatggaaacatgccagtttcggccgaaagataacgtcggttgagctcgctcaaaaaaacctagccgacctacattgtacattttttatgcaacacc

SEQ ID NO: 45908 - DNA, 186 bp, Glycine max
  unsure (1)..(186): unsure at all n locations
tgcacaggtcatagttgagtatgagagaagattgtatgaccaagtgaaggtgcatattgcgtagaagaatgatagctatgccaagcaagccaacaagaaaaggaaggaagtggtacttgaactcggtgatgatcctggacattngaggacaaatgttttccaagaatgagggaatgatgagaatca

SEQ ID NO: 45909 - DNA, 481 bp, Glycine max
  unsure (1)..(481): unsure at all n locations
agcttatcatcttacattnngtgagtttggaaaacattaaatatatgccctttgcaatagatgacacangtgagaagtatacttgcattggcctggttcanattctaaggactacaaggtatttaatcctatcaatgagaaaataataattacccggtacgtctcacaaaatgaaaatgtttaatatacttccagaatctaaccatgaagaagatattaatccttcatattcttccaatgggtgttagccactttggcttacatgtatcattaattntagcattgtatcaatgatcttcattattttcttataaatcatgctactcgggctaatggngttgaaatggccaatgatattgggttagacaaacattntgatgaaaggaataagagtgtcatttaaatntcaaacacanaatggttcataananataaatagaattccttaccttacatgnntgttgtangaaaatacaatgta

SEQ ID NO: 45910 - DNA, 442 bp, Glycine max
  unsure (1)..(442): unsure at all n locations
tctagccaaatggacttacgcttgattaattccttcgtagcccctttgagcctattgtcccctttctttgtttgaagctcattacaagccttaagtgatgagcccattggaagatatgatctttggccatgcttgatgtatatatatattgcctagatctttctttaattttcaatntcgtactgttcaataagaaaataaaaaaaaatgaataatgaaataaaaaattcagttgctgcaaattctgcaatttcgtactattcacaataaaaagaagaagaaaaagaagaaaagaactgaagttgaataaataaggtcttgatttgcgagccttggttgattntgttgatattagagggtttgggtttactacttgtgcttaatttacacttattgtccattgctcctctattcctttgggaattagctacttattccatat

SEQ ID NO: 45911 - DNA, 505 bp, Glycine max
  unsure (1)..(505): unsure at all n locations
gcttgaagatgaacttcactagcacaatgcatgaactcttgaaagtatacttactgcanacaaaatgtcaggtctgngtgcagtaagatatattaagcaaccaatcaagcttctgtaatgcatttcgtcaactttatcagctccatcatccttgctaaatttctccttttagttcattggagatgtagtgcttttgcagtcctccatatngaaacttcttgagtatttcccttacgtacttcttttggtgaatgaggattccatcatgatcttngttcacctccattcccaanaagaaactcatcaagccaagaattgtcatttcaaatgctntaaacatttcagctttaaactcctttatgagtttctcatcacttcctggcacaagtaaatcatcaacatagatagcaataatgatntaaattgcatctaccaatttcacatatatggcagcctcacttggactttngacaaatccaagatcttgaagatgatcatctatcct

SEQ ID NO: 45912 - DNA, 390 bp, Glycine max
  unsure (1)..(390): unsure at all n locations
tcaaaaagagaactaaagcaccattatgtgtatatattatgaaattacgccaagacccaacacagctaatttccaatactgccatttcataaaataagacatatgacatatgatgtagagttttattacaacaacaaaattggggtttgcatgaatatgattttaatcactctggtgacaaaggacagatccactaatgagaaggattgccaacctattacagccccataacagattcattagcttgtactccctccacccctaattataagacacttttcagaaatttatgtgtcccttnttataagatccttttctaatttctagatgcattaattattgtttttcatacataccctatcttaattattctctctccacacattaatg

SEQ ID NO: 45913 - DNA, 508 bp, Glycine max
  unsure (1)..(508): unsure at all n locations
atctaagccaccgcggctgcagcttcactgattacacgttccaataattctaatggtgtaatctgttacaagatattggtaatcgattaccagtgtgtttgaacgttgaaatcanattcaattgtgaagagtcacatcctttcacaaaatgctntgtgtaattgttacaagaatttgataatcaattaccagtgacanagtttggacaaaaatcanaagatgtaactcttccaatggtttntcagtttttttaaaggttataactcttctaatggttatcttgaccagacttgaagagtctataaaagcaagaccttgacttgcattntaatattcattacaatctttgacaacctttacaaaanannatttcacatacctttttacaaccttngaatctctntgaacttcttcttcttcttcctttgccaaaagctntctaaaaagtttttggttntcaaacctaganaacaaaaagtgtgtattcatctttntcattctcttctcc

SEQ ID NO: 45914 - DNA, 471 bp, Glycine max
  unsure (1)..(471): unsure at all n locations
cgcactntntacatttcattcctgtaagatatnnttgctcattttatttcctataatgttgtattttccaattttagtaactataagtgcaaacttatgaaaactataaataaaaaattaaaatattaaagagactaaaattgaaaaaatacaaacttacaagtattaaaaatgaacaaaaaacttacagaaactaaaattggaaaagcctcaagttatagggacttaaattaaaaaaaaatgatcttatagggacaaaaaaatgaaaaagtgcaaacttatagggactaaaaacatatttaagtctatcatttatcaaacatttttaaaaacgttggatactaaaacatgaattaaatattttccattataaaatgatttggaaaatatgcaatggtattttataaagaaccattatctaaagaggaaaagaatagagaaatatgtcacatatcacatcaatagtaataa

SEQ ID NO: 45915 - DNA, 342 bp, Glycine max
  unsure (1)..(342): unsure at all n locations
atgagcgtctcaatatactattagacacaatctgtacacccgagttaaaagttatggtcgnttgaatntgctcagagcttctattttcaattacgagcgtctcgacatattatgggactcaatcggacatccgtgtaaaaagtaatcatcgtttgatttttctaatagcttctgttcttaattccgagcgtctcgatatattacgggacacaatcggacatncgattcaaaagttattgtcgtttgaatttgctcagagcttctgttntcaattacgagcgtctcgatatattatgggactctatcggacacccgangaanaagtatcgtcatttgattttc

SEQ ID NO: 45916 - DNA, 471 bp, Glycine max
  unsure (1)..(471): unsure at all n locations
ttctatgcacccttagggctccatccttgcnttgcatgtcttcatcttcgttcttctaccatcggngatctttttccttgtttaaagcgagtttcaaccgatcgtttatgccattatctcatttaataactgataaaatgaatttcaaccgatcgtttgtgttgtaatctcgtttaatcactattaaaataaattttgaccgatcgtttatgtcataaactctttccatcagtgtaaaacatagtttcaaccggtcatttactttgcaagtcctcttttaatgagttggaaaataaccaagtgaaaccaaagctaaaatcaactcataatcaagctgttatccataaatattgcttgaatctgttcaaggtccaacaccttaacggtctctcttacttttagatggtaaaacgaaccttttaaaagtctaatatcaactctagcgcgtaatttctttctttacagaactac

SEQ ID NO: 45917 - DNA, 459 bp, Glycine max
  unsure (1)..(459): unsure at all n locations
tgtcanatgcaccatatattctctgagttgttatggcatntctgccccatcaaaagcacatggcaagaacttcaaagaaatcataaatagtataagaaattataaatcaatgttagcanacctgcacgtatcaaaatgagcatctagtcttcgcactgcttctgcacttgcttngcgtacatcctcccgagtagataccatcttctgaaacacactggaccagtgggaattgctgcgctcgcagttctgccagaggtgatataacatntgcatgcgtaacctgcacttattgtcaacagaagacaatcatctcataataacagtacatcataggaaaatacatatcaaataatcaaacacaagcaacagtaaatacatagcatatcataatatgatttgaaaaanaaaanaagagtaagccgtcatttagtgcctataaatataacgcactgtcacaat

SEQ ID NO: 45918 - DNA, 398 bp, Glycine max
ctttttatcctaaggaaactatagaatgtagactagaagcatgtcttagataaacatgaatcccctgcttatacaagcctttgaatgtgcagcgatgtatctgcagacaaatgctggaggaatcagtatatttggatggacagttgatcggcctttattgagcacaatattattctttgaattgactctggttacctttgctcttagtaagacaatactctattgataaaatttgcaggtcaacaccaatcaagggcctttgggccttccaggttactacgataaattgagctgttgcttcctgcatttccattatcgttgcttacactttccattacatcatagaaaatccattccgaaatggactgtgcataatgcaatgggaactgtaggaatac

SEQ ID NO: 45919 - DNA, 655 bp, Glycine max
  unsure (1)..(655): unsure at all n locations
caccgaagtacccnnactccatcgtgcatcatncagaatntacttctcaataaaaaacaaaaattatgcatnnnnnnnncnaagnnaaacaaaatgaacccttgaattgagntcgattgcanatccannnncnngnaannanacnngcgantnnncngagaggcngaacannaaagatataaacaatcatctttatgatgttaaacaacgaactcagacctgaagccaacaaagtaaagcttccaacgttaatgacagaaaaagaggggggacgccgagaataatgcagagaaaaatgactggtcaaactctagaaaaaaatatgcagaagggtgcttacctgtgagggggtttgagaacgatcgccaaactgttagtggctgcaaantgcagtgcacaagacgaaggagaattgagcaccgaatgagagaaacatgtgtcgacgcattaacgctagatgagataatccggagagactcgacatccttcttagcagatacttatacacttgagatcttgtctcttgccactggaccctcaccacctgacctgagtgctacagtactatgccattatatattattgtattctaatatgctaaaagtancactattacttacttttatatgaacagaatcatataatagtcgcaccg

SEQ ID NO: 45920 - DNA, 146 bp, Glycine max
gctaacacaatataataggggactattgtgaaccaccgaaacttccacgatccctcaaaacctgatgctgattcataacatttgcgagtaacgcactagtagcacgcgacatgttacatcattgcgacattattatacttcttatt

SEQ ID NO: 45921 - DNA, 608 bp, Glycine max
  unsure (1)..(608): unsure at all n locations
acggcacgtgnatttatcttcctgatgctcctnatgnannancannnnnncnnnngagnnanncaccaccatgcnanctagacgccacaccanacggattgtactnanaattatttctttgacgaccgagagcgaacatatactagatctttattgcagagtcgatcctcctcaaantacttcgagtagtatccaacgaaacatccgctggtcntcgtatacaaaatcgactatctcactcacactctatgcngtgctcgcctctcagctgcgaacacgagctgatttctattccattcctaatcatctcacacgcctatggatcttctcttgacctctcactcatcgcaatcatctatcttctgctcacaaattatcatcgcgaccataactcccattaccacactcaattaagtgatcttgatgcctaagttgattccaaaacgagacctttcacctcgctttggaatcacctcatatggagccctgcactctccgtattgcatttcttatctctgtccaccaccacttacctacgtttaccatcccatctatcatttatgcggataccccttataagaccacgagataccacctatttccatctg

SEQ ID NO: 45922 - DNA, 544 bp, Glycine max
  unsure (1)..(544): unsure at all n locations
acgactatccattgaanacgtgcgacaactagacaaatacgcagangcacgacatgcgagatgaacactanggcaccacttttttgtttattatgaagaaacgccaagagcccaacacaggtgagtttccaatactgccatctcataatataagacatatataatatgatgaagagaattgtaacaacacaaacttacgcgtattcataatgaacaatatacttacattaggctacaattggacagacctccaatgtacgggattgaacgacatataacatgctcttaatgggactaatagatgataatgcgcgcacctatacggactaaacacatattcaagactatcatttatccaacatatttaaaaacgttggatactagagcaggaattaataatttttcatatcaaacgagttggaaaatatgcactgctttttcattaagaaccgatatactaagaggaanaagataccagaatatggcacattggatatcaagagcaattagttgacctactcaatgtgaagagcatactaacgcn

SEQ ID NO: 45923 - DNA, 441 bp, Glycine max
  unsure (1)..(441): unsure at all n locations
tatacttggatgcttcctggattcataccttggatgagctggtgaagccacaccagaattntgttcagaaggtggccagctgacacaattntcaaaaatacttctgtacatggcaagcacatgttgctcacggcttgtaacttcttcttcaagtaactcaatttcagcaattaaatcttttgtctatgacggaggaaaaagaataagtagttaattgccacaaacaaacgaatacttatggctataacttgaatgagaaagatcacattgtgcattatacatgtctgatcaaaatttacaatccaagtgaagtgtccctttatccttatcacaagctacagttctttactngagaatcaactcctctggttctaataatatataatcctgaatggcttattccatgtctagtcaaataacatgtaataatatctctatcac

SEQ ID NO: 45924 - DNA, 471 bp, Glycine max
  unsure (1)..(471): unsure at all n locations
agctggggatgcatttgtgagttgtttgtacatatttattataggctntgtgttccatttcagtatgtttgtacatatattatccttattgtcttacgaagtagactcttacgagtctacgagtcgactctacgaagctgttacgagtctgcgtaaactctcgatattgataaccttgcaatatatatgtgttntaaaaatagttgagattataatacacataatacatatgcttggtattcacatgagattctaattgtaatatacatgttacaagagtgcatcagatgtatgacttaaattataactcatgttaataatatcatattatgcatgttagtttggaaaggtatcttcaatgacaactctagttactatataaatatttacttacaatattgtgcttatataattgagtccattagatttgctntctacattgtcttatatattcgaagtggttactcttat

SEQ ID NO: 45925 - DNA, 380 bp, Glycine max
  unsure (1)..(380): unsure at all n locations
tagagagttctacactactctagagctctccagagcgttctattttttctacctttccagaagctccaaatttctaacctctccattaagaggacccaacaatctggtggtggaaagaaatgattgatcacttgctatctctactaagctcacttaatctctctctctctctctatatatatataaaggaatgatgagggcatatgaaggaagactattcaaagacttttactataagtctgtctataattgcaggaatcaattgatttaagagatgttgattagaatgcaactataatgatatttaacaaattctataaaatgtaagttccctctaattaaagtctttnctttttttagggaagcacctctaaagtctt

SEQ ID NO: 45926 - DNA, 486 bp, Glycine max
  unsure (1)..(486): unsure at all n locations
agctagttcgcacatcgttcgtgtgtatgatatccactccacattgtttgaagtagaggagagcttcaaccctataacgcaacgtggcggacaaaagtgggcagcatacttgaatggtcgtcattggcaatgcggagggtattctgcgcttcactatccatgttcacacattattgcagcttgtggttacgtgagcatgaactactaccaatatatagatgttgnttacacaaacgaacacatcttanaagcttactccgcacaatggtggcctcttgtgaatgaagcggctattcctccttctaatgacgcatggacacttatccctgacccaactacaattcgtgcgaaaggtcggccaatatcaacaatgataaggaatgagatggattgtgtcgaaccatctgagcaccgacaaaaatgtagtagatgtggagccgaagggcataacatgcgtcgctgtccaatgcaatctgagcatgggag

SEQ ID NO: 45927 - DNA, 414 bp, Glycine max
  unsure (1)..(414): unsure at all n locations
ctacttgatccacatgggctctattgggctagtatctnggtctggtttatgagggccgcgaaagaaaggattacatgctcaaagagcgtttgagggttatattgagtaagaacctcaagagcattgctcgtacctttgggttggactctattcctttggtcttatacattaatcttccatcgcacttttgtgcctttcttgcaaaatttgaagatcttttgcctctctttttcttcactcgcctttggcagatactattcattattttttttattgttacccaacttcatgcatgtgttgtttgcattgctcttctcgccggattaacggtggttcctactcagggatcctatttgttgttgctgcacctttctttatttagaaacaaatatgctttcgctcagatggggtagc

SEQ ID NO: 45928 - DNA, 411 bp, Glycine max
  unsure (1)..(411): unsure at all n locations
agctggtaggattatggggtacccatcacatgtggtactaggtggcggtcgggcgatggtgcacaacaagttttccacattcacaaatcgcgcataaacccaccatccnctgttgcccacctccaactgagctcacgtactcccacgtagcccatctcctcgtttctctcaacaccgggtccccatcaatcctcccaagcttccccaacatccaagtaattcaacattcaaacaacacatactatcacagccaagaaaatagggcaaaggcagaaaactatgcccaaaacaccaaccaaaatcacagcttttctcacttaaagaccccagtacatttccttcgttccaattcgttaaccgttggatcgactcanaatttttactggaagtctctagtacataagcctacat

SEQ ID NO: 45929 - DNA, 480 bp, Glycine max
  unsure (1)..(480): unsure at all n locations
tcctataaatagggngagaagtgaatggaaaatatgttcatccctcctggtaattcgagaatcacttgaaataagtgaaaaaaattgtttccatgaagaaaatccaagccgaggcgcttccgtaacgttttcgtgggtgatttcgcgaagattttcaaccattttttgacgttcttcgtcgttcttcagtcttcaaccagtaagttcccgaaatcgaacttttcaattcattctatgtatccttagtggtcctcatttgcttcgggtgcttttatttttatttcatttactttccgtaccccttttgacgtgctttagtcatttacttaagtcattttctagcctaaatcaaaaaataaaataaatttccaccgatcatttgaattgtaatatccgttaatttctgttaaactgaaatccgaccgttcggtcatgccgtaaccacgttggaaaccaaaaagaggtaaaataataatataa

SEQ ID NO: 45930 - DNA, 457 bp, Glycine max
  unsure (1)..(457): unsure at all n locations
gctagccgganacattttcttctntaattttgtgttataacagcaaacaattaagattgcgaaggtaagaattctagggcattagacaggatcaaaccataacatagggaataagaatcgccgcatgtaaatgcccatgatagggcaagatatgctagatagggcctacaacgaacatcttagccgacccataagtgaaaagatttaacttcattcattatatgatgatatttacgggaagtttaatatccatcctcattggagcacaagttgcacataaacaatggctgagaacatgagacataaatgttagggtttttagaaggaaatcctgtcatcattcccaagttattgatattttaagttctttattttaaaattactntattntataaattctaagtctaattagatttgtattatatatgtcggacaatacatttcaattaattcttaa

SEQ ID NO: 45931 - DNA, 257 bp, Glycine max
  unsure (1)..(257): unsure at all n locations
taaaagagggaaagaagtggaactttgaagtgtatctcataagactttcattcatcaaagttacaactagtgttacacatgcttctatttatagactaggtagcttccttgagaagctttcttgagaaaacttccttgagaagcttctttgagaaaacttgcttgagaagctagagcttagctacacacacccctctcataactaagctcacctncttgagaagattccttaagaagattcctaaagaatctagaga

SEQ ID NO: 45932 - DNA, 451 bp, Glycine max
  unsure (1)..(451): unsure at all n locations
agcttgcaagttgaggctgtctctnttactgcaatgtacaatgactatgctgagccgttntctacctgtaatgtgctgaatactttgatacttgatggttgttcgttgcataaagatgcaaaattcctctctatatcaaattctagcctctctagtttgaccataagtggtagctttgaaggaggagcttacaaaattgcgctttctactccaaaccttagttctctcacagtcacgggtcataataatcacacaatctcctccgcatgcaatctttctttccttgaagaagtaaccattgacaccctnggttatacactntntccgaatacagacttactcatcataagctggctgcaagttctcaccaatgtaaagatactgaggctctattcgggtacccttctgacaatactacnggttagntactatgctnnntctctcttacatc

SEQ ID NO: 45933 - DNA, 461 bp, Glycine max
  unsure (1)..(461): unsure at all n locations
gacaagataatatgttcacctgataaaagggtgggcaatttctctctnttaaggggtgnganngantcttcttgtgataattaacatttacagttaacttggataagctttgaggaatttaccttaataatactattttcttcagaaacattnttaacttatgaaaaatattaaattatatttttttggaatttctttttgaaaaaaaaatataattatcattaaatttgtaaacatgacagaacgttaaagacccccccccccctctctctctctctctcagagtattntactttatttatccagataaaattaagtgtttaattacattatatatatatggtaatcttttaattgttttttttaacttttaacacataattattttctaaaaatatgaatgatgtattaacttgattctaaataaaatccttaataatttaaaaaattgttccttaaat

SEQ ID NO: 45934 - DNA, 475 bp, Glycine max
  unsure (1)..(475): unsure at all n locations
catactaagatatactagtattcatactaatgaggagcttattacacattacanaataactcatcatcaaaatattaaacacaatacaatggggtcttcacgtgtcctcgtgttctatnacctccgtggtgatctcatgtttttggtgactatacatnttttttggttcttttggaaggctttggatacttangcaggntnttgatngccttcctccntaagtttcacttattctacagatcgtataggtctagtgtaactaattttttatcaatagatntgtgcttttgcctttaaaaaaataaacagaaaagtcgtatctcttattacttctacatntattttttatagaagtcgtgaataaaaaagcacaatnntttgtatttcttttcttcaagaanngtgtgaataatatgccgctctaataaattattattctccaaccaacaataaatgaaaataattaattatcatt

SEQ ID NO: 45935 - DNA, 351 bp, Glycine max
  unsure (1)..(351): unsure at all n locations
atgagtgattatgaatctgtcgttctagcgcatgactgcttanggatatcatgaacatacaaaccacgtttctttgaatgtacggattgtaagcgactaggtatttcaatgacattgtgcatagcacacacaaaattctgtaattacattcaacaacaatgatggtgtgacaggtactatatatcgcactactacaaaatatatattcaacatcgcacgattaacatcggttttcaaaaaaccgatgataagagaagcacctatgtcaaacatataatatagatctaaataactgatgttgatatcaagtatgtaacatcggttatgacaaaaccgatgttaacataatat

SEQ ID NO: 45936 - DNA, 429 bp, Glycine max
  unsure (1)..(429): unsure at all n locations
gctttatccacatagttcagatcacctgttcataaaccaatgtagcatccaattntccccccttaagtctcactttctaatccatataagcaccanaactcactcacttgtagtcataatagcatgttcaactactgatatcatatcacanaatagtgaaggattattanggaagtttgattagtttgaaactgcaccaacttattgaaaaaaaatcacaagcttgcanagacccagtgacatanaaaccattattgaacaaaaaaaacaagcttgcaaaagctcacaaaaatgagaaaataagaaaatacttaccttgcgtngatgtcagactccaacggaggatgctcaaccttgctgtagtgataaaccccaacgacagtcacgaaccccagcggcgacgatgatgaggagaagacggcggtcaca

SEQ ID NO: 45937 - DNA, 446 bp, Glycine max
  unsure (1)..(446): unsure at all n locations
cttcttatttccagaaggaaattctatcaatagacctccaatctttaatggagagggttaccactactggaaaacccgaatgcaaatttttattgaggcaatagacttaagtatttgggaagccatagaaatagggccttatatacccaccacaatagaaagaattacaatagatgcaagcacatcaagtgaaagcataacaatagaaaaacctagagatagatggtctgaagaggatagaagacgagtacaatacaatttataagccaaaaacataataacatctgccctgngaatgtatgaatattacagggtttcaaattgtaagagtgctaaggaaatgtgggacactctacaattaacacatgaaggaactacaaatgttaaaagatctatngataacacactaactcatgagtatgaactggttangatgaatgcaaatg

SEQ ID NO: 45938 - DNA, 392 bp, Glycine max
  unsure (1)..(392): unsure at all n locations
ctttcttgagaagctagaggggggctactcacacctctccaatagctaagctcaccccatgccaaaatacatgaaaatacaaaagttaaagtccctactacaaagactactcataatgccctgaaatacaaggctaaaaccttatactactagggtacccttaacttgtacccttaatttgtagggttccctacaaacctaaaatggccaaaatacaaggcctaaaagtaggaaaacctattctaatatttacaaagaatagtggacccaaccttggcccatgggctcagaaatctatcctaaggttcatgagaaccctaggaccttctntagcagctctagcccaatcctcttggagtcttttgctcatgaatctggtgactgatcccttc

SEQ ID NO: 45939 - DNA, 144 bp, Glycine max
acatgtgtaacactggtcatatacttagaggattgagtaattttgtgagacacacctcaaagttcaacttctctccctaatctccttcaattcccatgcccccccccccaccctatatgatgcaatcctaccccctaagggcat

SEQ ID NO: 45940 - DNA, 422 bp, Glycine max
  unsure (1)..(422): unsure at all n locations
caaggcctgatcttaacactgctctatttgtgctgtcacagttcccacagacacaccttgctgaggcaagaatngcattcattgattcaagtactagtaggagtgtaagctatggtgaagctaaaaggtctatntactcccttgcatcagctntgttccatggacttgagattaggaaaggtgaatgttgtattgtattgtcaccaaactcaaccttgtactcagccatatgcctagctgttttatcagttggagcagttcttaccactgccaaccccatcaacactgcaacagaaaatgcgaagcangtgcatgattcgggtgctaaactagccatctcagcacctgaggagctacacaaatnggtcccaactggggttcctataattctcacttctcgtccttctgatggcaacatgtta

SEQ ID NO: 45941 - DNA, 461 bp, Glycine max
  unsure (1)..(461): unsure at all n locations
attagtagttgtcaattggattatattactttcataaatttattgattagtttgtttaaaacttgaaattagtggcatttaaataatcatgtttgttttggcagatcaaccacatgagtcagatttgcaaacaagagcagagcagcctagatcaagaacatatgcatgtctcgcgtccgtaaggggaaagtatagtccaatgtgcagtgtgctntttaatgacgagtatctcagtatttctctttataatgttttttcaattaaatatttggttgaatgagtggcaattattagatttgacaactgcaccactagcaattcttattaatgacccggattctatgtttgcttatgaatcatgatagtaacaatatctactgctataaataacaaaacacaatcagattaagaaagttatcgttacaagataacattaaatctgtttctggttgggtacatct

SEQ ID NO: 45942 - DNA, 457 bp, Glycine max
  unsure (1)..(457): unsure at all n locations
gcctaaggctgttcaccatgttgctcatgttgctcccnctatatttaacaatttccacctcaagacccctagttntattaaatcttgatatattnggtctaaccaaaaccctcttatttagtggttcaggggtaaaaggtatggtctagttgtggtggacgactactctagatgaacatggattatttttcttacccacaaaaatgagtattntagagtcgtctttataatttacaaaagaattcaaagtgaaaaaggagtatacattacttcaattagaagtgatcatggtggacaatttgaaaatgaaaattttcttctattatgtgaagaanatggcattctttgcaatttctcaacacctagcacaccccaacagaatgaggtagttgagagaaagaatagatcattgtacgaaatggaaggaccatgcttagtgataatttacacctaaaca

SEQ ID NO: 45943 - DNA, 389 bp, Glycine max
  unsure (1)..(389): unsure at all n locations
ggtgatgaacaaaagcgcgaatctgaatcaaaaaatgcgaaaagtgatgaccctaagactgcaaactcgtaaatcccgtgggtatggcttttgaaagggggaaaagaagtttttgaatgaaaaaacgtcccccctttcgtcacttttatattttggtgcagaggtggctcgcccaggcgagctaacctgcactntnntttttttttttttttttttttttttttggaggggaacatttaaacatgcccctcccttctcatggactagcatcttgcctaacttgaacttacttaggttagaattaggcgttgattacttattttattattactcttttcctttttaaaacgagcaaattgtaaaagaaagctgcaaaatacaaaggatac

SEQ ID NO: 45944 - DNA, 459 bp, Glycine max
  unsure (1)..(459): unsure at all n locations
taagcacctgcggcatgcaagctatgtgtcgctgnggaatgtctactaccatcatgttgtggactacgatcgtagtacactcaccatgtgttgtcatcgcgacggctgattgttgctcaaaggtgaggtcatcttattgccatggtcgtattgcttaccacaatcgtgctaaatgtaccatgaccatcgctatgtagcagagtcttcacatatttagaaaacatgaaaactctaactctttctctcaagtgagcgactaaacttctacatgacaaaactgatatctaaatgtgagttctgtttggaaaatgcataaaaatgacacataaactcacacaaaaaattactaatacaacgatntatcattgaatcacaaaacacaatctttctctttgatcaataattagagtgagataggattcattcttatcttgttaagagctctagtgaaatctgttg

SEQ ID NO: 45945 - DNA, 310 bp, Glycine max
ccatacaccactttcatgactgcccacctgatgaggacatgaccaagagcaaggtcaaggatccacttgtatgacttggaggacctatgacaacggcttaagcaaagaaagccaaggaagctcttcaacatgtgttgtccatactattcgaatacacgcccatgtttcaaggacataagttcaacgctgcgagttgtatcatggcccacatggaggaggactaaatgacaccactttgtctcaatttttagagaggctactttgtctaaataatggcccaatccttgtaaacgttgctgaccaaaaatat

SEQ ID NO: 45946 - DNA, 480 bp, Glycine max
  unsure (1)..(480): unsure at all n locations
gctgcatagcgtgtgaagagattggcgctagtgcaaggttttacgctaacggataagcaatctgaaaatntttctaagtcattttctgcttatctcttcacacataatntaaaaaccatntttgttcattactaaacaagctgaaattaatcacaatcacaagcaagatgtcctaactacatgcaagaaataaaaatgaagatagagaagggaaagaaaaactgggttgcctcccagtaagcgcttctntaacgtcactagctngacgcatcatcctgttatccaggatccaataatgttcccacttcaaggaccttcttctcaggtcttctttcctctatcacatgaactntanaacanacattccggtcaggtggttctttatcttcatgaaatagatcaaagctgattttctaatcttctatgcccaatttgcaacatcttctttcccatatctactacacagcttgcaatacacat

SEQ ID NO: 45947 - DNA, 329 bp, Glycine max
aagaaaaaagggagagaagctgaacttttatttgtgtctcacaagactctcattcatcaaagttacaacaagtgttacacatgtttctatctatagactatgtagcttccttgagaagctctcatgagaaaacttgcttgagaagcttctatgagaaaacttccttgaaaagctagagcttagctacacacacccctcacataactaagttcacctccttgagaagcttgcttgagaagattcctaaagaagctagagcttagctacacacacctctctaatagctaagctcatcttcttgagatgagaagctggaacttagctacaca

SEQ ID NO: 45948 - DNA, 427 bp, Glycine max
  unsure (1)..(427): unsure at all n locations
atcctctgagtcacctgaggctgcagctgtaatttaatttgtttatagaagnnttttttaagcaagaacaagagatgtgctaagacatcacagagtcgatcatgggttctntaaagctaactatctactttttattctctaaagaatcaagttaagcgacgtgaaagctttaataacaaagaaatatgtatactaaaaataaaagatatactcacagtgtataaaaaatatatcatgtaaaaaaggaaaaattcacattggatgtattcaattcattagataattttatcgttgttaaaacactccttattntttcattattctctcttaaactacgataattgttactactcttacattgtgggtcttgtcttccctaacacttatttatttgattaattgacctccacaccgtttctttctcttc

SEQ ID NO: 45949 - DNA, 525 bp, Glycine max
  unsure (1)..(525): unsure at all n locations
ttatatnaagggttggaccattgataagcatggtatatacgtgacactanatgcgacacaagcccggcatcgagaatatcttccgtcgcatctggagaggtggggggngggttgggataatattgaagacacaggatgatagttatggttgtatncataatctgctagagttcccatgcccacccaaccaccctatatgatgcatatgtaacctcaactgattttctaaattttaatcatagatggctttctccacgaaagataataacgctctcaggatacttagaacctctgacgtagtactcagcactagatatgaaatctattaaatgcaaataaccaaggacatagattatcaatgtttagaatttacttatgttctcttataactccactacgtctggtttccaattataatgaaccttggttttaatttctactgattggagactaatttacatctatatgatgtgttctactcatcctgaatatgcctgttgggcttatgagctcctgattatgccg

SEQ ID NO: 45950 - DNA, 423 bp, Glycine max
  unsure (1)..(423): unsure at all n locations
aaacttgaaattagttggcattaaataatcatgtccgctctggcagatcaaccacatgagtcagatttgcaaacaagagcagagcagcctatatcaagaacatatgcatgtctcgcgtccgtaaggggaaagtatagtccaatgtgcagtgtgctttttaatgacgagtatctcagtatttctctttataatgttttttcaattaaatatttgtgtgaatgagtggcaattattagatttgacaactgcaccactagcaattcttattaatgacccggattctatngttgcttatgaatcatgatagtaacaatatctactgctatagataacaaaacacaatcagattaagaaagttatcgttacaagataacattanatctgtttctgtttgggtacatctagatgctgcctgcttaatta

SEQ ID NO: 45951 - DNA, 449 bp, Glycine max
  unsure (1)..(449): unsure at all n locations
agcttaaagtatgcccgagtcattcatccctatgttatgttgttgaagtattggcgatcagaattgcctttccttggattatagggctgaaccaagctcatgcttttacaaaaaggttcatcaagtcaagttgaaatatggaagtaaccgtcttgcaaaattggggcaaaagatgaatcgagtcacatcactgcttcgtctactgccaaacatatttaggattggtgatgtccttggtacttccagtttcaccttgacaaagatatcatggaccatgttgaaaatctaaattgattcaaccccatatcctgcataaaaatccgcaatacttcaactgtacatcattcgcatacatccatgctnttcattggttgcattgctcattgcattctttccttgaaaaataaaataaaataaaataaaatgaaattaatcattggtatcaaaaa

SEQ ID NO: 45952 - DNA, 437 bp, Glycine max
  unsure (1)..(437): unsure at all n locations
tcactcctacatctcatctctagcatgcattttctttttttacccactcctcancgttggttttttagggaaaaacaccataactaaacgcgccgcaagggatccctatcgcaccagatccaaatctagaacgatgggtgatcaagaggagacgcaggaacagatgaaagccgacatgtcggctctgaaagaacaaatggcctccatgatggaggccatgttaggtatgaagcagctcatggaaaagagtgcggccactgccgccgctgtcagttcggctgccgaagcagacccgactctcttggcaactacgcaccatcctccctcaaacatagtaggacggngaagggacacactgtggcacgatggcagccctcacctgggatacaaccgagcggcttacccttatggattgccgccaactattaccacccatc

SEQ ID NO: 45953 - DNA, 325 bp, Glycine max
atggtctaaacttatcagacggaagtccgattcaggcgcataatatatcgagaagctcggaatagaacaacggaagcactcgagatattcaaatggtcataacttttcacacggaagtccgattgatgcgcataatatatcgagaagctcgaaattgaacaacggaagctctcgagaaactcgaatggccatcacttatcacacggaagtccgactcaggcgcgataaatatctagacagtcgaaattgaacacggacgctctcgagagattcaatggtcgtacttatcacacggatgtcaacttaagcgcaaatatatcgagac

SEQ ID NO: 45954 - DNA, 517 bp, Glycine max
  unsure (1)..(517): unsure at all n locations
ttatgtgttgaacatganacctgatccttgcattagctacncaattagccacaagcccgacatngtacaacggaagcacttgtgaaactcanatggtcatatcttgtccacggaagagcgatacaagcgcataatatatcgagatgctcgaaattgaacaacgaatgctcttgtgaaattcaaatggtcataacttgtcacacggaaagtccgattcctgtgcataatatatcgagacactcgaaaaagaacaaccgaagctctcgagaaattcaaatggtcataacttttcatacagaagttcgactctggcgcataatatatctagaagctcgaaatggaacaacggaagctctcgagaatctaaataggcataacttatcacaccgacgtgcgattcaagcgcatatatatcctacactcaaaatgacacctactgcctcgcaattatatggtacacctgcccccgaggtcgttaagtccataattcccactcnagatgccaaatgaccttaag

SEQ ID NO: 45955 - DNA, 447 bp, Glycine max
  unsure (1)..(447): unsure at all n locations
atcttggtcatcttgttataatacgtggtcttccttttttgaagttgatggcgcaacatattactttggcctaacaggaactccaatattattacagcttctaatgttatgattggtttggccacaccttccacatgtaaactcagccaatttcctctttagcttatgtcctgtgacattgtcctcatctacagatctccttctatttttctttggcctttctctctggacccttctatgtggtggaacagggtgtgtatactgtgtctgggcccaatattgtggtccttggactggttcaataaaatgttggtatgtcttattataaacttctattgacagncactcatgacacatgtnctcaggcttcccttctttgtgagttatagttgcaatggcatgtcggcatggcatccctacatcatagttgtataatcagcacacatg

SEQ ID NO: 45956 - DNA, 242 bp, Glycine max
agtctataggttacgcttttggtgtttaggaagataactgtgatgcagacctaccttcgtgtttattcccaaatatgatgttttgcatgactagctggaaccaattaatcacctctgttgtgagcaattttttactttgcatggcatataaacgttaaacacatttctcgtatatatacataaaattctagtactaggctggaaactacatacctacaactagtatatgcaaacttgcattt

SEQ ID NO: 45957 - DNA, 405 bp, Glycine max
  unsure (1)..(405): unsure at all n locations
cttagcttctatactgcaatatatattatacactgctctntctgagactcactcactnatctctgtcttactatactacacaggtgtcaatctcaccatcagaaaatgaagaatttcttgggttctttgtactatcttgcttcctgcaatcattgcaattattcttgtgctgctcacttccattccaagtgcacagctaacaacaagtgagaacagaatccttctccaagttcagaagcttcttgaatatcctcaagctcttaaggatgaccaacttgacaatttgtctctcctctccctcacattggtcttaatggcatgaaccgagtaaccgtcgttgcaattcatcttgactctctataaagatctcattgagtcttctttactgctgacaactctaaatat

SEQ ID NO: 45958 - DNA, 503 bp, Glycine max
  unsure (1)..(503): unsure at all n locations
tggattatgtttgtcccttgataagctgacaccttgcaanttcggcaaagatctgaaancgctccatgctgagaagatcttttcgtgtactcttgtgaccatccgtacaacggcgacctgatagttttgttggcgaaggagggtgtggctgcgttttcaacgcgtggattgaacaaattggaactgctacagtgaaacctgacacaggacttactgttgctgaatatccctaaccgtatgggctgacggtcataagacaggctggctggcatatactctaaagtacttgttttctactatagacaactactgaaatctatacttttaatgaaccttcccgctcgatcatgtggcaggctgaactgaatgctcttgtgacctaattgaccacaccttttaaacttgacgttactgatggagacgatctaggttgtaatgatgagtcatgcttggtgacgtgacaacattattagatatgaactattatattctactgttacgtt

SEQ ID NO: 45959 - DNA, 610 bp, Glycine max
  unsure (1)..(610): unsure at all n locations
cccctgcatcctccatgtactcgacttataacganatangntancgaaattcggtaacnannnnnnnncagcaaaaggatttgaacattgattgacacanttcgaanaccagancagcangcaagcnagctagaagccaatagcccatgagacctggagcattctcactacctcgtattacacatgtataccaaatatagacaccaggactgccaatcaattctcgtagagactaatcaggagatccataagctttcgaagacctaatctacgctnatggcaagggcttatatattacccgtataaaaactctgtgacgcttacttcacaatctctgttgggcaaattgtaatggcataagctcgtggggaaagagctcacagaacaaccactgtattcaggtggtgacccaaacacaaatatctacttaggaaattttgaagacacattttgagtgcaaaataaaacttaaagtataagctcatgtccacaataggattctcggtagcaattaaggcatcttatcctttttgcagactttagtttgtgctctgcacgcctaaagcaagtacagaaactntaattgacatgatctgctatatacatatgg

SEQ ID NO: 45960 - DNA, 536 bp, Glycine max
  unsure (1)..(536): unsure at all n locations
tgatggtggtgaacatgaaccctcataactggnaanttcacaagtccgaaaanacaccatatgagagactggccttcagtttgtcaggttcttacagtaccagcacacgggcttggcttactttgaaagccgcatatcatagcaggcgcgtgaacatgctcaagagtgacagtaaacttatccatatgcgattgaggaaaacgataagagactcgatgaatgatgctcatatggtgtggatgaatgactactctcaaacacatctttctgtctgtaatctatgagaaatatgactcctgaacgtatgggtgatatatgtggagacattggaaggcgaacttcacacgagtaaattcatcgcctctcttataggcttatatccgcacacatgatttctctctacttattagcgtatctatacgtgtgaggtctactctgtaaacagagaacgatcgacacggtttatgtatatgtatagatatctcaacactcaaatcattgagaccgctcaacatgtagtgatcacatgagagaag

SEQ ID NO: 45961 - DNA, 417 bp, Glycine max
  unsure (1)..(417): unsure at all n locations
agctagatcttgaattaatcttgaagtaatgcttgtttattgaagcaaacttgtattaatcttgaagcaatgtttaaccttngaatgtttgttgaagtaatcttgaatggcatcatcaaaatcatgtattcatacattcacatatgttatttatttcatgacaatcacaaaccagaaatacataaacctagttcttagttatataattacatgaaatttcttttttattcctttgggagacaacttggacgacaattcagtaactatatcatgactgggttacacttcgtctataagttgaatcaaactaatgtgaaatacaaccctaacatgtttttggcgccgatgctagagaataaattggatttatttctatttgataagaacttgctaatattttaaatacactagtaataa

SEQ ID NO: 45962 - DNA, 433 bp, Glycine max
  unsure (1)..(433): unsure at all n locations
acacaccgctgtcttctactataagctaaaacttatacagatttctattctatagatacacataattataactcataattataacacactcttaatcctaatctatctccaccttcagtagtcattacacctcaattgtctcaatcatctccctctcattctacttctgcacctcttgttcctcctggattttccactaatccaattcattcacctacaattcctcttcctaaatatctttcactcacccaccccctctgaatccacatctgtntatcctcaaactttagagtccacaaccattaatacatcctcctctgagtctccttcagcaccaagctctataccagctaacacacattccatgcaaacaagatccatatctggaattcacaatcctagactacatccattatttcttactcattctgaa

SEQ ID NO: 45963 - DNA, 472 bp, Glycine max
  unsure (1)..(472): unsure at all n locations
gcttgtccactntgcttctctgccatcaccttgaatttctagannattgttaacacgtcatctttntccttgatcaagtataaccacatcattctgttgtgctcatctacaaatgatgtgaagtacttgttcccacctagtgatggtacctcaaaaggaccacacacatctgaattgcacaacaccaagtaccactagaaagcttctcattggggcaaatgggaaacttaaaggaactttcttggttgcttgccaatgagacacacatcacacaccttctntgctacatttaattgtggcagacctataaccatattattaattactaacatattcacaactttgatattttagtgaccaaacctgagatgccaaagccagctcaatnggntaatctctatagtcattaaacacttgtactttgatgccttaatgntggcttgaaaggttatatttcttgagagtggagatc

SEQ ID NO: 45964 - DNA, 471 bp, Glycine max
  unsure (1)..(471): unsure at all n locations
cctagattttcttaataattcataatgtgttatatttngagtcacatccattacatttatattctcatctaaacataaatcgatgaataatacttctctctccatccttaagtataagacaattgattaatttatgtttattatgaaagttaattagtttagttattagcattaattataatatatttttttaaaatttatccttaaatatatgggaacatagtcatctccttcggtctccattgaagagagaaaaatacaactaaagaatattttagtaaaaaaataattgatatacaaaagacaaaagaattgattgataatgtcttataaattagaaccgaataaatatatatttgaataaccattgattattattattactattcaatctagcgggttgaatgttactaaatcaactattaattattctatatctacatttttggtctcattctaatgtattccaac

SEQ ID NO: 45965 - DNA, 309 bp, Glycine max
ctaaatccttaattgaaggcgtaggtgacaatcatagtgaattactaaacaagaatggtagtttacttaaggtcataccagatactccccacgcctcagataatacttccaaaatggtaacaagaagtacctccaaattaattaatgttattaatgaagatagtgaccaaaactctgataacacaactgagataggatcagtgtcagaacagaatataaatccaattaattcaaacactggaaacaccctctaaattatatatcaacgccgactgccctgactctattagagaaagacggaaacaattt

SEQ ID NO: 45966 - DNA, 427 bp, Glycine max
  unsure (1)..(427): unsure at all n locations
atccaagattctatgtgacacaagtcgntcatttctattctataaatgtgacctaagcgtttgtgccataatgctcctgagtttgtattatcaattctatgcttagtaccatgcaattctgcattagaggcttcaccataagaagctacaatatcaagttaatatagattatcattaaccaagagtgaaccagttccaaccatatctaaattaaaagacagcctgaacaaattgtttccaaatgaacacaaataacccaattcgtctaaataagatactgacaccaaattccgtctaaatgacggttcaacaaaagtgtctttcaaatccaaataaaaatcaatacatgataataatctaaaatgccctatagcttccacttctacctatttaccatctccaacatagatccatctttcataatcaa

SEQ ID NO: 45967 - DNA, 498 bp, Glycine max
  unsure (1)..(498): unsure at all n locations
ngcttagtgccagtgcatgttgtgtttaggtttattataacagagaanataatgtgtagagaagcttantatattttattgaaacaactatatataaagagcccanagcataacaaanacatcccttatttctaggcataacaggataaatntaaatttagaatacagaatcataactcctaatttttgaaactntaactcactaaatctgaaacgtaaacagaagcaaaacaaattcctaaaaaccaggaagggcactacacattgcagcagctagtatgggcactctatcaacaaatcctctccttgccttagcaactggagactcctttagttttcaaaaaaatcanatcaagcttgactcttgctnttcttcttttatgtngtaattntggctatcatctttctcagataagaccaccaccacattccacttcagcttatccttcatatataggaatcatttactngcatccacagcaccttntaccatcatca

SEQ ID NO: 45968 - DNA, 424 bp, Glycine max
  unsure (1)..(424): unsure at all n locations
acgccatcactattgcgaaccaaaccttgtatgttctcatacttatgccctagcatcacacgggctaccatcaaagcggagccagacgagcgtggttgcaccggtggagactcgacataagcactgcttaccacttccaaggcttaaaaggaagtctctaaggactcttccacgacttccacatatggtgtagaggaatgacaacttacaagaacatctttctccccgcatactataattaaatgtccccctaccacaaactntaactattggtggagcgttgaatggaccaccccaaccgagtcagtccaaggtcggcctaagaggcagctataggccagattgatatccatcacttgaaaagtgatctgatatgtgtgaggcacaatctgaatngggagatcgatctccccccttatgtctc

SEQ ID NO: 45969 - DNA, 484 bp, Glycine max
  unsure (1)..(484): unsure at all n locations
agcttctatagaaggttcgttcctaatntctctacatttgcatcacctctcaatgagctagtgaagaagaatgtggcatttacctgnggtgaaaaacaagagcaagcctttgctntgctcanagaanagcttactaaggcacctgttctagctcttcctgactnttctaaaacttttgagctagactgtgatgcctctggagtgggagttggagctgttttgttacaaggtgggcaccctattgcttattttagtgaaaaacttcatggtgccacccttaactaccccacctatgataaagagctttatgccttaataagagcactccgaacttggaaacattaccttngttccaagggaattgccattcatagtgatcatcaatcacttaagttcattagagggcaaagcangttatacaaaaggcatgcanaatgggtagagtacctagagcaatttcccatatgtatcanatacaaaaagg

SEQ ID NO: 45970 - DNA, 371 bp, Glycine max
  unsure (1)..(371): unsure at all n locations
gaacctcgagcctattcagttgtgtctattgctatcttattttaagctgtaagagagcatcatccacagaaaatggttcaaggcaaatttgttccaaatttgggggaggcactgtgtaaggattgaaatggtaaaataaaatagtatatacacactgcctttgttttctgtgttaaaaaacaactataagtataaataaagttaataagtgtgtatgctataatttcacgtatgaaatctaagtgcctacgaaaagagggcatgtatggngaaggaatgaataacaaaatgaaggttattcaatggatgaatgctctcctagaacctaagcntttgaatcctagaanaccatgacctaagcttttgaatct

SEQ ID NO: 45971 - DNA, 489 bp, Glycine max
  unsure (1)..(489): unsure at all n locations
agcttacaaccnnctgttcattactaaacaaactattattaatcacaatcacaatcaagatatcctaactacatgcaagaggtaataatgaaaatagaacagggaaagaaaagctatgttgcctcccagtaagcgctcttttaacgtgactagcttgacgcatcgtcctgttatccaggaacctagagagttcctacttcaaggaccttcttctcaggtctcttttcctccatcacatgcactntaaaataaacattttggctaggtggatccttgttctcctgaaacaaatcaaagctgatcttctgatcttctatgcccatccgcagtatcttttttcccatgtccaccacacagcttgcagtagacatgaatgggcggccaagaatgagaggaatgtcagcatcctcttctatgtctatgacaacgaaatcagctgggaatataagggtgttaaccttcaccagatcattcttagtcgatgaatac

SEQ ID NO: 45972 - DNA, 422 bp, Glycine max
  unsure (1)..(422): unsure at all n locations
gacgtncttgattaattaattattgtattatctagtgttatactaactaanaaaaacttataaaatttcgtataagtaatgtacaaatccaaaaataattgataaacaaaatcatattgaattcaagtcgttaaagcacaaagtatatcaaaagaaaataaaaagagcatgatattaaaaaatgtatggattaggtcctcagccccaaagcttacaaatctantttaagtccaagcccataaacaaaataaaataaaatctggacaagataagataagattggatgaaataaaatctggacgaaataaaatttagatggaataaaatctggataatataaaatctagatggaataaaatctggataagatatgattcgataaaatgaagctgtattattatattattattatattattatta

SEQ ID NO: 45973 - DNA, 436 bp, Glycine max
  unsure (1)..(436): unsure at all n locations
agcttangcacattanggacacatattctatctcatagtctcatgactccatttgatcccacatataaactaccatctttccctgacactatagnctttaattgagtcttntgcaaaggatcagacttttggccctctctgatctctcttaacaacttaccagtaatcctcaaagatccaagtctcatactattaagagtgacctcacacgcaaggccaagggctctaaattgttctaggagatctaactcccaatccatcaaggcagatatatgtatggatttccaactcaaggcattagccactacattagctntgtcaggatgataactaagctcaaaatcataattcttaagaaactntaaccatatcctctaacgcatgttcatctctttctagctaaacatgtacttaaggctcttatgatcgctaaaca

SEQ ID NO: 45974 - DNA, 340 bp, Glycine max
gtggttctagagaattataaacggtttatatacttatattggccatggtaaacaattacactatcatatgtgtgttgctctattcctcattgcttttggttgtcatgagtgcccaacaacatcatcatcgtattactctgctcttaacagatgccagacagctgcttctgcaaataagtagacattcgagaataaaatcatgtacatgaattcatgcccctctattcatgtgaatacttaaatacacgcatgctttgtttgcaaatctctgggtagagggttgactgggtagttgttcaaaagcgtcttgataatattatcttggacatcccaaaatcaa

SEQ ID NO: 45975 - DNA, 405 bp, Glycine max
  unsure (1)..(405): unsure at all n locations
agctagcattgtgctaagcctaaagaactccctgttttgtaaatatttgtatttgggctaagcgcgcaagggcagctggctaagcttgcatgtcgcgttaaacctaaaaacatctttgttttgtaatatctcanattgggctaagcgtgcaggcacaggctaagcgagtcatgcattcccggtaagcctgtggtgctcgctaagcggattttgcaggaaatttcctcctgcaaaactctctaagccctatgtggcatgctaagcccaataatatctctgaagttgcaattntcattttgggcttagcgcacaagtttgggcttagtgcgcaaaaaanaaaatcaaaatttcttgtacttctattttggtatgtctcctacgcagcaagcttagtgcgcacttaca

SEQ ID NO: 45976 - DNA, 484 bp, Glycine max
  unsure (1)..(484): unsure at all n locations
ccacagcaacacanaatctaggtgtccanaactccctcaattcattggcttttctaggctngaaaggtggaatttagaatgaggtaaatttggagcaaactctcacctcacacaagtctataacatcaatctaaacttgctcaaactggatttacacctaaatttccaccgaatcaaaatttgactcctcaacacccaattttgccctagaaatggctcttggttcactttggtcatttgtttttctctctagctcagcctaacctttctcacatgtcctaaatgacatttcaagctattattaactcactttaacctccatttaccacagaattcagacttagccttccaactctcaaggtctcgctctttttccactcataacatcacattctcactctctaatcctaggttagttctacccttcatctctaacagatntccatcagcaatttcagcatataaacatcacanacatcatcac

SEQ ID NO: 45977 - DNA, 348 bp, Glycine max
tcttccatggcttattccctagaggatggcgcctcctctcacctcttctactttgtcttccgctgcatctccatgttggaaaatcaccattaaaggacctcattgaagctcaagatccagcctccataaaagccccacaagcaagctcccatcaatgtgcatggcatttgatgcgcaatgcaggtaaccatgtaagggacaaacatggcttaaaatgcttgtagagttttatgcttagttatattgaagtcgttgtgtcataccctaattttgtccgaggattattacttgatgccttctctgtcgtaatgcaatattacctcctttccaagcttcttattcagagct

SEQ ID NO: 45978 - DNA, 312 bp, Glycine max
  unsure (1)..(312): unsure at all n locations
agagaaagaacttgtgactagaattatgaatctttatgttagncagnttgtcagattgattgtgaaggaatgcattaactgtatctcggtgagagtgtgatcctaaaatttggagagaaacgactatcatttagtactgatntttgcatgaatctctgaagtatggattgaatgcatgaaattgaggatgatgaacgccatgtttgattgtgatagccacttagccaaaaagcttactacgtgcttgaatgatttatcccttgcacccagttttgagctgaatgatngaaccttaagcctatacaattttat

SEQ ID NO: 45979 - DNA, 412 bp, Glycine max
  unsure (1)..(412): unsure at all n locations
agctntatcatatggatgtataaagcgcattcttatttggctntattcaagaggaagtatatgtagatcaaccccctgtatttgaaaactcagagaagcctaatcatggttttagattaaaaaaggctttatatggcttatagcaagcccctagggcttggtatgagcgtctgagtaagttccttttagaaaaggatttctctagaggcaaagtagatactactctnttcataaagagaaaattacatgatattntattggttcaaaattatgttgatgatattatttttggatctactaatgaattattgtgcaaggaattctctcatgacatgcaaagtcagtttgaaatgtcaatgatgggagaacttaatttcgttcttggattacanattaaacaaaccaagactag

SEQ ID NO: 45980 - DNA, 439 bp, Glycine max
  unsure (1)..(439): unsure at all n locations
attacatctcccctttctcatgcaaattcttcttgatatcatgaaaatcttcatgatttacattctcccnctttttgatgatgacaaccacctataggttaggagcaacaacaaagaaaatatctatttgcatatagtttactcccccttggttttacaatgattgcttatatgagacaattgaagatttcatatttttcatatataaaaagttgtctcataaaaaatagaataatttttcttattattttatcttttatctttctctccccctttgttaacatcaaaaacaaatcatgaatagagaggataaaaatgttaccacttgttgtaatgtatgagaatcaagtgataccaaaaggcattgaaccaatcattcaatattgatcaagcaaaaacaagtatagtatcacatcaatcaaaaacacaatcaatcaaa

SEQ ID NO: 45981 - DNA, 194 bp, Glycine max
ctatcatgatcaatggagatctacagtgacacgaagattgtcgtcgattggacgataactcgagaagcttctgcttcaacaaaattatggttcgcgcgggattggcaagatgtcatgctcaaagggctcgtgccttgagtgaaccacagtggttgcggccctcaaggatgaagatgacatggatggctctattg

SEQ ID NO: 45982 - DNA, 500 bp, Glycine max
  unsure (1)..(500): unsure at all n locations
gcttctaaggaggtgagcttagttattagaggtgtgtgcctagctaatttctagcttcttaaggaagttntctcanagaagcttctcaaggaagttttctcaagacagcttctcaaggaagctacctagtctataaatagaagcatgtgtaacactngttgtaactntgatgaatgagagtcttgtgagacacacttcanacttcaaattctcctcctcttttcttccttgaatntcatgctcccccctctctctttctctctctctttcttttcctccattgaagcatcctctccaagcttcttatctaaggcacattcttggtggtgaagctccttcttccatggcttattccctagtggatggcgcctcctctcacctcttctnctttgtcttccactgcatctccatggtgaaaaatcaccattgaatgacctcattgaagctcanagatccagccttcatagaagccgcacaagcaacttccatcataatacata

SEQ ID NO: 45983 - DNA, 460 bp, Glycine max
cgctgcacatgacagtcagatattggctggatgtgtcgccactgttcaggaacttgtgcagtttggttgatgtttggtgcggcaaaaggacgtgcgtgagagcacagtttggctgttgtttgtgacagaaaggtcattggagctccgacagtggccagaaaagtcattgggaaagcttaaacagcttaaacagtgggtccccaatgagacacaattttcatgatacctcaatcaataatatcaagctgtgataccatagagaagttcttattataattgtgtgtgtaggatgaccatactaatcctttatttataatgagcataagagcatctacattaattacatagaatcaatctaacatgagtgataatgaacaaatccctaattgctctctaatcataaataagagaataatatgtaatctaacaagttataagtcagttttgatgtcttttaagc

SEQ ID NO: 45984 - DNA, 333 bp, Glycine max
  unsure (1)..(333): unsure at all n locations
ctagatatttcctctaatcctatgtnttcctagctatggaagactcatgtcaaaatttagatatcttctctactaactcattttcgtcatatcctaccttctctgttctgctttcattctttgcaatcaaattacaacaagtagaggtgcttttacaggccttgaggaaggcgcttctagctattaaagaagatngaaggccaagncaaagcccatgtgtaagtcgaccctttaacataggcggatgctagttttctttactgcctttttcctatcacttctgaaagttttatgtcgacacttttgcttctctaattactactgctatctgca

SEQ ID NO: 45985 - DNA, 531 bp, Glycine max
  unsure (1)..(531): unsure at all n locations
attattatgatgaccatgaaacctgaacatagtcatactccgnaacnttgcaacacaacancaggttgtttagatcaaagcgattgtgtcgatgtggtttttcttttcanangcaangaaaagaacattgtccngctaattatcccgacaacgccctcgtctggtcgaggaacacaatgaacaatactatactaccatgtgttacttgcgcatgatgacacaacagtatggcttgatgatgacacgaagtggaagaacgacatatttggtcactattttagaacgacgttcattaaacccagacatattgtgtgacttacccaatcaagtaagctacactgcaaccttgtcgtgatgaactttacatcctgctgttatgtgacttacatactcacactgttataggcgagatctaagaatggatgtgccctgcgcattctactcattcaaattctactaccaacctgtttattaaattgccgtaatgatacatcattaattattataactgatgcagtgccacgccctaan

SEQ ID NO: 45986 - DNA, 491 bp, Glycine max
  unsure (1)..(491): unsure at all n locations
ctgcagcttctcaaatcaatttcgaccaccatccattattttctactcttcttgtttcttattggggaaaatcttctgagccacaataattctgtcaccactttaatgaccaggaacaaagctagattaaaaatgatgtttcaacttacttatatagggtctaatcctcanagagagtaacccgataatcacattatatgtcacattacataaactaataggcttaaaatctttcataagactaacctcatctttcttaggaatgagagtgataaaggtctggttccttctgaaattgcatgaagatttttaaaanaatttcggacaaaattgtagaggtcatcaccaaccacaactcaatacttgtagaagaaaactgctgaaaatggtttcaatgtaggtaccttgctgaanatgtatcagtcattanaagagcaatctanttatcccattantgtgtatgtngaaatccgagttatgcacttgattac

SEQ ID NO: 45987 - DNA, 441 bp, Glycine max
  unsure (1)..(441): unsure at all n locations
tgaaaaggaagaaactgaagaccattccaagaagacttgggaatcacgaaagccacctgaaaaggctatggtggatgattcccctaacaaggaagggaaggaagaaagcaaaggtttgggcccatctgaaggagagaagagaagggaaataaatggtaaaattggcaataatgttggaaaaaagagtgataataaggccattcctgaatcaacaacaagggcaagaattaaggaagtggctgcttctgcttctcaagctataactagtctagccaagaaattcaatgaagaagataaacaaaggatagtatacatgggtgcagcagttcttgtggtggcacttggagtttatggtacctacaagcttcgntcacgtagaccatatngcaataatggcatcacatctatttnctttcacatggttttttattactaaagagt

SEQ ID NO: 45988 - DNA, 479 bp, Glycine max
  unsure (1)..(479): unsure at all n locations
tcttcttcatcaatggagttctttgcttgttgtattttaatggcagtggagtgaagaaggaataaagatgattagagatgccacttcaaggagaagatgagtcaagaagaagttcaccaccatagggagccatggataagagcttgagggtaggagaagaagaatagagggagaaagagatagggagcatgaaatttgtgcctcanaagaggtctgaactntgaagtgtaattcttcaatgaataaagttgaaaaaatgcacacacatgacctctatttatagcctaagtgccacacaaaattggaggaaaatttgaatttctattcaaatttcacttgaagtttgaaatgaatntgtggagccaaaatttcactagttatgattagtgaatttcagttatggctcagcccactaatccaagatcaagtccaagattctccactaagtgtggttaggtgtcatgaggcatgttaagcat

SEQ ID NO: 45989 - DNA, 416 bp, Glycine max
ggtagttcctaaacagagatcaattgaggaagtcttgccaagtatccccattgaaaaacctttattcaaacctttcaaagttagtgagaaggctaaacgaaaaattagggaacttataaaaactaaatccttaactgaaggtgtaggtgacaatcatagtgaattactaaacaagattggtagtttacttaaggtcattccagatactccccaagcctcggaaaatacttccaaaatggttacaagaagcacctccaaattaattaatgttattaatgaagatagtgaccaaaactcagataacacaactgagataggatcagtgtcagaaaagaatataaatccaattaattccaaacactggaaaacaccctccatattatattatcaacgtccaactgcccctgaccttctat

SEQ ID NO: 45990 - DNA, 495 bp, Glycine max
  unsure (1)..(495): unsure at all n locations
agctntccgctagcatagggatcgcagaagatacattcattaaaatgcaagatgaagacccagctgcagcccttcgactcctgctgaataccagtcaagccaacacctccagtgaaaagatccctggtgcttcgtcctcatctgatgctgaaataaactcttcagtacgccaagattgtctgctcttgaagttatcaatggaatacgcacgaccagatgtgcttaaatctattgaagagaacccctctgctgcctttgggcatctgaactttttgaagaaattgcacaacccccttacctctgatgagattctaggcaaagttatccaaatcgagggcatcattggaccaattgcaagtactatgcagaanaaacgcganaatgacgctagactagatgcccaaaaacaggcacatatccttctgctcgagaaagcgcgagctgctcaacatgaagtcgaacgtctcaccaaagaggcgaaagaagaatcttctg

SEQ ID NO: 45991 - DNA, 421 bp, Glycine max
  unsure (1)..(421): unsure at all n locations
gcccgctctcgatctcatctctcccattcacctttcactcttgcactctatatctccacgctcctatcaatgctcctctacggcatgttcctgaatgcccccattgngaaaagaggttctagtgctgggggcctatggttagggtttgtgagagatgttggatgctccatgcattgatgagtcttatcgcaagctgttggaagccattcgagcacagtgacgacgccgttaatgccgccgctggaagagaatgcaaggatgacctcctttggttccgtgacatcggaaagtttgccatcaacgatttctccatggccgtcatccaggccaaccaagtcgtcgaggaaccattttgatgctaagcactttccaatgacaagctganaagaatggatcactccatttnttacctttaccttct

SEQ ID NO: 45992 - DNA, 283 bp, Glycine max
  unsure (1)..(283): unsure at all n locations
agcttcaccaccaaaagagtgtcttggataagaagcttacagatgaagcttcaatgaagganaagaatgagaaagatagagtgatgcaatcctaccccctaagggcattggatagaagactccaagaagattgggccagagattcnnnananngccntncnngtctcatgagccttaaggtatatttcatgctcatgacatgggctaattatgaactcacatatctttgtattatataataactgttcattattttggcccttgtattacggctctcatatat

SEQ ID NO: 45993 - DNA, 424 bp, Glycine max
  unsure (1)..(424): unsure at all n locations
atctacatcttagtatcactctatcaccttcaatattcctaccacatgaaatctacactataaagtgcatcatctcctggtgttctcaccaaataggttattagacccagaggtctaagactgactntgtccacactntataattattttttatcgtgtttgcatctttttgtttatgctagatccatgagccaaggaacaaaaccccattcatggacctccgttgcagatctactcagatggaattcgttgatcatgtctcatatttctttaccctctcttttatgctntgccgtatcgtttgttctaaccatggccaataaacatcttcaacgaccatgatttctttgattaactatataaggtannaattctacctcttttgttattgaaattatatcatntattaataacaattacatga

SEQ ID NO: 45994 - DNA, 495 bp, Glycine max
  unsure (1)..(495): unsure at all n locations
agcttacaaatctgttntaagtccaagcccataaataaaataaaatctagataagataagataagacaaaatctagatgaaataatatctagatgaaataaaatctagataagataatatctagatcatataatatctagatgagataaaatctagatatgataagataaaatcttgattaaataatatctagatgagataaaatctagtaagataagatttggtagaataaaattgtctgttctcttcaagtccaagcccaattttggattcaaacccaattacttataattctcctgaaattaaattaaaaacacaaaattaatccagtaggcccaagtgataaaactgcataattaatttgaccattaaggctaatcagtaattaaaatggtgacaaaaaggggtaagaaatatgaganaatgatgacacatcattcatgtttcatacttcatatggcatggaaatagtataaactntntcagtaagtactc

SEQ ID NO: 45995 - DNA, 470 bp, Glycine max
  unsure (1)..(470): unsure at all n locations
gccccccaacatccaagcaaaacaacattcaaacagctcatgctatcttattcaagcaaaacagagcanaggcagaaaactctgctcaacacatcaaccaaaatcacagcttttctcacttaaagaccacagtaacaattcctttgatccaattcgttaaccgttggatcgactccaaaattttactggaagtctatagtgcataagcctacattgtgaccgttgggatctactagcaaacatccagaactcattctgtactactctttccacagccaaccacacacaagcattttctgcaccaagctaaaatcctgctgcacctattttgacagcaaaattctgcataagtgcagatttcgaanatcacactctcnctcatccaatcttgctcagatcaaatcctacaagtcccaaatcatgtatcanacatgtctaaaccaaagccaagcttcataccacagcaacac

SEQ ID NO: 45996 - DNA, 384 bp, Glycine max
  unsure (1)..(384): unsure at all n locations
agctntntgcttcttcttcctgcattanagcgagactctntctcgtcaccgaccgtttccattntctttntcttcattgtcgttaagaggaggttgcgggaagaggttcttcttcttcttcgttgaggagcttgccaccattgttgccgtgaataggaggttgtcgtggtgcattgaggagggttccgcgaagagcaacgctgtcgtccaccgtcgagggagcttcgtcaccgtcgaccatcgaggtaagcgctgtgaccatgtcgtttccaccattgttgtaggcgatagtgtagaatgctgatctgaaaatggagatgtgagtggtatggatcaagttgatccgtangcatgttactgatcaagttgatcctgaagcatctc

SEQ ID NO: 45997 - DNA, 419 bp, Glycine max
  unsure (1)..(419): unsure at all n locations
tgagtgactcacganaaccttgagtttactttatttgttgttctttacaaaacttatnttcataacacacttagagtgtgtttagatgagacaatttaaaattctatagaatattaaattctgagaattgcaaatgctccaatttaaatttctttattcttaaaattttgtgttaggattcctttattaaaagtcgaagctatatgttttcaatgcatacacacgttcgctttcggcatgtgcaccggatcgcacaagtagtataaaacggtaagaaccgagtatcgaactctcggngaacttgtgttacttggtaagctatctcagtaaatatgtgtctggtgtgaaaatctaagcgtgaatatgaacaggtatgtaaactatctattgcaaaaggaanatcacgcgagagaaatgat

SEQ ID NO: 45998 - DNA, 371 bp, Glycine max
aggaggaagaagagaatttgtcgggaaatacattgcaagcctgacactcccctttgagttattaataggagactcatagctgagctatacaatcttctagaacccgaggacacaccatcactggagaatattattgtgttgatacataagaaggaacatccttaactgtgatataatacaaaaggatgatggggaggtgttagcttttgctgagtattttatatgttatttctcacttttcaactttcaaatataatgctagagtacagccaaagataaaagtataaatttatgtgagatgtggcataacacataacatgtactctgcatgatctgcttgcctgcggatgcttataggtttttacatttct

SEQ ID NO: 45999 - DNA, 171 bp, Glycine max
cagcagggacatgaatgttccattctattcaattctctccgtttgcatgatactagtattttatggaaatagaactaacattctatgctcttaacgtgggattcctttcatacttgtatataaatgtaaggtgtacctttcatacccccttctgtgttgcttggacatgct

SEQ ID NO: 46000 - DNA, 368 bp, Glycine max
  unsure (1)..(368): unsure at all n locations
tcttccatggcttataccctagtggatggcgcctcctctcacctcttctcctttgtcttctgctgcatctccatggtggaaaatcaccattaaaggacctcattgaagctcaaagatccagcctctatagaagccccacaagcaagcttccatcaagcggtaatcagagcacaagagcttcaagtaggtgctccttanacctccattaatattctgctataccttctcttccattggtggttcttcattatttatccatgtatctcctcacatgtcttgtgctaaatgtttttaacatgaattcttagagtctccaccgattaaacttgctatagaagctagatntgattctctatggctcaaatttc

SEQ ID NO: 46001 - DNA, 505 bp, Glycine max
  unsure (1)..(505): unsure at all n locations
tgatgacccattgaacccgatacactcgataacctcancccttactcataagccncatagaaggttcgatactaattgttctaccattgcttgaccttttttgagcaggngaagaagaatgaggcatttacctatggtgagaaacaacagcatgcctttgctatgctcaaagaaaagcttactgaggcacctgttctagctcttcttgacttttctaaacttttgagctataatgtgatgcctctggagtgggagttggagctgtattgttacaaggcgggcacgctattgcttatgtaatgaaaacttcatagtgcacccttactaccccacctatgaaaagagcttatgcctaataagagccctccaaacttggaacataccttgttcccaagaattgtcttcatagggaccatatcactaatccatanagggaaaacaagtatacaaaagcatgcaaaggggtgagtactaaacaattcctatgtttcaatccaaaaggaan

SEQ ID NO: 46002 - DNA, 394 bp, Glycine max
  unsure (1)..(394): unsure at all n locations
taatgcantttatgaagtggcagaccacttgctatatagaagctagtgatctcaaagcatgaaaacacatatgaagggtgttgcangtatattaatatgacccaacatctcttannagttaagactctggtctcttgtcacaatgtcaaaacgcatgcgttgacactcaactngagtgagtcgttttatcattccacactacactcatattgctgaaaaaagttgagatgtgatgttaccaaaatcttaaaaaatactaaatgaaaaaaattgtaagttatacatataatataacattgcttantaacttnntcttcaattaattaaatttccttatattttgttgtggtgaatcaagtatatagcgcaactacgggacaaagatattcaaaat

SEQ ID NO: 46003 - DNA, 372 bp, Glycine max
  unsure (1)..(372): unsure at all n locations
tgaatcacgaatataaataatgtctactntcacaactatctatgggagaactagcttcatatattctaattataacattctacaaccatttctctctttctttctctcccagatattctaaatgaataacaaataaaaggaaatcagatgcagttactgtacaagtacactgtaaatacacatgcagacacnattagaaaatgcaacaatatttgtaaatatagcaagcaacaaataaacattgtattattgtatcacacatctgttaatatgtatcataattctgccgtggtccaaaatacagaaatataaccatgtagctgtattcaacagttataaacataaagtttcttcccatttgtcttcaactct

SEQ ID NO: 46004 - DNA, 450 bp, Glycine max
  unsure (1)..(450): unsure at all n locations
atatagactntagagctgtgatacattgagagatcccagctagttcttgtctaatagctgtggcgcctaacatgaggtcgttattgtgcaagaagagagagtgggaccacatacactttctgcagcatatcttcagagaagtacagttntcttgtgtcgtctagtgctcacagctgactttcatcgcacanattgaaagaaatgttaacaacataagacaaaacgaattaagaatgtcatgacaagacaatttaaatatttccttatgtgcgctagggcacgcatttcttaccgagcctatggacattactttctcgtcattggtttcagtacttgaggattgagtaactattccattgctcttgtactgtgagccaagtgctatagcacttgtcttctcaagactagacactcgaagcagtatcgtcaatgactgatactttgtctatc

SEQ ID NO: 46005 - DNA, 473 bp, Glycine max
  unsure (1)..(473): unsure at all n locations
atattgatttctntaatttgcacaccatgtgtttctgtccttctactgagaaccccattgactaatccatataaacattctcatctaaatatccattaagaaagagagttttcacatccatctgatgtagctccaagtcataataggctactaatgtcatgataatcctgaaagaatcctttcgtgaaaccagggaaaatgtctctntataatcaatgttatctttctaagtaaacctcttaacaacaagtctagccttgtaacgttcgaagttggcatgagagtcacatttagtcttgaagacccacttacaaccaactctcttacaaccctttagcaattctataaggtcccaaacaccattatgttccatggaatnntattttcccttcatggcatntaaccagttctcanaattatcacaacttacagcttgtgaaaacgaaactggatcattatcattaatgcttaag

SEQ ID NO: 46006 - DNA, 445 bp, Glycine max
  unsure (1)..(445): unsure at all n locations
gcttgccacccagctcgcccaggcgagctaggttgcttcctccagaagcaacagtcttctggaggaatcttctggagggcccaagtgggccctggttgctattgcacccccatttntactaaatacacncctntgcccttttttggtgattccttttttcgtaaagttacggaaacttacggatttcgcaacgatacttgttttctttccgtaatattatggaaccttgcggaatacataatcatccctttttttgacttacggaatgttacggaacctcactaattgtgcaacgatgcttccttttgatttccggtgtgtcacggaaccttacggatggtgcatcaatactttctttcggtttccggcacatcacgaaacttcacanattgcctaatgatgggtgccaagcacctcaaaatgaccaaatacaagttgcatgcca

SEQ ID NO: 46007 - DNA, 410 bp, Glycine max
tcctgactcaccatataccttgacccagggtgagtatgtcaattcttaccctcggaagcaaagaaaaaggggggagagggaaaatttccaatcaaagacgaagcaaaaaaggagagaaggaaaatttccaatcaaaggaaaaaaagagaggaaagggaattcccaatcaaagagtgggagaaagcaaaaagaaaagaaagaaaattcccaatcaaagaatgggagaaagaaaaaagagaagaagatagggaagaaagttcccgatcaaaaaaaataatatgcagaaaggtctttggaccggacaatatctgaacaatacagaattgtcaccaaatgaataataagaatgaaagggagccatgacctataatggtcttccccctttatttgccaggcaaaatcttgtgcgc

SEQ ID NO: 46008 - DNA, 466 bp, Glycine max
  unsure (1)..(466): unsure at all n locations
ttgatgactttaactagaacctgtgagaaatcgatattcgatatctttgtcacacatcatactatccggagagagctagagtacatcctgaagcgaatagtgagtgagctaactcagacaacatatatatcacctactgtccgatgagcgaggcagacaacgtgggactcacgtagtatacagcatacctcctcgcgcacaacatgtatggcgcttggcgcgtgaacaacaaatggtgggtggacgcaatggaagcgaagacgacgtcccaggaacagagatcagctataatagaccatgttagatttcatcatagaatcttgactctgcgtgaaattgctcactcgatatattagctgctctccaagaaatgacgcagtcgatgtacgacttgaatatctttgaacactgaaaatgaggtgtctagaactatgagatcgtcatatttacactcctacactatcan

SEQ ID NO: 46009 - DNA, 564 bp, Glycine max
  unsure (1)..(564): unsure at all n locations
atggatgaacgcatcatatacctacactnattagtcataagtctgcatacatgcncgccctctgcttgagattctctatgaccgaactctgatacattttgtattggctcaagatacagaggagtgtgcgtattaataccatatacaagactgggaaggacaacgacgatacggcgccttagatcacgctcgtattgacatcacaacttccacacggcgggagaacaatactcgaccaaggctcttaacgcgattcgctcttaactagcactaggccaagctgcctgggtcctaggaacatgctgccgtatgcccatcgtacggagggtgacaagtggttgcacacaacaatggagagcctcacttgcttctgatagtgctgccgatatgcaaaccatccagcctacgcatacgatgcctgattacactggcgatgttattaagggctctacaatcataacacatgcgccatgtcccatactttttatggaccaaaatcactgtgacagcacaaggactcatactatctcttacccaaccttngctaattgagtcattcacttg

SEQ ID NO: 46010 - DNA, 416 bp, Glycine max
  unsure (1)..(416): unsure at all n locations
cactanaatcttatatactacaaatttatatattcttatcacataattatatactttgtgagattacttttcttcgttcctatctctaaactcatgagtaaccaacaggttgattggaaatggatttcagacaagaaagatttaatctggattccatagttgctattaaattcagagcttggaattggatatcaactntggggaaaggactggatgcttctctctattcatggcgcttggatcctacacattgcatcaaatttctatcatatggtcattcataatagtagtcatacgtaggggaattacggaaaagtattaggtgagtcatggtttttcgaacatatgtgatagggaaaggtatgctcttccttatgatttcacattttngatattggtttgcttctttatctcta

SEQ ID NO: 46011 - DNA, 394 bp, Glycine max
gcatcttttcttttcttcatctgtctttacaagttcctcatcgcttatgggattatcattgcactcctttcttctctcttcatttatccttttttatttgttatttcgagtctaattctctctctctctctctctctttgttttttaattaggcgatttcactttgatgtctaagaagcaacctaagcgccaagagattgaagataaggttacatgaatgaatgagatgcacacacttgatttcctcattcttcgtgtcttaaataaatgactctgtcttttccatgtttcgtttcctcccacgctgtttggattactggtgctagccgtggaattggataacaacaactctaccatgtgttatatttctttatatcactcttctaacctatag

SEQ ID NO: 46012 - DNA, 404 bp, Glycine max
  unsure (1)..(404): unsure at all n locations
agctngctctatngaccagtgatattgcaggcaaatatgtggcattgtccaactgcgcattgtctattcctcangctgccagcaggacctgaggccccctttcttggtggaagtcgctcgaaagaaaggggaggaaacactgcggcgaaacgaaactgcttttccaatatgggtaagtcctcaatcaacactgcatcaacaccacgcgtggacctgcaacctccctatcccccanacctctgttcctacctcactcgatcctcatccaccaccatcacccatctaccctaaacccaattctctcttccgccagttcacgatcccaacatcgcaccaacacaggacaccgcacaccatgaatcanacggcaatggagacggcgcccttcgaaagcgtgcccctcg

SEQ ID NO: 46013 - DNA, 292 bp, Glycine max
tgacttgatctcgccatggcatgggaattctcacgacgtgcgtggcatatcccgactttcctcggcttctggatccgtgggtgagtggccgggtcgagtgaaatggcccgtccaactgatccaacttgtatcccctcctgtggccgacgccaccacatgggacagaggcacagcatgtcggagatggatgcacaacaccatcgtgagcgacgtgcggacagaagaacgaatggatcgaggccagtatgtgtgtggttgggatggttggttgaaggctgcattctccccggat

SEQ ID NO: 46014 - DNA, 370 bp, Glycine max
  unsure (1)..(370): unsure at all n locations
ttaagcaccgcggctgcagcttgatggttctcatgaaattaccccttggttgtgattttgggctggttgacttctttgctcctagttgaattgattccncagatggttcctccaacttgagccttgtgtgaaattcctctcctgattgaatcccagcgatcctccttggttgtagccttggaatccgtggcgattctgtactcccatgtagttcacgtccctggaaaaatcttcttggactatgcattgccctagctcgtgtgctcctccatagatgtggcatccccctatctgcatgactgaagagtgagaaggacttaccgatgatcacgaaggatggcgtgatcactgcgccaccatgtttctatca

SEQ ID NO: 46015 - DNA, 413 bp, Glycine max
  unsure (1)..(413): unsure at all n locations
agctgtgaacaatatacttgctcttcatttaactgtctttgngcttggcggccacgctcaacanagtattnntgaaacctactgtacgttgatttgaccaacgctgttatgggaatgttgcgacaatccttcanaaccttattgatacattctgagaggttggttgtcatgtggccatatcgacgtccttctctatcataagccatcgttcatttttcttttgaaatgcgatcaatccatgttgctatggctggactcaattcacgaaatttttctaaattttgataaaaaaatgtgcttgcaaggagtgtaggctgcataaaattagttatgaataacaattntaagtacatatgaaagttaaataaacgtcaaccatcaaatatgaaatcttacccaatttcttcaacatt

SEQ ID NO: 46016 - DNA, 665 bp, Glycine max
  unsure (1)..(665): unsure at all n locations
ccgactctacacanntctcctctattccgcaacacgtacnttcatatantnaactacataactnnnnntntnttaannnanataggggncnaaaacatagaccccttanatggacatcgatggccaatactganaacnacnnanagnnnancngcangcncgcnagctagacangnaanggagaagttctaccactcgaccttgtaattcacaccaggaacataaacacccaaacgatatacaccacaaaacaagaactaggaacagacaaaactcgttacaacgtaatttatggaacagagctctgaggacactttacatgcatgtaacgattcccgacagtcgaggcaattcccttcgagtgaaagatggctcagagctctgaaactgagacagaccctcccactgcacaaaagtttcagaggatgaagaccatagagaaagaacatagagatgctttggatagagctgttagcatacatgtacctcatgcagtggacacatgaaagaacgaaccgtgtgagaacaatgaaagcgatgaagcatcctggacaagcatatatnaccgcccaagncaccaactacaatcatatggaggaagggcacaccgcggtgaggtactcgcacaactactgacaaataagagagaaactggaatgcgatag

SEQ ID NO: 46017 - DNA, 482 bp, Glycine max
  unsure (1)..(482): unsure at all n locations
taatgcctgacctgaaatgaaactcgcaagccgccngaangagatgggaactgcttttacgttttatgngacaacaagagttgcaatatttgtaactcatgggtcgccatgccacatagcagaagacatagctcaatgtggtcttcctcatagttcaccgaagatcaatggaaagtacattcattctcaccttgctgctagacttaacaagataatggtatttgctcttactactactcatcgatagagccccgcctatatgattaacaagtgtacttcctaatactggataactgtgttaattgttgagcggaatacgctaataaagttattagcaatggtcttttcttccaactttgcccatctgtgttctatcagcgaaatgtgtcgcattcgccacatagctgctattaacaactgatgaacaataaatgatgtcgagccgccctctctaagaggcttttggtttaggttgtcatgct

SEQ ID NO: 46018 - DNA, 446 bp, Glycine max
  unsure (1)..(446): unsure at all n locations
agctngngagcaagctttcttacccttcattatgtttattgtcacaccgctagtgaaaaagatgttggaactcacaaaccaagaggggggcgaattggttactaaatcaaataaacctttaaaaacgagagttaaaaaaaatattnctttccaaggatcatatcacaaacatttgataaaccaatatttaaccaatcacccttaacaaaaaatcctttgttaaagttctttctcaaaacgatattgtctctaaccttcagtaaactgatcaagactagaatgagaaagaaaaataagatccaaagaagatgtgcaccaattgttatattggttcactctctatctctagagaagctaatcaagttatctaatccacaccaaaatagaatttcactatgcatataanattctaacaagcaatcataatcaatctcagctcctaccct

SEQ ID NO: 46019 - DNA, 288 bp, Glycine max
  unsure (1)..(288): unsure at all n locations
ctgacatcaattcacgaatcttcattctgtcttcaccatgggtcaagcccatntctgctaataagacactgttgttccaggatatgggggtttatttggccgtgctcatcatcctgctttatacattctgattccaagtgagatactatattggtatgggctgtcttcaagggtcctttggtaggagaaggcagtatatgatatgttagatggtccacggccatttcctggttgtattgggcctgttctctagcccccccaaccgtttttcttctaacataatattta

SEQ ID NO: 46020 - DNA, 315 bp, Glycine max
gacccttaggggctatgctgatggcttcttaccgtcccaagcttcaattggagacttgtctttacagacttagtaggacatctggtgagtatgtaaactgcagtgtagactgcttcagcccagaatgtgttagagagtccctcttccttgagcatcgatctagccatctccataactgtgcgattctttctctcggacactcgcatttgttgagtagaatatgcgactataagttgtcgctcaatgccttcatcctcacaaaatctttcatactcgcgagaggtgtactctgtgccgcgatcacttcttagtact

SEQ ID NO: 46021 - DNA, 81 bp, Glycine max
cgtgcgtcatatgtccagcttccagttcataatttccaacagaacaagatgttaagtagagagagagattgagagagagag

SEQ ID NO: 46022 - DNA, 468 bp, Glycine max
  unsure (1)..(468): unsure at all n locations
agcttaagctccttcaactgcacaaggctcttaatatttgaagagtatccttgtggaaccttcacctgacgaagacactgacaaaaacttatcttctncttcttggacaaagtatggcaggctgggggcaagtaaattntcttcccatcagaccttggatgcaactgtgatcttatacccatatcagctagatcttgacgggtattcaagccatccttcgtcttgccttgaatgttaaggagcatcccaatcacactgtcacanaacattttctccacatgcataacatcaatacaatgtctaacgtcaagatcacaccagtacggaagatcaaagaanatggacctcttcttccatatgcaactctgacttttatccttcttttgnngtcttccaaatacagtgttcaggtgttgaacccgctgatatacctgctcaccagtcaatggtatcggcgcaatatcatgc

SEQ ID NO: 46023 - DNA, 314 bp, Glycine max
  unsure (1)..(314): unsure at all n locations
acataaatntgcacattatccaactcattatttgttctctcgataaacaatgttatgtcaacttgacctcttacaaaagattgcccaataaagaaattgctcaatctttcataccaaggtctaggtgctagctttaaaccatacaatgcctttctcaacttgtaaacacgattatggtgttcactgtctacaaaacctagaggctggaccacatatatgtgttcttcaacgtatccattgagaaaaacactttgtacatacatccgatacaacctgatattcatactacatgcttaagcacacaacaacctaat

SEQ ID NO: 46024 - DNA, 388 bp, Glycine max
  unsure (1)..(388): unsure at all n locations
gcttctcatggcctcttcatagctcttanggtcatcatcattatgatattcctcattngacatgtcatcttgcaccattaagtttaatntattaggtgcatgatgcattcgagtagatcttttaagaggttcttgtgttggattcaaaggttgttgcaattgttctaagattggttcattaacttcttcttgaacaatgacttgttcttgaactatagctggttctttgagccataatcgttgagttgaagagctttgtcctaatttcaaanaatcaaagaaaggcctctcagtttccatctcatgttcttgagttatgttatcattggtgacttgagtctcatcaagttcaatttctttagcatggtttccttctacaagaaactct

SEQ ID NO: 46025 - DNA, 456 bp, Glycine max
  unsure (1)..(456): unsure at all n locations
gtcttgtaatcgattaccagaggggattttcataatattatttccaagtcacatctattcagatgttttatgaatgacaatcaaaggtgacttggaaacacgaatttaaagagacttttcattgcccaaacagctttatcctctcaaaaagattccttggtcaaccacttgcatactcaataaagaattttgattgatcttcattatacaatctatctcttttaagagagatttcttcttctcttcttcttatttctgacaagggattaagagaccgtgggtctcttggtatagaggactcctgaatacaagggaagggttgtccctgtgtggttcagactntgtaaaaagagtcttacaaagagaatggaatatctcaagtgggttgttgatgactggacgtangcaccagaagtggccgaccagtataaatcaagtttcattcctctcttccct

SEQ ID NO: 46026 - DNA, 492 bp, Glycine max
  unsure (1)..(492): unsure at all n locations
gcactatcggatttgtcacgcatggagagcccaagaattaatcaacagattatgggtgctgcagcagccaagtttatttaaacttgagaaccatctacacgtgtaaaccacatagttgtttaatcatcaatctttaaactaatgacattgatttatnntttattttttctaanagtaagatatcctcatgatcgtaaattgtaagactaaccttctaaatataaagatcactgaatgagttngtatttttctaataaagtcttttgcatatcatgtcattaatatttttcggtgtatatctggtcaacaatctcagaacatccatgcaaaagacaaatattgtctcaagtgcaaggtatattatgtgtgctacgggttcccncttgaaaaacagactcattgtcataactaaagagatgctctctatntaagttataattatgaattagtgccatcaattactactaatgacttaaccgctactgacagaga

SEQ ID NO: 46027 - DNA, 459 bp, Glycine max
gtacttgctgtgcattgctaagaagcttatggtatcatctcagtgagatctctatacatctaccatttcatgtttctatatacttaagcaagcaaaagagttatgtgcgtcatatgtccagtttccagttcataatttccaacagaataagatgttaattagagagagagaatgagagagagagagaaagtaatcaacacttgggttcaatactattgtgttgtcatttgtcataatgatgtatcctcaaaatacaatgttattgtcaataacaagaatttgtcaattgttactattttcattgagatcaaagtgtttgttataatattggtagggcggtgctaatcaatgacgatgaaagtatattttgtttttacgatatgataaactgagataagccatgagtccacgaccttgattatctaactaacttgacaatgatatctttcgtcttttcta

SEQ ID NO: 46028 - DNA, 441 bp, Glycine max
  unsure (1)..(441): unsure at all n locations
gtcacgtaaatntcatggaagaaattttataaggtttaaagaattgtaacgccctagaattntaataactgaaaatagatgtttgatgcatttcttgtattatttaactgcttgattaatttggattagttgaagttttgggtgaattacccttgtgcagttgcttggtgtggatgttaggttatatggagtttgattgatctatgctggaactgtctgatttcgagattgacccanaacatgttttagtaaaaccacaatctcaaacttattaaccgttggatcgccttcaaactttgagtattagcttgcaaccccagtctgcaggttntgaccgttgggattngcaaaaataaaatatctaaacagcttgcttagcgacagcaactcgctaagtgcaattcttcccaaaagaaataatatgcttagtgacaccatctc

SEQ ID NO: 46029 - DNA, 525 bp, Glycine max
  unsure (1)..(525): unsure at all n locations
atttttggatggatgaacgcatcatnacgtttgcatttcgacnangctcgatataatnacccacacgccanatgtgaggaggatttatgagttgtttatgttgttatatatgaaaannnccgggagncgagttctttatgcatgtgtaagagaagatgcatcacatccaacacatgtgtagaagaagatattttttttaaacatgaaaacacacacatgttaccatcagaacactcgtttcatcaatatatcatattgtcataccctaatttcatccggcgattattacttgatgacatgcaatctttggttagccactctgagatacttggggggctttggttgacaataaatgaaagccggagacgtctcagaatattaatggaagcaggcgtgcgcgaaccgggaattccaatgtgggggagacaaagaggaggttgtgccaacggaggttcgtccatctttaagaggaaaaagtaaaacaacatttcgggggggacctccgaggaaataaaaattgtgtat

SEQ ID NO: 46030 - DNA, 380 bp, Glycine max
  unsure (1)..(380): unsure at all n locations
agctngaaccttgatacatatgaacacgatggatatcttatgaagaggaggaagaagagaatttgtcggggtgatccttagaagaaatttcccaacaatcagtgatactctgcaagaacttaaacttctataacatacagtataaaaacttaggagacccanaaacttgaaaatatgatntgtgattgtgaattatatttgaaaatataattgttctttcttcaaattatgtgtttcacataattagagtagttntagtgtttttcttaatttataagcatattctactaggacacctttatgttcttgcaggtttatgtaaatattatgttatctggattgaatgcttttaaatagattcacgggtacttaggttcatc

SEQ ID NO: 46031 - DNA, 106 bp, Glycine max
  unsure (1)..(106): unsure at all n locations
tttcaaagtgatgacctaaacgaaactgaaacccgggtatggctttgaaagngaaaacacgttttgattaataacttccccctttcgtaattttatattttggtgc

SEQ ID NO: 46032 - DNA, 441 bp, Glycine max
  unsure (1)..(441): unsure at all n locations
agcttctggaaggcccaagtgggctctgatgctatttacacccnnccttttactaaatgcacccncttttcttattttttgtaattctttntccgtaacgttacgaaactttacgaatttcgtaacgatacttattttccttccgcaaggttacgaatacttacagattatgtatttactcctttntacctttcgaagaagtcacggaaacttacggattgcgcanaaacacctcttttcgacttccgccacattacggaatttcacggaacgcgcaagcctgcttcctttcgatttctgagacgtctcggaacttcatttattgcatgtcatcaagtgataatccccggacgaaattatggtatgacaccaaacanaaaaatgtatgcgctgtacaaatgacaatcgaaacaacaaaaacaaacattagtctctcaagtc

SEQ ID NO: 46033 - DNA, 375 bp, Glycine max
cagatttagtaatgacccactaacgctagatttacaacttcttaatgccatcaaccgagggaattaataaaaccttaatggctgagtgcaactgaaagcgcggcaaccaaaagtcaccctcatcagtcaacaagtcatccgccatttggtctaccaataggctgatgcctatgatgccaatagggcccttattacaacttggactaaacctaactaaagtccttttagatgattaacccataacatatttccggtcagacaactatacaaggattgcgccattatctacacgaactatacactctaagattgagacaaagtggtgccatttactcctcctccagttgggccatgatacaactcacaaccttggac

SEQ ID NO: 46034 - DNA, 370 bp, Glycine max
agcttgtcttgcactcttttgtctgtgtgccccatactgtcctcgaccattggacattgcaatttacgcatgatacttccctccctcatgaggccccacccacacaatttttttattgcctttttttttgttgattgattttattcaaattcgaatgttgagctaattcataacaggattagttactgcaaaattaatgaaaaatgattaaatgtggaaggcactgtgtcgcaagtgcattcaaaattcctgatttcttactaatattcctaccgtctaatctctgtgttgtaatattcctaccgtcctaccttaccttccaacaccttgaacttaagtgaagaaataaaataaatacttgtggagattt

SEQ ID NO: 46035 - DNA, 336 bp, Glycine max
  unsure (1)..(336): unsure at all n locations
ttcaggtgctggaactactttacatggtcttgatggttcctatgcaagnngaaagccttggatgaaaaaggtatgcctatgtttgtgtggatgatttctccagaattacctgggtcaactttatcagagaaaaatcagacacctttgaagtattcaaggagttgagcctaagacttcaaagagaataagactgtgtcatcaagagaatcacgagtgaccatggcagagagtttgaaaacagcaggtttactgaattctgcacatctgaaggcatcactcatgagttctctgcagccattacaccacaacataatggcatagttgaaaggaaaaaca

SEQ ID NO: 46036 - DNA, 389 bp, Glycine max
  unsure (1)..(389): unsure at all n locations
ctgcagctaaanatgttggatggtttgctagctgtttctggngactgtcaatgcaagttatgggacattaactattgtcataactatgtattctattcatacttatttcttttgcatgggttgtgttaccatcaatgtatgtcttattcagacatcttgaaaaatcaatatcccagtctctgattccaatcattctacccaacatgaatctatgagtattgatcatcactctcattntttaatatgatctttcttgcaactcttccattntgacacttcatgactttcaacttagtattcaacttattcattgttatttgttttatccaacaatccgtgtctgtgacagcaaaccatgatccactgcttgngctcccgtngacacctac

SEQ ID NO: 46037 - DNA, 415 bp, Glycine max
  unsure (1)..(415): unsure at all n locations
agctatanaccccanatagttgattgaatctacaatgcattctcaaatgaatcttcttcttctatcacatccattagcatcaaaggctcttgtgtaacatctctactccaactttattacacgtacaaggtcatccatcatcctttaaaaatagatgtataggtgaattttccatcctcttcatgccacaagcaaaataaccaaaatagtttgacatacaaaatcaaccactttacaatggttcaaaattcattgcaatgcaggatgtcctagttcctctttctagggtttctctcatttttcactttgggctcacgattccttatgatccctaatctgaggtcttacacttctatggcagtacataccattggtgcaacacaggatactatctaccataacatggctatgcatt

SEQ ID NO: 46038 - DNA, 228 bp, Glycine max
  unsure (1)..(228): unsure at all n locations
gaggtaagccttgtacttttgccaagtggtaaacttgaggtatagttctgcttgggggaagctttatagtttcctgaattgatgattgagcttctgcaaatggcttagtgttgatttcgttgatggtaagctttgattgtgcttggactttanaaaagataggaaagccgatgttggcaaaattttataactactgttggatgatgatttccacatgttagctttttc

SEQ ID NO: 46039 - DNA, 380 bp, Glycine max
  unsure (1)..(380): unsure at all n locations
atgcttganacagatgatagggggatnttctccactctatccttgaggaggattccgctccgattaaagtgttcctcttggtgttggggttcaacggcaagcaacggcggccaccgatggtcttgggtggtgaaaaaatgaggttctagggtataggtggtgtttttggagaagatgagagtgaaaattcgtgtttttcacgctgaggaagtatttataacctacaaatttcgcttagcgagatttttgcgctaagccaaagtctacttcttgtgcttagcgcaagaatttaggcttagcgcagccccctctgcactagggcgagcttagcgcacccctgngcgctcagcgcaactttctctctggttgaaattgggctt

SEQ ID NO: 46040 - DNA, 476 bp, Glycine max
  unsure (1)..(476): unsure at all n locations
tggtctcatcaaattatttattntctgtagggaattctataaataggccttctattattaatggtgtgggttaccattattggaaaactcgcatgcaaatttttatagaggcaatagatctgaatatttgggaagccatacaaatagggccctgcattccaactatggtggcaagaaatacaaccatagaaaaacctatggaagaatggagtaaggaggaaaaaagattatttcaatacaatttacaagccaaaaatataattacatctgctctaggaatggatgagtactctagggtatcaaattgtaaaagtgcaaaagatatgtgggataccctacaagtaacacatgaaggtacaacagatgtaaaaagatctatgataaatacattgactcatgaatatgaattatttagaatgaatccaaatgacagcatacaggacatgcnatagaggttcacacatataattaatcat

SEQ ID NO: 46041 - DNA, 105 bp, Glycine max
tattaaaatacgccccgtctagccatcatcgcagactggtgaattaataacattctgcgacatgaagccacaatacggatgatgaaccgaatcgcgcgcacaccg

SEQ ID NO: 46042 - DNA, 365 bp, Glycine max
ctccatagagtcagttagttctgttgctaaatctgtggcacccaaatctagctctaaatacccatttgttttatgaactttcgcgtaggatcaagtcacaggtctagccatggaagtagactcatctttgatagtgttcctcttaaactaaaagaagactctaggcaccgtgctcttgcatatgtcactcgccgtgggtggcatatactggagtcatgatattgatacattcttgcatgcatgccactggccgtgggtggtatacactggagtcatgatggcgatatgctcttgcatgtatgtcactcgccatgggtgacatacattggagtcatgatattgatacgctcttgcatgcatgtcac

SEQ ID NO: 46043 - DNA, 160 bp, Glycine max
  unsure (1)..(160): unsure at all n locations
tctatgtggagatcaccaggaggaggctgggcaccttttcttccattgcagaatgactgtaaggttgtggggggaatccatgaactggacccggactttgggacctttcttagatgatcctgctgctcatntatccaattcagtgatgggtttggggcac

SEQ ID NO: 46044 - DNA, 370 bp, Glycine max
  unsure (1)..(370): unsure at all n locations
ttatggacttaaacatgcaccgatgcaatggtatggtagacttagaaacttccttcttgaacaaaaatttgagagaggaaaagttgataaaacacatttcattaaaaagttctctcataacattttactcatgtaagtttatatggatgacatcatttttggttctactaatcgatctctttgtgaagattttgtacacaagatgcaggaggagtttgaaatgccaataatggggggggggattaaattactttcttggtctctatgtgaagaanattgaccatggaacatttctctatcanacaaagtattgcacagaacttctcaagaagtttaagatggacaaaagcaaggaggatgaaactcctat

SEQ ID NO: 46045 - DNA, 439 bp, Glycine max
  unsure (1)..(439): unsure at all n locations
agtcatcaagagattataaatatgttaccatggcataagtttcataanaagatcaatcatcaatcatctttgaatcatctatctttcaatctttttcaacatcatctctcaaacatctttcaatcaatctttcaatatctttctacagaattttctgattcatttctcttcatctttctaaaaagtttttgatcaacactttctcttccaagaaaagttctttgttcaaaaacttgtgctattcatctttntcattctcttctcctttttccaaaagaacaaaggactaaccgcctaaatntctttgtgtctctcttctccctttgccaaaagaacgaaggactaaccacctgaattcttttgtctctcttctcccttacaaaagaatcanaggactaaccacctgagaattcttttgatcttcccttcccttaagaaa

SEQ ID NO: 46046 - DNA, 510 bp, Glycine max
  unsure (1)..(510): unsure at all n locations
gatccttgagtcacctgcggcatgcaagcttgaggccatgcctccaataaataccttngataggtaaaaaaagtcaagctcagatgatgtatttttaatcaaagttggattcatacctaataatgactagcctgacatactttatttttacttctaatatcaaggaaattatattacataatgtataaaaaataaccaaattacaaaaaatagttttcaaaatatattaaaaataactaccatacgaaaactactttacatgttttagttnttacattattttttttgtatacgattttctacttgaggtaattttatttgtgttgggtaaatatattggaccatcttgttaaaaaaaatttaaaaaatagaataagtgtttgttagaaaaataaattttaataaacagataagattggtttattaaaataaacaatacattattttttaatagaaacagtttagacaattacattgaaaatacaaaaaaatatttattctattaaaata

SEQ ID NO: 46047 - DNA, 449 bp, Glycine max
  unsure (1)..(449): unsure at all n locations
cacatccttgaagacttgtgacagcaatcttcactgctttggtggaaatcccttggccccagtacttggcaactatggcatagtcaatctcagccctacacctgtcatctcctgttccaggagacacagacacaaacccaatggttacatcgtcaacgcatatggaacgagtccatggatgaggcatgcacagatctcgaatgacagtcaacgcttgctccctcgaaacaaaagtgttccatcgagtgtgaaatcatctacatcgctcaatttgaatggtcgcagggtgatttgtgacatgttcattgccataccatgtgtgttttctcgtatgntttagacttaacaaacttcgtattatttctgatcatttatattaaatatgtagctcatcgatttttattcaacagatggatgtaaatacatatctcaatacaagtaatagtttc

SEQ ID NO: 46048 - DNA, 437 bp, Glycine max
  unsure (1)..(437): unsure at all n locations
catgcaagctnggtcgtataccatctttaatttcaattaggatatgtaccattcgcgattaaatctgtttttgggtaagggaatacgtatactccttcttacaatctagtgaatttaccaatgtgaagaagaacaaaattaaagaactagcagattttaacacacatgaccaactaccaaaccatattaattaatcgattgaaattcatttcaaaggacataattattattgaaaatccacgaccaactaccagactaaccacgacctatcaccaactggaattagcttggactaaattcacacggccttgtgaaacataaattaganaaacaaacagaatgtagaaactcaattaagtctcaagccaactcgattgatgaccttatacacgaaatttcctatattttcaaactcanatccagctctgtcatccgaa

SEQ ID NO: 46049 - DNA, 425 bp, Glycine max
  unsure (1)..(425): unsure at all n locations
accttaaacgagtaatatacatattgatattntcacctggtaacatccatacctcataaaaacaattttaatacctcagagagaaaaaatgtcactaagaattatgttacttgaattaatgggcatcactatatttgttggtattaacacgaagcataatcactgaaacaaaccaagttaaattatagtgacaccaaattacactcactacatgttggtggttgaattcataggcaacactatattctggtggttaaatttaatattcacaggtgccaccttaccacaatattacaaatattaagtgcaataaaccacatatatagtgcactacattccaacacttgaaatattacaaattgtctactaaaatatngcatggaaataaaccacgttgtattaagtgtataactttgtctttacat

SEQ ID NO: 46050 - DNA, 481 bp, Glycine max
  unsure (1)..(481): unsure at all n locations
agcttcttttctgtgaaaactccttccctagttggtgctctggttcgtgttaaaggtggtgtttggtatcggatgtgcggcagatgggttttgtttctgatttaggggtttctttgtggatgattatgtgttcttggctgataggatgatgggtaatgagaagagctgatattggctgagtgttgacattgctaagctggtgggaaatttggtcatgaagggacagcagtcacaacatgggatccttcctccatcttattctctccattttccctaggcttcatgttcatcanagcaggataatcaaatttgcctcttttcaaacccactttgatccttttgccggaaaaaactaaatcggcaaagcttgaaggcgtgtaacccaccatcttctcatagtagaataccgataacgngtctactatcattattatcatctctttntccatcattggnggcactacttgagctgcctgatccc

SEQ ID NO: 46051 - DNA, 404 bp, Glycine max
  unsure (1)..(404): unsure at all n locations
cttgacctcaagttattagtggtatgtaagtatgtcttggttggccttattctgctgtctttatgtgcttaaatcaactcatcttgttggtatattattgttgtgatactaatcatactatattntgtaaaagtaacttggtgtccattcaggaaactaaataaaggatatgtcttggaagaagttcactgaatttttattttctctttgaagtcatagacccttaacaatgaaatggttgtacattcaaaaaattgttataatttctcactctgtttcacaactgtangaggatgttttgtatgcaagagtgcgtaccattgtcgctgtagagatctatttcatgtacacatgtgggttgccttgatttngcttactgaaatagtacanagaaatgcttatta

SEQ ID NO: 46052 - DNA, 369 bp, Glycine max
attaaggtattagcttatcttaatcactcaatttttactcaagaatgactcttggcatctcatggaaatcgtgtacatcaagcccacaattagtattgtttccttttgaattttctactataaatggttaaagtacagctttgcaaaatatggatattcttgtttttttcatcaaaactagtaaatactatcctaaacaccttgattactgggctaatctccctagaattaagtgtaaccaaagtgaacctcagacagagattgatcgaggccgtacccgaatcatataaacatgataatgcagtacctatgaagtgatcctatgtctgttcccaacgagcagtgacaaaccaaatgttcataatatac

SEQ ID NO: 46053 - DNA, 304 bp, Glycine max
  unsure (1)..(304): unsure at all n locations
gttatgtgtgatttaactntggtttcacttatntactttcaaactcattaaaagatgacttgcaaagtaaatgaccgattgaaactttattttacattgataaaccgaggttatgacacaaccgatcagttgaaactttattttacaatgattaagtgagattacgatacaaacgatcggttgaaattntatcttacgatgattatgtgagattacgacacaaacaatcggctaatatcgcttcacacaaagaaatgagatcactgatgtagaagaatgagatgaagatgtgaaaagcaacaag

SEQ ID NO: 46054 - DNA, 311 bp, Glycine max
  unsure (1)..(311): unsure at all n locations
attgggcaaaattggatgaaggcaagagtgcttctcgaaaatctgcacttatgcagaattntgctgtcaaataggggcagtagaattttggctttgtgcaaaaaaatgcttgtgtgtggttggctgtggaaagagtantacagaatgagttctggatgtttgttagtagatcccaacggtcaaaatgtagacttatgtactagagacttccagtaaaattttcgagtcgatccaacggttaacgaattggaacgaatgatatgttactagagtctttaagtgagaaaaagctgtgattntggtttgagttt

SEQ ID NO: 46055 - DNA, 355 bp, Glycine max
  unsure (1)..(355): unsure at all n locations
aattagtggattagttggatcatgaactntgtcatctcggttaagtatacaactcgtctcaacaatgataaaattggccatatttctcctagtagatggttgcgtcgaggcaaccctttatccctatctttntatcatttgtgtagaggatctatcgactctaatcaagagacatgaagtgagggggtacatccacggtgtgagcatttgtaggaaaataagtttgcatctcctttttgtaacgccctataattttgctaactgtaaattgatgtgtaaatgtatgtattatgttatgtgagtatgtgattaacttggatgatttgaggtatngtgtgaattatccatgtgtggt

SEQ ID NO: 46056 - DNA, 394 bp, Glycine max
  unsure (1)..(394): unsure at all n locations
acatggagctacgtcatgtggtatcaagagcatcttcgtctaggtgacgttcttttgcttcctctatcanttttgttggtcaattcactttaattccttgttcttcatcttattctccatgtatatcctccattntcttgtggnttggtaatgtttagagtagattcaacaaaataaactgattaaatcttagatctactcttgaattttgattnttgttgattgaattctagatacattngttcatgtattcttgtcattcttagaatatcttttgaattttgagtctaattcatgcatgttatttagttcataacatgttctaaatcaattcctagaagtagtcttgctgcagaactntgttntgttttctaagtttcctatatgatgcgta

SEQ ID NO: 46057 - DNA, 419 bp, Glycine max
  unsure (1)..(419): unsure at all n locations
gagtcattcatccctatgagatgttgttgaagtattggcgaccagaattgccattccttggattatatggttgaaccaagctcatgtttttacaaaaaggttcatcaagtcaagttgaaatatggaagtaaccgtcttgcaaaattgtggcaaaagatgaatcgagtcacatcactgcttcgtctactgccaaacatatttaggattattgatgtccttgttacttccagtttcaccttgacaaagatgtcatggaccatgttgaaaatctaaattgattcaaccccatatcctgcgtaaaaattcgcaatacttcaactgtacatcattcgcatacatcccatgctttcattggttgantgctcattgcattctttccttganaaataaaatanaataaaataaaatgaacttaatca

SEQ ID NO: 46058 - DNA, 395 bp, Glycine max
  unsure (1)..(395): unsure at all n locations
aacagcaccataagtcaagcgaattattccaccaacctgcaaggtaatacaaatggcatcttggctatccttcaaatctcaatcgagatgatacaaaagatggcattaataaaaaacacaatacacagccctccaaatgaaacaatgtgnacttcctttnaaagttctaatagtaactaaatgtatcaaatttgcttagtctattatcaattcctggtaattatctgaaaaatattttcccaaacagaanagtcataagacattgaccacaagcaaaaagggtatccaaatcaagtaacttcaaaatttatttgaagttccaacggtaactaattattagccaggtcttcttctgaatatgtntatanagagttttctcatcttaattatgtccc

SEQ ID NO: 46059 - DNA, 537 bp, Glycine max
  unsure (1)..(537): unsure at all n locations
gggcatgcgatgttgannncnttnggtagattaccnttgctantacgtgtcactatcgaatactcaaccttatggaacanataataggagggagagcgaaatttgacctatatagagtggtactcactgcaggcgcaactgcagccaatgaactcttaaccttcattcttgctaacccaggagatgctctacttgttccaaccccttactatccagggtaagaactgattaatataccttaaaaaaaatattatacatgtgctcacgtacgtaaagttttaacgtgatcaaaagtttaaactaaaaaaattatggctcttttgttttacaaatttgatgaagatttaagggtgaaaactgggtgaaacttagtttccattcaatgggaacagttccaccaacttccaaatcatcttaagctttgaggttgtttcaagaaccaacccaagaacacaatgtgaaggaggggttcacaacccttaacctttggtcaaaattaacccggtttgaagacttttaattgaattcagaaatcat

SEQ ID NO: 46060 - DNA, 466 bp, Glycine max
  unsure (1)..(466): unsure at all n locations
agcttacaacatcaacaacccgcattctttgattcatttaatataggggaatttattccaaggattacctaacgaagacccctatgcacatttggcaacgttcatcgaaatatgcaacactgttaagattgttggtgtgccagatgaagctataagacttagcctatttgttcacggccgacaagtgtaccagatcgcacaagtagtataaaacggtaagaaccgaatatcaaactcttggggaacttgtgttatctggcaagctatttcggtaaataggtgtctggtatgaaaagctgattgtggttatgaacaagtatgtaaactatctatgcaaaaagaaagaanatcacgcaagagaaatgttgtgtaaaaacaagtagagaacgccgtggtctttctaataggttcctgatgcanaaacgaatgttctctatctaacaatgctcacgtattcctatgttgg

SEQ ID NO: 46061 - DNA, 298 bp, Glycine max
  unsure (1)..(298): unsure at all n locations
agaatgatttccagattgaatcaagaaccaattcgagaatccagagaagtttgatttcaagattcaagaaaagatgaattcaagttccaagagaagaaatccagaagacttcacaagggaagtattgaaaagattctntcagaanacaaacatagcatagtttggttttcaaagagttttactctcagtatcgataccagttcctgaataattctagggcaagttgattcaaatgggtatcgattacagaatggtattgatccaggcttgacgtggatcaatcatggagagtctcttc

SEQ ID NO: 46062 - DNA, 456 bp, Glycine max
  unsure (1)..(456): unsure at all n locations
tatgagaccaanacatgacatagaacatttccaacaatctaattctcacgttaatctagtaaatcttgtccaagacacaaacgaattatttagaaatgtttctcacagcatggggaacaaaacccctcaaatcattttacataatcatatcaaaatcaaaggaatcaaaatcataggttcaaaaacaagaaaacaccaagagtacttaattttatcaatgtagtcggtgctgtacaagacctgatattgcttatgtagtcggtgttgtgagttaattcttgtgtaattctaagaaggaacattgngctgctataaaatagatactcaaatatcttcgtagcacaactagcagtgtttgtgcttntataanggaaagcatgtgttagaaggatacacatatgtgggcatggctagagatgtnattctagaaatcaacatangatatctactacttta

SEQ ID NO: 46063 - DNA, 182 bp, Glycine max
  unsure (1)..(182): unsure at all n locations
agcttncttctagtgcgtcacgtttaaaaccgagctcgatggtggtgcgagcctttgatggtactctgcgggaagtgatggnggaaatcgacattcccattcagataggcccccacacttgcaatgtggtgtttcaagtaatggatataaatcccgcctatagctgctgatgcaatcctacc

SEQ ID NO: 46064 - DNA, 395 bp, Glycine max
  unsure (1)..(395): unsure at all n locations
taagatacacaaaatagcacaaatgaagtcgttctctcaaaatttaaagatcacactctcaccgggatatgggtaatgcattccttcataatcaatctgacgaccgactaacattttcagacataattccaatcatatgctcattctcttctaatgacaagcaaacttgatccaaacaatcatccgatcatcccaatccattcaattcatacattngctaaatcaaatcatttccaaacactcattccataccaaacaatccattgcatacaatgttcaatgaattcaatggtcaatcaagctttntgtacaagcacacaacanactatgctacttgaaataanatgctgaaatataaaagctgaaattanatgacataaagcattaaataactg

SEQ ID NO: 46065 - DNA, 507 bp, Glycine max
atcctctttagtcaccttcggcatgcaagcttccatcatacctcttgattctgaaccctatgttccaatcaagagatccttccttataggcacttcagtcatagcatcctttggttatcaaaaggagcatgatggctcttgcgtgaagaagggtgctcgacatgttggtgaagaatgacatgatggagaagattcatctcttctttcaaagactttggacaggtttgatggccttcaaacctttgttgatgaaaggtttgacaccttggaattacaagtagatatgcacttcaatgagatggagtcaagaatcaccaaggttgaagaagatgtgtcttacattcattcaagctttgatctaccaccaccgccgccaccatcatcttagtgttatattatgttatattaactagcactttgatttccagccttgtatttggctatattattatgatatttgaacaatttactatctctttatgtgtctggtatgtctgaacaaatatt

SEQ ID NO: 46066 - DNA, 473 bp, Glycine max
  unsure (1)..(473): unsure at all n locations
cactcagcttggctcccaacactttttagactttcccaanatctagaagtaaatctaggatctctattagacactatgctagatggcacaccatgtagtctgagaatctcactaatatacagggaggctaacttctccaatgaaattttgatattaattggaataaagtgagtaggcttggtcagtctgtcaacaataacctagatagaatttaaacctatgagggtcctagatagtcctacaacaaattcatggaaatactgtccatcttccactgtggtatctctaaggattgtaacttacctgaagttctttgatgttctatcttagccttctgatagactagacatgcatacacaaattcactaacctctctcttcatgttgggctaccaaaacattgtctttagatcttgatatatctcggtagcacctgngtggatgctcaagttgtttctttgtgatgcaatccta

SEQ ID NO: 46067 - DNA, 487 bp, Glycine max
  unsure (1)..(487): unsure at all n locations
agctntgattcactacaagggtcaaagcagattatctacaaagactctactctagagagtaagaaaaataaatccctatcacactgctacaaagtcatcacaaaagaatattctattttatcaaaattgaaaagcattaaaaaacacacacacggacacaagaggctatatcaagcgggtctaacttagttggttgaagaatcaacctcctcatatctgtttttgatacctactgataagaaaaaaacgcgagactatataaaaggaatctaaagcagataccagatttccagcaccaactgtgcaaaagccatttatgatgtccacaagaacgagaccatttacagcatcttcagctaaaaccactgattcctgctccagaggaatctcattctttaagagttcaactgtctgtgagaccatnttatntttggttttcacttgcctgatgtcagagatgcctagcaattatgtattcaatgtcaca

SEQ ID NO: 46068 - DNA, 296 bp, Glycine max
actatggagatggaatggcgttcttccttgctgatcctaatctaccacttctgaacaatattagagaatgacgtggtcttggccttgaggatggcaaacaagtgctgaattgaactcaaccatttgcaacagtggagtttgacaccttccacaatacatgggacccacacggtggcactcatgtacgtctgaatttcaactctatgatgtctaacataactaagcaatggttgacagatattcaaatatggaatgcttataatcgcagcattgagtacaactcaagcactcctaat

SEQ ID NO: 46069 - DNA, 482 bp, Glycine max
  unsure (1)..(482): unsure at all n locations
agcttctcaagctatagtcggtttacctctgtgtttgccctatgggcatcagcatctctaactgagcgtccctgctgtcaagggttacaaatattctatacattgtttcacagcttcacatacccatttttaaataattaacacatttgtatgacagaataaaattttgattgagaatgccatgtagtatcacaaatttacatctacatcatcaatgcttggtcccaatttgaaactctacaattcaatcaagtccttcatctctttataaacatcattacaggcctttccatgttttgttagaatacattaagtataattctcacaaatcagtaagcccatgatagcatttaacgcagatcctgataccgttctatgaactaatcaagagtgaaacaacgatgatgagaactgcttctcagacatggngctacattcggatcatggctggtacaatctttggaggcatccttggattctat

SEQ ID NO: 46070 - DNA, 398 bp, Glycine max
ctcatcttggtggtgaagctcctctttctatggcttattctctagaggatggtgcctcatctcacctcttctcctttgtcttctgctgcatctccatggtggaaaatcaccattaaaggaactcattgaagctcaaagatctagcctccatagaagccccacaagcaagcttgcaccacttccctcattaccaaggaagagatggtgaaagctcaaagtgtgtgaaaattctaaatggcttgcgacctaaggtgaaacaagctgtgaattatcaaggtgttcatcaattcccactatcgtgaacatgtgtaggaattgggatgaagactcctgagctagggtgacgtattattggaatatgggcctaatgaagaacatgaagaatggatcccaaaatc

SEQ ID NO: 46071 - DNA, 443 bp, Glycine max
tatcatgttcaaaatgggacagcggttttatactttgtgcccactgatgatcatctatctgatatttttacaaaatcattaactgaagaaaggttgatcatgctaaaaggtcaacttcaaatgatctctattaatgattgacttaatctttatatgtcaaaatgtcgcatccaatgatatattgtccactccaccttaaacacacactcataatgttcaatatatggacaacatatcatgcattgtattcttatatatgaaatgcaacattttcttatcgaaacgatgtaacgcttcatgctgagttggttttgggaagtgaacctaataattgtatttgaaaaaaccaaaaagtccataataataccttattacattgaaactcttggcattacacactctctacagacctctaacttactatctaagtattaaaccactct

SEQ ID NO: 46072 - DNA, 363 bp, Glycine max
  unsure (1)..(363): unsure at all n locations
cctcatcactttcttccgaagctttaacctcattgtctctcacagtctgtagatttgggagccaatccaatccttgtgtgcgaactctcagccacttatgataaccgccgatgatcccattactgcttcccctaagctctctgtcctttcttcacaccgcatcccatgccttgcgaactccttggagtacccttgcgttgtggtcactgaaaccccgtgcgatgaaaggcgtgatgctttcatctgatggcactcctctcatggngtagccaagctgtcttatggtgaggacgggattatatgtgtgccatctctagatgatntgaaagtgcagagtttggaggaagcacataaaagtcgtct

SEQ ID NO: 46073 - DNA, 416 bp, Glycine max
  unsure (1)..(416): unsure at all n locations
gcttctttgtagacctcgatcggtcatctttccaggccgaggtcgaccgtcatttttttcgatccatttcggtgaataatatttttttgccgagatgggctaatgttttcctggccgaataaatgggaaaatgccagtttcggccgaaacgaanagtcggttgagctcgcacaaaaaaacctagccgacctacattntataattttcatgcaaccccaaaacaagaaaacttcctgtgccgtaaaaaaaaaaaaaaaacattacatgacagcgagcgttttgaaaaacaaaattgcgcaacgtcggctgaaaaatatcagtcggggctttttcacgaccgatgtcggctattgagttttcaattcaatccgagaacgaaattgcatgatgtcggttaggaaatgttcgatcggcat

SEQ ID NO: 46074 - DNA, 369 bp, Glycine max
  unsure (1)..(369): unsure at all n locations
tcaccggatgacgccgatcgaacatnttctaaccgacgtcatgcanatttcgttcagggattgaattgaaaactcgttaggcgacatctgtcgtgaagtagcgaccgatatttttcagccgacattgcacaattctttttagaaaagctcgctggtcgataatggtctttttacggcagagtaagttttcttgttttggtgttgcataaaaaagttacaatgtacttcggatgggtttttcgtgcgagttcaaccgacattttgtttcggccaggagaacattagcccacctctgcaaaaaaaatatttgctaaccgtcttcatgcatatgtcattcaacgattgaatagaaaactcaatagccgacaa

SEQ ID NO: 46075 - DNA, 447 bp, Glycine max
  unsure (1)..(447): unsure at all n locations
agctntggagaaccaagccaatcagaatgctagacgaaatatagatgggaatagaggtaacaatggtggtaatgacggaccgaggcagaaccgggttgagggagtaaagctcaatgttcctcccttcaaaggtagaagtgatccagatgcctacctggactgggaaatgaagactgagcacgtatttgcctgcaatgactacactgatgcgcagaaagtcaagctagcaacagctgaattctccgactatgcccttgtttggtggcataaataccaaagagaaatgttgagagaggaaaggcgagaggtagatacatggactgagatgaaaagggtgatgagaaaaaggtatgtgcccactagctataacagaaccatgcgacagaaactccaagggctgtcccaagggaatttaaccgtggaagaatattataaagagatggaaat

SEQ ID NO: 46076 - DNA, 395 bp, Glycine max
  unsure (1)..(395): unsure at all n locations
agcttcaaccaaggagagatggaccatntctagtgctagaaagaatcaatgacaatgcttacaaagttgagctgcccggtgagtataatgttagttccaccttcaatgtctctgatttatctctttttgatgcagatggagaatccgatttgaggacaaatccttctcaagagggagagaatgatgatgacatgaccaagagcaagggaaaggatccacttgaaggacttggatgacctatgacaagggctagagcaaggaaagccaaggaagctcttcaacaagtgttgtccatactatttgaatacaagcccaagtttcaaggagaaaagtccaaggttgtcagttgtatcatggcccaaatggaggaggactaaatgacaccactttgtttc

SEQ ID NO: 46077 - DNA, 379 bp, Glycine max
  unsure (1)..(379): unsure at all n locations
cctggtttgggcaatagcaccccacttgacatcctcaaagtctcctgaccccgcgacatatctccaggtaccactctgtggtcaacgaataaaagtatgaagtctcacccttccacacttcctcatttcaagcttgtaagattatggggtacccatcacatgtggtactaggtggcggttgggcgatggtgcaagtcaactctccacatccacagatcacacataaacccaccatccccagttgcccaccttcactgagctcacgtactcccacgtagcccttatcctcgttcctctcaacaccgggtccncataaatctctccaagctttcacaacatccaagcaattcaacatcccaaccatcatgaactatcaaaa

SEQ ID NO: 46078 - DNA, 459 bp, Glycine max
  unsure (1)..(459): unsure at all n locations
agcttagaagctggcattaggattgctttttatcacttcatgccacatcagcaatttagcacagctggcaacataggatgtattcaaaagttntctgctgtgtgaatagtacatagacgctaaaacacaaacatttcttttattcaagaaaatatgaacagtttcatgtatgactcatttacaaccattaatgggttaaatgaataattaatttctagcaacaatcaacagttntcagagacgaatagctggctagcgttactcttcaactattagtatgcttgaaactggtttgctaccagaggactagcctcattgaaccatcacccattgcagcaaaatggcatgttcagttgagacatactagcacaaacaaggcaccaccaagggctaacttctgcacaacccanacagtngaataagccaattcattcgcanaaatctccattcacatagcta

SEQ ID NO: 46079 - DNA, 294 bp, Glycine max
  unsure (1)..(294): unsure at all n locations
gaacctaaagacgatactgaagttcctgagcttctttgccccctttgtcgccggcaggtgaaaggttggacagtggttgaagtggcacggaagtgtctgaatgcgaagaaaagaagttgcatgcaagatgattgctcttttgtggggaattacaaggagcttatgaagcatgttaggtctaagcatccatttgcacgaccacgagaagtggacccactataagaagaaaaatggaagagatttgagtgtgagagagaacggaatgatgtgattagcacaantttatcttcaaca

SEQ ID NO: 46080 - DNA, 341 bp, Glycine max
  unsure (1)..(341): unsure at all n locations
gctgaatgtcatcttctttctttattctcatttcatgaaaggaagactcaagttcaagtcacccacactatttttttgttattgagcaacaagaggtaagaagagtatttatttttatgaccgactatgtgctagcactaaacttatttattggngattttatggtaacacaaaatctgaacttgtactgcggcactaatttgaaatgaatgggaatatgggtaaattgagtcctgacacaaacctagaaagccaataatgctatttaattggtacctgggaataatttagtaggcacaaacatttatgccattcgatattaattgaggaactgtatatac

SEQ ID NO: 46081 - DNA, 482 bp, Glycine max
  unsure (1)..(482): unsure at all n locations
tgtatgaatatggggtacccatcacatgtggtactaggtggcggtcgggcgatggtgcacaacaagttttccacatccacaatgcgcgcataaacccaccatcccctgttgcccacctccaactgagctcacgtactcccacgtagcccatatcctcgtttctctcaacaccgggtccccatcaatcctcccaagcttccccaacatcaaattaatacaacattcaaacagcacaagctatcacagccaagcaaaacagggcaaaggcagaaaactctgcccaaaacaccaaccaaatcacagctnttctcacttgaagaccccagtaacaattccttcgttccggttcattaaccgttggatcgaactcgaaaatttactggacgtgtctagtacataagcctacantttgaaccgtgggatctactagcanacatncataactcattctgcactactctnntcacagccaatcacacaca

SEQ ID NO: 46082 - DNA, 331 bp, Glycine max
ctgcagcttgaaaagtccttctgattctggttatacatttctgacttgattgcatgagatgaaatgcaaagattggacctcctgttagttgttatcaattaatagcttaaacacttgtgcttgagtgaaacaatagtcgtgagactgtggtttgagctactttccttgatatttgtcttatgaataacttcatctaattgtattggtcacattttgctctcctatttgtctagccgcatattctgtgaaaacaagtgataggtacacattgcttcatctttctcatcatgcaatcaataaatatttatgcatacacctttgtacataaaca

SEQ ID NO: 46083 - DNA, 409 bp, Glycine max
  unsure (1)..(409): unsure at all n locations
acagaagtcgttcagttctattcttagaaatgtgacctaagcngttttgccataatgctcctgagtttgtattatcaattctacgcttagtaccacacaattatgcattaaaggattcaccataagaagctacagtatcaagtaaacatagattatcattaaccaagagtgaaccagttccaacaatatctgaattaaaagacaacctgaacacattgtttcctaatgaacacaagtaacccaatttgtccaaataagaaactgaaaccaaatttcatctaaatgatgatacaacanaagtgtctttcaaatccaaataaaaaccagtacataataataatctaaagtgctctatagcttccactttctaccgattaccatctccaacatagatccatctctcagaatc

SEQ ID NO: 46084 - DNA, 425 bp, Glycine max
  unsure (1)..(425): unsure at all n locations
agcttgaaattgatcaacgcatgctctcgagaaaatcgagtgggtcataaatttcacacagatgtccgattcggggaaataatatatcgagacgcacgaaattgaacaacggaagctctcgagaaatncgaatggtcataacatttcactcggatgttcgatccggggacataatttatcgagacgctcgaaattgaacaaccgaagctctcgacaaattagaatggtcgtaacttttcacgcgaatgttcgattcggggacataactcatctagacgctcgtaaatgaacaacggaagctctcgagaaattcgaatggtcataagttttcacacggatgtccgattcgggaacataatatatcaagacactcgatattgaacaacggaagctctcgagaaaatcgaatggtcataacgtttcac

SEQ ID NO: 46085 - DNA, 407 bp, Glycine max
  unsure (1)..(407): unsure at all n locations
tatcaataaacacaagttgagtactattcagataattagagttcatctcttttatcttagtgagagtgattctcctaaattctcgagtgattcaagaacaccctggctgtatcaaaggacattcacaacctttgcgtgttgccctcgctggaaagagtgattctttccttcctttcatgttcacccttgttctttcaaaccacaattccagataatccacctctgcccagaattatctcgtggccataacttcccatttacgcactcaaattaagtgattcttgagcctaaattgaatgtcaaaacgagttctttcacctcgtnttggaatcacctcatttggagccctttagcttcagncatttccatntctatatttctgtccagccaccacttaacctacgttt

SEQ ID NO: 46086 - DNA, 510 bp, Glycine max
  unsure (1)..(510): unsure at all n locations
tcgacccggatccttttgtcacctgctgcatgcgagctnntttctctatacacctacgttcctatacacgagaaanaagactnttgtctctatatacgcncgcnttgaaaagctctttctctttatactgacatggtatatatacaacctctattccttttcaaatatttctttntcctttttcaatatacactcgttgtttatataaaaacttcctttatatacacttattgctcatatacaagaatttcttttcacacattgtttatatacaaaaatttcttttcttttctttatatacagatatgacatttgttcacaacgcctctttctttntttattcttggcgttatcatgatgtttgttcattntattttaggacgacgttcctaaatgaaaactctacacggttccggaattccaacaaacactatcgacaataacgaagtaagcactaacgcaacaacccanacanaatgtatgcataaaacanatgacaatcaaaacaac

SEQ ID NO: 46087 - DNA, 385 bp, Glycine max
  unsure (1)..(385): unsure at all n locations
atccttatggcctgcctccggacttcaccccccgtgccatcccggaagattatgccaagcccctacttttgaggggcaactcccaccttatgaagactatcccgggcaagacgatggggaaggagatacccatcttggccccctgctccacctcaaagatccgtccccgcatgaactaccccaaccaaacatagtccgtcatgccccggcctcacccacacctgtaaaagaatctgttccctttgcggaagataagggaaagattgaggcgcttgaagaaaggttgagagcagtcgagggcctcggcaattacccattctcnggattggcagatttatgtcttgtgcccaacatcgtcatccctcccaagttcanagtaccaaac

SEQ ID NO: 46088 - DNA, 423 bp, Glycine max
agcttcttatccattgctcatcttggtggcgaagcaccttcttacaaggctttttccctagtggatggcgcctcctctctcctcttcttctttgtcttccgctgcatctccatggtggaaaatcaccattaaaggacgtcattgaagctcaaagatccagcctccatagtagccccacaagcaagcttccatcactattcacaaagtatcaaaggtttaaccgcctgagatatttgtcttaacacattagagggtacatcctttgtggtacaagtagagggtacatctacttgggttgttgattgagaacaacagagggtacatctcttgtggatcagttctagtggagggtgcatccactacgttcaaagagaacaagggagggtacatcccttgttgatctttgcttgtaaaacgatttta

SEQ ID NO: 46089 - DNA, 363 bp, Glycine max
  unsure (1)..(363): unsure at all n locations
attaaagtntagatgaccatacctcaagtgctacagtatggactcatccatattctcacatttcaatgcattggtttgcccaaatggcataaatagaggaaatactttattaagagccattttgatagaaataatttggccctttcttttatgaatgatattacatttatcatcatcaaagatgactctataatatttatgaataagttgaccaacacttagaagattttgagtaagacctggcacataanatacatcatggatatatttcttgctaccattttgagtttaacagcaatggtggccttttcttcaactttntgaacatttccatcaccaagtgtaactttgaaatttattgct

SEQ ID NO: 46090 - DNA, 407 bp, Glycine max
  unsure (1)..(407): unsure at all n locations
agctngcagtgatccttgaagttgttctatcatcatggtttctaaatctttggtttcctcgattctcacaacaatgtgctcaaatttgggatctaacgagcgtagtatcttctccataattgttacttcttctaacttctcacaatttttttagttgatttgaaactgcaagaattcttgaaaaataatcggaaatggactccgactctttcatatgtaaggattcgaactcagctcttagagtttggagacacactntctttactttgtctcctcctttttcaaccatttcctgaacatcatgtgctccaagaagtgctttcttttttacgggccaatggtcataggtgctcccctttagaagtggaacttggaaggatgtcactccattggcttgccatactcta

SEQ ID NO: 46091 - DNA, 558 bp, Glycine max
  unsure (1)..(558): unsure at all n locations
tgggatatttaatgaacccatgatgtacgcgctgttgnatactcagcgtcacgtgatctacttagagctcagcactctatgaagatgcatgctgagtagagcatgagagatgatagggaccatgttggagatctggtgttactgactctacaaccctatcggcggcattcagtggctatcatgaaacgtcctaagctaggcctgtggctttttggtccatggtcactgattgatagaatcgtggctggtgcatacctagctcagctactagagtctgctgaaatacatcctgtctatcatattgctcttctgcaaccattgcatggccaaagtgctccaccatatcttgcgtatccactcacggctaccgaactgagacctacgctctgcccatggaacgtgacggatgttcgagatagcagacctttagaagctagtgtgtctccatagttgatgcaatangacacaactgaagctaaggatctacttgcgaagactcgtaggacatatgtgaatcctatactcagttctaccttaagacaacgtgtctttgataag

SEQ ID NO: 46092 - DNA, 445 bp, Glycine max
  unsure (1)..(445): unsure at all n locations
agcttatgcgccatgataccattaacgtcctctngcccaagacattctattaaccgaaaaaaatgcacccatatacaatcaaggtttctttgttacctagattatttacacgtgcttccaaggtgtatttgttactcacatcacacacatctccttggctaaattcacatacatgcatactccgagcantttggggtaccaaaaattgcacatgcgcacatcttggtatttctaatacctatacatacacaaatttcatgatgaatgttgactatctacacaataaagtgctacatttcatgcctttntccaagttttcgctacctatagccgcatgcaaattcaagcatatttgtctttgttgactaaaattgtattcaaattatatatatatattntttggaagatgatctctttcacataacattcaacatatttatatata

SEQ ID NO: 46093 - DNA, 550 bp, Glycine max
  unsure (1)..(550): unsure at all n locations
tgtttcagtgatacccatcattgacggcctcgtataacacatactctcatagctntagcttacactgttgctatgaggcacgatcgttttaccatcttcttactcaagttatgaagggtgggggggtngacatcatacattcctaactgcttcctctcattaacaatctagttgacatcttactcgagttatgaattcccttaatgacaatcttngttaaatattaatccacatgaaacgatctgaatatgaatatatagcaataatacactctggagattatcgcaagagaaaatgcaatctcatcttgctctccatcttccacactcttgtgcctaactccagaccccaagcaacccgattgagagctccattatcttgttaattgcttctacacgttctatacacactatgacatttcgttctttgtgctatagatccttacgacatgatactcaccgtctctcactccctcacttatcgagaaaatatgatgaccattcgctcttacgatacgatcttcatatgacgctctcttatctcgaacgac

SEQ ID NO: 46094 - DNA, 459 bp, Glycine max
  unsure (1)..(459): unsure at all n locations
tgcatgtgtaggagcctgacatagtagtgtaaaatacttatatatttgataagttagtaaaaacttggtgggtcatcaagaattggacatagtctcggttntgagacgaatcaatataattctctgcatgcttcctttatttctttaactgacaaaaagtttgaatttgttttaagatcttatgtcttgttttgtttcacaaagaaaattgtttttctcatcttctgataaagcatgtatcaaaacattctctatttgatttaagtttatctatatcagacgataaacatggtttcctgttagaaagagttctaaaattttaaaaacacaattcaacccttcttcttgtgtatttgcttctacaataattgtaaatctatttgacttgagctgtttgacatttggaccaccacacatgaccaataagttgcaattggtggtgtctacacttccacttta

SEQ ID NO: 46095 - DNA, 558 bp, Glycine max
  unsure (1)..(558): unsure at all n locations
tgggattganaatgaaccttgatgactccctgctattacgcgcactctagantactcaagctngcttnntatgtgttttcattgctttaattgttgaatattctttgaaacttgtcttgttaanactctattacggtagctttcatttcattttctgatctttggttattgcttgtctctnntgttcctttgttgtgagttgccatacatggaattggaaaggagcatcngtgccatcccttgaaagaattgagtcaagaagcaaggggccaactaccttaagagctattggactaataagcactcttaattgagtgaaacaccaaagagagcattacacanacattcatgacttttttgtaactcttaattggcaattacttaccttcattccttgcanattttgtaacataaaggtctttcattataagtgtgttgggagcctccaatatgttaccaaacttncatttgtgtataataatttanggcatnttccttangatagtgagtgtnntggttggaccctttatgttgtcatgccaacactctcatgatccn

SEQ ID NO: 46096 - DNA, 348 bp, Glycine max
  unsure (1)..(348): unsure at all n locations
agcttggatttccttntagtagggaatctatccttcctaagatggagccaaacccagtcaccctcattaagaactagctcttttcttcctctattgcctttagttgaatacacctttgtttggttctctatttggttcttaaccctctcatgcatcttctttacaaattctaacctagattccccttctttatgtataaaagaagtgtccagtgggaggggaatgaggtctaacggtgttaggggattgaacccatagacaacctcaaaaggggactgcttggtggttctatgaacccccctattgaggcaaattctacatgaggaagatactcatcccaagacttat

SEQ ID NO: 46097 - DNA, 275 bp, Glycine max
tcccgtatccgtacttggaaggatctgattaccgccttcctaatgcagtatcagtacaattctgatatggctcctgaccgtactcaactgcagaatatgttcaagaaagagggtgaaacctttaaagaatatgcgcagcgatggagggatttggcggcacaagtagctcctcccatggttgagagagagatgatcaccatgatggtagacactctgccagtgttctactatgagaagctagtaggttacatgccgtccagctctgcggatctagt

SEQ ID NO: 46098 - DNA, 384 bp, Glycine max
  unsure (1)..(384): unsure at all n locations
agcttagcagtagtcccaaaacccaatgtntatgcgcaaccaagtgtcatgatttctatattaccaatcttgctagttgttaatgttgaatcatnagtttggtctctcatttagcattcatctcatattgtaaacttattccgtgtcgtccagatttaaaacaaacttctcttactctatatcaaaatcattcttttgtttaccttacaactcactcaactctatcattaccctttntcaatatgcagaagtaccaacatgcaaacaaatctaatccagcagatggcagcatcaataggcaagctatgatccagaagcagcgagatgcctcatctatcatttctttcatattactaaatgatggaccttctgcatatttaaaac

SEQ ID NO: 46099 - DNA, 383 bp, Glycine max
gtacgtattattgaactcatcacctcacgaacgaattctattaattattttaataccgttaattctttggacataaaacataataacttgcatttgaaggatcaaatcagtctaaagtcaaataaaggatgtcaaaaaggagacaatgtgtatctttgaaggacataatgacaaattgttaagaatataatcaaatactactgcccagctagatactttgactcggtgcccaacagcaattatagtgcatcgacaatatctattttgacttactgtgcatgtgcaacagcaattatagctttcaacggtcaaggttctcactgccacattaactattgttgcccaagtggcacttatatatctacaatagtattacacaatat

SEQ ID NO: 46100 - DNA, 399 bp, Glycine max
  unsure (1)..(399): unsure at all n locations
ttttggaatcattcgcagacatgtcttctgaacctgaaaccagcatctcaagcttgatggtgggtgagccgtccatggattgactatgctggtgtctaactctgggcctttcattaatcccaataacaacattctcggtagaagaggtgggtgcccctgacgccggtgttgaagccgatgctcccacagcattagacggctcaaccatttgaaacgtggacgttgccgacgatgaattgaacttatccatatcaaggtacatggacagcaagtcctcctcggcatcatcggagaaggaaggaccatcaccacctccaacaacaccaaggtcactgtcgaaactaatatcatccggtaaagtgagaatctncgaatgagcacgcctatgacctctatttc

SEQ ID NO: 46101 - DNA, 323 bp, Glycine max
ataatatttaccaggaatggtaccacccttgagtaaccttcacaaaggaaaaatattaaactataaattcccataaattgtataaggcatgtgcttccatgaaatgcattttcaaagcaacaataatccataacactacgaaaagaaggttcccaatttgactgaacggaatacagtcacatcaacattggattcaatcagacacacataaaccatttccaaccatttcttagaatttcacccttcgaaaattcgtgatcttaatgccaaaaaaattcaaaattttttaaatgggttttctaaatccgacggatgaaaacatt

SEQ ID NO: 46102 - DNA, 470 bp, Glycine max
  unsure (1)..(470): unsure at all n locations
agcttctattggattcatataccagagcagttctcttgggattntttgggtataattgtgatgctntagaaacttgataagatttgaaacttttcttcctggatcattcacacaaaaagttacctctgattttacctctgttatgggattttttttttcttgaaaagttacttctgttttgatcttcattccattatttctacaaacttcccagtatatgttccaccaatatttatctaaagtgttatgttctttttctacataatctttcatttttttaactccattactattttgatattgatcctagattgtgggtaaattgtcttattatttatcataaattcctttcattttgtcttttgttgttttcgaatattaattatttaatttgtattaataatatttcaaatagcagtcaacctgttcctgatatctttntgtagtgttctttgagttggctgctatgt

SEQ ID NO: 46103 - DNA, 473 bp, Glycine max
  unsure (1)..(473): unsure at all n locations
atacctcggtttccactaaggagctaaagatcttaattaagaaatcttatctctntactttggttactagtatttaagccttctaaggagccttaaatatgtttgagctgctttatgataaataactgactttaattttaaatactaataaattntttcttgcattgaattttttatatatgaaacttttgttttgagtctcaatcatttagtaagtgataatgtgacactntgcaattagattttctcaatttactagtatttttgcaagtatagtgatgaggctaaatgtttattttatacaactaaaatatataataaataaacatctctaaatatataaattatattataattaaaatttgtaatntataaatgttgatatacttatnaaatatattntagatttaagataattaattatacctctgatatattattattttaatattgatgaatttttaaaaaatatg

SEQ ID NO: 46104 - DNA, 474 bp, Glycine max
  unsure (1)..(474): unsure at all n locations
agctntaatgcggcgttcttggaatgtgaagattagccatgttntgcatgaggctaacaatgttgttgattgcctagcttcgaaggcacaccactctntgcaagggttggtcttttttaatagtcctcctgtgtaaaattcttgtacagattgattcggttgggactntgtaccctcatacattagcttttgcttttatttttaatcgaaaaacaattcatttattctataaatttctaaatgtttttttttaaatgttaagaattacttgattcaataaaaatttgtttcattattttcaaattatcaagtaacaaaatttaattatttttatatataataaaatgtttaagttattntatacggtcatttaaaactatttttaagaaattaaaaataattttattacacaaaaacttgcactgatctacccncaacttacaaaatacattccttcatactagatgctactac

SEQ ID NO: 46105 - DNA, 468 bp, Glycine max
  unsure (1)..(468): unsure at all n locations
tacggacactatgatactcagctngaataacccaatattctgtgttctaccaagccattgatgactctatacaaatcagaagaattgttggtggatattctcactgactaactcttaatcgtcttacagacgaatattcaatctaagcatttagtctattctctcaaggtgttcaaggtgtttttgagagctctacaatctttacaagaatatacaaagagctttttacagaaagaatttgaatgttagcatgtaagtccgtgtcgcacttcttcaaagcttctagtatatatagacctttatcttcaagtgttggttgtctctaaatgaatataattntcctttgagaatttttctaatgtttatggtcgttggagcatntaatacttgcattaaatgaacatacttcttcatgttgaaacaccactcttcgtggctttcatattgagactatagcatanaatcact

SEQ ID NO: 46106 - DNA, 428 bp, Glycine max
agcttataaaggaatgctcctagtctataaatagaagcatgtgtaacacttattgtaactttgatgaatgagactcttgggagacacaactcaaagttcaacttctctccctttttcttccttcaatttcatgctcccccctctctctttctctccctctttcttttcctccattgaagcatcctctccaagcttcttatccaaggctcatcttgggagtgaagctccttcttccatggcttattccctagtggatggtgcctcctctcacctcttctcctttgtcttccgttgcatctccacggtggaaaatcaccattaaaggacctcattgaagctcaagatccagcctccatagaagccccacaagcgagcttccatcagtattgacctttgcatgaatctctgaattatggaatgaatgcatg

SEQ ID NO: 46107 - DNA, 481 bp, Glycine max
  unsure (1)..(481): unsure at all n locations
gctgtatacatngattgctctntatatctcatgggtcttgtattctaagaanaaccaaattcctttgaagtcatgtcacaatataagccttgatcgagttcttgtgattttcatgtgtgtgcatgctctntattgcttatgagaaggaaaataaagttgaattgtgtgatgcatgattgtgagttgatatcacctaaagtaattggtggttgagtgacagacatgtacaatgtgataccctctacccctcacatatatactaataaggaataaaaaaatntaaatattaattaaaagtatttttaaaacaagtctttcaaagggaaaaaaggctcacattcattntcttttacatcatanttcaaattgtccaaataaataataaagtattctcgaatcaaacaaggtcgtctaagcttcatancaataatatagaatctgtatcctaatgtcacatcttatcagagcgttgtgttctcgt

SEQ ID NO: 46108 - DNA, 468 bp, Glycine max
  unsure (1)..(468): unsure at all n locations
agctntagcttcctgaaggttctcgtattcattctgttttccattgttctcttctcaaaccttttcattcctcctccccgaaacttgtcatggaattgccaccaaaaatcattgaaaaccaacctttgatcattcctctcgcaattcttaatactcgttgggactacttttcaggggaacccaaattactggttttagttcagtggaagggtctctctccagacgatactacttaggaagcctgngatcacttgaaggagacatagcaccttgaggacaaggtgttctttgaagttggaggggatgatagggttgcgcaccatcagcctcatgctaccagcactatccaccacccgttcgacatgaccactaattccaagcccaaacgaaggatcatcgctcccaaacatctaacggattacatttaacagaatcctgtagatgttgtcgagctggaaacacgttagt

SEQ ID NO: 46109 - DNA, 472 bp, Glycine max
  unsure (1)..(472): unsure at all n locations
ctcgcttgcttcgaatttctctatttcttctacaaagatcctatatgcaaagcaatttcaagtttacaacttgtaatagtaatcatataattagctataaaaacaattcaataattaaaacaatctaattgtaccaatgttgatggtttatgacgataatgaacaaaatgagcccattgatctttatctatgcctatcggcacattttttatgatttcatctctagttttggttggatcgttgaattcattccataagctntgcctatttgtagcccattttcttcccatactcaatatgcaataccattttgcaccagcttcattaatcttaaaataaaatcgaggctaataaaaagataatattatcacatatcagtatgcaaataatatatatatgaaaaatagttaagataggggctctaagtggtgtagatataaaatagtatatataactaatcggcataccttta

SEQ ID NO: 46110 - DNA, 388 bp, Glycine max
  unsure (1)..(388): unsure at all n locations
cttattaaaataaaaataatttgaaaatagtttataatagttaagagttattgaactaatgagtgaaatacacttctaaaagatgagaaaataaaatacttacaatatttaattgagagaataaatatgttatttattttaatttatataaatacataaattaataaataatatttattcgaagagaattgactggcaggttaatttggccaagtataccttanaaaaaaatacaaaactaagaataaatttacgacattgtcgccatcatttntgttactcaaatgtcattttctgtcggaattggcttatctgctgctgaaatttcaacggcaccaatcttcaccgtccaaaaatggtttttacacattaaactataaaacaaaaa

SEQ ID NO: 46111 - DNA, 616 bp, Glycine max
  unsure (1)..(616): unsure at all n locations
tctacacttccctnatacactanttttgacttngaattatactagaancgaaccttacggaagagtgatttgataccatggatnacctgacacttatgatacgtggactcctttgcaannccanccncatattagtatcatcccgtccttattctgcacaactgctacagtggacacacttttcgttctacaggtgaacgcccacgttgtgcacacaaaagatgttctgatcagacaatcctgccctattctgaccattggagaacacatcgaaggcatgtgtatcatttttcgtttgttgcaagtgattgcaacacaagcacgctactcaggcatatgtgtcacccgtagagtggacacatactggagacgcggtgtgcggattagtggggttgcatcgcggcgcatacttccaacgcatcatttcagctcctgccagctaccgaagagttgtgcctccacataaaataagtgtacagtttgattttgatcgacaccactttgaattgtactctctatttcctgaactatcgtgcctttgctcgcgatcgagatttccattctccttgatatcttcttcgctttaagatacagttactttcatcatgtccttccc

SEQ ID NO: 46112 - DNA, 329 bp, Glycine max
cgacaataactctttactcggatgtctgatagagtcctagaatatatcgagacgctcgaaatggaataccgaagctctgagtctactgaaacgacaataacctttttactcggatggctgatcgagtccccgaatatatcaagacgctagaaattgaatgttgaagctctgatcaaattgcaacgacaataactctttactcggatgttcgattgagtctagaaattattgaaccctctaatggattatcaagctttgacaaattaaacaataatacctttactcggatgccagatgagtccgaatatacggaacccttgaaatgaatg

SEQ ID NO: 46113 - DNA, 527 bp, Glycine max
  unsure (1)..(527): unsure at all n locations
gcaggcaatgacctgtgaccatgatgacgcccctgaaccacctttcatgaataggagcgctcgataactacaggactctttcagacatccgagtgggacgttattgaagatgaatttgcaacggcttcagactacatttcgagcgtatcgaaatattacgggactcaatctgacctccgagtaanaagatatcggtgtatgaattgctcagagcctcagagttcatttcgagcatatcgagatatgaccggactcagtccgacatgcgagtaaaaaggtattgtagtatgaatttgctcaaagcctaagtattccatttcgagcgtttagatataatacaggactcaatcagacatcctaggtaagagttattggtcgattgattcgctcatagctatcacatactatttcgagctgtaacatctatctctggacgtcatcagacatccgtgtaaaagaattgtctttgtattactacgacttaactttcaattatagcgtttatatttacggactcatcaactccg

SEQ ID NO: 46114 - DNA, 244 bp, Glycine max
atctggtgttagtgactctacaaccctataggcggcattcagcggctttcaggaagcgtcctaagctaggcctgtgctattttggtccatgggcactgattgatacaatcgttgctggtgcataccaagctcagctactagactctgctgaaatacatccatgctatcatattgctcttctgcaaccattgcatggcaaaagtgctccaccatatcttgcgtatccactcacttctaccgaact

SEQ ID NO: 46115 - DNA, 377 bp, Glycine max
aagtctcatgtgttgagggaaaatgctgtagaaaacaagaatataattacaatttcaactattatataatcaattaaaaatgcgacccacaaaagcatatggattatggtaaacagaagatttcaaaaataactaaagaagtaagaagataatacacaatgctatattaactgtaattgtcaatcatattatattcggaataaaagccattaaccacaggaatgcttttcaaaacaaaaaaaaaaaacaaaagaatgtttggaggtcacagtcacagtaatgtagaacctgcacagatcgaaccaagcatatgaattctaaatctaagaacaaaaaggaagaaaactacacactactcattcgtgggaattcatgga

SEQ ID NO: 46116 - DNA, 488 bp, Glycine max
  unsure (1)..(488): unsure at all n locations
ngagaaaaatcttgagaaaaccatgggaagagttacatctcttgattntntattcataacttttcactggtaatcgattactataaccatgtaatcgattacacaaaacattntatgaaaagatgtgactcttcacaattgaatttgaatttcaacgttcagatacactggtaatcgattaccaatatattgtaattgattacaccgtttaaaaaaacatttggaacgttgcaaattcagttaaaagcttttgaaatcaaactttaccactggtaattgattacaggtaattggtaatcgattaccagagagtaaatactctggtaacttagaaaaatttggaaaaacttttcttgtaaaacataattgtgctatgtttgattnttgaaaaatctttttcaatgcttcccttgtgaagtcttgacttggtgcttnnttggttcttctcttgaatcttgaattcatcttctcttgaatcttgattcttc

SEQ ID NO: 46117 - DNA, 421 bp, Glycine max
  unsure (1)..(421): unsure at all n locations
cttgaagatatcttaacaatttctttgcagttgtccagtgctctattcctggattactntgatatgtctcaagcattccaaccacaaaatcaatgccaggtcttgcacacacttgtgcataggcttcctacaatagaagcatatggaatgtttctcatttgttccatttcaagctcatttttaggacattgattcaaattgaatccatcacctttcacaataggtaccatgttgggtgaacaatctttcatccgaaatatttctagaactttattaatataggccttttgagacaagctgagaatcccttgagaatgatttctatggatctctatgccaatgaaatatgttgcatcacccacatgcttcatgtcanaattcttagaaaggaattatttacatcatgtaacatcccaaaatc

SEQ ID NO: 46118 - DNA, 380 bp, Glycine max
  unsure (1)..(380): unsure at all n locations
ctctcttacaaaagtctttcctagagccaacaaatagttcacaacatgtgtaaagtgctgttacacatccgaaatgctctatcatgacaacattctaaacatttcatattcttgaatgaggatgttcttgtagaagcaaagcttntaaaaatatattgacaatgctcaagattattaataagatacattcccacatcattacagaaatcatcaggattcaagagaacactcatgatatgcaaaatcctcaagacaaacatcaagataagtataaatacgaatttttcacagaacacactgaatagcacaacttttacaaaagaatntttcatagaataatcttttatcagagtatttactctctggtaatcgattacctt

SEQ ID NO: 46119 - DNA, 493 bp, Glycine max
  unsure (1)..(493): unsure at all n locations
caagctttgacggtctataccatgctctacgatctcaggacggagaaagatctatatataggctngctaagggtagagagaggaagactagagatttggatcaagtaaagtgtgttaaggatgaagaaggcaaagtcttagtgcatgaaaaagatatcaaggaaaggtggaaggcgtatttccacaacttatttaatgatggatatggatatgactctagcagtctagacacaagagaagaggaccggaactataagtactatcgtcggattcaaaaacaggaagtaaagaaagcgttgaaaagaatgagtaatggtaaggcggtggggccagacaacatacatattgaagtgtggaaaactcttggagatagaggtcttgagtggctcaccgaactctttaacgaaattatgaggtcaaaacgcatgccggaggaatggaggagaagcacgttagtgccaatctataagaacaagggggatatacaaaattg

SEQ ID NO: 46120 - DNA, 359 bp, Glycine max
  unsure (1)..(359): unsure at all n locations
gtctcacgattgtcacgtgctcatgcaacaattgttagctgtggctatacgagacatcttgccaaacaaagtcaggttcacgataactcgtctgtgctttttcttccatgctatatgtagcaaagtgattgatccagtaatgtttgatgagttggaaaatgaggccgcaattatactgtgccagttggagatgtattttccccctgctttctttgacatcatgattcacttgattgtgcatctggtcagagaaatcaaatgctgtggtcctgtttatctacgatggatgtnacccggtgagcgatacatgaagatcttaanagggtatacaaagaatctatatcgttcggaagcatcta

SEQ ID NO: 46121 - DNA, 476 bp, Glycine max
  unsure (1)..(476): unsure at all n locations
agcttctggtgggacatcttgactcgctttcttatctgacattcaccacagattctgtcttcttctattttcagattgggaatgcctctaacagcacctttgtcaatgattttcttcatgcctcttaagtgcagatgtccaaatctttgatgccatattctgacttcatcttctctggagaatagacatgtggaggagtaactggtttcttgaggtgtccataggtaacagttgtcctttgatctgttgcccttcattaggacttcactcttctcanttgtcaccaagcattctgactttgtgaagattacattgaatccttcatcacacagctgactgatgctgatcaagttngcagtcagtcccttcaccagcagtactttgtccagactaggaagtccatcatggactatctttcccattccagtgatctttcctttagagccatcttcaaatgtcacatagctagtggagca

SEQ ID NO: 46122 - DNA, 306 bp, Glycine max
  unsure (1)..(306): unsure at all n locations
gaactaggtgggttgctctataagtggacgtagtctctgttggagatatgaatcaatataaatntctttgcatcttatatctctatctctatgtgtgtaattaccatggagtttgaatgtgattttgttgtgaaaagaaacatttttacaaaaattgttattatcatctgataacgtctgtttatgaaaatcgttatatgctctcaaagctatatcaaacgatagctttgtctttcataaaaggttacaaaatttctaaaatctaatctgctttgatgaccaagttatgtgctcttatcaacctca

SEQ ID NO: 46123 - DNA, 391 bp, Glycine max
  unsure (1)..(391): unsure at all n locations
agcttaattagttcttatgctcctaactctctcctgcagcctctctcattggctcactgtgtgatactatcggatgtgattgtctctttcgacacatccttcttcttttatacatttcaaatcctatcccttgggcttggacaacaaaaaacaaaaacctttcttaaggatgcttcaatgtgccacaacatattgcgacgctgaaagaccgactatggttgtactcaatccttttcacaccgccgagagaagaagaaatgttcagttcgagatcaacgattccttgcactctcttggcgttgctgccagggngaaaagatgtatgacatgctggcttactaatcccaaacgtgaactaccttagagctgtcttcacgctaaacattccttc

SEQ ID NO: 46124 - DNA, 579 bp, Glycine max
  unsure (1)..(579): unsure at all n locations
cgtcactctacactcgatatcacacaaatctanttnnnntaatntattttttcnnnaagggactaganggatgatccattgatgtacccactcgatagacacttctacttcctcaagataccccancnntacatgatcatcgcgaaccttctgctgacccttattgtgtccatggagagcttctttgaaccgaccacttcacccatcctggtaacgaggcaaactctgcctatccggaaatgagaaattctttgttttctcatcacaacataatccagggtaacaacaataggcgctacctagatctcgcccaacgtctggttctggacccttggcacatgcgtcagattgccaagtactttattgcgtcaataaccaagtaaataattgctaaacgacgcctgatagagttcaactctctcagagacaccctctgtacttatcacgcacacgcctaacacttggtaaagaactatattaacctctaataccgtttatccctattgtgacaaactccagctgccaattctgaccgtgcttatttcacagaaataccaaccgacttgtattcttaattct

SEQ ID NO: 46125 - DNA, 458 bp, Glycine max
  unsure (1)..(458): unsure at all n locations
agcttcccgtcaatggtattacaagttccatcaagtcattacctcatatggttntgaggcaaatgcagttgatgattgtgtataagtttagtaggagtaaatactcattcttggtgttatatgtcgatgatatactacttctaccaatgatataagcttcttacaagagactaagaaatttctaacgaaaaattttgaggtgaaagatcttggggaagtctcttttgtattaggaatcaagatactaagagatcgctctcaaggtatcctaaggttgttacaagagagttataccgataaggtcctagatagattcggcataaaatataataaaccaggagatacccgatagctaaaggagacaaatntagtctcaaacaatgccttaataatggccttgaaagaacagagatgcaaaagaatccttatgcatcagcagtaggaagtctaacatacac

SEQ ID NO: 46126 - DNA, 483 bp, Glycine max
  unsure (1)..(483): unsure at all n locations
actgtaccgaaaatgtcatctctataagctngtaatcatagngattatattnttatgattcctgattcgaatcctacattccgataaaattcagctacttattgattcatattattaatattagacgaatctcaatttttgtatcttacggtacatgaatgaatctgcacaatttcatatcatcaatacaaatcacatgattcaatagtttgattttcttttatttntctttcaccaattctcatgaaaagaattgaaaagtcatttaagtgaaattgataaatgaaaaggaattagaggaaatatattttaaaattgtcctatttgattatttcacaacattatttgtcattcatttattcagtgcatgcactntattngtctatntcactgcttcatttntttctaaaataaagcttacacattgaataaagctataattttgtttattatttctagttaaaatatacattgacatatata

SEQ ID NO: 46127 - DNA, 409 bp, Glycine max
agcttgaaatgaggtttattgatcatgaatggataatggctagagagcttgcagctttaatcattaaccaaatggaagaaggttcagaagctgaagctccactagatcctgcacatcaatggagtccttttgagtcacttatgattcagaagatggttgttatgcttcacctccatcaagagcactcagctgaaattcaagtattgtatgcattgtgtttttagaaaattcaagtactgcatgactttgatgacaaatttataatgcttgaaaaatagtttgagtggtgtatctctaatgtgaatgatgagtgcaaccctttgaataatgttgtgtcccactttagacatgaccaatgttctgattaatgatggcaaaattggctctgaattattctcttgtgattaat

SEQ ID NO: 46128 - DNA, 257 bp, Glycine max
gccattgcatcactcacccaatactacgaccagcctttgagatgcttcacattcggagacttccaattagtaccaaccattgaagaatttgaggagattctatgatgtcctctcgggggaagaaaaccatatctttcatccgggtgtctcccctctttgagcagaattgcaactgtggtcaatgattcatcaagaggtttggaccacataaaacagactcggaacggcatatcgggcctaccacggaggtacctata

SEQ ID NO: 46129 - DNA, 550 bp, Glycine max
  unsure (1)..(550): unsure at all n locations
tgggatgtggggttgagacctttgtatgaccacataggtangacagaancctcgggtagtnaccntgccgcccggagtattacgactatgcttttgtgnggagtttcnagctacaaaaggagagagcatgaaatgaagagcctatgtgtgatacatggacggagatgaaaaagatcatgaggaagcaatatgtgccggctagttactcaatggacttgatgatcaagcttcaaaaactaatcccaggcaacaagggggttgaggagtatcctaaggaaatggatgtgctcatgattcaagctaagattgatgacaatgacgatgtatctattgctcgatttctaacggttggactaatgatatccgtgatattgtggaactacatgaggttattgaaatggatgatttgcttccaaatcatttcaagttagcagcattaaaatgataagagtgctaacaggattttactacttagttcttctataggatggacaagttagaagatgagccgtacttctgtaggtctacctacccatataactcgtcaagc

SEQ ID NO: 46130 - DNA, 351 bp, Glycine max
  unsure (1)..(351): unsure at all n locations
gcttattcttgtattgagattgaatttgcttcattgcatattctttcacctcgtcagataaactaaaagcatctttacatcatacattttcatcagcaaaagtaaacattaaatactatcaagatacattatcaaaccaatttgaagatataactaatattcaaatatataaataaattgaatataattgacctaattatatactaaccttcatatgtcgccacatttcatctacatcatctttactaatttcactccaaccattaacttgtaaaggagctntctggcgaatacacatttgtgccttagacttgaaatattttgcatgttttccgcagatcttataaaatg

SEQ ID NO: 46131 - DNA, 243 bp, Glycine max
aatagaaactgttgatggaaaaacagcacaaccttagattactgctaagaagctttcacaagaattcgaacaaaactttcaaattcatcaattaaacagcaactctcaccatacagagagatgtagcaaactagtgcaatgaagacagaaacagagttactgggctagcacagataccacgttcggcatttctgacgttagcgcagattccggcaaagatgaacatacatcagctctcaccgg

SEQ ID NO: 46132 - DNA, 409 bp, Glycine max
  unsure (1)..(409): unsure at all n locations
agctctaaaatttgaattaatacgttcaaattctgctggtaatcgattaccatatatgtgtaatcgattacacagtgcaaantttgaattcaaattttagtagttgttgtgaatcagtttttgccattggtaatcgattacatcctctggtaatcgattaccagagagtaaatttgttgaaaaagactntntaacttaaatttcttggccaaaccttntgctacttcaattggaattcccttcctatttaatataccctttctaagactctaaagtctgtctctatcatccatcttgaatatctttaatttctttgtcttgaataaagctttgagacgcatgtgaacctttggcatcatcaaaacattcagcctgatcctttgtctacagggtctgcgccttacaattc

SEQ ID NO: 46133 - DNA, 432 bp, Glycine max
  unsure (1)..(432): unsure at all n locations
gcatcaagtggttatcagagcacaagagcttcaagtatgttctccttaaacctcctttaattatcagctgtaccttttcctccattggtgcttcttcattcttcactatgtatctcctcacatttcttgtgctaaatattgttaacatgattatttagaattcgcaccgattaaatttgctatagaagctagatttgattttatatggntcaaatttcttgttcttgttcttgaaccatgaattgtgttgagtttaggttcctttgaatttagtctctctatttttagtggctgaaacctaaaccataaaattcttacataaacattagagcagaagataacctcanaaatctataagtgacttgtcacctattgtagttttgtcatagaagtcatgtctagtcatgaaactcgtcacatatgatttcttat

SEQ ID NO: 46134 - DNA, 441 bp, Glycine max
  unsure (1)..(441): unsure at all n locations
cgcttgcttgtggagcttctatggaggctgtatctttgagcttcaatgaggtccttcaatgttgattctacaccatggagatgcagcggaaggcataggagaagaggagaggggaggcaccatccactacggaataagccaaggaagaaggagcttcatcaccaacaatttccttggatgagaagcttgaagaggatgctttaatggaagaaaagatagagagaatgggggagcacgaaattgaaggaataaaagaaggagagaagtggaactgtgaagtgtgtctcataacactttcattcatgaaagatacaacaagtgttacacatgcttctatttatagactatgtaactntcttgagaagctatcttgaaaaaacttccttgagaagcttctttgagagaacttccttgagaagctagagcttagttacacacacc

SEQ ID NO: 46135 - DNA, 288 bp, Glycine max
  unsure (1)..(288): unsure at all n locations
cttctaaagaagagatagtgctcagaatgcattttatgcnncantcnattttataatgtgctgtanacatgcaagacgaaattgtttgcaataaaacgaatgagataggggaagagagaatgcgaacacatttttatattggttcgacacagactgtgcctacatggagaaccacccctacccaacactataatgcacgtggatattctggatttccgcntggccaacattatcatcaacaacacggaaagtggagaactcaccctggtaatcagttcaataaagact

SEQ ID NO: 46136 - DNA, 356 bp, Glycine max
  unsure (1)..(356): unsure at all n locations
gcacttggaaggacctgattactgccctccttatgcaatatcagtacaattccgatatggctcctgtcatactattatttcgttcggngacctttgcttgatgacatgcgaccattctttggtccttgtgaggtgcttggcacccatcattaggcaatttatgaaattccaggacatgccgaaaaaccaataaatgttgatgcacaatccgtaagtttccgtgacacatcggaaatcaaatggaagcatcgttgcataattaagtgatgttccgtaacgttccgtaagtcaaaaaggggatgattatgtaatccgcaaggttccgtaacattacggaaagaanacaagtatcgtta

SEQ ID NO: 46137 - DNA, 260 bp, Glycine max
atcttgcagcgactcacgagcaaaggctataggatgagtacgccaagatatcatcacaaagggaagcacgggaaagggtaattgattcattgcaccaagaggcaacaatgtggatggaccaatttgctcttactttgaacaggagtcaagaacttccccgattgctagccaaggccaaagcaatgtcggacacctactatgcccgcgaggagatccacggacttctcagctattgtcagcatatgatagacttaatggac

SEQ ID NO: 46138 - DNA, 429 bp, Glycine max
  unsure (1)..(429): unsure at all n locations
tatgaactcnncttttttcaatattaatcacacttaaatctcacacaatcacaagcaatcaaccacactaaatgcaaacacaacaaaaattaaaaatgattgngttgcctcccagcaagtgcttgtttaacatcattagcttgacacatcgttctattatcctggatcaatcttggttctctcctttagaaccttctcatccaacaccttgacctgcaaacacacatcctggtccattaattctcttccttcattaaatagatcaaaactaatttgttgattntcaagactcatttccaaatttttcttccccatgtccaccacacagctagtagtggacataaatggacgtcctaaaatgacaggaatatntgcatcttcctcaatgtccattacaacaaaatcggtaggaaaaataagatgcttgac

SEQ ID NO: 46139 - DNA, 430 bp, Glycine max
  unsure (1)..(430): unsure at all n locations
agcttctttgagttaacttccttgagaagctagagcttagctacacacacccatctaanaactaagctcacctccttgacaaaatacatgaaaatacaaaaaaaagtccctactacaaagactactcaaaatgccctgaaatacaaggctaaaaccctatactactagaatggccaaaatacaaggcccaaaagaaggaaaaacctattctaatatttacaaagaagagtggatccaaccttgacccatgggctcaaaaatctaccctaaggctcatgagaaccctagggccttcccttggatctctggcccaatctactaggagtcttctatccaatgcccttgcggggtaagattgcatcaagaacacacattacttgtcgatgccccaccaacgaaaacatgattatgaggtgccgaaacatttata

SEQ ID NO: 46140 - DNA, 468 bp, Glycine max
  unsure (1)..(468): unsure at all n locations
agagccttctagatctgttcttcaatcgattntgttcatcaaatctttttctttctttatttgctttttatcatagtccaactccttcacaaatatcacccacttcaatactcgacatctcattgaattcccactgctgacctctccaacctcttgtgtcccttaatggcatcgattttcactcctccctcgaagtctcttgctctttctccttttccatcattgatgtgatcttccatgaagctagtgcgatggattggggaggggaggagagtgtgatatagatgacgattttcatatctaatttggagttgtgttcgttgaggatttctgatctaggttgatttntttcctttatcaagattcggattgagtgtagttagggaaaagagttccttgcattttttaaaaaaacatcttccaattatggtgttttaatccccataactatgtttgattatgacattt

SEQ ID NO: 46141 - DNA, 441 bp, Glycine max
  unsure (1)..(441): unsure at all n locations
agcttctcanaccanatgcccacaaagaaagcataggattccctctccaccagaacttcatagtgaagtttcacggataagagagtaccatgataaattagatgcaaaggctttcacaattttcttaagaacttaattaanaaatgtttaaacacaatagaggaacactaaatgatagctatatttaatccctattatttcctactatgtacagttgtactgaaacttgtatattaagatcttgatgcattgagttcaatgcctaagttacaaccacaagcatacattgngaagaagtacttgggcacaaaaaaataagcaatttaacaagtttaagattgatcaagcaatgacaaanattaatgaaggtgaaaaataaaggaataaatataaaccattgcttgcatgagtattgcttttctacccaactgatcattcacg

SEQ ID NO: 46142 - DNA, 422 bp, Glycine max
  unsure (1)..(422): unsure at all n locations
cgaggctaagctagttagggcatatgcatgtatctgaatataattatgctcagtgtctctgaaccacaccgacaatgtgatcctaaaatgaaatggccgccataaaaaagaagaaacaaaaatgagagggttagtaaagttggtcatcctcgtacagttcctacaaaaacattcgtcaattgtttctctacggggaaaagttcataattaagatttaggatgcaaacagaacttggacaaatatattntaattaggaggataaatatatgcattgcttatattatntggcatataagtgtttccaaacttcctcaacggctacatggtcctctagaatntacttcatacgaattatatatatatatatatatattagaaatcataactaatattctgattctattaataaatataatttata

SEQ ID NO: 46143 - DNA, 486 bp, Glycine max
  unsure (1)..(486): unsure at all n locations
agcttatctttctctatgctcaaactgatctaaactcactaaacactacaaacataagcaaaacaccataacatcaatcattaattaattattgacacttaaatataaatttagttactcttgcaatttaattaaaaccacttaatcatacgttttttattatggtttttcataattaaaatcaaggatgtggattcaacaatctcccattttttgatgatgacaaattcttaggagcaaatttaaagggtgtgacaatacacatatgagcttttcaatttttaactcccctacgagtgtgcatcaattttgtttctttataacaaaaaagaagctccccctcaattcatgcattattaatcttgcatagcacaacataatgcataaggaaagaaacacatgaacacaaaaaggagtaatcatttaatcagatcagttttattattaataataataggatcatacacaatacatcanaagatataa

SEQ ID NO: 46144 - DNA, 463 bp, Glycine max
  unsure (1)..(463): unsure at all n locations
agcttgtcaacttgaagcacctcacttaggtcttgccaccaaatagaatccctcacaacaatcctatcactaaccaaccctctccaccctccatgtctagaggttaggaccttttcccgtaaggcatttttctcatagaagagactccatctccatttacctaacaacgcttcattgaagcattgaagacaatgatatttctgatacctcatccccccccccaagaagtgtctatcttttttgcaactgttttgggtatcctaaagaaaaaaagatagaataaaaggagagaagttattatcgaattgatgagacacacgcaacctgcaagagagaggttcttatgttgccaactagatagcctcttctaaatcttcctaatcattgactcccaagttgaagctctccttagatngacaccaattggaaaacccaaataagtgaaagattcactcataagttt

SEQ ID NO: 46145 - DNA, 381 bp, Glycine max
  unsure (1)..(381): unsure at all n locations
ttcaatcacctgcaatactgcctccaaaatagcataccagattccaaacaatctcacatgcacacactcaagatggaaaaaagaataaattatctttaacgggcaaaaatggcttgtccaattcctggtatgtaagctacaaccacttacataaaataattgtataaaaaacaatctcgaaccacataaatctaaaacaataaaagggatggaagagacataatgtgtaacttatagagagagaaagggaaatacttgagaaatattggacatgaatgttttgcttgcaaaatgaattcatgtggaagtaggccttcacaatgaccctgcanaagctgataatattgtaaagggatggcaattgaaatactggatctggta

SEQ ID NO: 46146 - DNA, 341 bp, Glycine max
  unsure (1)..(341): unsure at all n locations
acatgattgatacatcgattgcgacttgtaggatctgattcgggtaagattggatgagaggaagtgtgattttcgaaatctgcacttatgcagaattttgctgtcaaataggtgcagcagaattttggctttgtgcagaaaaatgcttgtgtgtgatgggctgtggaaagagtactacagaatgagttctggacgtttgctagtagatcccaacggtcacaatgtaggcttaagtactagagacttctagtacaaatttcgagtcgatccaacggttaacaaattggaaggaaggaattgttactgaggtctntaagtgagaaaagctgtgattttggttg

SEQ ID NO: 46147 - DNA, 223 bp, Glycine max
  unsure (1)..(223): unsure at all n locations
tttgaattcaatttaatacctgtttgtacatcagctatggctactggtaatcgattacatcctctggtaatccacctccacagagtaaatttctttgaacagactntctaacttaaaattccttggccaaaccttttgctacttcaaatggaattcccttcctatctaatataccctttcttagactctatagactgcatgaacatccattctgaatatcttt

SEQ ID NO: 46148 - DNA, 580 bp, Glycine max
  unsure (1)..(580): unsure at all n locations
cggggnacggggnnnaatgatagccattngataggacagcactcgctnngaccgcacactcttgagtactcacgctctanattctgaattaagaacgtccagttatcagctgggaatctattaccatatatgtgtaatcgattacacagcgcgcctctcgaccgcggacgccaatatcatatataaaaccggcntggccactgcgaagccaacacatcctccggctagcgatcaccacaggagtaatagtgttgatacagacttaataactcaaaattcttgaccaaaccgtttgctacttcaattggaatatccttcctattcaatataccctcactaagacactagagaccatcttgagcatccatcctgaatatctatgatgcctttgccctgaaaaagctttgagatgcatgtgaaaaccttggcatnatcaaaacattcgacttgatccctggtctaacaatcttagagtccaatagcgaaatggctggtgtaataagttctcgggcaccggagatcgatcacatactccggaaatcaataccagacaggaatctctcgaaaagacatactgccg

SEQ ID NO: 46149 - DNA, 368 bp, Glycine max
  unsure (1)..(368): unsure at all n locations
agctntnnttgttcggtattggcctaaaaatttgcaatgtagttcggctaggtttcttcgtgcgagctcaaccgaagttgtatttcggccgacaccggtcatttgtcggccaggaaaacattagcccgcctcggccaaaaaacatgattcaccgatattgacagaaaaaaatgctagccctagtcggccaggaaagatgaccgatcaaggtctaaaaaagaagcatgaccggattacgccgatcgaacatttcctaatagatatcctccaagtattattcagggattgaatggaaaaaacaatagctgacatcggtagttaaatagccgtgactgacattnttcagccaacattgcgcaatttctttc

SEQ ID NO: 46150 - DNA, 433 bp, Glycine max
  unsure (1)..(433): unsure at all n locations
tcagaattcaatttcgcgcgtctcaatatattacgggactctatcagacatccaagcaaaacattattgtcgtttgaattagctcagagcttcagaattcaatttcgatggtctcgatatattacgggtctcaatcagacatctgagtaaaaaagttattatcgtttgaatttgctgagagcttcaacattcaatttcgagcgtctcgatgtattacgggacttaatcagacatccgagtaaaaagttatcgtcgtttgaatntggtcagagcttcaacattcagtttagagcgtctcgatatattacgggactcaatcagacatccgagtaaaaagttattgtcgttggaaaatcctcagagcttcngtattcaatntcgagcgtcttgatatattacgggactcaatcagacatccgagtaaaaagttatt

SEQ ID NO: 46151 - DNA, 446 bp, Glycine max
  unsure (1)..(446): unsure at all n locations
agcttatgcgcctatntccttacaaacgttctcttgcacaagacantttaaccgaaaaatgcacccatatacaatcaaggcagcttcgttacctagattatttacacgtacctccaaggcgtatntgttacttacatcacacacatcttcttggctaaactcacatacatgcatactcaagcattttggggcaccaaaaattgcacatgtgcacatcttggcatttctaatacctacatacgcaaacttcatgatgaatcttgactatctacacaataaggtgctacatttcatgctctttntttttcaagtttttgctacctaaagccgcatgcaaattcaagcatattttcctttgctgactaaaattgcattcaaatntaaaaggtatatnttttgtaataatgtttcttcacataacatgcaacatatttatatatatattt

SEQ ID NO: 46152 - DNA, 302 bp, Glycine max
  unsure (1)..(302): unsure at all n locations
tatcagtacaattccaatatggctcccgatggcactcaactgcagaacatggttaagaagggaagtgagacctttaaagagtacgctcagcggtggaaggacctgccagcacaagtggccccttccatggtcgaaagggagatgattaccatgatcgtagacaccttaccagtgttttaactatgagaagtggtaggctacatgccctccagcttcgcggagttggtattcgctagggagagaattgaagtangtttgaagagagggaagttcgattacatcttctcaacaagtaccaatgc

SEQ ID NO: 46153 - DNA, 445 bp, Glycine max
  unsure (1)..(445): unsure at all n locations
agctntggaanatgctatatttcatctcctcgctaagccaatctgctggcttagcgagcctccgctaagcgcgaggaatactctggaagaagatgagctgtacatgttcgctaagcgcaccgcttcatctcactaagcgcaccgcttcagttcatccgctaagcgagaaaggcgcgctaagccaatnataacaaatgtgcgctaagcggtggcaaatttaccacagagggttatctttaaaaactatttaccaatcagggtctggtctcaaagtatttgcaaagggggtctatttctccatggatgccgggagctgcgttggcgagatacctgctgccgccatttcaatggtgagaacgttgctgaccttgaagggtgccgtcgggaggaatggcgaaaccagtgatgccgccattcacaatggcgagaagcttgtaacctggag

SEQ ID NO: 46154 - DNA, 326 bp, Glycine max
  unsure (1)..(326): unsure at all n locations
tttcttgtgggtgatgggtttatcgcacagaatggcatgatcactggctgacatattctcaattagctcaattgcttctttcngggtctttagctttattttccccctacagaagcatctagtagttgcttggttagtggtcttactccatctatgaacatattcaaatagaatggcttggacaacccacccntgggagttcttcttaataaacctctaaacctctccaatgtttcactcagacattcatcagagaactgatgaattaaaagattgtagctttcccttccacattcttggactatgggaaggattatcttataaac

SEQ ID NO: 46155 - DNA, 409 bp, Glycine max
catgcaatcttatacaactgtacaatatttgttgtttatggtcaacacgcgatgcaacaatgcagtgtgaatagaataaaacagagagtgaaccatgaagggaataatgattttgggaggaaggtgtggtttttctcagattaaattgctcgagagaaattgaaaatcaaagatggaggagttgtttagtcttttaagtatggaatatgaaaactcatccgaaaggggaatctattgtgtaggatatttttgggggaagaaatcagaaaggaggtgcattagtaataaatggaaatggaaatagcaatagcccattaatttctatgatagatggccatattatgcccagagaatatgaatgaatggatgggatatgctattgactattattgacttcaaagaattggac

SEQ ID NO: 46156 - DNA, 364 bp, Glycine max
  unsure (1)..(364): unsure at all n locations
ataatgcatgtngtgacaatgttaaactaaaccactatctgtctttgccttaatgaaatgttgattaatatgattagatctatcacgttaaactaattgcgggatcataatttataactcgtcaaaaaatagcttgatgagaacctcacgtccaatccccaaatcatcaagaataagcttcatcaaatgtagttcataaattcattgtgtcataactcgaaatccaagttgtagaccgagccaccgtatgccatctcttactcatccatgtaaatagatgttatacttaaaaacatgtagcttaagcttaatagttaatctttgactgagctgcataattagaatccgtgtacactttcatggt

SEQ ID NO: 46157 - DNA, 479 bp, Glycine max
  unsure (1)..(479): unsure at all n locations
tctatataagctgaaccattttatcaataaacacaagctgagttttattcagaanattagagatcatctctcttatcttagtgagagtgattctcctaaattcttgagtgattcaagaacaccctggctgtatcaaaggacattcacaacctttgcgtgttgccctcgctggaaagagtgattctttccttcctttcatcttcacccttgttctttctaaccacaattccagaaaatccacctctgcccagaattatctcgtggccataactcccattttacgcactcaaattaagcgattcttgagcctaaattgaatttcaaaacgagtcctttcacctcgttgtggaatcacctcatttggagccctttagcttcagttatttccatgtctatatttctgtccagccaccacttaacctacgttgtaccatcccattcatgccatttatgccgagaaccaccttaataagacccac

SEQ ID NO: 46158 - DNA, 442 bp, Glycine max
  unsure (1)..(442): unsure at all n locations
tagcttgtggcagctgatgatgaagatgttgttgctttgaaagagcaagttgctttgaaggacactacagntaaaaagaagaatggggtaacagatgagaagagtcagtggagagaaaaatcaataattgttggaagggaagaaataaaagacaatgaaaaaaaaaatagggggaggaaaacacaaagaaaaagaagacaaagaaaaagttgaaaaaaaataaagaagaaaagaagtagagtgaaaaagcaagagaaaaataaaagaaattgcttcagatgaggggaaggaagtgccatattcttcagtacctctcaagaaagataaggaacgccacctggcgagattcctatatattntcaagaaactggatatgactatgccatntggagaagctntgccacaaatgccactctactcaaagtttttaanagacatgttg

SEQ ID NO: 46159 - DNA, 440 bp, Glycine max
  unsure (1)..(440): unsure at all n locations
agcttaaagtatgcccgagtcattcatccctatgagatgttgntgaagtattggcgatcagaattgccattccttggattatagggttgaaccaagctcatgcttttataaaaaggttcatcaagtcaagttgaaatatggaagtaaccatcttgcaaaattggggcaaaagatgaatcgagtcacatcactgcttcgtctactgccaaacatatttaggattgttgatgtccttgttacttccagtttcaccttgacaaagatgtcatggaccatgttgaaaatctaaattgattcaaccccatatcctgcgtaaaaattcgcaatacttcgactgtacatcattcgcatgcatccatgcttttcattggttgcattgctcgttgcattctttccttgaaaaataaaataaaatgaacttaatcattgntataaaaaag

SEQ ID NO: 46160 - DNA, 483 bp, Glycine max
  unsure (1)..(483): unsure at all n locations
atcgatgttaatataacatacaaaaatcaatgttattttttaggatctttgtaatatgttctctatttttttaataaccccaaaattaacctgcaaatgttaaaaacagaaccacaacatataattttaattctattttgaaataggttttaccagaaattccatcaaagatttattatttactatgaattaaaagaatatttaatgttaaggagacatgaattgtaaaaaatgtaaagtaactaaactacaattccaaaattgtctaaacactaattgtctcaattttaactctcaaataataggttgcccattggatgcgaaacgccttcaatctctctggttccaatggtctagcatcatcgaaatactgcatgatataataaaacatatattaataatatataataccgatcataacanaatgaaatatgtttgaatagacattatcgcttccaatattctagaacttctaagatatag

SEQ ID NO: 46161 - DNA, 476 bp, Glycine max
  unsure (1)..(476): unsure at all n locations
agcttccaggttcaagtatggccaagttacatgtttcatatatgtccaccanagatcttactcgtcttggagtagactctggtgatgatagttcgtgatcttgttgttgtgatggaggtgaaggtggttcacccgggtcttcttcctcatcttcttcttgaggtagttgagcgggtataagaacgttcttctccactttttcttcatcccaattccatgaagcatattcatcaacttcaagatctcgactgatgacgagtttcttagtttgcaagttgtagacacggtagcccttagagatattgctatacccaaggaagatacctcatatagtcttgtcttcaagcttgtgcctcttcgcgtctggaatatgaatgtagcatatagatccaaagacccttaggtgctttgctgatggcttcttcccgttccaagcttcaattggagtcttgtcttttacagacttagttggacat

SEQ ID NO: 46162 - DNA, 395 bp, Glycine max
cactcaagcttcttagtatcagctgatgaagatgaattcgtggctacttcatgcactcctcttatgacaatagcatcatttctggcactaaactgttgggagttggaagccatcttctcaattaaatttctggcttcagcaggggtcatgtctccaagggctccaccactggcaacatcaatcatactgatctccatgttactgagtccttcataaaaatatcggagaagaagctgctcacaaatctggtggtgaggtcaactggcacatagttctctaaatctctcccagtattcatataggctctctccactgagttgcctaatgcctgaaatatcctttctgatggtcatggtcctggaagtagggaaaatgttctctaagaatactttctc

SEQ ID NO: 46163 - DNA, 392 bp, Glycine max
agcttctcaatgttgtgttctcacgatagcttctcaaggaagctacctaggctataaacagaagcatgtgtaacatttgttctaactttgatgaatgaaagtcttatgaaacacacttcacagttccacttctctccctcttttattccttcaatttcgagccccccccccccttctctctttcttttcctccattaaagcatcatcttcaagctttttatccaaggcacattctttggggtgaagctctatcttccatggcttattccctagcggatggtgcctcccctcttctcttctcctttgcctttcgctgcatctccatggcgaaaaatcactattgaaggacctcattgaagctcaaagatccagcctccatagaagctccacaa

SEQ ID NO: 46164 - DNA, 257 bp, Glycine max
cgcacaactaccaaagatatttacgcccatagatatcatagctaacactgatcgctatatgatgcgtacatcttctgacgatcactcagtgctaacggaatctcaagagtaatacatagcgctcataccactgcgatcaaggtactaatgatgtcattactgcctataatcaaagctcagctgctactataccatgcccatgcctagattaaggattaaggatatgaccttagttctataatttcacagaatctggt

SEQ ID NO: 46165 - DNA, 456 bp, Glycine max
  unsure (1)..(456): unsure at all n locations
agcttgtataaattgtatcaaactctcnccaatttatggttatttgtagtgttataagtattttttgttaagcataggtaataaatacttagtatttttcattntgtgtgtttaataatcattttctctcaatttcaggttaattaggcaagctttggaaagtgttgttttcaccttctcgctaagccaatcagttggcttagcgagcgtccactaagcgcaacactcctgtgctaagcgcgaggaagaatccagaagaagatgagctgtacaggttcgctaagcgcacctgtcgcaacctacccttttgcgggtgagcgaggcaaggctcacgggtgcgtcttccataggaggaaaatgcgcggagtcgccaccaacgtttattgaaaggaaaatgttagaanaaccaaaggaaaccggtcatgaagaatattccagattcgggagttatcttta

SEQ ID NO: 46166 - DNA, 544 bp, Glycine max
  unsure (1)..(544): unsure at all n locations
aggtaaggnngtgaaccttgatgacgcatagatgacactaagcttcgctaagaagcttctaaagaagataagcntagcctcatatagcatcgctattatctaactcacctgcctgagatgagaagctagagcttatctacacaccccctataatagctaagctcacccccatgactaaaaacatggaaatacaaaaaaaaaggtcttactacaaagactacttaaaattgcctgtaatacaatgcgtaaaccctatactactagagtgggcaaaatacatagcccaaacgaagaataaacctattctaatattcacaaagataagcgggctcatgcttagcccatgagctcaaaatctacccttatgtgtatgagaaccctatggcgcttccttggatctctaaccncaactaacttggagtttctacccaatgccctcgcgggataagattgcatcattccttcttcttgaaagaattgacctcaaatccgaagtgttatactctgggctcttcctcaaaactggaaaagacaaaacatattg

SEQ ID NO: 46167 - DNA, 462 bp, Glycine max
  unsure (1)..(462): unsure at all n locations
gcttgtangattatggcctacccatcacatgtggtactangtggcggtcgggcgatggtgcacaacaagtnttgcacatgcacaatgcgcgcataaacccaccatcccctggtgcccacctacatgtgagctcacgtactcccatgtagcccatatcctacgttatctcaacaccgggtacccatcaatcctcccaagcttgcacaacatccaagcaaaacaacattcagacagcacaagctatcacagccaagcaaaacagggcaaaggcagtgaactctgctcaacacaccaaccaaaatcatagcttttctcacttaaagaccccagtaacaattgcttcgatccaatacgttaaccggtggatcgactccaaaatgttactggaagtctatagtacataagcctacatattgacgggtgggatctactagcanacatacagaactcattctacattac

SEQ ID NO: 46168 - DNA, 262 bp, Glycine max
gcaaggttgctgactacttaaacaacagtcttctggaggaatcttctggacggcccaagtgggtctgattgctatttgcacccacattcttactagatacaccccctcctttttatggtgattctttattcggaaagttaccgaaacttacgaatgtggttacgatacttgatttctatgcgtaatgttacagaaccttgcggattacataatcatccccattgttgacttactgaatgttacggaacctcactatttgtgc

SEQ ID NO: 46169 - DNA, 458 bp, Glycine max
  unsure (1)..(458): unsure at all n locations
ttctttttatccaaggctcatcttggaggttatgctccttcttccatggattattccctagaggatggcgcctcctctcacctcttctcctatgtcttccgctgcatctccatggtggaaaattcaccattaaaggacctgattgaagctctaagatccagccttcatataagntcacaagcaagcttccatcaaggggtatcatagcacaagagcttcaagtaggtgctccttaaacctccattaatatttttgctttaccttctctctcattgatggttcttcattcttctccatgtatcccctcacatgtcttgtgctaaatgtttataacatgattctttagattttccaccgattaaacttgctatagaagctaaaattgattttctatggttcaaatttcttgtacttgatcttgaaccatgaattgtgtcgagtctaggttccattgagtt

SEQ ID NO: 46170 - DNA, 425 bp, Glycine max
ctgagttatatctgtataggctgttatcttcgttgtcgcatcttagaacatttaatatatgtattgcatcatgcatcatcatggttagtgtgaagaaaagtttctaagttagaaaagtttcttcacaggcaaaaattgtgttgtaatcgattacaacctcattgtaattgaatacaacaagttgtctgaagcttgtatagttaagtctcacatcgggttaatcgattaccgatatctcgtaatcgatacactattgttgagacatgactgattagtcagagtcttgctttatcgataccaagggattattgattctcttcctgttcagtgttcgaggtaacagacactttatcatatctagtccttatccatcattgttgtgagtgttccaatgtagtgaaccttatctatacttgtaaaaatca

SEQ ID NO: 46171 - DNA, 412 bp, Glycine max
  unsure (1)..(412): unsure at all n locations
ttatgctgcanacatttataatagacgctcctagtagcaaaaccaataacaacaaactaattatgatctttcaagaaacaaatacaatccaggttggaggaatcatccaaatctgagatgggcaagtcctccacaacaacaacagtttgtccctcccttctagaatgttgttggcctaagcaagccatatgttcctcctccaatacagcagcaacaacaacaacaaagacaacaaccaactgaggcccctcctcaaccttccttagaagagttagtgaggcaaatgaccatccagaatatgcaatttcagcaagagacaagagcctncattcagagtctgacaaatcagatggggcagatggctacttcagttgaaccaaactcagccccaaattctgacanattgcttcac

SEQ ID NO: 46172 - DNA, 408 bp, Glycine max
  unsure (1)..(408): unsure at all n locations
tcataacaacattggttnttccaaaagccgatgttgctgtttataaaacaacatcggttcttaccaaaaaccgatgtctgttatcagaaaacaacatcggttntcagtaaaaaccgatgttattttgttaccagcaacatcaatttttggaaaaactgatgttgataagaagatatatgactttttttgtgataattcatactatataacatcggttatttaaataaacaatgttgtaattntatgttaacatcgattttggaaaactgatgttaacagcattactttcaacgtcggtacttacaacatcagttaataactgatatggaaagttcttaataatcgatgttgaaaccctatttttagtagtgaatagtcagaatagggaaaaagttaaagaatgaaaga

SEQ ID NO: 46173 - DNA, 464 bp, Glycine max
  unsure (1)..(464): unsure at all n locations
atcttgactntgcgagtggagtttagccttattttcactgtagttattagtcaattcaattaagagagagaaatcccaaagagaaacgtccgattgcttttttttctggtttattttactaaaagatactttttgattattttacctttttttggtttccaacgtggttacggcatgaccgaacggtcggatttcattttaacaaaaattaacggatattacaaatcaaatgatcggtggaaatttattttattttttgattaggcgagaaaatgacttaagtaaatgactaaagcatgtcaaaagcgggtacggaaagtaaatgaaatgaaaataacagcacacgaaacaagtggggaccaccaatggtacatagaatgaattgaaaagttcgatttctggaacttactcggtgaagaccgaagaacgacgaagaacgaacgacgaacgatgaagaacggttg

SEQ ID NO: 46174 - DNA, 468 bp, Glycine max
  unsure (1)..(468): unsure at all n locations
ctcgnacccgggatccttaatggagccgctgctgcactcttacacatatggtcttcgccagagaacagatcgatgtgggtctgaaaagaggcaattttaatcattctgcttgggcgaatgatagaactgcggcatatgaacaaggtgaggatgacgcgacaaacccatgctgtgactgccattcctatacggtcaagttaccaaccagcccaccaatgtaattacttatacaaggacaaaacctctccttacccaccacccagttatacacaaacgccatgcctaaatcagccactaagcctcgctaccgcactttcaatgacgaataccacttttagcacataccaaaacacctaccacaagatgaatattgctgcgaaaagtgctggggctcaccccgaatccgatgcatatgctacacttactacctatctacttagtactgcaatggtagccatcacccctgct

SEQ ID NO: 46175 - DNA, 309 bp, Glycine max
  unsure (1)..(309): unsure at all n locations
aacctgttttcaagaaacacatacactttctttttcctagtcgatcactcactgtattctccatattctccccctttggatttgagtttatgcttacttgaaattaagttaattacttatgtgagttctcgattngattcctaattctctcgcgctttggcatcaacaaaaagccaaagtgcgcaacatatataaaacatacatacattactaatcattcacaagacattcattgtaaaaatctaaacctattatgaagcaagaaacatgaattgatcacatatataacaaccacatagtcatattaca

SEQ ID NO: 46176 - DNA, 390 bp, Glycine max
  unsure (1)..(390): unsure at all n locations
tgctngtagccattagaagagaatgagcatgtgattggaattatgacagacaatgttagtcagtttgtcagattgattgtgaaggaatgcattaatcgtatcccgttgaaagtgtgatccttaaattttgaaagaaatggctatcatttagtactgatttttgcgagaatctttgaagtatggattgaatgcatgaaattgaggatgatgaaggccatgtttgattgtgatagccacttagccaaaaagctgaccatgtgcttgaatgaattatcccttgtacccaggatgagttgaatgaattattgattgattgaaccctgagcctatacagtgttatctcctgctaccttgacttaggttgaggagagcatcatccataggaagcgc

SEQ ID NO: 46177 - DNA, 306 bp, Glycine max
  unsure (1)..(306): unsure at all n locations
atggctttcgtggcttctgtaatgcttccgtaaaatttcctaaaaccttgggtaagcatatttcacttaatattggtgaaagggaagagaataaaagatgaaaatgaaaatccaaaacacttctgtaaggctttcgtaacttttccgtaaagtacgaaaaggggggtgaacttagtaattggggtacacttagaaatctttctcaagaagcccctangcggcaagcacctcccttattccctataaataggggaaggcggttgtttcacaaatttcggaccccttggctataaataggggaggggg

SEQ ID NO: 46178 - DNA, 388 bp, Glycine max
  unsure (1)..(388): unsure at all n locations
tcttcttgcttntattcgttgaccacagagtggtacctggagatatgtcgcggnggtcaagagaccttggggacgtcaggtggggtgctattgcccaaaaccaagcttgacctaatcccgacccaacccgggcatagttagtcaatgagaacctgtgatgtacctaagcaggcgagctcctggcagtctacagataaaaggaacaaagaccacaaagcaaggaggcttgtgtggtggctggccagctgtgaatcttgtgtgatatatgggttatggcctctggtaatcgattaccaagggtgggtaatcgattacaaggcttaaaaatgaagacaggatgctaagatggtctctggtaatcgattaccaaggggtgtaatcgattacc

SEQ ID NO: 46179 - DNA, 398 bp, Glycine max
  unsure (1)..(398): unsure at all n locations
ctatgataccacactcacaatgaattctccttctccaaccttaacactcatntttatttctagaatattaaaactgtgtatctaagcttgttcacaattacttgattagcttattgatgcacaagatgcaagggtcacacgaaggtctgttactataagcctaaaagaagaatgaaatcagatctttgcttccatctgtgctgattgagttttatgctttgtggtagcgcttccatatttgatgcttgagatttgtgctctttgttgaaactagacctaagttattgctttcaattcataaatatttaactttgacttaacataaaaaggcatctgactgaaacaagtatgcgagcanggaattctgatctgtatggattcctcgagccacgttccat

SEQ ID NO: 46180 - DNA, 370 bp, Glycine max
  unsure (1)..(370): unsure at all n locations
agcttgctaacccatggaagcttctaatatcttccacactnnttgtggtgggccattcttggatggccttgattttctcaaggtgcactgtgaccccatttctaccaactactaaacctaagaaaactatattatctacacgaaaggtacacttctctatatttgcatagagggagtttttcctaaggacagaaagaactcgtctgagatgtcctaagtgatcatctatgctcctactatacactaaaatatcatcaaaatacacaactacagatctacctatgagatcccttaagacatgatgcataaacctcataaaggtgcttggtgcattattgagcccaaaggcatcactagccattcatacaaa

SEQ ID NO: 46181 - DNA, 407 bp, Glycine max
  unsure (1)..(407): unsure at all n locations
ctcccatttctataatatggggagaagtgaagtgtataatggttcagccccttaggcacttctctctctttctgaattgcttgaaaaaattgtttccgttaagaaaatccaagccgaggcgcttccgaaacgtttccgtaacgtttccgtgaggaatttcgtgaaggtttcgaccgttcttcgacgttcttcattcgttcttcatcgttcttcgatcttcaacgggtaagtacctcgaaccaagcttttcgattcattctatgtacccgtggtggtccacattgtgtntcgtgtatttntattctcgtttcatttacctttntatacccccttttgacgtgcttaagccattttctttaagtcatttctcgcttaacctaanannaaaaaaaaatttccaccgatta

SEQ ID NO: 46182 - DNA, 484 bp, Glycine max
  unsure (1)..(484): unsure at all n locations
agcttaagaactgctgaatcattaatatcaaatgcagaaattaggctgagaccaccttccttcaaaggagaacaatgcttttcccatatttgagcgaagtatgtgggtctttacaagatttaggaaattactaaaatatttcatctagcattgttatgttaccttagagtttttgtatgcttaaagctttttattatttattttgaattaaaatattaacgctaaggtttgagatccattcttctttgagacaaatatcgattttttgaaagtattgcttgtgttgagcattttagaattgagtgtgtatgtgttagtatcatttaaatgcaaattgcaaggtctagcgcacgcagcanatgcatatatttaaatatggaatcacattaagatgaattagctggcaatatattattntttcaatcacaataagaaaaataacattatttttgggttatcttataatatattattaaaagtattt

SEQ ID NO: 46183 - DNA, 422 bp, Glycine max
  unsure (1)..(422): unsure at all n locations
cgcacaatgtgaccactcactttntgttacatatctatgtatagcctagttccttaagcagaattaacacacacacagatatatagctatttccttcatttcaaacaaaacatttctagccaaccagtattgcagacaactacctcatgtctcttgatagattaatcacagtttaaaaagttcactcttgtcatgtgaaaaataaattggtatatgacaaaaaatttacatgaaaagagagaatgtgcacagttgaggtgcttatcaaagcattattttggttgtgtgcaaatctttagatttgttaaggattttaaattgaagttttaacaaacattctctgtaagaattgattatttgtgctatgtttacagtctcaagcctctaatccacaagtagcctacttgtcaatatcaatgtca

SEQ ID NO: 46184 - DNA, 461 bp, Glycine max
  unsure (1)..(461): unsure at all n locations
agctntgaaaagtgttgtttttcaccttctctctaagccaatttgttggcttagcgagcttccactaagcgcaacactcatgggctaagcgcgaggaagactctggaagaagatgagttgcacagattcgctaagcacaccgcttcatctcactaagcgcactgcttcagttcatccggtaagcgagaaaggcacgtgctaagccaaaattcactaatgtgcactaagcggtccataagtgcgctaagcgcacgagcacgaacaaggccacctatttaagcctgaaatcagattttagagagagagtttggactgggattcagagctttgcatgtctagagattctagagagaaaggtccaagttccagagattnttgagagattntgctgtgtgaagatctgcagagaccagagcttgaagcaggagccggttngagagcttgagatgagtntgtgagtg

SEQ ID NO: 46185 - DNA, 484 bp, Glycine max
  unsure (1)..(484): unsure at all n locations
acatggattaaaaatggtgtaaggtatgggaagctatatcgtgtagagtgttggaagcaacacatgtgagaatcctagtgtcattttattataccctctttcctttntattatctttatggcaatagtattttgaataatgtgaacttattatctttatatttatgtcctgtatttttcctttaactattcggcttatggtttattatacttctgtcaatattttttgttttatgtcaacaattatgttatgttaactaataaatgaaaataacaattaagatatagtcaaatgtgttctttgttattgaaattcaattntattagttcatgttgttctatatctatatcttaattataatgtcttataatganaataattatagtttaaagtaaattgttttataaaataatntattgaagtaaaagaaacaaatgaatantgttgttagattttaaaattatttatataananaatattcta

SEQ ID NO: 46186 - DNA, 429 bp, Glycine max
  unsure (1)..(429): unsure at all n locations
agctntgagcantttcaaacgacaataaccttttactcggatgtctgattgagtcctgtaatatatcgacacgctcgaaattgaatgttgaagctctgagcaaattcaaacgacaataaatttttactcggatgtctgatattgtcccgtaatataacgagacgctcgaagttgaatgctgaagctctgagcaaattcaaacgacaataacattntactcggatgtctgattgagtcccgtaatatatcgacatgctcgaaattgaatgttgaagctctgagcaaattcaaacgacaataactttttactcggatgtctgattgagtcccgtaacatatcgagacgctcgaagatgaatgttgaagctctgagccaattcaaacgacaataactatttacaccgatgcctgattgaagtccgtcatata

SEQ ID NO: 46187 - DNA, 432 bp, Glycine max
  unsure (1)..(432): unsure at all n locations
tcgtcttcttctctagtccagtcttcttctggtttcaatccatcagtgggctttccttctgtgtccagcatcttgggatgttcccagcctttgatgacagctttccaggttctgctatccagtgatttgaggaaggccaccatccttgctttccagtattcatagttggttccatccagaattggtggtctgttcactggtcctccttctttctccatgttcatcagaatttatctccctaggtctcactncagtgattcgagtgcctgctctgataccaattgaaattctgataccaatgccagatgtcgtacaggatgtcacgacatcacgcttcagaacatgcagattatctctgagtgtatgaacagattaaacaagtaaattacacaagagaattgtaacccgagtcggtcaacctcacctacatct

SEQ ID NO: 46188 - DNA, 447 bp, Glycine max
atatggccgcgcaggcttcctacttgaccattttggtggtgcggatgagggcatatgagtctatgaataataccaagctctgccagatacttagaaaaaggcctgtattcccctccccaatcagactagacagctttaataggcaaattaaattgagatttcaccatagattgacactgtttaaagataggtagtgtctctgatttatttttcaacaagtacaaccaagtgaaacaagtgtgagcatcaacagaagttacatacgtattatcaacagccgacatgagttcaaaaggacgtgaatacacagcaagagagggagaggagggaagttatgagatttgccaatgcaacaatggcaacataagtcacaacttggtttactgaaaagaggtagattacacacgctcgaatacaagattcataacatcagcatgatgatgacct

SEQ ID NO: 46189 - DNA, 451 bp, Glycine max
  unsure (1)..(451): unsure at all n locations
atgcttactctggatacaaccagatcaagatgcactctccagatgatattaaaacaacattcatcactgaagatgtcaacttttgctacagggtcatgccctttggcctaaaaattgcaggtgctacatactagagattgatgaaccaaattntcaagcaacaaatctgatgaanagtcgaggtctatgtcaacgacatggtcgtcaagtctcatagcatagcccaacacgtggcagacctgcaagaagtctttggaaagctctacaaatgcaacaaanaggccaatggcaaatggtgaatgtgcacanactacactgatctaagaaaggtgtgccccaaggatgcataccttctgcccagcattgacaggctagttgatagagcgatcgggttccanngtgctagcttcctggatgcttactctggatacaaccagatcatgatgcacac

SEQ ID NO: 46190 - DNA, 422 bp, Glycine max
  unsure (1)..(422): unsure at all n locations
ttctttgtcaattctcttagtgntggtaaggaatgtgtcaccatggaggaggtgaaatccagcttatactcaagggaacttcgatctatagcacctggaaattctgaagaatcaaatggatctagtcttgttgtctctaactctaacaagaacatcaagaaaaaggtgtttaaaggaaagaagaagactcatgtcaatccaaaggatatttgtaattactgcaaggagccaggtcattggaagaaagattgtcctaagaaaaagggcaaaccatttgctgttgttgccaaggaaggttccacatctgaaaatgagcttgttctctcagttgctaatcatcaccaacattctgaanatcagtggatattagaactctggtgtcctttcatatgtgtcctaacaaaacctggtttgacacctat

SEQ ID NO: 46191 - DNA, 422 bp, Glycine max
  unsure (1)..(422): unsure at all n locations
atcctttgtctacaatctcccncttgttgatgatgacaatccctgaaatcaagacaagctatatacaagatgatagcacgttcacacaacccttactccccctatctnttggcatgtatgccaaactttacttaatgataaatttctaattgataattgatttctaacccaagttctctccccctttggcaacatcaaaaagaactaagcaacataatcaatatccaaacagagccaaacaataaaccaaaataaatccattcattgtcgtaaccaaccaaatcaaagtcaagaaatataatataagtgcaagattacgataactaagcaataaaaagccaaatacacggcgataaaccaaagtactaataatacttaattactaataatacttagtcataatacttaagctaagatgatga

SEQ ID NO: 46192 - DNA, 256 bp, Glycine max
atgacaaaacctacttcatctggacattgacgactttcttatacgcacgcaaaggcaccgctacctaaactcatgtgtgccttgcggttctagagccttacgcaccacacaactggtcgctttttacctgaaccaattttaaatagatttgcagcattactttatcactggtaatctacacaagcggcacaccgattattattaatgatcaaaaatttgtagccatcagacggaacatcaaagagacacctgaatg

SEQ ID NO: 46193 - DNA, 229 bp, Glycine max
  unsure (1)..(229): unsure at all n locations
atgtgataatcacccggtaatatatctctacacatgtaactttntattgacgtaaaaccatactgtgctccctatatggtgaactccataactctacaagaaggtcctgctattccctatttaggtccatcacctattgtgcatgatacagaggccactataggttgtaccatagatacacctgacgatcctccacttgagaagactcaaagatcacccatcgtatatc

SEQ ID NO: 46194 - DNA, 441 bp, Glycine max
  unsure (1)..(441): unsure at all n locations
ttttcagggaatgttcaagttcctcttacatggttttacttagttctcatcttccattgcatcatcaatatgcttggtttatacttttgaaatgagagttatgtaaccttggtgaatgagagatcctcttgtctggactttggttgagggatatccaatgatttgactctctggacggttcttccttataactcatccaggtggttctctttcttcttaagatcgtgttgttacttgattggatgtgtttgttcttgtagattgttctaccagtggtcgaatgccttcatctagtcttatatctgcaaaggattcatcaagatatgatatttttgtgttaggctttgtgtcattaaatcttacatgaatagcttcttccataactgaggttctagangtgtaactctatatgccttggatgtntcagagtacccaagtaag

SEQ ID NO: 46195 - DNA, 342 bp, Glycine max
  unsure (1)..(342): unsure at all n locations
atgtagcttatacacacaaagacccaggtgttggacaagtgacctcaataacttaagagggggtgaattaagtttcaaaatttcccactaacaaacttttaacctccttccaaatgataggctcagaatgcagaagaagaagcaacgatcaatttaataatgttctttaaacatgcaagacaaaattaattgcaataacataaatgagataagggaagagagaaatgaaaactcgatttatactagttcaaccacttcccgtgcctacttccagtcctcaagcaacccacttgagatttttcattatctctataaatgctntacagactntgaacacacctt

SEQ ID NO: 46196 - DNA, 459 bp, Glycine max
  unsure (1)..(459): unsure at all n locations
agcttgtgatgtgttcaagcatatagcaaattctatctatatatctgcaaaatcattttcaggatctgataacttcttatcagacgttagttcatcattgaatntaacatggatggattcttctacaactaaagttcttgtactaaaaacttatatgctttagatgtattagataaaccaagaaaaatccctttgtccactttggaatcaaacttagcaagttgatctttagtgttcatgataaagcactcacatccaaatggatgagagtatgaaatattgngtcttcttcctctctatggttcatagggagactctcttatcaatggtctgatcaatattctattctaaacatagcaagttgtatttactacttctgctcaaaagtacttaagaagtgaattntcatatagcatggntctagccatctcttgcagagttctattgtccttntaacta

SEQ ID NO: 46197 - DNA, 491 bp, Glycine max
  unsure (1)..(491): unsure at all n locations
ggtacctccttcttcactacatcaagaatcaccgggtttagtcttctctgtggctgtcttactggtttagccccatcctctaaatntatccgatgcatacatgtggatgggctaataccaggaatgttcgctagggtccagcctatagccttcttgtgcttcttgagaactgataatagcttctcctcttgctcatcagcaagggaggtagatgtaattactggaaaactnttgctatcatccaagtaagcatatttntaaattgatggcagaggcttcaattctggtgtgggcggctggataatggtagaaagagatggtttctcagcctgtacctcanaaataaagtcagaggtatgtgtatttcctgaaacatggttagttctatctgactctagaaaatcaatctcaagaggtaaacatcaccagacatgtaatcaatatcaatttcagattcactctcagcatcanattcattccatatgatcaac

SEQ ID NO: 46198 - DNA, 465 bp, Glycine max
  unsure (1)..(465): unsure at all n locations
agctntatagagcttgtagtggaccgtanatgaaataataatttanatagttgaataaatatatttttaattgaaatagattaaaagagtacatatttattgaaatactaccctcgacaaatagtacatagaatttattaatggaaaaaataattattttattaaaaaatattttattcaaatataaaatttttaaaaagaaggcaaagtcggcaccatactaatagccatggcttcagctagtttcctggtcacaatattccatctcataatcctttgccacacccaccaccataattcaaaacaaccctagtgcggcgcacgggagagaacgctctggtactgccgcacctgattccagcccacaagtacgagaagaagaagaaagtgatggtgatgatgacacttgtgctgtgtgcttggacgaagacgctgccggagtgcatgcattccttccacgtggtg

SEQ ID NO: 46199 - DNA, 431 bp, Glycine max
  unsure (1)..(431): unsure at all n locations
acgttcaatatctactggtaatctattaccatatatgtgtaatcgattacacagtgcaatatttgaattcaaattttaatagctgttgtaaatcattnttggccactggtaatcgattaccagagagtaaatctcttgaaaaagactttttaacttaaatttcttggccaaagcctttgctacttcagttaggaattcccttcctatttaatatacccttcctaagaatctagagactgtcttgatcatccatcttgaatatctntaatttctttgtcttggaataaagcttgagaagcatgtgatcctttggcatcatcaaaacattcagcttgatccgttgtctacatcatgagggtatttcttttccctttataagcattgtgaaatttgtcgtatggaatacatgtacactaatttgtatttatgat

SEQ ID NO: 46200 - DNA, 263 bp, Glycine max
  unsure (1)..(263): unsure at all n locations
attaaacaatgtgagagtcttctaacaaataaaactaagccttatctttctcttgatcttgaatttagacttgcagtaactttagacttgaagcaatcttgttctttnggcatcatcaaaacccgtatacattcattcacacaatntatacttaacacaatattctaatatatggtgtgttttaacaaacaacctgaagatgtttaagtacacatagacaatcaaatttcactacaaaaaaaacatgatttagcgactgaaga

SEQ ID NO: 46201 - DNA, 444 bp, Glycine max
  unsure (1)..(444): unsure at all n locations
ctcaatagcatgctggacaaccttcaccctcttctattttgcaggttgcaggttgtgttatatgtggtggagcacatganttgggctgctgcattcccacagaagatacaacacatgaagtgaattatatggggaaccagccaagaccaaactttaatgcaggtggatattctggatttcaacatggccaacaatataatcaacaacaaggaaagtggagaactcaccctggtaatcagttcaataaagactanggtgggccatctaacagaccaccacaacaagggcctagtctctatgacagaacaacgaagctggaagagactctngctcagttcatgcaagtatccatgtccaatcaaaagagcacagagtcagccatcaagaatttagaagtccaagtgggacagttggcanaacaactggcagattgaccgtcaagca

SEQ ID NO: 46202 - DNA, 375 bp, Glycine max
cattaaaatattttttaaaaacaatgtgtgcgccagaagggtgaatgcaattgaaaattttcccgaagcccttgatggactcggatgtgtgcgaaacttggataaaagtgtgaatgtatgtatacattgatttgattatgtcaaaagaagaatcaaacaaggctcattttgcttcaagaataatacaagattgtttcaacaaacaaagccttgattcaagatttcttcaagatcaagccttgcctcacaatgaaaggtttcaagtcattcaaggcacatgtaatcgattaccaatacatgtaatcgattaccaatggtttgaaagtgtgtaatcgattacacatcatatgtaatcgattaccaaagactctgaat

SEQ ID NO: 46203 - DNA, 472 bp, Glycine max
  unsure (1)..(472): unsure at all n locations
ttaatatcganttttacatattgtcaacatcggatatgaactaatgttgaaactaccgtgtcgttaaaagtatcatttctaacattgattatgaaaaccaatattgaaatccactatacaacatcggttcttcccaaaccgatgtggtataacaagaaatagacaaaaaaatggaaaagcaacatcagttctgaccaaagtcgatgttgtaatgcacaatacaacctcggttcttagatcgataacacatctaataaatatttgttagagagccacttagttatttagtcattcttgccagggccttgttattggtgtaacacccttaaatatagactntcaaaataactcgttcatttctttaatgaaaagatagtctcgattctcttcattattaacacaaaagattagacaagatagaggaaacttttgccgaccatataaactttctatctcaatttcttaaaactta

SEQ ID NO: 46204 - DNA, 439 bp, Glycine max
  unsure (1)..(439): unsure at all n locations
tatcttgctaacccatggaagctcctaatatctcccacactttgtggagggggccattcctggatggcctngattttctcaaggtccacttggaccccatttctaccaactacaaaacctaagaaaactatattatctacacaaaaggtacacttctctatatttgcatagaaggtggttctcctaaggactgaaagaacttgtctgagatgtcctaagtgatcatctacgctcctactatacactaaaatatcatcaaaataaacaactacaaatctacctatgaaatcccttaagacatgatgcataagcctcataaaggtgcttggtgcattagtgagcccaaaaggcatcactagccattcatacaaaccaaacttggtcttgaaaagcagttttcactcatcaccctttttcatcctgatatggtgataaccac

SEQ ID NO: 46205 - DNA, 285 bp, Glycine max
  unsure (1)..(285): unsure at all n locations
aaaaattggttcccgtaagaaaatccaagccgaggcgctttcgaaaccgttccgtaacgtttccgtgaggaatttcgtgaagggttcgaccgttcttcgacggtcttcattcgttcttcatcggtcttcgatcttcaacgggtaagtacctcgaaccaagcttttcgattcattctatgtacccgtggtggtccacattgtgtntcgtgtatttttattctcgtttcatataccattttatacncccttttgacgtgcttaagccattgtctttaagtcatttct

SEQ ID NO: 46206 - DNA, 453 bp, Glycine max
tacccgtcatatgtggtactaggtggcgatcgggcgatggtgcaaatcaactctcccacatccacgaatcaaacatgaacccaccatccccagttgcccaccttcaactgagctcacgtattccattgtagcccttatcctcgttcctctcagcactgggtccccatcaacccctccaagcttccacgatatccaagcaattcaattccaactatcatgaactaccctcaaccaagaaaacagagtagaggcagcaaaatctgcccaaaacacattcacatattacagctttccttactcaaataccccagtaacactctcttcgttccgatgtgggtaaccgtggatcgacttgaaaatgttactggaggttcctagtacataagtctatcatttggccgctgggatctgctagaaagtgtccaaaacccaatatgtactacctttcccata

SEQ ID NO: 46207 - DNA, 476 bp, Glycine max
  unsure (1)..(476): unsure at all n locations
atcaaacatagccatccgatcttatcaagagtgacctatgttaacaacaaagtcaaacactactcgaacatctaatccgtacccaactatcctaaactcatactaacttgagtattaaagtctttgaaagtgacttcttgattgttgttctagctaggaatcgaggcaatggaacatactattgtattatcaacttatacacacatacttatacgaaaataatttagtcaataagaacctaattaaattactcaatatattttctttcaaaatttagttntctcaccatgcgcatattntagatattntagtgtaaaatntattgttaaaatcantttttatattctaattgcacttgaaggttcaaaactacatttaacaatacaaaattgaccagatttaanacataatgacactataatattattaattagtacaactcattntctataacaatcaaatgttcaatattgata

SEQ ID NO: 46208 - DNA, 400 bp, Glycine max
  unsure (1)..(400): unsure at all n locations
agcttccttntagtgcgtcacgtttaanaccgatctcgatggtggtgcgagcctttgatggtactcggcgggaagtgatgggggaaatcgacattcccattcagataggcccccacacttgcaatgtggtgtttcaagtaatggatataaatcctgcctatagctgcctcttgggaagaccttggattcatgccctgngagtggtcccttcaacgcttcaccagatattgaagctcgcagtgggtggagtattagtgatagtgtcgggtgaagaggatatgttagtgagctgcccctcctctgccccatacgtagaagcggcggaagaatcattggaaacggctttccaatccttcgaggtggagagctgcgcctctgtggaaccaagtccgttgctacc

SEQ ID NO: 46209 - DNA, 473 bp, Glycine max
  unsure (1)..(473): unsure at all n locations
tctacttatgtggcagggcgggcttccttcaccttcttgtctccaacgcgatacttgaccattattcttccttcccgcgatgcttcttttcatgtccgcctgagtgggcttatagcctaaaccatacttcccacgatttccttgggtatttatcaggctagttatgccgccgttgttgtttcctaaacccatcccgggttcataaccgttccccaacataactcgggccatcattatcgctgcatcggacagacaaggctgcccaaagagggagtccacggaggaaatgctgaccacctcaaaagactggaaagcagtttctaacgattcttctgcggcttccacataaggcatggaggatgggcagcttaccaagatatcttcctcgcctgacacgatgaccaagtgcccctccactatgaatttcagctcttggtggagtgtnaacgcacaactcccactgagtggatcca

SEQ ID NO: 46210 - DNA, 432 bp, Glycine max
  unsure (1)..(432): unsure at all n locations
agctntagtcaagaaaagtaatccaaaaatgaccaagaatatggtgttgaaagagcataacaagactttcctaaattggtttaaagatataatcctcagtgaccataatgcatctgaaacgttatggaagttagcagatgagcctaaaagtaatgttataacttggcaaggatacaatatcaacaagtattcattctacacaaaatcacaagacaacaagagtacaatgcanaatagtggtgttagtctaagggttgaatctcaatactttgctattgtacatgatgacaatcctcgtgtagctntcatgccttactttggagtcattgaagaaatctaggaggttaattatgtaaaanttagtatctgtgttttcaagcgtaagtgggttgatagcacaattggtgtgcacaccgatgatttcaaatttac

SEQ ID NO: 46211 - DNA, 417 bp, Glycine max
  unsure (1)..(417): unsure at all n locations
actatgtgactnttgactctaaaacaaatcagaagatctggttgaagaaaggtgcacatgggcaaccactatcgtcttacaacatgtttacaagttaagaaatttacaagaatacgtagctcgaaggtaggacaaaatatttagttcaaaatgcaaaaactttaacactttaactcctcttgttattgatggcttctgcaacaagagatagttatatctaaattgtcttcatttgcgtctggtgtagcgtctggagagggtatccattgggagcattaaatgttgcatttaatgcaattccattccaacttgattaagcacattgcttatcttccttgaatcaatacttttctaccatcttcattggtcaaaccatactttgcacagtgtaagtgttcacactatagttacatgtct

SEQ ID NO: 46212 - DNA, 392 bp, Glycine max
  unsure (1)..(392): unsure at all n locations
attaatttctttataataaactcatccctcgcaatttttgtaccgtgtggttggtacctgtgatgatcgcgaactcttgttcatgggagcagaatgacagcagtatagtatgataagtgagattctcttgtggagccaccgagccgacatgatgacgttgatattattttacgagagagttgtgtcttgtgaatcaactcctccatagctagttccataattctcttgttgaatcgaggatgtanatcacaattctaattatatgtatgaacaaatctattntccattatgtgaatgatgtgtacgtgagtactatacctatatatatatatatatatatatcatagcaattactctgattgtgtgggcactgagtactaattactatactt

SEQ ID NO: 46213 - DNA, 493 bp, Glycine max
  unsure (1)..(493): unsure at all n locations
gaggggtgcgcagcccaccatctttcatagtggaacaccattcacgtgtctactatcattgtgataatctctttctctgtttttgggggtgctacttgagttgccaagtctctccatctttgggcgtattctttgaaagattcgtgccccctttttgcacactttttgtagttgcatcctatccggagccatatcagaattgtactgacactgcttaatgaaggcaaccattaggtccttccaagaatggactcaagaaggttcctaagttagtataccaggcgacagttgtcctagtaagactttctccggaaaaatgtatcagcagtttctcatcttttgcgtatgcccncatcttccgacagtacatctntagatggttcttggagcgagtagtccccttgtacttgccaaagtccggcaccttgaacttgnngaatgaccatgttgggtattaggaacaactcttctatggttagcaaggcataatctt

SEQ ID NO: 46214 - DNA, 441 bp, Glycine max
  unsure (1)..(441): unsure at all n locations
gattgcatgatgatatgctcagaacacgtagcttgtgcaatgaagataaagcatganctccattcctgtcctttgcagatattgctacaccatctagatacaattctgtgatatctgtaaggttttgaaacattgctatgtttggctttgcaagtttcacgcagtgaggtgaggtatatgaacaagacaaatcaagagtaattaaccttctgaggtgagaaatcttttgtggaatctgcccctcgaagctagtattagacatgttcaaatacctcaaattgttcagcttgtaaagctctgaaggaatcaccgaacgaaagttattgaaagccatattaaagctctgaagatattgaaggctgaaaagaaagcttgtattaacaagtcctttgacatagagtcacgtgatatttaacattntctctaacacttagtaaaaat

SEQ ID NO: 46215 - DNA, 490 bp, Glycine max
  unsure (1)..(490): unsure at all n locations
ggacaagtgttgttcagtgttgagagtggttttcttgacaagtgttgtccgggttgcttctgtcaagttgtctggggtggacaccctttctgatgcaagaggctccaagaggattgggctagagctgctgaagaaggtcctaaggttctcatgaactttaggatagatttttgagcccatgggccaaggttgggtccaattatctttgtacgtattagattacgatgtcactatatttggttcttgtaattagggctccataatgtaggtagggtaccctagaaatataggatntttcagcccttgtattttatggcacctagacntagttttgtattacgggtagttctgtaatttcacatgcactaagtgaatatttaatgtgtgtgttggcaaataaatttaattgaattggtagaagcccaatccaattaatatttagagggggaggtgagcattngcttactacaccccattgccacatcatata

SEQ ID NO: 46216 - DNA, 315 bp, Glycine max
  unsure (1)..(315): unsure at all n locations
gaattatcaacattatgactaagagggagaaccaagtacttctaagtattgagctgaaagagatcttttattcaacttttgtcactattataccagtttttgttgattataaatatgttgatatgacttagtaacaagcaactttattctattatattatcatttaactgtttcanaaatctagtaaagattagtgacttatccaaaattatttgtgtaagcatatatatcatatttagaactgtatttttaatagatcgggacacttattagtttttatgcatacgaataaatattttgtaggttagattcatt

SEQ ID NO: 46217 - DNA, 502 bp, Glycine max
  unsure (1)..(502): unsure at all n locations
tatgcaanaatcaaaatcatttcttataactnttgaataaaatacgtagatcggtagaataatacgtaatttaggatggtttttttaaaaatcaatcatattttagagaataaaacactttccaaacaatttgatggacaaagaaaagaggtgcccaaatatgttaattttgttctttagtctattttctttgtggtgtgtttgtctaagatcccttgcgcaggtaagtgattatgttgatctgtgtaattttctcaatattttttacatacttattttcttctcatctatcaaatatatttctaaagtattttaagaaaaaaatatcacaaactactttaagtatattgatttaatagtcatntttatcttggcaaatgagataaaaaaaataaaagganaaagaaattaanagaatatttaaacatganaattatattacaataattntaagataaaattataatggattaaatatatctttntatctnaaaataatata

SEQ ID NO: 46218 - DNA, 397 bp, Glycine max
  unsure (1)..(397): unsure at all n locations
agcttgagaagaggaagtgtagaagggtgaaacttcctgcttttattcgttgaccacagagtggtacctggagatatgtcgcgggggtcaggagaccttgnggacgtcaggtggggtgctattgcccaaaaccaagcttgaccaatcccgacccaacccgggcatagtcagtcagtgagaacctgtgatgtacctaaacaggcgagctcctgacagtcaacagataaaaggaacaaagaccacaaagcaaggaggcttgtgtggtggctggccagctgtgaatcttgtgtgatatatgggttatggcctctggtaatcgattaccaagggtgggcaatcgattacaaggcttanaaatgaagacaggaggctaagatggtctctggtaatcgattac

SEQ ID NO: 46219 - DNA, 493 bp, Glycine max
  unsure (1)..(493): unsure at all n locations
ntagaaatgctagtagaggtagatagaagttgattatatcttttaattaattattctacagatttgaatattacctcttcaccatcagagttggcaatgtcatcaagctgagagtcctcatcatctaaacttacgtccagtgttgggtctgccttgctggtgaacgcattggccattagacataggttggcttcttcttcaccatcctcgtcagatgaggaattgtccaggtcctcccaagtgctcatgaggctcgtctttntgggcttgaagaatttcttcttcttatcctttagctnttcaaggtcaggacattccaacttgaagtgccctagtttctagcattcatcccatatgattggattcttctctttcttatggaaggatctttnggataatccgctgaacctgaaggagttctttatttttcacatctttatgatctttcttgtgaccggacttagctcatcatctttctcatcatagtcatcat

SEQ ID NO: 46220 - DNA, 359 bp, Glycine max
  unsure (1)..(359): unsure at all n locations
atctgatcatcatgccttgataaatgccaaaacaactagggcaaacgaagagggtgagaatgagggagaagcccatgctgtgactgccattcctatatgaccaagtttcccaccaacccaacaatgtcattactcagccaataacaacccatctccttacccaccacccaattatgcacaaaggccatccctaaatcaaaccacanaacccacctaccacacaaccaatgctaaaccccacttttagcacgaaccgaagcaccaaccaaaagggaattntgcncananaaccttannggtttgtcccatatctactcgataattcaatggtagccataaccctagccaagggtcatcaa

SEQ ID NO: 46221 - DNA, 500 bp, Glycine max
  unsure (1)..(500): unsure at all n locations
tatctctctcattcttgatcactgtgaggcctgtcttcttatgaaccacttggactagactcacccactgactgtcagaaatggggtaaatgattcctgcttgcaagagcttggtcacctcctttttcaccacatctagaatgatggggttgagtcgccgttgtgactgcctcactggcttagctccatcctctaaaagtgtcctatgcatgcangtagatgggctaataccatgaattcctgctaaagtccatccaatggctttcttatgcttcttgagcactagcaacaacttctcctcttgctcagcagcaagggaagcagagatgatcnattggaaattttccttgtcctctccaagtatgcatacttgaggtttactggtaagggcttcaactctggtgtgggtggtggctgaacagtggaaggaactatggtaggagaagaggaggaggggtccttaccctgtacctcataaagcaagtcagaagtatatgtac

SEQ ID NO: 46222 - DNA, 631 bp, Glycine max
  unsure (1)..(631): unsure at all n locations
gtcctgtcagacacacaatagtantgctgtanctanattatcctaatcnntaccgtttnnnnnnnnnnnnnnnnggaagagttgangctgagaccnttcgtancacgtcgacactacgaatactnaagcttgagtgagaatgggtaggctccttcccacattgctattaatgatgaacgtttaatcacagccgttgacatcaatgttggaaagtctgatctcagcgggataaatatcactgaaaagctcgaagaacgaacgtatattctcaattatgaattntcacactctccttctctctgctgtgtagtgcaagatcgaagaatgctatcatattattgatgtatctgataagaccggaacnctacaaagaatggctgggttactgtaatgatatccctatatcatacctccatgagaattgatatacaaattctatcatgtctatcatatagggcgacttcacgagaatgcagaccttctagctgattatttcttgaaataaattcagacgatcttcctgaggtatgtaccattaaatccctgcataatgaataacgtgcgttgtatcttatgaacaatagcatctccattcctctcttaatacgatagtgactcatgcaaacgctcc

SEQ ID NO: 46223 - DNA, 391 bp, Glycine max
  unsure (1)..(391): unsure at all n locations
gcttgctcacactaagcgcanagaccccttattgattggctgaatggttcagctaagtgcacatcgctgcgctaagcccaacatcttcactgtaagttgcaccttaagcagtgggctttgcgtggatgatgcgctaagcgccacttcctctctgtgaaaatatattatagctgctctaagcgcgccatcctgtgctaagctctagattcattctgtaagttgagctttcaagctgggcttagcgggaaaggatgcgctaagtgtcaacatcattctgttttgaaatcattggaagtgtgcttagtgcaggaagtggcgctaagcctgaatcactcactgtaagtaaaagcttgatgttatgctaagcctcgcatctcaagctaagcacata

SEQ ID NO: 46224 - DNA, 417 bp, Glycine max
  unsure (1)..(417): unsure at all n locations
ggagacaagtcaagggcgctgttacgaggatgagttcaagtcattggatttggtcgaccatgccctcctgatttccacctgggaaattgggagaggaggaacgccccggcattacgcaacgagcataatgtaaacctttacggtttaaaagctctatagctgggcctacgctctagagttattacttttgttaaggctntgtgtctttcgtgtttgaatgtataatacaaggatctttcttcatctgttcctacgtctctacccattctcattcatttgcatgtttacttctttatatctgaaacggcagatccgatgacgagtcccccgaaggtactaatacctgagacccgcttatcaacttcgagcgagatacgaatcagacggaagatgaagggaacgaggatgtgggacttt

SEQ ID NO: 46225 - DNA, 500 bp, Glycine max
  unsure (1)..(500): unsure at all n locations
ctcgacccggatccttaagtcacctgcggcatgcaagcttgccaatccaccgtgccgtatgccttctgaatatccatntgcaccaagcatctaggagacacatntttcctaccataccctctcaccagctcctgagcaagtaatatgttatcctggatattcctaccaggaataaaagctgattgagtgtcttccaccacactatttatcacatcactcagtctgctagtcaaaatcttcgatatcaccttataaattatgctacaacatgatattggtctcatgtctttgatggtttttgcctccggggacttagggataagtgagacaatagagcagttgacaactctgtacaacttactagaattaaaaaattccaggatagcattctgcacatcattntttacaataggccaggcggcttnanaaaatgagaaganaaccatctataccaggagctgtggttcaccaatatcactagacattcanatctctttgat

SEQ ID NO: 46226 - DNA, 471 bp, Glycine max
  unsure (1)..(471): unsure at all n locations
ntgtagagaaattgtggggatgttcatgtggtatggaggtttgttccagctgtaaatcacaccggaggagtcctatgtctatatgggaaggaaatttggcgagtgacttcaatgtcgtgagaaaaaaggaggaaaggatggtatatggaggtgttagccaacaaaggggtagaaagatagaagaattcaattccttcattgatgggatggaattggtggagacatctatagtgggtaaaaggtttacttgggttcatatcggcggtaatgacatgagtaaaattgatagaatacttatgcttgggcctttcggtaggggtgaatgcaagaaagattaacacttatcaaccagtcattgacaagatgataaagaagcttgcaccttggaagaggtaccatttgtcttttggtgggagaatatgctcgattaagatcggactatcttcnttatccccttactacattttattt

SEQ ID NO: 46227 - DNA, 478 bp, Glycine max
  unsure (1)..(478): unsure at all n locations
atctctgagtcacctgcggcatgcaagcttgtaattcttgatccgcagataacataggtggtaaagtttgggactggaacgagtcaccaatggctttcttgaggaaagagaaataaaatgtcagatgaattttactgtgagatggaagatccaacttataagcaacaacaccaaccttgtttaacacctggaaaggaccataaaaccaaggggagagtttttcattaatccttttagccaaggatcttctcctataaggttgcatcttcaagaacacccaatcaccgactgcatattctatgtctcggtggcatttgttggcatttgctcacatgatatcttgagacttcaacaaattttctcttagagtagccaataattcattccaagagnattttagtttattgacttcttcaaggcgggaaggaatggtggatcccttgagaatgtgaggnggatcatgtccatacaaagcttt

SEQ ID NO: 46228 - DNA, 513 bp, Glycine max
  unsure (1)..(513): unsure at all n locations
tctgcagttcagacatcatanaagttcaataaattgacatgattcaattgtggatattcatagatctgcaattacagagacaatatttaacaatgcttgtattattttaaaacacaaacgcaaaattggatgaaaaccaataagaacaacttcactaatttctccataaaacccaaaaatctattttagttcatcattcagaaagggagaaaggaattatgcatacatgagaagttattaaaatgatacctttggaattcaaaatataaaaaatgatgccaggtgatgtcgccatttcactcttccctgaaaattcaaatataaaaattactttatccgaaaattagttacatattcagtagatgaactacttattaatggaatacaagtaaagaaacataaatatggatacacatagatgttactgcattcaaaattagcatgattaanataaacagcagattcttaataatatntataccaaaatcatgcataagctccagtccagcagag

SEQ ID NO: 46229 - DNA, 451 bp, Glycine max
agtcacctgcggcatgcagcttcacacagtttattttctcataccttgagtttgttataccaattactaagactttcctaactagatgattaagatgatgcatattaatgtgtgcatccctacgatgccacaaccaagaatcatctattttacttaccaagtaactcagctcatgaaatgatgcatgcttaacattcagcatatagatattacctattctcttgccaatgtggacaactttatcggacatggcttcacttgtaagacaacaatttttgttgaattcaattttgaagcctttgtcccaaagttgactaatgcttagaaggttgtgttttagtccatccacatataacatgttctttatttgagttgtgtgttgatttccaatatttccttctcctattatttttcctttggtattggctccagatgtgacatgtcctccatc

SEQ ID NO: 46230 - DNA, 435 bp, Glycine max
  unsure (1)..(435): unsure at all n locations
tataagaacannaatgccttaatcatttccaaatatgcatgtgaattaggacgcatcaacaagaatcaagccaaggctattgtgcaagcaatcaatggggcaaaacacaccaaatgattataatgatggatggctcaaattctcacaaaggtaaaatcatcactttcaaattgagctttcaaaactatcatgacatgtagagaagaatcaaggatntcaagtcacaaaatgtcaagaacttttattttcaaaacaattacccatttcttgaacatatcctataattcaaagaaaaacatgcaaagtcgtacgtgcacacaaaattgacccaaaatattaaactaaaaatccgacgaaactaacaacattaacaaattaacacaactaacaaattaacaaaaccaacaaaactagcaaaaccaaagaacactcccc

SEQ ID NO: 46231 - DNA, 482 bp, Glycine max
  unsure (1)..(482): unsure at all n locations
agcttcttttgtccttngngttgtaaatgtgcatcaaaagaaaagaaaataaaattaaccaaagattggagaaaagaaaaaaaaaatagaaaagaaataaaaaaaatgtacaaagaggttctttgtaccagacaatgtctgaacaatgtgcaaaattgtcaaaagcaaaaaaggaaagaagatagtgacagtaacttggttaaaaccttagggatgcgtgaagcaaacacctatttagttacaaaccaaatcttgtatccatgttggtcccacatcgaaccaaagaaaaaaaaatagaaaaggaaaaggccaagacaccaaaaagccaaagtttccaccaaaatctggctttctaaanagtcctattggtccatgattacgcatattatctntgattntataggaaatgacttataaagtcaaatcatgaacttgttgtggtcanaatangataaacacttgactggtgaatttatacactg

SEQ ID NO: 46232 - DNA, 508 bp, Glycine max
  unsure (1)..(508): unsure at all n locations
taggtcatggttcaatgtatggtttccttgagcctcagtttatacacaatgcanaggatagatgtcaaaaatttcaacattacattaaaacatgggtgaaggaatcacaacgagaagcatacttaggagcttacttgaatcaatatgtaaaatataactagtacgttcaaaaaaatatttgcattatacgtacctaattatagttctggactttanggcacaatggaagcttgttgttgtgtgtccatgggacaatactattgtttggttttgttctttgcgtaagaagcctgatgttaacatcaaagctacaattaacaggttatgtttaaaattataattcatttattgtataacaattgtaggatatgtaaacagaattttgatgttatatacgtntaagttttnttttaactagtgcaatgaagacattaaccactagttnggaaggtaaatcggatcaacccgtacctcgttggattgaaacanaggttagtctttatttaat

SEQ ID NO: 46233 - DNA, 450 bp, Glycine max
  unsure (1)..(450): unsure at all n locations
attcaattggttgtaatcgtataaaactttcatatatagaccaataagtagctgatatgagcaaaagtggattcggtttagtaagcaaaatcttgagtttgaatttgtggattaaaaaaatgtgattagaatgagagaccttatttaaagtggttactaaaaaaagtggttaatcttgtgaataaaaaaaattatgatggaaagaaaatatttcactaaaaatgattaatctaattttcaatgaagattaatcattaataaaattgatgaatactatagactaatctcatgataaaaaaaaactattatcataaatcctattgtcctatgcccatatctacttttattatcacaattcttgttaatgcatgtttaagggaaggcaacctatatgtttggtgcaactcattgaagaagtcctcangggacattattcaacatttgaaaata

SEQ ID NO: 46234 - DNA, 477 bp, Glycine max
  unsure (1)..(477): unsure at all n locations
cgtgcattgtgtgcaatacacaattcccggtacaccacatcaaaatggtgtatcagaaaggcgtaatagaactttaatggatatggttaggagtatgttaatcaattagactttacccgtatctttgtggatgtatgccttgaaaactaccatgtatttgttgaacagggttcctagtaaggcagttccaaagacatctnttgaactgtggacaaataggatacctagtataaggcacctgtatgtttggggttgctagacagaaataaggatttataatccgcaagaaagaaaattggatgcaagaacaatcagtggatatttcattggttatccagaaaagttaaaagggtgtatgttttattgttctaatcatagtatgagaattgtcaaaactggaaatgcaagggttattgganattatgaaatcagtgggagtacagttccacgagaaatgganattaaagaaagtagagt

SEQ ID NO: 46235 - DNA, 390 bp, Glycine max
tcaatcatatgatagttactctctcctccaccttttcaatttcttgtacttcttgaaagaagtaggtcattcatttatgttttagactctccggttctatcgaaagatattcttataattttttaattatttaagatattcttataatttttaattattggaatcagttatgaaaccaattctttaattaagacttgatgagaaaatacactctttcatttaagctgaatatgaaaaaattggaaagaataataaaaataattaacacgtgaaattctaccacaggagaagtatgcccctatagtaatagaaggtgccacctcgcgttcctctaatgaaagacagagtaccgttgcttacgtacatatgttcctcacacgtcagacactg

SEQ ID NO: 46236 - DNA, 446 bp, Glycine max
  unsure (1)..(446): unsure at all n locations
catgtggacagtctgtancgaacaatgaccctntttctgcataaattatttagttaaaactttttaaaatgactcatttaatttgtcatgttattacgtttcgggtagtcccgcagttaaacgggtcaaaactttacccgccctatgcttgctgttagggtgggttgacaatttatctaataaatgtaccttatcgtatatagtacatacatttgttgtaactaaaatgtgtatgatattgaatagctgtaattcagaggaaataaatatatcgttcttttattccacacacgggtagagttaagtgagtcaggtgggcttaacagctcaatcattaaagtcaagagagacaatacttattgcttgcaagatcctaaagtggtcttcgctttcagagccctcgaaccttctactactagtattagataatgtgaatagatggagag

SEQ ID NO: 46237 - DNA, 422 bp, Glycine max
  unsure (1)..(422): unsure at all n locations
agcttcttagtttcagatgatgcagatggagccatcttctcaattaaatntttggcttcagcaggagtcatgtctccaagggctccaccactagcagcatctatcatacttctctccatattactgagtccttcataaaaatattggagaagaagttgttctgaaatctgatggtgggggcaactggcacatagtttcttaaatctctcccgagactcatacaggctctctccactgagttgtctaatacctgagatatccttcctgatggctgtggtcctggaagcagggaaaaatttctctaagaatactctcttaaggtcatcccagctcgtgatggaccttggagcaaggtaatacaaccagtcctttgccactccctctaatgaatgaggaanagccttcataaatatgtgatcctc

SEQ ID NO: 46238 - DNA, 501 bp, Glycine max
  unsure (1)..(501): unsure at all n locations
tgcttctacagaatggggccgaaacaagttctgaggtgctntatggtgtagcaacagtgaactcaagcttcgaagggccaaaagggacgagccgagggtggaaagtatgatattagagtacaagttgaaggcttgtcaaaggtcgaagaggagcttgaccgaaaagttgagtaggacggaagagaacatgtggggaatcattgaccagtataaagagaatctaaatctagctgctagccatgagcaaagactggaggaagagcatgcaaaagtatcggctctgcaagcggaaagggaagcaagagagagagtgatagattcgttacacagagaagccatgatgtggatggataggtttgctttcactctgaacgggagtcaagagcttccaagactgttagccaaagtcaaggcaatggtgggcgtgtactcggctcccgaggaagttcatgggcttttcgattattgtcagcatatgatcgagttgatgtatcacataat

SEQ ID NO: 46239 - DNA, 413 bp, Glycine max
  unsure (1)..(413): unsure at all n locations
agcttagaacaataaactnggccttctcttaattgtctttgggcttggcgatcacgatcaacaaagtactttcggcacctactatatgttgacttgaccaacgctgttattggaatgctgcgacaatctttcaacaccttattcacacattctgataggttggttgtcatgtgaccatatcgtcgtccagatgtatcgtaagccatgctccatttttcttttgaaatgcgatcaatccatcttgctatggctggactcaattgacgaaatttttctaagttttgatcaaacacatgcttgcaaggagtgtatgttgcatcaaatntgttatcatcaaaagttgtacgtagacatganactcanattaaattaatgtataaaataaaccttacccaatttcttgaacatctctt

SEQ ID NO: 46240 - DNA, 489 bp, Glycine max
tgtcttggaatcaaggcttgggaattgcattggagctgccaaaggtcttcattaccttcacaaaggagtagtggtacggggaatcattcaccatgatgtgaagtcctcgaacttattgcttgatgagaaccatgttgctaaagttgctgattttggcctttggggtatcttgaacctgaatatttaaggtggcaaaagctgacagaaaaatctgatgtctatgttaaaattaatgtctcatcagatacatattatttgtataaagattaataaataaataattaataatcaaagattaaattgtattttagttaaataaaaaaagttcttaaagataactactacttgatgaaagtaatgatcttataaaaggggttaatacccactaatatgagacaatgttcccttcctgacaaacaaagtattatccctaatctagtcatcacaaacgtaaagagacagaaagaatagtcaaggaagtgaaatctt

SEQ ID NO: 46241 - DNA, 87 bp, Glycine max
  unsure (1)..(87): unsure at all n locations
agctggctgagcaggtacataaagttggatagagtcaaggattgacaggaaagttntttttttttgtgtgtgttgggggggtgggga

SEQ ID NO: 46242 - DNA, 284 bp, Glycine max
  unsure (1)..(284): unsure at all n locations
gctattaggacctatgaaactcaagctggntgaggtacttacccgttgaagactgaagataacgaagaacgaacgatgaatcttgaagaacggtcgagaatcttcgcgtaattactcacggaaacgttacggaagtgcctcggcttgaattttcttcacggaactaatttacctcagcaatttcgagagagagagaagtgcctaaggggctgaacccttttcttcttcactcctccccttatttatagcaaaataggggaggagcttgccacccanctcgccca

SEQ ID NO: 46243 - DNA, 449 bp, Glycine max
  unsure (1)..(449): unsure at all n locations
agcttcacaagcaagcttccatcaagtggtatcagagttcaagagcttcaagttggtgctccttaaacctccattaattntcagctctaccttctcctccattggtgtttcttcatttttgtccatgtatctcctcacatgtcttgtgataaatgttgttaacatgattctttagaatttccaccgattaaacttgctatagaagctagatntgattctctatggttcaaatttcttgttcttgttcttgaaccatgaattgtgttgagtttagattcctttgagttntgtcttgcaatttttttgtggctgaaacctaaaccataaaattcttacaaaaacattaaagtagaagaaaacctaacaaatatagagtgacttgttcacctattgtagttntgtcatagaagtcatgtctaatcatgaaacttgtcacataagatttccta

SEQ ID NO: 46244 - DNA, 445 bp, Glycine max
  unsure (1)..(445): unsure at all n locations
cgactttggtttagacattattgataccatgattgngacttgtagggattgatttgggcaagattggatgagaggaagggtgattttcgaaatctgcacttatgcagaattttgctgtcaaaataggtgcagcagaattttggctttgtgcagaaaaatgcttgtgtgtggtgggctgtggaaagagtagtacagaatgagttctggacgtttacaagtagatcccaacggtcacaatgtaggcttatgtactagagacttccagtaaaattttcgagtcgatccaacggttaatgaaccggaacgaaggaattgttactggggtctttaagtgagaaaaagctgtgattggttggtgttttgggcagagttttctgcctttgccctgttttgcttggctgggatagcttgtgctgtttgaatgtngtattactntgatgttggg

SEQ ID NO: 46245 - DNA, 391 bp, Glycine max
gcacaggcactatgttaggctgttagcacgaagatgcaggattcgttacgtgcgctaagcgcgaggcacacgctaagcgcgcgatccaacagaagcacacgctaagcctgcagcatgcgctaagcgcgcctacgaaggcccaaagcccatttctacacctataaatagagatccaagccaagggagaatgacaccttgcctcagagcacttctctcagcattccaagcctgagctctcccttttctctctatattctttgcttttattatccattctttctttcaccccagttgtaaagcccctcaatggccatgagtgtgtaatcccctagctacggcctgggaggcctaaaaagccaatgatgtatggtgtacttcaagagttatcaat

SEQ ID NO: 46246 - DNA, 399 bp, Glycine max
tatatctattatatcaaataatattagtacattcgcaaatatgactaatacaatcaaggatctatacttactacgtgtaaataaaacactaatatagatgctctagtgcttatgtgaatgaatttcaagccgttatagtgtatactgatgatatggctgagatagttgtacatatcgaagattatggattcgctactacaagacgtgtgttttaagtcggccctatatgaccttctagaatgggtctgcaccgtcttaaaaagcggcgtcataatttggtgttgagcgtgctaaagcaagttttcaaccgatgtgcattgaagcattttctaagacggttatgtgaacaaccgacttagaatacaatatatactaacgcatttctcagtccacccggct

SEQ ID NO: 46247 - DNA, 453 bp, Glycine max
agcttatgctgcaaatatttacaatagactctttcaacctcagcagcaaaatcaaccacaacagagcaattatgacctttccagcaacagagacaaccctggatggaggaatcaccctaacctcagatggtccagccctcagcaacaacaacagcagcctgctccttccttccaaaatgctgctggcccaagcagaccatacattcctccaccaatccaacaacagcaacaaccccagaaacagccaacagttgaggcccctccacaaccttccctcgaagaacttgtgaggcaaatgactatgcagaacatgcagtttcagcaagagactagagcctccattcagagtttaaccaatcagatgggacaattggctacccaattgaatcaacaacagtcccagaattctgacaagctgccttctcaagctgtccaaaatcccaaaaatgtcag

SEQ ID NO: 46248 - DNA, 453 bp, Glycine max
  unsure (1)..(453): unsure at all n locations
gggagaggatgcttcaatggagganaagaaagagggagagatagagagaggggggagcacgaaattgaaggaagaaaaaagggagagaagttgaactttgagttgtgtctcacaagactctcattcatcaaagttacaacaagtgttacacgtgcttctatttatagactaggtagcttccttgagaagcttctatgagaaaaacttccttgagaagctagagcttagctacacacacccttctaataactaagatcacctccttgagaagcttccttgagaagattcctaaagaagctagagcttagctacaaatgggggaaaagaaagagggagagaaagagaaacgagggaggatgaaattgaaggaagaaaaaaggaagagaagttgaactntgagttgtgtctcacaagactctcattcatcanagttacaacaagtgttacacgtgc

SEQ ID NO: 46249 - DNA, 454 bp, Glycine max
  unsure (1)..(454): unsure at all n locations
agctntnggctgtatgttagagggtggtgccttttgcattgctcctacgtgtatatgtaggtgtaacagtacttatttaaccttactcacctatcagaaagctttagaattcaattggccaggagctatgtcccttgagttaagtgggttttagtggcatcttaactattttagtgtttctttccccatgtttttttatttaatcggtaaatttagtttattaattntattaaaaatattaattgaaaaattcaaattcataacttttcttttcttcatgactctttgcattctttcttaatcatcaagtcaatcttatatcttttttcttttaacatgttagtatagttnttatcaattgtccttgaagggcgattgctttcaagctaaatattataactcaatattacaaagactcatcttatttgtgatttatatttctaagtgtaactta

SEQ ID NO: 46250 - DNA, 478 bp, Glycine max
  unsure (1)..(478): unsure at all n locations
ntaccttcctaattctttcatttgatgatgtatatcaagcgtttcatatgaaagtgtactgaagttntgcgagtgaggggagagatcagtggacatcaaatgcatacataatactcagtaaagaataattaaccaacctgactaaaaacaatattaatgaacactcggcttagactactttttctaaatgaactggttggttgctcagcatgaacgagtattttactatttttaagttgcctaatctcttatctcttatttagcataaatgcagcaccaagatttagaaagcacaaatgcgacccaaaacataaatatgatatcatacgggcatgaacttagagatacacaacacaagcttaaaatatgcacaacanaattagcataaattgcattaatcaaactgagagagaatcanttatttaaaagtgtgcatgagttaatatggacatataagtataattcatataaacattat

SEQ ID NO: 46251 - DNA, 465 bp, Glycine max
tctgagtcacctgaggcatgcaagctggccacccagcttgccacccagctcgcccaggcgagctatgttgcttcctccagaaggtaccgccttttggagaacttcctggaaggcccaagtgggcctggttgctattttcaccccctttttactaaatacacccctgccttttttctgattctttttccgtaacgttacggaactttacgaattacgtaatgatacttgttttctttccgtaatgtcacgaaaccttacggattacgtaatcatcccttctttggcttccagaatgttacaaaacttcacggattacgcaacaatccttccttttgacttccggcatgttatgaaacgtcacggattgcgcaacaatgcttccttttgacttccggcatgtcacgaaacttcacggattggctaaagatgggtgccaagtacctcgaagtggcaaacgagggcaca

SEQ ID NO: 46252 - DNA, 446 bp, Glycine max
  unsure (1)..(446): unsure at all n locations
aattgaaacatcggctaagcgcacgggttcactaagcgagcctcgttgagaaaccaaacgtctctctggctcgcttagcgcagcagtccgctaagcgaaagtatcgaaaaattgcttaagtgagtgtaacagcagttatactcacacttgccagattttggaaacttcgtctctgcattctctctctccaaaaatntgcacattntgcatctgtgctttctttttccattatcaacttcgaagcaacaaccatacaccatccaagcaagttccttgattccttttctatgttttcttgtccaaactttaggatagaagacttcacttgtagttntagatntttagggattntatatttagttagaattaatttaagattaggactatatacgcttgaatactgtattgagtatgatgcacacattgcatgtctgatatgcctttta

SEQ ID NO: 46253 - DNA, 472 bp, Glycine max
  unsure (1)..(472): unsure at all n locations
agtcacctgcggcaccaagctatatatattgcatgtttcattctatgtttcaagttctctgtaaaaactcctcanaagctgtggatcatgtttcactcacaactttacttgtttcatttctaaacttccaatacctttcccaattttttaactttattgcatgtgtaagctttaaaacattccctcttgtttcttaccatttcttgaatactttccttccaccaccaagattccttatctcagtccaaaacttcttgattcactgaagactactttaccaaccattctatccttcttacaaacctcatctcanatgaggttaacgctaccttgtgatgctcaattaccttcctccaataattncttctttaaagacaagtgtttttcacccttgaagctgcatcacttgattctagaatttgaacctgccgaagtatttgtgtactactcttaaaacaaatatcaaggatca

SEQ ID NO: 46254 - DNA, 509 bp, Glycine max
  unsure (1)..(509): unsure at all n locations
tctngaataagatatgccaatgttgtaccacagtcaactatattccctcctcggttgttagatatagaaaatacagctggattaattgggagaagttgtccattgacagcaatactctgaagattcaagttgtaatgaggcctgatcaacaagtcaaatacataaagaattgcaaattatttgacagaaaaaaaaagaagcataacaagcattttaagaacatgattatttatctaatacaaaagcttacctccccaaactatcagatcatactatatatatatatatagatagatagatagatagataggttctaatttatattaatgacttagattaattcactaaacatacatcacgtgacagatctcattctttccctgtatgcggaaaacacaacagcttggtcatttgagtgttcctcttcccattttctctganatgtgtgtgcctccctcttcttaaatggcttgttgcgctctggctctggtgtcatgcgctgcatgctc

SEQ ID NO: 46255 - DNA, 475 bp, Glycine max
  unsure (1)..(475): unsure at all n locations
agcttcatattcagatacaagagtatggtttcttgttcttttatatcctgcagngccttcatgaatgactttaagcattttccatatctcatttgcacttttacaccttgcaatacgaaaataatcatcagaagataaaccataagttaaaatatttttagctttttgatcatcttgcacttttcttttctcatcatctttcatctcatcccattctttaggaactaattcaccattaacttctttagttggtatgcaagttcctttaacaatagcattccatgtgtcgggattaatctattgaataaagatttttattctcttttcctaaacctanaatattctccctcaaacaatggtggttgattgagagagtcaccctctatgatatggatttgtctagagcccatatataataatagtgatcttgagtaacattcaagacaatgctctgataccaattgaaaaagacaat

SEQ ID NO: 46256 - DNA, 508 bp, Glycine max
  unsure (1)..(508): unsure at all n locations
ctcagcttcagcaccagcgaattgtttctntaagtatggtatatagattgccttgngcttactttcaaccttcctatgtatgttgaactcactagcattgtttaccacagttttaggagttcaatattcacttaggatcaacatttcagccagcaattcaatcaccaaaactcaaattcacaatagacacaatcataaggaaacctaaaagttcaagaaaaagttcacaatcaaagactctctaagaattttgcatgaacatgttaaggactaattaacatgaaagatttgactcaaatcaaataataggctaaaagaatttcatacactcatgaacaaatgagttagacaaagaaacaagaaaataaaatttaacacaacataagaaatcttatgtgacaagtttcatgactagacatgacttctatgacaaaactacaataggtgaacaagtcactctagaattttgaggttntcttctactntaatatntttgtaagaaatttat

SEQ ID NO: 46257 - DNA, 495 bp, Glycine max
  unsure (1)..(495): unsure at all n locations
agtcacctgcggcatgcagctataactgacatgtcaatgcctcccanattctcactatgttattgttccaagtgccaactcaacattacatctgcattgggaagaagaatgatcatgtgcgagtaactaacattttttttaagagtgaatgaacaatttacttcataaatttgtatgtttttagttttatcgactagtgaaatataattataaattaacctataatactntacttttaaactaaattatatatacatttactatgacttaataaacaaattttatatttacattaataatattaatactattattaataataataatatatcattaaaatatatgatatgaataagtntgagtggttacagtatgtatattagatactccacatcaacatgaatcttaatagtctcaacattaatgcanataatattntctagtaatattattgatatttgatatatactttacaaanatatactaataatatta

SEQ ID NO: 46258 - DNA, 497 bp, Glycine max
  unsure (1)..(497): unsure at all n locations
tgtgccatagtaggccagatattgcttatggtgtgggtctggtaaatagatatatgaatgatccgaggacttctcatatggctacagcaaagagaattttgagatatgtgaagggcacacttgattatggtttgttattctccaaagcaaatcataatcaaggaataaggttaattggcttttctgatgcagattggagtggtgatgtagaggacaacaaaagcaccactggatatgtcttcaaattacttgatccacaatctgttggagttctaagaagcaagaagatgttggactttcaacttgtgagtcagagtacatggctgctgcctcagcagcttgtcaatcagcctggttggagtccctctttgcagaatngaagattcagcttgattcagttgttcaacttaacatggacaacaagtctgctatatgtcttgccaacaacccaattccacatggaagaacaaagcatattgtgacaaagtaccactatc

SEQ ID NO: 46259 - DNA, 364 bp, Glycine max
agcttagaaggtagtcataccttacataatatatgtatgtgtgtttatgtagcgaaaacaccttatatatgcatgtgtgtagcaaaaatatctcacaaaacatatatatgtatgtttaggtagcaagataccttggacacgcatgtatatagcaaaatacctcatggaaaaaagagagagcttaaacagagtgtgcaggaaaagaatactaagacaaattataattgaaaataagagaaaataaaaaataaaagttggctagctaaacaacaacatgcttgtgaaaaagagaatttccaacttttctttgaaagatattactgatcttaaccagtgtctgaaaaaaaaaatgtgtatccacctg

SEQ ID NO: 46260 - DNA, 437 bp, Glycine max
  unsure (1)..(437): unsure at all n locations
tcttgagaatacttccatgagaagctagagcttagctacacacacccctctcataactaagctcatctccttgagaagcttccttaagaagattcctaaagaagctagagcttagctacacacacatctataatagctaagctcacctccttgagatgagaagctagagcttagctacacaccccctataatagctaagctcacccccatgacaaaatgcatganaatacaaaaaattccctactacaaagactactcaaaatacctcgaaatacaaggcataaaccctatactactagaatggccaaaatacaaggcccaaacgaaggagaaacctattctaatatttataaagataagcgggctcatacttagcccatgggctcgaaatctaccctaaggctcatgagaacccgagggccttcgctgggatctct

SEQ ID NO: 46261 - DNA, 478 bp, Glycine max
  unsure (1)..(478): unsure at all n locations
agcttgttcttgactcatcttctccttgaagtgtcgtctccaatcatctttcctccttctccattccgcttccattgatcttcaagaagcaaaggactccattgatgaaaaagatccaaggcctacaagctccacatggagctacatcaattaggatcttcatcaagctttctccttctaaatttatttggcctactacgaccctttttgtattttggtggttgaatctcatcaaatctataactggccacatattcataccattaattgatgtcaccttacgtccataacaaacaccatatgtatcccttgaatattaattattcacataatcgacaaccttaanaaaatttaattgtattgcaaccactacatgtgtgcaaggtatgccaaccaatctccanaagttacatgaacaactcnntgttgttataccaataataaattnttcaatagaataaatatatgacttcaaaat

SEQ ID NO: 46262 - DNA, 550 bp, Glycine max
  unsure (1)..(550): unsure at all n locations
cttacactcctcatttatgatgaatgagtcnttnncagagtgtgactgacacgaccggaataaactggagcaattggtcgcctctattcatttctcatcgcgcggatgactctacgagctcgacagacaactcacacgtatcgggctacgctctaagacaaacatctctaacccaaaagataaaagaaantgatgcataagattgattctaatngtacatactctcaactatcttaacttggaaacttctacttgatctggacacagctatagagacccatctagaaactggagctgtcgcttccatctgcaaatagacctcaccccccttataccgaccacgcacaacattcagaattcttctctatgagatctcggaccggaattgacgactcaactacttgcataagaagattaggatgtctatcgtcctcagtctcctgtagacttaaatgagcaaatgactatcaacggtagaatctgtattctgacgattcaccacattgagtctttcaaccatgccccgaattcaagcgctgcacactcaccg

SEQ ID NO: 46263 - DNA, 458 bp, Glycine max
  unsure (1)..(458): unsure at all n locations
agcttggttcgaggtacttacccgttgaagatctaagaacgatgaagaacgaatgaagaacgtcgaagaacggttcaaacctttgcgagattcctcacggaaaacgttacggaaacgtttcggaagcgcctcggcttagattttcttcacggaaacaatttttccaagcaaattcgaaagagagagaagtgccaaaggggctggaccctttttcttcttgctttcctcccctatttatagcaaaataggggaggtggttgccgcccagctcgcccaggcgagctcagctcgcccaggcgagcagggttgcttcctccagaagcaaccgccttctggaggaatcttctggagggcccaagtgggcctgggtgctatttgcacccncatttttactaagtacacccccctctgctggtttttggtattctttttcgtaaagtacggaacttacaatttcg

SEQ ID NO: 46264 - DNA, 498 bp, Glycine max
  unsure (1)..(498): unsure at all n locations
tgtggttgttgtggagctcttattgaagaacctacataagaattgttagaatgtcctaganaaaagtgttagtgggaccagaatatgcattattattttgtggtctccagccataaggctaatttgaacatgagccacctctgtagccttgatagtttccttggaagttctattgaggtcttgcttgattctatatataatgggcctcctcttcctattgacaatgctgaatagtggccattctgatggtgaccaccacagaagtcacatcttagaactcgttgaacttgatgagcttggtggtgtttttgtgatccaccttattcatattgttgagggagttaacctatctgcttggttaaggcctctatctgttgagtcaagagtttgttttgagccaaaattgcatttagagtatcaactccattataccatntctttgaatcggagctctatcatggtgactctgataatcactagtttccatggagtaaatga

SEQ ID NO: 46265 - DNA, 446 bp, Glycine max
  unsure (1)..(446): unsure at all n locations
agctngcatgccgctctctctaatttattctttaatacagatagcaagtacaaaacaaacccatgctatactaccatatgtttaatgaaatgttacgaaagaaaagaataattttaccagcaatgctccttctgtggatgaaagaaatagcaagtacaactcctaaagctgcagcaacagagcttcatcaacaacaacacaaataataatcactaagaacaaaggggtagttgccaataggctcactcacctctgatataatgcaaatcaaagggcctgagcctagtctcggggtatctgaagcttcaaacaatcaaactacaactttcctaaatagatcanatgtaggtggcaaccaactaagggaagtaaaagctcagttaagggaagtatcactaagggaaataacagaatggcagcacaaccaaacttacatgtcatggagt

SEQ ID NO: 46266 - DNA, 491 bp, Glycine max
  unsure (1)..(491): unsure at all n locations
gcttctcaggaagttntctcaagaaagcttctcaaggaagctacctagtctataaatagaagcatgtgtaacacttgtggtaactttgatgaatgagagtcttgtgagacacaacacaaagttcaacttctctccctttttcttccttcaatttcgtgctcccccctctctctttctctccctctttcttttcctccattgaagcatcctctccaagcttcttatccaaggctcatcttggtggtgaagctccttcttccaaggcttattccctagtggatggcgcctcctctctcctcttctcctttgtcttccgctgcatctccatggtggaaaatcaccattaaaggacctcattgaagctcanagatccagcctccatagaagccccacaagcaagcttccatcaagtgtgtttcatatntcaataaccaatggtggatatatggcacaacanatcgnatatcaagttcaataccatttttagcact

SEQ ID NO: 46267 - DNA, 374 bp, Glycine max
  unsure (1)..(374): unsure at all n locations
agcacctgaggatgcagctctacctcatatctccatagtcttatatgctgtagccaatccaanccacgcgcccggactctcagccacttatgatagacgctgatgctaccattactgcttaccctaagctctctgtcctttcttcacaccgcatcacatgcctagtgaactccttagagaaccctcgcattggggtcactgaaaccccgcgcgatgaaaggccggatgctttcgtctgatggcactcctctcatggagtagccaagctgtcttatggcgaggacgggattataattaattcaaccccttgtcccatcaagggaacattnggacgtccttcgcatgatggtagaatcctgattcttccttccttc

SEQ ID NO: 46268 - DNA, 529 bp, Glycine max
  unsure (1)..(529): unsure at all n locations
tacggacactatgaatactaagcttctgggatcagcacctctcaagttgcataactntgactgcatcagtacatgtgaaagataaaacattcaacataactatggagttcgatgattaaaagctaattttctggcaataatagtatgattcagagcacaatagcattcaaaaaaataaattgttacatacacatgcacaagttgtatgtgtttgtcaagctaacaagtaataaactaggcaagtcaaaatttatgtagaaacacactgggatttctacataagaaacaactagttatgcttacagaagcatatgaaacagataatgtaaaattcaactcanacacactcaagtttattaaagggaaaacatgctaatattacaaagaatntagactcgtgcagtcatgtntaaaataaagcttgaaatgctggaggataaaaatgcaaaacaaatagcaaggttagtgggaaacttatgccgctctttcatctntgggaacanattatatacaaagcaacaaacctgca

SEQ ID NO: 46269 - DNA, 329 bp, Glycine max
  unsure (1)..(329): unsure at all n locations
tctatgcacccgtagtggtccacattgtgtttcgtgccattttattctntgtttgtttactttntataccccctgttgacgtgcttaagccattttacttaagtcgtttctcgcttaacttaaaaataaaataaatttccaccgaacgtttgaattgtattatccattaacttcggttaaaatcaattccgaccgttcggtcatgccgtaaccacgttggaaatcaaaaaagaggtaaaaataatataaaacaatcaaaaaacatcttttagtaaaataaagcgganaatcaatcggacgttntctctttgggatttctcattcttaat

SEQ ID NO: 46270 - DNA, 423 bp, Glycine max
  unsure (1)..(423): unsure at all n locations
tgagacgaggaagtgttgaagggtgaaacttcctgcttttattgttgaccacagagtggtacctggagatatgtcgcggnggtcaagagaccttgtggatgtcacgtggggtgctattgcccaaaaccaagcttgaccaatcccgacctaacccgggcatagtcggtcagtgagaacctgtgatgtacctaaacaggcgagctcctggcagtcaacagataaaaggaacaaagaccacaaagcaaggaggcttgtggtggctggccagctgtgaaactcgattgatatgtgagatatggtctctggtaatcgattaccaagggtgggtaatcgattacaacgcttaaaaatgaagacaggaggctgagatggtctctggtaatcgattaccacggtgcgtaatcgattaccangcttgaaaac

SEQ ID NO: 46271 - DNA, 407 bp, Glycine max
agcttcttatctaaggctcatcttggtggtgaagctccttcttccatagcttattccctagtggatggcacctcctctcacctcttctcctttgtcttccgctgcatctccatggtggaaaatcaccattaaaggaccccattgaagctcaaagatccagcctccatagaagccccacaagcaagcttccatcactatcacaccagatccaaatctataacgatgggtgaccaagaggagacacaggaacagatgaaagccgacatgtcggctttgaaagagcaaatggcttctatgatggaggccatgctaggaatgaggcaactcatggagagaaacgtggccaccgttgccactgttagttcggctactgaagcagacccaactctcctagctatcgtgcacca

SEQ ID NO: 46272 - DNA, 492 bp, Glycine max
  unsure (1)..(492): unsure at all n locations
tcatgatgatgaatcaagtngattctagtagttttgatgatgacaaagatgatgacaaaatgccaaagagaatgatntcaagattcagtaacaagttcaagatcaagataaatttcaagtttcatgaaaagaaatcaagaagattcaagaatcaagagaagtttgatttcaagtttcaagagaagattaattcaagattcaagagaagaaatcaagaagacttcacaagggaagtatcgaaaagatttttcaaaaaacaaacatagcacagttttgtttttcaaaacagtttttctcaatattttctaagttaccagagtttttgctctctagtaatcgattaccagtggcaaagttggatttacaaagctcttaactgaatttgcaacacttcaattgttttttaaatggtgtaatcgactacaatatattggtaatcgattaccagtgtatctgaatattgaaattcacattcaattgtgaagagtcaca

SEQ ID NO: 46273 - DNA, 438 bp, Glycine max
  unsure (1)..(438): unsure at all n locations
agcttccttgagaagctagagcttagctacactctcctctctaataactaagctcacctccttgagaagattccttgagaaacttacttgagaagcttccttgagaagattcctagagaagctagagcttagctacacacaccagctaagttcacctccttgagatgagaagctagagcttagctacacacacccccatgccanaatacatganaatacaaaaaaaaatccctactataaagactactcaaaatgccctgaaatacaaggctaaaaaccctatactactagaatggccaaaatacaaggcccaaaagaaggaaaaacctattctaatatttacaaaaaaaagtgaacccaaccttggcccataggctcagaaatctatcctgaggttcatgagaaccctagggccttctttagtagctctagctcaat

SEQ ID NO: 46274 - DNA, 491 bp, Glycine max
  unsure (1)..(491): unsure at all n locations
ngaagaaagtttgtcttttacatgtcaaactctcttgagtgacatttgtattgattattgtattgtttgttgcatcttagtctctgtcttttcatatgtgcatcatgcatcatcatgtangagtaagaagaaaggttctaaagttagaaaatttcttctacgtttaaaactctgttttaattgattacaggctgatcctaatcgaatacataagtgtttgtagcttgtagagaagtttctcgtatcggtttaatcgattacaagtttatcgtaattgattacatagttcagatgtgacaatgattgctttttcaagagtctctgctttaaatcaattaccaagtgatacaatcgattacttttcttttagaagtatttcanaagtgatcaagaacactntaatcgcttacatcaagaatctaatngattacattgntcttgaaagatntctagttcttggaaaaatactttaatcgatggaaatgataata

SEQ ID NO: 46275 - DNA, 329 bp, Glycine max
  unsure (1)..(329): unsure at all n locations
agctcgtgccacccacatagcatagngttttcattgttgatcaacctaggctgtggttgcaaatttgagaatctctccaataacaaaatatgaaccaagtagtaaaagggtgaccnangagtttcctcttatcatctgccaaactaactattgttttcttcaacagacctaaactcatttgtatgttggcttaaaatattgtgtcgcacagctcgattatctacatcaaggaaaacattcttgctcatcaagccattgtgagagaaatcaatctctactaaccaagttgcaagggaatgttcatgctccatttcattcccactatcgac

SEQ ID NO: 46276 - DNA, 474 bp, Glycine max
  unsure (1)..(474): unsure at all n locations
tataataatattgattatatatataatcaaattgtagctcttacaataaaattatttaataagtagttattaaataacgtagtcataattaaagcagtttatttggtattgtctaaatgttaagacaccaaatatcaactttcacatgttcctgtttggtattatatatttatctatttatttattatgttattgatatggagtatngattaattgtgctgctaattaattttgattgaaaaatttaactgattattttaatgtgttttttttctttcacttatgtttgcttatcctcaaaatttaaattaaatgttttattaaagataattaaatatatacgcctactggtcacatgctacttcacttataaaatacatgatacatattagtctttcataaatagagatatggaatgtctctgtttttacatctgtaggatagtgtgtttaaatctgatagtgcgtctaaata

SEQ ID NO: 46277 - DNA, 438 bp, Glycine max
  unsure (1)..(438): unsure at all n locations
cttcaaccacttgtgtaatcaattaggattagcctatagtcgattaaaatagagagttttaacttcagaagaaattttctaccgttagaaattttcttcttactcctacatgatgatgcacgatgcatatatgaaaagataaagactaagatgcaacacacaatacaacaatcaatagaaatgccacacaagagagttggacatgtaaaaataaaaaattcttcaagctcttcttcaagctttcaaggctaagtcttcatgttctccccctatctttcacacttcctaggttatttgagtgaagatgaatatgtttgcattcctactttnttttttctattaaaaaccaatttaaatntacttattgcaccacanatcacactctgcaccccactttttgtgtagtccagatntacttacagcactctaatactggta

SEQ ID NO: 46278 - DNA, 494 bp, Glycine max
cggttcatatcattattagattacatattattctcttatttatgattagatactaaatagtgatttagtccttattactctttattaaattgagggcgagccctggtgcagcggtaaagttgtgccttggtgacttgttggtcatgggttcgaatccggaaacagcctctttgcatatatgcaagggtaaggctgcgtacaacatccctcccccataccttcgcatagcgaagagcctctgggcaatggggtacagaagttttattttttactctttatataattgatcctctataatcaatattaatcctatttgttcattataaataaagacttagtgtggtcatccaacacacacacaacactacagtaaaatacttgtatatattaacatctttgagagaaatatcatatcatgtacacttaacaataacagcaatataatgagttgcctgatatacatatcggaatagtctttattttcgctatgtcac

SEQ ID NO: 46279 - DNA, 509 bp, Glycine max
  unsure (1)..(509): unsure at all n locations
tgcacctgatgcnagtaagttggctttctttgaaagttctatactcttatatttccttgatgttgatgttcccatcctgtacattcgtgccatgacttaggattaagattaagctccatcaaaaaaaatttttgttagtcaatgtgtacaattgataactattgttattataaaataagaagtgcaccaagacgaagagaagaaaattacaaagagtctgaaggatcatggatcctctttgttaaaacgaaaacgaacaactaagaataaaagaagaataacatcaatgaagcacagttgctgccctgatgtgtgtgtgttatgtgagtgcaaactcagaattatagtctatcatctgttcttacatcgcttaaatgctatttctatctgaattcattgcttgccatctttggtgaatgtagtgtgcaccctaagtntatagatcatctttatatgattatcttacattggttttagtgacgtacagacataacattttatatgctaca

SEQ ID NO: 46280 - DNA, 436 bp, Glycine max
  unsure (1)..(436): unsure at all n locations
agctataatatatcgaanatgaacaacggaagctctcgtatattcaaatggtcataactnttcacactgaggtccgattcaggtttataatgtatcgatacactcgaaattaaacatcggaaactctctagaaattcaaatggccataacttttcacacggatttccgattcgggcgcataatatgtcgagaggctcgatattgacaacggaagctcttgagaaatcaaatggcataactntcacacggatgtccgattcgggcaaatcacatctcgagacgctcaaaactgaacaacggaagctctcgagaaattcaaacggtcataacttttcacacggatgtccgattcaggcttataatatatcgatacgctcgaaattgaacatcggaaactctcgagaaattcaattggtcataacttttcacacggatg

SEQ ID NO: 46281 - DNA, 152 bp, Glycine max
tatgaccatatcaatcgctggagagtttccgacgtctaattatgagcgtagccatatatgatacccctggagaggacctccgagcgaaaagatatgaccatagcaatcgctggagagcttccggcgttcaattacgagcgtctctatatatg

SEQ ID NO: 46282 - DNA, 472 bp, Glycine max
  unsure (1)..(472): unsure at all n locations
gtcacctgcggcatgcaagctaaggagtactttganactatctttgaaaggataaatgctatgagagcaccacatcatatggatgatatttgatctttacctatccttctaggatcccctcaacctaggatagttagcctcatagctcataagcatatagtctaggcttgactntttttctatgtttgttctatatttntgcttataaacttttagttagtatatctntctaatttctgtcatgtgtgtcttgattttaattgttttatttctccatcataaacactcactctggctttgtgatgccaaaagggggagaaagtttgatgcctttgatggttgattacaattaagtaatttgtaccaattaacttgaattgaaaagatgctactaacgtgtttgtgaaacatgttgtagaacatgtactatgagaagaaacatcaatacgcataatatagatttggcattatc

SEQ ID NO: 46283 - DNA, 471 bp, Glycine max
  unsure (1)..(471): unsure at all n locations
cgttattaatatagttaataaaaataataactaacatgagctacgcctctgttttactaaaggtatactctgatataattaattnttccattgtttctagtctaggaattaggatataaacatggttttaaaaaaagtttgtggtcatcaatgtgtgtagttacactctaagtttgtaaggagaggatatatatttgattttaaaagaatatattatggtgaagataattggagatccaactgaggaaccaaagaatnttaattactgtgttaacgatggtgcaaaacatatatggtgattacaatttaaaaccatttgaattaaaagataattaaccatgtatgaaacgtaaaataaattaagagaaatattaatttaatttttgtgtgaatatgttagctagagttggaatttcaatcgtgttgaagtgggttctgcatgattggaacgatgaactctctgtgaagata

SEQ ID NO: 46284 - DNA, 459 bp, Glycine max
  unsure (1)..(459): unsure at all n locations
atcctctgagtcacctgctgcatgcaagcttgtaacgttgtctagttntctttattttgtttattaagacaccagatctagtttggtcatcacgttgtctaatcttctttacgttgcaaatttcactgcttgcacaatttggactatttcttgggtggtttgtcaagttgacctcttataatattgtgtcccacaggccaatcaatctgcatctangcgtgatggtggtagtgatgtatgctttgggagatttcctaacacattatagaaaaaaaagaaaaagtttataacatttattgttgctcctaattaaattattttgcttacttgtactgactagtgactcctctccatttcttattcttttgttcttttggtcaattcaacttgtccttttttttaatagtgattattcatgataacactcgaaggtcaccacattgattattcgtgataaca

SEQ ID NO: 46285 - DNA, 428 bp, Glycine max
  unsure (1)..(428): unsure at all n locations
ggatacaaatctacatgctatcattcttatnntcttttgttaacagtcttgtgtgttctattaaagatatcaaaagctcaaaaacgatttgaacatcttgaaagaaaagatcaagtgcttcgatttcatattcgtttgtaagacaataaagttttaatcagtgagaaaatcaaacagcaaatcttttgatttatatagagccaacaacgacttggtagaataaagaatattgggtttgctaaatcttggtcataagctgtgttgtaagagctagtagtgattgtatgaatacttgtaacttattgaagttagtggaacatggttgttaatcaagaactggacgtagcctcacgtggaagagatgaagcaatataaatctctatgccgtatattgtctctctttattcttcgttctatactgacatatg

SEQ ID NO: 46286 - DNA, 474 bp, Glycine max
  unsure (1)..(474): unsure at all n locations
agcttgcagccattagaagagaaagatcatgtgtttattagtataactganaatgttagtcaatttatcagattagttgtgaaggaatgcattaaccgtatcccggtgagagtgtgatccttaaattttgagagaaacgactatcatttagtactgatttttgcatgaatctctgaagtatggactgaatggatgaaatngacgatgatgaangccatgtttgattgtgatagccacttanccaaaaagctgaccacgtgcttgaatgatttatcccttgcacctagttttgagctgaatgattgatttattgattgaaccttgagcctatacagttttatctcctgctaccttgtcttaggttgtangagagcatcatccacagaanagcttggtttaagacaaatttgtcccaaatttggaggagacactgngtaagaaataaaatggtcaaaacagagcatcatatacaca

SEQ ID NO: 46287 - DNA, 491 bp, Glycine max
  unsure (1)..(491): unsure at all n locations
tctcacgcccttgacatttattggaggaggaagtttctcaatatcatcaatcttagccttgtccccctcaatccccctcactaaaattttatgtcccaacactatgccttcttagaccataaagtgacatttttcccaattaagcaccagattagactcttcacatctctgtaatactctttctaaattccatagacaacaatcaaaagatgagccaaaaacaaagaaatcatccatgaaaacttcgatacatttctccaccatatcagagaaaattgccatcatgcacctctgaaatgtagttgaagcattacaaagatcaaaaggcatacacctataagcgaacacaccaaacgggcaagtgaaagttgtcttctcctgatccttaggatccactatgacctgattataatcagagtatccatccagaanacagtaaaatgctnggccctgcagtctttcaagcatctggtccatgaagggaagtggat

SEQ ID NO: 46288 - DNA, 458 bp, Glycine max
  unsure (1)..(458): unsure at all n locations
gatccttaagcacctgngctgcagcttgactcttacaattagaattgaattcttacgttcaaatntacttgtaatcgattactaatatagtgtaatcgattacactatttgaaaatcattntggaacgttgcanaccatttgaaaantatttgaaaaccaaactggtcattggtaatcgattactgataattggtaatcgattgccagagagtaatcactcttgtgtcttagaaaattttaaaaaattcctttgaaaacaaaactgtgctatttgatttttgaaaaanaatattttaatacttatcctatatgaagtcttgacttattgcttcttgatttcttctcttgaatcttggattggattcttgatgcttgatcttgaagtcttgaatgaaatcattgggcnntttggcatcatcaaaattgtttggtttatcatcttgaagcttgttctaca

SEQ ID NO: 46289 - DNA, 452 bp, Glycine max
  unsure (1)..(452): unsure at all n locations
ntagannaccctaattgaggaagaagaagcaagtgaagaagttaatatntgacaactttntaaagtttgtatcaaagtccagtctacgtgtcacaatctgggataatttgccacgttggatagtctatgtggcattaaaattgccaataatgcacctcactaacggcgttactttcaaatttaatggcaatgactgttttgcaaaacttatgcaaagatagggactatttttaacatttcaaaaagatagggactgcaaaaagggtcaaaaatcagggaccaaaatgtctatttataaaattatttctagtgtgtgacgttaccttttgtttggattagaaaatttaaaattctagggaatttaaaatgtttagaatttaacttgctttgattttaaattcattttatttttacatgctntgtttggataaatcaattcaaatntcttcaat

SEQ ID NO: 46290 - DNA, 439 bp, Glycine max
  unsure (1)..(439): unsure at all n locations
agctntacaacagaatttagtaatgacccactatcctataattaanataacttaatgccattaacctagggaattaaaaaaaacttaatggctgagtgtaactgaaattgtggcaaccaaaagtcacccccaacagccaacaagtcagccaccatttggtctcccaaaaggctgatgcctaggttgccaattgtgatgagaatcatgatactcgccatatacaggctaaaggcccaagtggagaaggacgaatgcctaagtggagaaggacaaagccctcgagtggagaatgatgaaggcccaagtggagaatgatgaacgcctaagtggagaatgatgaacgcccacaggcagagacactatcaagacaattaattgttgttaaggcccatctaatttgaaggccaagcaaatatgtttttagttataattttattta

SEQ ID NO: 46291 - DNA, 389 bp, Glycine max
tggtcataactgttcgcacggaggtcttattcatgcgcataatatatcgagacgcaagatattgaacaacggaagctctcgagaaattcaaatgctcataacttttaacacggaagtccgattcaggcgtataatatatcgagactcacgaaattgaacaacggatgctctcgagaaattcaaatgggtataacctttcactccgatgtcagattcatgtgcataatatatcgagactgctcaaaatttaacaatggaagctatcgagcacatctaatggtcataacttttcacttggaggtccgattctggcgcataatatatctaaacgcacaataattaactacggaagctatcgagaaattcaaatggtcataacgtttcacttg

SEQ ID NO: 46292 - DNA, 493 bp, Glycine max
  unsure (1)..(493): unsure at all n locations
accctgcataagtaagggtgaaagatggnggttaacatgataaaaaatatatttagtaacttaagatgaaattatttttgtatatgtaatgcttcttttatcctcaacccaaaaccatgttcataaaatcaaacaactaatcatgattcanggaaataaaaacggatcaagatgcatagacaagttataacatatttgcaccagaaggccacaaggctacactgccttgcagacacatcccttagaccataattntttcagagattaggagacttgcccttgttacagtacacagaattcaacaaaggttaaagaaaatcacaaaataataaattagtcccatgcttggtggcttatcaatccacgagcaaaacacattntttatatttcanacactnttaccaattagttggttgccataccatcaacaagaagcatgtcccccacatccacatcattgacgaaatcgtcatagttcacactaacacaatct

SEQ ID NO: 46293 - DNA, 479 bp, Glycine max
  unsure (1)..(479): unsure at all n locations
ctcgacccggatccttaagtcacctgcggcatgcaagcnttataagtgaaatcaggtgcagtcttcttcctaagagtcctctcacgaggtggaggttgagccatgttctcagtatgaaaattactagtcgaatgctcaaaatcagaatattgagaatgctcaaaatgcacagaatgatcaggatgcacactatgcctaactaatctatgaaaggttctatctatttcaggatcaaagggttgtaaatcacctggattgcccctagtcatgcactatatgcagcanatcatgtatctctcaacaagcacctaacaagggggtaaaactatagctatactcaaatgatatccaaatgagctgaaattntgtgagcaacaccctacaatcatgagaatatagcacanaagatttcaaacaaaaattcgaagtctaactatgataactacctaagcaaagtttagaaaaataggacaataata

SEQ ID NO: 46294 - DNA, 433 bp, Glycine max
  unsure (1)..(433): unsure at all n locations
ntagcatggcctccgtgatagaaagccattgatcttttaaggccgataggtcggccttcatctgttcttgcactccctcttcattatccattnttctggatcgagtgttataggggcgcctttgcgctttcttagttatggtgagttccctaaagaaacaaacaatggtgagtatgccaccaaaacatgaatatgctaatgaatgatcagagcacttggatccacctcaaggcccttttttagacaacgtgatgagttgcagaacttctcgttttataaaaaggaacaaagcttttatctagccaagatcatacaaaagtgttacaacagaacctaacggtttctaattatatgggccatcaaatctatcatgtgttgacagtaattgattagcccgtgaatttcctcggnggctgtacacacttcagcgata

SEQ ID NO: 46295 - DNA, 345 bp, Glycine max
  unsure (1)..(345): unsure at all n locations
agctnttcgattcattctatgtacccatggtggtccacattgtgtttcgtgtatttttattctcatttcatttactttntataccccctgttgacgtgcttaagccattttacttaagtcatttctcgcttaacttaaaaataaaataaatttccaccgaacatttgaattgtgtatataaactctttgttgcttttagtgcgttttaaaatgtatgcatgaggtaaatatttattcatttgatgcacacaaacaccaacactattttcacacactgtgagtgaaaaagggccctatacccgggttcatgggaacataaggagtggaggtgaatctgtgatcatg

SEQ ID NO: 46296 - DNA, 490 bp, Glycine max
  unsure (1)..(490): unsure at all n locations
ntccattctctnggaagttcatcattgggattgacttcttctggaggatcttcattgtttcctttatcatttcctttggaatcttgttcatgaatattcatatgttctaaagaatctgcaatatcatctagcatattctttcttgacaagatagcattagattcatcaaaggtaacatgaatggattcctcgatattcatagttcttttattatatatcctatatgctntgctntgtaatgaatatccaagaaaaataccttcatcagattttgcatcgaattttcctagattatctttaccattattaagcacaaagcatttgcaaccaaaaacatgtagatgagaaatatttggttgtctaccattatataactcatatggngttttctttaaaatgggtcttattaaggccctattcatgatgtaacatgcagtatgtcgcttcagcccanaaatactntggaagagaagtatcatttaataaagtt

SEQ ID NO: 46297 - DNA, 136 bp, Glycine max
agcttaaagatggaatacttacttgttggtgactaatattatcacaaaacggaatcaaaaagtgcgaaaaatgatgaccctagggctgcaaactcgtaaatcccgtgggtattgcttttgaatggggggggggggg

SEQ ID NO: 46298 - DNA, 448 bp, Glycine max
  unsure (1)..(448): unsure at all n locations
aagttcatcaagtcaagttgaagcatggaagtaatcatcttgcaaaattgaggcaaaagatggatcgggttacatcggtgcttcgtctactgctaaacacatttaggactgttaatgtccttgttacttccagtttcaccttgacgaagatgtcatggaccatgttgaaaatctaaattgattcaaccccatatcttgcgtaaatattcgcaatacttcaactgtgcatcattcgcatacatccatgttgttcattgcattctttccttgaaaaagaacttaatcattgttataaaaaagaaaagaacacgctntacggcgcccttaccgaacccgtgatagaactagagtaatgggtgaagtggaggaggtgcaagagcagatgaaggccaacatggatgtcgtgaaagagcatatggccacaatgatggatgccatgatgagcatg

SEQ ID NO: 46299 - DNA, 230 bp, Glycine max
  unsure (1)..(230): unsure at all n locations
tacgtacacgtgcgcttagagatgatcaaagtaccgtgatctccattatatcactaaaacttacactcgcctgtactgagttaagactatactacagctcatctctatgttaacaagacctatatggatggtgaattacttagagagagccttgnggagacattattccgatctataggtcagtgatactgaacagtctatttacacatcaaatgaatatataactgtat

SEQ ID NO: 46300 - DNA, 329 bp, Glycine max
actcagcttagtccttaatactcgtgtgtgcaaggctttgatgctccgtggtcgactcaatgagtgcctcaggagctgctagcatatccttatctgcaactatgtaaacagaaccactcttgtttccacaagccacatatagattgcctgatgatgccatacaagctccatctatctatgcggtgtgatgttcctcatcatgcaactgccctatagatagtaaatttctgtttaatgcatgaatatgtctgacgttgagcaacgttcatagggatccaatctaggtctagctgtagctatcacctgcaacaactatgtcaagagaccct

SEQ ID NO: 46301 - DNA, 432 bp, Glycine max
  unsure (1)..(432): unsure at all n locations
ttggaggtatgattgttcttaatctccatggattcaacctagcagggttggaatntcattaataacccacatactacaatttctaaaattctcaaagctaaatatttttcaaatatttgatacttggatgccaaactaaggcataaaccaagatatgcatggcactagtattctgcttcacatatattggtcgaggatggtattttgtggggaattgatggcagctccatcaatatttggagccaaccttgggtgctagcataaacaagcccatatatcacttcatctaccccgctcggccttgaggatcttaaagtcagtccattcatcaaccaccaacaacaatgttggcattaagatgtggacaacaaatttcaatgacaatgacaaagaaatgttgcttcctccctctgtnaacagtgaagtcaatga

SEQ ID NO: 46302 - DNA, 488 bp, Glycine max
  unsure (1)..(488): unsure at all n locations
agctaagtttattcttcttggtgatgcacctttcgatccccaccaaattcaattcaacatcctctgaatcacatcctttagagttgctggaataaagtagatactcatggtgtatgaaggcatttgctcttctccaagtcactatttttcttaaaaaacagaccttttccaggatttctctttaaatacctaaaaatttggtagaatgcctcaatgtgtttttcataaggagagtgcataaactgatgtacaacactcactgaaaaaacaatgtgttcgggtataagacaagtaaatcaatttgccaactaacctttggtatcttccaacatcaataggaaccacttccttttcccacaatttcccattgggatcgatggnggtatctgctggtctacaaccgctcattccagtttcttccaagaggtctagaatatccttctgtanggaaacaacaattcctctttttgagcanacaaactccattc

SEQ ID NO: 46303 - DNA, 302 bp, Glycine max
ccaatctgatggctcactcgagcgaaccgctaaggcgcggcagactcctggggctaagcagagagagaacaatcctagaagatgaagatgtacagggatcggtaagtgcaccacttcatgtctctaagcggaccgattgagttcatctgctaggcgagaaatgcgcgctaacccggatagcactgatgtgcgctaagcggtgcatacgcgcgctgagcgcacgagcatgaacaaggacacctatctaagcctgaaatgagagattgtgaatagagtttggattgggattcatagcttcatat

SEQ ID NO: 46304 - DNA, 419 bp, Glycine max
  unsure (1)..(419): unsure at all n locations
ggatccttaagtcacctgcggctgcagcttcgaaatagtgtgaggtcatgcccttttgcagagcttgaaagagcctgcgtagtcgaagagaagttcaagtccatagccatcaaagtctgaaaagagtatgatgaactaagggatgtcaatatggccaccgatgaagccttggaatgagaaaccaagaaggcccgaaaggaagaacacgaccaaagcannagtttgaggggctttatagggcagcaatagtgagctcaagctccgaagaggtgaaagatatcatcacaggtcataggcatgatcttgaaggacgagctaaaggtttgccttacgtcgaaaagaaatttgtcccaacagttaagcgagactgaagggaatatgtgggccatcatcaataagtgcaaagagaagctaaatct

SEQ ID NO: 46305 - DNA, 492 bp, Glycine max
  unsure (1)..(492): unsure at all n locations
nttcctttgngttctctgctagagtttccaagtgttagagagtagaagaaggaattgaagccttaatttcactgtgtccctgcaaggggcatttatctctctttactggcattatttcgcaaatcccaacagtgggaatgtgtaaaaataagttttaaagggggtgtccaaatttcaggacgatccaatggttaataagtccaggattgtagttttactgggataggtttgggtgtatgtgggaaaaagagagggttttgggagaggaagaatggaggacgaatttgggagaaagagagagcgtagaaacatatcgtaaatgtaaaagctaacttaatatgtctctatttatagttagggtactctaagcctattatttactctatttttctttattntattaatttataaaaatgaactctatntttctatttcattaaataaataaccaattaaaaacccctttattgtctanaacatcactgtactcta

SEQ ID NO: 46306 - DNA, 409 bp, Glycine max
  unsure (1)..(409): unsure at all n locations
tgccttggacagttgtattgaagctnttaagattgatgaggagcttgtggaagctcttgttcaggttcactataatattgaaaatcattgtgcatttgtgcttgttttgacttttagctatattttttaggcaatagtctgctagcaatntgtctcttctttttttgattgctttgttgagtgcaatgtgacaaatacaaaattgattaaaatatactgtagtataggttgcacttactacttatcttatcttggtgttatttgttgtagagtggagaagctaaactcttaacacaagattgcgagggagctatggaggatctgagatcagctgctcaaacatcgccttatggtttgtatataagttgtactcatatagcatgcactctagatcactaatatattagaa

SEQ ID NO: 46307 - DNA, 490 bp, Glycine max
  unsure (1)..(490): unsure at all n locations
tgtagataacactgcggctgcagcattcaatgctgaccttntcaacctccgtcacccttgttgcccaaattcctttgatctctaagtacatcagccaatacacgttccatttccaaattccatgtaaaataacttcttgtttcctcattattttttcctaaaacttttcttttgtccgtcattttttcattagacgactccattgaagttaatgtcacttattcaacctgcacataacaaatagtagatatgacctactttattcatttgactagttcagtgcacaatcatagaanatatttcaagcaaagtttttatgcaatagcaaagtacataaaagtctatcttcaatagaaaagtacaatagtaacaaagcacacaaagtttgtcagcaatagcaaattacatttaanaagaactatccttaagcaaagtttctcctaacttgatagttagcaaacatattcatagctaatgtatctcgaaatct

SEQ ID NO: 46308 - DNA, 504 bp, Glycine max
  unsure (1)..(504): unsure at all n locations
acccgtgatccttagagtcacctgctgctgcatcttataccnatcatgtcacaatcttgtttctagtacccctcgatttagcggatttcaatgtttgagaagagaaaatgaaaatggggtaatttcggagcacactctcatctcaaacaagtatataacattaacttatactcgctcaaactggatttacgaccaatactctacctgatcaatatttgacttcctaacacctcaatttaccctagaaatggctcttgccttcacttatggcactcattttactcctttgcacagcccaagcttttccacagtcctatatgacattctatactacgattaactcactttaacctccaattaccactaaatccagatgtatctattgatactcttaaagcatcacactgtaccactcatatcactacatcctcactttttaaccctatgatactctaccctcatctctatagtttccatcgcaaattcagcacacaacatatcata

SEQ ID NO: 46309 - DNA, 490 bp, Glycine max
  unsure (1)..(490): unsure at all n locations
gtgcctctggttgctctgctatggtgttcacgcgttatagattttgagaacagactatagcctcaatttcactgtctctgtgtgaggggcgtttatctccctacaaacattattccttaaatcccaatggtgggaatatgtgaaaatgagtcttgaacccgacgtccaaatttgaaaatgatccagcagctaattactctgctattatacttttattggaatagaattggatgtatgtgtgaaacagagaggattttgtgagaggggaagggagaacgaatttgggaggaagagatagcgcttacacgtattgtaaatggtgaaattgacctattatgtcccggatcctattatatactctatctctactatttattgttctatgaaaatgaatnatattttactcccttcgcacgaataaattaacattattttatttttaaagccatgttcattctttacctaaaacataatttactaaaaaactatt

SEQ ID NO: 46310 - DNA, 432 bp, Glycine max
  unsure (1)..(432): unsure at all n locations
agctntgagaagcatgtgatcctttggcatcatctatacactcagcttgatcctttgtctataatctccccctctttgatgatgaaaatccctgaaatcaagacaagctatatacaagatgatagcacgttcacacagcccttactccccctatcttttggcatgcatgcctaactttaatgattttaattgatttctaacccatgttctaggttctctccccctttggcaacatcaaaaaagaattaagcaaaacaatcaatatctaaacagagccaaacataaaaccaaaattaaatccatacattgtcataaccaaccaaaggaaagtcgagaaatataatagaagtgcatgattacgataactatagcaacanatagccaaatacacggcgataaaacatagtactaataatacttagtcataataat

SEQ ID NO: 46311 - DNA, 518 bp, Glycine max
  unsure (1)..(518): unsure at all n locations
acactatgaaactaagcttgtatccanggaagggattcaagcttaatgctgatgggcattccttgattatgctgaggaagaacatgaccactctagctcagacatggagtgttctttccttttctaacctcattcctacctcccacacatttgatgtcaccttggacagagccaagttgatttatggtattattataaagatggatatgaatttggggtacctcatctcccaccagatctctttgattgcacagcatgatacatccagacttggattccctgccttgatcacaactctatgcaaggccagaggagtctaatcagattctagatccctggagaacttgagccttgacattaacttggcatatattaaaaagaaatgttggaatcttgatgatccaacagtgacatntatagggccaaggaaggccagtggtaagagataagatgtccncactactncagcaccacctgagacaccagctccttcttctccacagctncagtaccttcct

SEQ ID NO: 46312 - DNA, 499 bp, Glycine max
  unsure (1)..(499): unsure at all n locations
gatccttaagtcacctgaggcatgcaagcttggactcaaggagaaacttagaatggctctagattatagtaacaaaactataaaaaaaaagactcataaaacctctagctatggcccttgtttttcacactaattttcaatttaaatttaggaactagattgatataaaataggaaccaattatagaataaattttgagccataacaacaagcacacttccctttcactttttttttcttgatactgatgtttctgccaaattgtgtgacttttagtattttttcctattatccaaataactcgggtctttttgtataacttttttccagatgtctagaaaattcagtaaaactttcagctcanaattcgaagtaaccaattctcggtaatttttacaagtttatatgtccaagctgccagcaccagcgattttttttaagcatggtatattgattgccttgcgttactttcaaccttcctatgtatgttgaactcact

SEQ ID NO: 46313 - DNA, 397 bp, Glycine max
  unsure (1)..(397): unsure at all n locations
nntgatttccttgttccggagacctttcatttctcatgtgcacccaaacccaatctacgggttcgaagacaaccttctttctccctttgttggcttgtttagcatagcttttatttttcctctcaatttgatctttgactctctcatgaagcttcttcacatagtccgcctttgcttgaccttctttatgcttaaaaacagaaacattatgcataggcaaaagatcaagaggagttagtgggttaaaaccataaacaacttcaaaaggagaacaattagtggtgctatgaacaactntattgtaagcaaattcaacatggggtaaacaagcttcccaagttttaagttcttcctcaaaactgtcctaagcaaagttcccaaagtcctattaacaact

SEQ ID NO: 46314 - DNA, 470 bp, Glycine max
  unsure (1)..(470): unsure at all n locations
agctntacacctaatntatatcctgaacatttgctatcacaaactacttacatacatttgaagtacaccatacaaatttttgctgtttcactcctattcatttatacgcatattggaaagctaattacatcctgtagatatttgcattcaaaaagggcattccacactatcatacattcatttaagaaaacaattattcatacgttgctaggaatttcatgctccttatatttacctatgtatacacactattgcaaggtgttttccacgctacctctatgtaaagtatcaaacatggggcagcccanattcgagcaaaaactctcacaagcaaatcctaattttcatgttnttctaattctaaaaccaaattttggattcctagccataagcatgtntccttgcattgaagctacaagtttgggttcctaagcttggaattgcatatggcacctatttgaatctctatg

SEQ ID NO: 46315 - DNA, 490 bp, Glycine max
  unsure (1)..(490): unsure at all n locations
tcttatccaaggctcatcttggtggtgaagctccttcttccatggcttattccctagtggatgacgcctcctctcacctcttctcctttgtcttctgctgcatctccatggtggaaaatcaccattaaaggacctcattaaagctcaaagatccagtctccatagaagctccacaagcaagcttccatcataacctttatgagtaataactttatgtctgatcttgtttntaaaacccctgttatgtatgaaagtgctaacataagtaagaaaggagtctcaaatgttctaatttttttatagaaaaatcggtaaagacaaagatggttttgaaaaggctgcatgtaagtaatgtggaaaggactataaaattggcaaaagccctataacccacaataactatgggacttcacatttaagtcaacatgtntatgcttgtaaaattattgccaacacanatgtggatctgaatcaatcaaaagattcactg

SEQ ID NO: 46316 - DNA, 376 bp, Glycine max
  unsure (1)..(376): unsure at all n locations
agcttaatgaaatccattagtctataagaacttatgtttcanaaccatagatattttaagggtttgacatcatccaatgtatttggttctaacaaaatggattgagtagaggtatcatactcttcagcgcttgatgatcaaaagcaacatgtggtttgagagtgtgctacaaagatatcatttaagcccttagatattcatgtgtaatgcatggtccatgagatagggttctttctgcttatggtttctctttataaattttaattatagaccatgaaacaccaacaataggaacttagataacccatgcaacaatttgtagtttgaattcaacctccaacggctagcttcagaactctatataatgataaaattc

SEQ ID NO: 46317 - DNA, 361 bp, Glycine max
  unsure (1)..(361): unsure at all n locations
cgaaggatntcanaattcagctcgacaaataananattaggttttattgtaagtcaattattaaatttggctaataaagaaaatcaaagaagaaaactaaaatacctgaatatcctcccaaatcaaatccttctgagcagcagggacttccttccaggtctcgtatgtgacgtcgaccttatcacgagcgacaacccccaaatatgttcttaatttcttcttgtggggatcgtcggccttgtcggttgtaggatcgacgttgaccactagtctctctgccccaggtggtctagaggccaaggatcgtagtcgtgtctcttagtgtgtccgcttctaggtggatggngacactgatgctatt

SEQ ID NO: 46318 - DNA, 442 bp, Glycine max
  unsure (1)..(442): unsure at all n locations
agcttgtcctcagatccctcttgttggactagacttattccaaacaacatatttaaaaccaaaacttaatccacagatccctcatttaagactaagttccaatcttgcttcattcaagttctatggcaacagtacatttctcaatgctaaagtcacctaactatgcacataaatggttgatcagaccaagagcatacaaaatgtaagcactgaaagaagcattgaacacaagaaacacaatcaattagatattaaagtaattacatcagttgttctttagaaatccacaacaagggtgtttagccagccattacagaaaaaccctaacaataatgagattaagagtagagaataattgctccttacacaagagaagggatccctcctcctctnttcagcatttcagaatcactctgcgactctctaatctctctctaattac

SEQ ID NO: 46319 - DNA, 497 bp, Glycine max
  unsure (1)..(497): unsure at all n locations
tgccgtgccatcaccatttcggcctaaacccattccgggctcatacccatccctcaagataacgcgggccactatcaaggaggcaccagatagacgcggttgcaccggaggagcctccaataagcattattcacaatttctagtgcttcaaaagatgtttccattgactcttctgcttccacatagggtgaagaggatggacaactcactagtatatcttcttcccttgacactataaccagttgtccttccaccacaaactttaatttctggtgcaacgttgatgggaccaccccaacagaatggatccaaggccaacctaccaggaaactctatgcggngtttatgtccattacctggaaggttatctggcacgtgtgtggcccaatttgaatcgggagatcgatctctcctctcacatcatgccggctaccgtcaaaagcccttacaacaatgagttcgttggccactatgtggtccatgcttntaacggacac

SEQ ID NO: 46320 - DNA, 418 bp, Glycine max
  unsure (1)..(418): unsure at all n locations
agctttannaaatgctagttntgcttataaactttcatatttatttatcaattcccaaagtaggttgagagtgaaagattggtgaatcacactataggagtttattgttagtcgtcttatacgactaacttttgtatagaaaacattttccaaaacttgtatagttccctaatttatggttattttgtaataattttgtaaataaatcttgttttattgttaaaattgtctctagaatatttccattgaatttaatgataaaatttgtgtaatttcaggttgaaaagaggctaagtcatgaagtgctaaaagtgacaattgagctcagctcatcagttgggctaagcgtgcattcattgctaagcgtagcttcagcgcgcttagcgcgacagaagaatntggtagaacatcaatatca

SEQ ID NO: 46321 - DNA, 502 bp, Glycine max
  unsure (1)..(502): unsure at all n locations
tgtaatcgattacacaaatactgtaatcgattaccagagcagattntcttataatattctcatcagtcacatctttttatttggttcttgaatggccatcaaaggattatatatatgtgacttgagacacgaatttgctaagagtttttcagaacaaaaaggtcttatcctcttaaaaagcaaaattgtttcatcctcttaaaaattccttggccaaaacacttgtgattcaataaggaattatttgagtgctcaaattgttcaatctatctctttcaagagagattacttcttctttattcagaanaaagaattaagagaccgagggtctcttgttgtaaagaaatctaaacacaaaggaaggattgtccttgtgtggttcagatcttgtaataggctnttacaagatagtggaactctcaagcgggttgcttgtggactggacgtangcacaagggtgtgactgaaccagtataaatctgagtntgcattctctcttccc

SEQ ID NO: 46322 - DNA, 391 bp, Glycine max
  unsure (1)..(391): unsure at all n locations
gtctgattgagtcctgtaatatatcgacacgctcganattgaatgttgaagctctgagcaaattcaaacgacaataaatttttattcggatgtctgatattgtcccgtaatataacgagacgctcgaagttgaatgctgaagctctgagcaaatacaaacgacaataacattttactcggatgtcggattgagtcccgtaatatatcgacacgctcgaaattgaatgttgaagctctgagcanattcaaacgacaataactttttactcggatgtctgattgagtcccgtaacatatcgagacgctcgaagatgaatgttgaagctctcagcacaatcaaacgacaataactatntactcggatgtctgattgagtcccgtcatatatcga

SEQ ID NO: 46323 - DNA, 454 bp, Glycine max
  unsure (1)..(454): unsure at all n locations
cttggagtttccaagtgccaattcgtcttcttctttagtccagtcttcttctggcttctatccatcagtgggctttccttctgtgtccagcatcttgggatgttcccagcctttgatgacagctttccaggttctgctatccagtgatttgaggaaggccaccatccttgctttccagtattcatagttggttccatccagaattggtggtctgttcactggtcctccttctttctccatgttcatcagaatntatctccctaggtctcactcagtgatttcgagtgcctgctctgataccaattgaaattctgataccaatgccagatgtcgtacaggatgtcacgacatcacgcttcagaacatgcagattatctctgagtgtatgaacagattaaacaagtaaataacacaagagaattgtaacccagttcggtgcaacctcacctacatc

SEQ ID NO: 46324 - DNA, 504 bp, Glycine max
  unsure (1)..(504): unsure at all n locations
agtcacctgcggcatgcaagcttgcagtatttgtggtggtacctgtctgttgccttttatttctcttactttngnttctattgattcttttatttagtctaactttaagtttagttagtgatcttacttttgtttttattggttcttttaatttagtccaactttcacttttcacattgcagttttcgtcctttcacatctaaattttgaaattctagttaatattaattaagcctctgtgatcgacagaaaagagaatcactaatcattgtacatggtttgagaccatgagtttataaactaattttgaggaaattttttcatcattgtacatgttttgtgaccatgagttcaaccctactctttacgttaactacatgaccacatgagcgaactcgtaaattattattatttattttattatcatcatgcactacatgaanaaagagaattaacgggaagtttatntttaacgttgtattgttgaataataatatacatatc

SEQ ID NO: 46325 - DNA, 407 bp, Glycine max
ctaaccatgccaatgttgttatgtaaaaatcatgaggaggcgttgaaggagtttctggcaaggcttaagtggttgtggctagtggtggtctatattatctcaagtgacgacacttgtagagaatctgatgctaaagttagttgtgagctagggaaaagaggaaattataaaaatgttagttgcacatactagcgtaataaatccccttttttgaggattgtggaggggaaagattctaccatggtgttaccagtaagcaataacttcatttttgacttggttggagagcttcccaatcttgtatggatatgaacactgacaccgacacagacatggacacaatgaacacggatcatggacacctgaatgccaaatataaacgatacggggtgacactgaccggcacg

SEQ ID NO: 46326 - DNA, 344 bp, Glycine max
  unsure (1)..(344): unsure at all n locations
ttgaagaanataatgacataaatcacctatgacaagtcagcttcggtccccttcatcagtttcttctcatgggaatcactgctcatagaagaccagtgtaataatacctcttgccgtgcaagcttaagttcagcctccaaaggagcacgaatggcctctatatgaagcatgtcatcgtccttctgagcagcatggacccttcgaagagtggcttcagctgcaaactgagctgccatcgatgcttttntttcatcattgattntctttatttcaagattctgcaagagatacccagtttattaaacacaccacgtaacctataaaatttacctctcactaagctt

SEQ ID NO: 46327 - DNA, 473 bp, Glycine max
  unsure (1)..(473): unsure at all n locations
tgtangttaatgtggttagctaacagcttctggtgcataaagttatttcattntctcctactagatatgaagtgatcttttactgtcagtccttcaatgcatttcttgtaataaattgtttagatgggaaagctttgtttcacaatttaaattatcagagcttcctataggtttcttgattagtttgatgactgctgtttcttttgtaatattaacgctatatgcttttggctgtgcttctttcatactttctcganagcagtattttcataatgtggctgtatcactccttcagctatgttttgatcattctgagggaaatatattctgtgatgtangtgatttttccagctctagatatacgtgtgaagaatgtagcacagacatattctctcgagcacaacggtgaaagcaacctntctgatcatctatctgagcctttaaattcttccatcaataatgtngaaagtttc

SEQ ID NO: 46328 - DNA, 320 bp, Glycine max
  unsure (1)..(320): unsure at all n locations
tgtgccttacgatctctatagtttcttggagctataagagtatatccagtgctcattntataaacaactcatttactccaaaaaaatntacaataaatctattctttgataattatattctgatttgataatgtgtgtaaaataaatctatactacacgaanataaaaatantcttattttaatgatatacatttatgaagcaattcanattcatatcanaatgagactaaacaaaataaaattaaatacaatcatatatatatatatatatatatatatatataatctgtatttaattatataaataattatcatcaat

SEQ ID NO: 46329 - DNA, 494 bp, Glycine max
  unsure (1)..(494): unsure at all n locations
tgtactctgtcagaagatcaatttctataagggttaaaaagttatccttaaatatgacgaagatgaagcctntgtgcactttgttaaagcttgtctagggcgtctggttaaacacgaagatgaatcacttgataggaaaatgtcaaaatctgaagaaagcagaatctgagggggagctaagcctatatgttcgaaggaagcacaatctaaggggtagcttctatggtgacttatgtcctatctatctattatgtaatccacaataaatctccttgatgtgaaattttttacatgaataaaagagaaatgatttttgttacctgttcaaactntgtcttgaagtcttatgatgctttaagttttcttttttgtcttatactctcttgcatctgataagactactaatatgtttntcaatgaaatactttaagttagtattcatcttctacatttctaattgtttgacatcatanaaaagggagagattgttgagt

SEQ ID NO: 46330 - DNA, 445 bp, Glycine max
  unsure (1)..(445): unsure at all n locations
gggataagtgaagtagatattggttcatccccttaggcacttctctctctctcgaaattgctgagaaaaattagttccgtgaagaaaatccaagccaaggcacattcgtaacgtttccgtgagtaattacgcgaagattctcgaccgtttttcaagattcatcgttcgttcttcgttntcttcagtcttcaacgggtaagtacctcanaccaagcttttcaattcattctatgtacccgtggtggtccacattatgtttcatgtacttttattctcgttntcatttactttntatacccccttttgacgtgcttaagccatttatttaagtcatttctcgcttaatataaaaataaaataaatttccaccgatcgtttgaatcgtatcatccgttaatctcgggtaaaatgaattctgaccgttcggtcgtgccgtaaccacgtt

SEQ ID NO: 46331 - DNA, 367 bp, Glycine max
atgttcttaagcaaaagctatctattgccctcatacttgcgttgccaaactttcaaaaatcttttgaaattgagtgtgatgcttcaaatgttgggattggggctgtgttgatgcaagaaggtcatccaatttcttattttagtgaaaagttaagtggtcctacccttaactattcaacttatgataaggagttgtatgtcttagtacaggctttgaaaacatggcaacactacctttatcccaaggaaattgtcattcatagtgaccatgagtccctcaaacatatcaaggggcaaggcaagcttaacaaaaggcatgcgaagtgggtggaattcctagagcaattcccttatgttatcaaacataa

SEQ ID NO: 46332 - DNA, 456 bp, Glycine max
  unsure (1)..(456): unsure at all n locations
tcattgcctaacaagccaacttacaacagcaagcctcaagagactcagcataaggatgcacagaccaaagttgcgtatgtaaaaaaattgtatgaccaagtgaaggtgcaaattgcaaagaagaatgaaagctatgccaagcaagcccaaaagaaaaggaaggaagtggtacttgaacccggtgatgatcttggacatttgaggacaaatgttttccaagaaggagggaatgatgagaatcatgaaacaggccaaatacagtctataggcccaagtggagaatgacgaaggcccaagtggagaaggacaaagcccccgagtggagaatgatgaaggcccaagtggagaaggatgaatgcccataggcagagacactatcaagactattaattgatgctgaaggccaagattaattngaaggcccataataaatatgttctatttagttattaattt

SEQ ID NO: 46333 - DNA, 287 bp, Glycine max
  unsure (1)..(287): unsure at all n locations
aagggagagaagttgaactntgagttgtgtctcacaagactctcattcatcanagttcccacaagtgttacacatgcttctatttatagactaggtagcttccttgagaagctntcttgagaaaacttccttgagaagcttctttgagaaaacttccttgagaagctagagcttagctacacacacccctctcataactaagctcacctccttgagaagcttctttaagaagattcctaaagaagctagagcttagctacacatacctctctaatagctaagctcac

SEQ ID NO: 46334 - DNA, 495 bp, Glycine max
  unsure (1)..(495): unsure at all n locations
tgtgcctcttcacattnggaatatgaatgcaacatatagatccatagacccataggtgctntgctgatggcttcttcccgttccaagcttcaattggagtcttgtcttttacagacttagttagacatctgttgagtatgtaaacagcagtgtagactacttcagcctagaatgtgttaggtagtcccttctccttgagcatcaatctagccatttccgtaactgtgcgattctttctctcagacacttcattntgttgagaagaatatgcggcagtaagttgtcgctcaatgccttcatcctcaaaaaatctttcaaactcgcgagaggtgtactctntgtcgcgatcacttcttagtacttttatccgttgtccacttcgatttcagcaagggccttgaacttcttgaatactccagagacttctgattattcttttagaaaatatacccatgtcattctagagaattcatcaatgaagagtatgaagtacct

SEQ ID NO: 46335 - DNA, 336 bp, Glycine max
ctgaaggggaagagagagaaaaagagagtgaggactgtctgtctggatgaatggacagagggaacagtggtggtgggctttagttaactattatcttttctcgaggagaagagggaataacgccttgcatgattgatggaataatcgcagcctccatatgaaaacatattgcatgacaaccaatgttggtttggtgctaaatatgacactttgtctctcttctaacttctaatatcgctcctcccacaaaaagttggctctcctcaccaccgtgttaatgagtctaaatcatggttatctgttgcctgacacattccgataaataagatatcaaca

SEQ ID NO: 46336 - DNA, 390 bp, Glycine max
cgttcacatcataaggagcttcgttgaaagattgattgtcctgctacaattattatccaacacaatgtgaagccaatgaatggaacttaaaacagacagtcggtaactctctatcaagatcatcataattcagatccttgttgaagattttgaagaacaaagggttgatataattggcatacaccaaaacagaagttgcattgcaatatcgaagacatatctttttatttagcagcatcataccatatgatgtgattcgggcagagcatactctcatattaattggtactagactgctaatactaatcaaatcaaataaggaagtgtaatgaaatctatacagacatggaagacccctacctgatattagagaagagaggaatgactgaa

SEQ ID NO: 46337 - DNA, 466 bp, Glycine max
  unsure (1)..(466): unsure at all n locations
agcttacacaggcaagtgttttatcttatttcttaatcacagatatgtcataaattgattgtgcaagtcatttaccatcaaatcaaggataatgtgcataatcatcatggatcaataggactttttaaggtcggacttgtaggaaattttggctctggtcccccccttntttttggtgtgagtaggagagcacgcataaagatttggttagtaacttaaatgggcgatcactccctatcccttcatgtcttgaccaagttactattgtttcccttcctttttactctntacaacaaccctatacatggttcagacattgtttgttccaaagaacttgttcttcttttctagtttcctcttgctctnttccattcttgatagattattctctcttttctttttcctttcttaaccttttttatgaacatataacttccttcaaaaatccatgactaaccaaaagatg

SEQ ID NO: 46338 - DNA, 475 bp, Glycine max
  unsure (1)..(475): unsure at all n locations
tctacttatgtggcagggcgggcttccttcactttcttgtctccaacgcgagctntgaccaccgctctttctttccgcgatgctcctctntatatccgcctgagtgggtttatagcctaaaccatacttcccacgatttcctttggcatttatcaagctagttatgccgccgttgtctttgcctaaacccattccgggttcgtaaccatttcccaacataactcgggccatcattattgctgcatcgggcaggcaaggctgcccagagaaggagtccacagaggaaatgctgaccacctcaaaagactggaaagcggtttctaacgattcttctgcggcttccacataaggcatagaggatgggcagctcaccaagatgtcttcctcgcctgacacaatgaccaagtgcccttccaccacgaacttcaacttttggtggagtgttgagggaacaactcccactgagtggatccac

SEQ ID NO: 46339 - DNA, 426 bp, Glycine max
  unsure (1)..(426): unsure at all n locations
tgcatgtgaattaggaagcatcaacaagaatcaagccaaggctattgtgcaagcaatcaatggggcaaaacacaccaaatgattatgatggtggatggctcaaattctcacaaaggtaaactcatcactttcaaattgagctttcaaaactatcatgacatgtagaggagaatcaaggatttcaagtcacaaaatgtcaagaacttttattttcaaaacaattacccatttcttgaacatatcctataattcaaagaanaacatgcaaagtcgtacatgcacacaaaattgacccanaatattaaactaaaaatccgacaaaactaacaacattaacaaattaacacaactaacatattaacaaaaccaacaaaactagcanaaccaaagaacactcccnccccccccccatacttaaaaacacat

SEQ ID NO: 46340 - DNA, 472 bp, Glycine max
  unsure (1)..(472): unsure at all n locations
ntagccaaaccgcttagcgacaccttatccttggctaagcgcgactcagtgtcgccaagcgcaattccttacggccataactaaggtccatgaagctaagcgccagtcatggcagctaagctgaattccttgcggcaatgtgagcgctaagagaggccttatcagctaagcgcatgctcctctgtacttaagatgcatcattttagctaagccagccatangcctgcttagcgagagttacaacttttcggatctgcaaacctcgctaagtggtttgatcctgtcgctaagccaagcctctgttaaaaaaaaaaaaactgattntgaatttgaaacgtcggctaagcgcgcaggtccactaagcgagcctagttgagaaaccaaatgtctctctggctcacttagagcagcggtccactaagcgaaagtgtcnaaaactgctgaagtgagtgtaacagcagntacactcaca

SEQ ID NO: 46341 - DNA, 478 bp, Glycine max
  unsure (1)..(478): unsure at all n locations
agcttcccaacatccaatcaaaacaacattcatacagcacaagctatcacagccaagcaaaacagagcaaaggcagaaaactctgctcaacacatcaaccaaaatcacagcttttctctcttaaggaccacagtaacaattccttcgatccaattcgttaaccgttggatcgactccaaaattttactggaagtctatagtgcataagcctacattgtgaccgttgggatcgactagcaaacatccagaactcattctgtactactctttccacagccaaccacacacaagcattttctgcaccaagctaaaattctgctgcacctattntgacagcaaaattctgcataagtgcagatttcgaaaatcacacttcctctcatccaatcttgctcaaatcgaatcctacaagtcccaaatcatgtatcatacatgtctaaaccaaagccaaacttcaaaccacagtaacacanaatct

SEQ ID NO: 46342 - DNA, 497 bp, Glycine max
  unsure (1)..(497): unsure at all n locations
cttaagaaaacttccttgagaagctntcttaagaaaacttccttgagaagtttctttgagaaaacttccttgagaagctagagtttagctacacacacccatctaaaaactaagctcacctccttgagaagcttccttgagaagctagagcttagctacacacacccatctaaaaactaagctcacctccttgagaagctntcttgagaagctagagcttagctacacacccctataatagctaagctcacccccatgacaaaaaaacatgaaaatacaaaaaaaatcctactacaaagactactcaaaatgccctgaaatacaaggctaaaaccctatactactagaatggccaaaatacaaggcccaaaataagaaaacaacctattctactatntacaaagaagagtggacccaaccttggcccatgggctcaaaaatctaccctaaggttcatgagaaccctaaggccttctttatcaactctagcccaatcc

SEQ ID NO: 46343 - DNA, 407 bp, Glycine max
  unsure (1)..(407): unsure at all n locations
ggagttntcttagggattgagtcaatgcaactgttgtaacattggagagattatcttaatgcaactgtttatcttggtaaagatattgaatgaagttcactattgataataatgcagaatgcaccattctttgttacaaaactggctatcaagaacttaccctgcgtcatactgttcaggtgaggcctaaatctgtacttgatcaattgagtgtattaatgtttctgttaggtctcaaaaattatgtgaatgtaataactgccccccatctagaaaagtggatataggagctaacagatgcttggtggcagatgttatcctggatgaaataaaattcttgtggtactgaactaaactgacagtatataaaatanatgtgaataanatttatttggtatatcagtata

SEQ ID NO: 46344 - DNA, 507 bp, Glycine max
  unsure (1)..(507): unsure at all n locations
tctaagggagtgggtatcctatttactaataacagtttataacagttcatccaggctactattctatccactctntgcagtgtcttcatggaccaaagtggctgaaagctgaagttcttttttggttagtataggcttaatttttcagtgcaatctgtcttagtcttactgcttactctgattatcattattctatctaatttatcagcaacataaatactggcaaacatgaagaatgaatttctctgtatacctgtatggtgggcagttactgtatccaaaagtgtgttggtagtataactattggattgcagtcttattcgtcttggctcaacaacatccaccgagctcttagaccaaaatgcanaggtagatgaatcgaatntctgcataattcaattagaanatgttatattgagattgactacaaattaatttcaaaatttcacanaggaaaacaacaagcttacatcacatcttgttatgttctcaattggatatattctc

SEQ ID NO: 46345 - DNA, 443 bp, Glycine max
  unsure (1)..(443): unsure at all n locations
ctcttacctgagtcagtggtccctaccactttatttcattaaacaacaccctcaaatcctatcaaaattctggccttattgtgttatctgtgtaacattacttatgttgaaattactgtttaaagtaaattatttgatagtgtacaattttagggtaacctgttcaattctaagtctctatcangaattacaaataaagcaagtcatttatgaataatccttatccttactactctaaacatgacaactacacaagacaagtttcattgaccactacttttactagaaatcaaagccttgaattctggaggtacaaaagtcgaaaaatcaatgcttcatattaagttttttgttgtcaccaccaagggtagaataacatttactcatgattataattaaaataatgaataagtaacacccaanaatagtggagcacttacatg

SEQ ID NO: 46346 - DNA, 508 bp, Glycine max
  unsure (1)..(508): unsure at all n locations
tcagggttcatgactggggtcttntttgatgcaaagaccatgctatgagcaagttaatgctcaactatgtggagttcaggcttaaaattntntatttgagtaacatttggaaaagtaggggaaatcccattttgatcactgtatattcctcgtgttttctttcttggtccataagtactcttttatttttggcatttggtcatatctcatctagttattaacttactangaatgtcagtgacttgagaataatgtgtttggaaatgtcagtgactttnttccttctacaaggtgctggattgctgtttttaataatagttcacttttgatgttgctttatacccagcaatctggaacagaaacgaacgtgcttcctgaagctctgtgattactcgcagcatgaaatggccatagcccccagcttgtacgtggtangggtatgtattattgatgtttggtagacagagtagttatagacaaaatgatgatatgctngaagagacttcta

SEQ ID NO: 46347 - DNA, 464 bp, Glycine max
  unsure (1)..(464): unsure at all n locations
agcttccnctataagcttcttatccaagacactttcttggtggtgaagcctcttcttccatggcttattctctagtggatggcgcctcctctcacctcttctcctttatcttccgctgcaactctatggctggaaatcaccattgaaggacctcattgaagctcaaagattcaacctccatagaagtttctcaaccaagcttccatcatgcagtcatacttttggccatgaatagctagtctccttagtccaggattatgatgtagtcatacttttgtaccccttttctaattttaatgaaactctcgatgtttttcagtcatttaaatatttttttgttctttaatgttaatttggaattgatcactctgaatcttgatctattgcattacagtgaccatctggatgtaactgattgcttatgaaagactacttctacgaacttgcatgaatcaaaatggtat

SEQ ID NO: 46348 - DNA, 483 bp, Glycine max
  unsure (1)..(483): unsure at all n locations
gcttgtacctcatcactttcttccgaagctntaacctcattgtctctcacagtctttagatttgggagccaatccaatccttgtgtccgaactctcagccacttatgataaccgccgatgatcccattactgcttcccctaagctctctgtcctttcttcacaccgcatcccatgccttgcgaactccttggagtacccttgcgttgtggtcactgaaaccccgtgcgatgaaaggcgtgatgctttcatctgatggcactcctctcatggggtagccaagctgtcttatggtgaggacgggattatatgtgtgccatctctagatgatttgaaagttcagatnttggaggaagcacataaaagtcgtcttagtttccatccaggaatgactaagatgtaccaagatttgaagaagaagttttggtggcatggcatgaagaaagatgtagccgaatatgtagcaagatgttcgacatgtcaaa

SEQ ID NO: 46349 - DNA, 370 bp, Glycine max
tatacgaagatgatgtctcgagtacattggatttggtacgaccatgccctcctgatttccagttgggaaattggcgagtggaggaacgccccggcgtttacgcaacaagcataatgtagacctttacggttgtaaaagctctatagttgggcctaggctatatagtatttcttttgttaacgctatgtgtcttttgttttcgaatttatgatacaaggatctttcttcatctgttcctatgtctctacccattctcatccatttgcatgtgtacttctttatttctgaaacgacagatccgatgacgagtcccccgaacgtactaatacctgagagccgtctatcatcttcctacaagagatgaatcaca

SEQ ID NO: 46350 - DNA, 509 bp, Glycine max
  unsure (1)..(509): unsure at all n locations
cttgttcctcttgcataatcaagtccaagttcaagaaaaatacatcacttcatgcacttaatacccctctntcaactcctcttaatccgtacaaaaaaataacaataagagacttttctgtggatctatttctccgaaataacataatattgaaaggactagtaacatggatatagaaagaaaagaaaattgagttaaccacatagtccactntatgtctcctttgtagaaaagagaaataataattgatgatattaagtgaattgtttaaagagatagataaaataaaaatgtgattagcattaattaatataggtgttttgattgttgaggtatccaaaaatagttcaaggttntattggtttgcgaatagcacannaagtaattggaaatgccatactatcatccaatttaattcaatagatntgattngcctaaactntacaaacttggtagcatgttcaaaagttcttattcaaacactactntacacatgtgcagtacataag

SEQ ID NO: 46351 - DNA, 500 bp, Glycine max
  unsure (1)..(500): unsure at all n locations
ntaatgctntcatctcttccaccaatgtagagaacactcttgctgtatgtatgtntttatatcttggttttctttttaaaaatttatatatatatatatatatatatatatatatatatatatatatatatatatatatatatatatatatatatatctatgaaaaattttacaatccaaaggtttatcggcttgaacggtggaaaagctgaaccgctctataataaaaaaaatattaaaaaagtcaaagcaagatattggattcatatgtggtgtacatacacgcacacatttcaactgcacttcgctcttttaatgtcacttttctatgtgtcttttacccgcagattaagcacgagaatgagatagagctcgtaaatatatattattgtgttttcttaatacaacatcgaanagaccaactcacgttatcatgtctctatgtttgagataaacaattgtctatcgataatcataagtttatagcagagtgactcgcn

SEQ ID NO: 46352 - DNA, 358 bp, Glycine max
agcttaactcatctagacgcgtctgttatgatgtatcttcctgacagtggtcccttcacggcgtaagacgctttcgttaatgataatctccgcatgtgcacggttctattaattgccattgagcctaacttgagacatgctttatggacgaaggcgtagctcgtgtatgacttgcctaataacgtattgacagacataagttggcgttcgcttactgaattagaatatggttggattaaggggtgatctgtggaggacgaattctccattggacacgacaagatagtggctattgaatcagaggagacaacccctttttaatactatgaatatcttattctaggtcgcttgtgattta

SEQ ID NO: 46353 - DNA, 376 bp, Glycine max
gtgactcggatgtgcgatggagtcactggacacatcgagactctcacattcgcaaacagaggctctgagaaaattcccgcgacgatcactttctactcagctaacatgctcacacgtcacaactgaagctctgactttcatcacacgaccctcacttataactccgatgttcaactgagtcccgtaattctctatactcatatctcaaacagacgctctgatcattctcggcggcggtagatatctactcccatgcacgactgagtaccgcagcatatcgcgaccctctaccccgataacatatgcttcgtatcaattcgtaccacgatggatcgactactcacatctactgtagagtcctattacataactatac

SEQ ID NO: 46354 - DNA, 478 bp, Glycine max
  unsure (1)..(478): unsure at all n locations
agcttccttggggccatttcctgcgaggaccatctatttgngaagttagttttacaagataagcttttcttaacacaaaaatgacatgctaatccctccgatttagaatgaactcatgtacacttttaatgtaaaatatttatgcacatgcgtatgtgtagaatatcccactatttatgtcaacgtacaaggacatccaacacattccaactgccatacatatatatttntgaaaagaacacacattctcatgctctaggcactgcgtcaaaactcacacctaatcacatcctagatattntgctatcacaaactacctacacatatttgaaacatatatcatacaggctntcattgtttcactcacatttatttatatgcatattggagagctaattacgtcatgcacatacttgcattcaanagggaattccatgccatcatacattcattaaagaaagcgacctcatattcattt

SEQ ID NO: 46355 - DNA, 493 bp, Glycine max
  unsure (1)..(493): unsure at all n locations
ttgtgtacaagcaaactcaatgactgagattaatacaactgaaacataaatcaaactaaatactgataaactaaagtcttcataattngcaaaatttaaaaaaaaaaaacagaatttaaatgtcctgttcctcttgtggctgatcttcattcagttatagtactggagctgctaatgaatcctgaatggtgggctcaggctccaaaaactgttactgctggctaggtctcctcaagagctggtgcaagggatggctctggcatgggatctggagaagtttcctcctcctgaaccataggtatatctgcaacaaatgaaaaaggatcggcgagaggagtgagctcatcctctacaattggaactagctcctctgtgtgttccttaagctcatcatattcaggatcctgagctagggatgccccaccccctccaacaggaaaaggctatactcctggccaggccacctgagtctgaaactccttcatagtcatga

SEQ ID NO: 46356 - DNA, 447 bp, Glycine max
gcttgtcgataggcacagccgctttcaaagtgcttaatagaactgagcccatgctgtgggacgcgacatgtgaacgagccttcctggctttcaagaaaaccataactacaccaccgatcctgagtccgtctatgctatgagaacccatactcctatacctttcaataactaacaaagctgttaactctacccttctgcaagacgaatggaaagcataactccctatctatatcaccgaccgcatacttcatgaggccgagaagtgctaccaaatgatagaaaatatggaactagcactcattacctcggaccgacgactcaagccctacttctagagtcatcaagtggtagtcaaaatgaactaccccatcaagcatgctttgcgaaagcctgaactcataagaacgatagtggcctgcaatgaacaactttcagagttcaacatct

SEQ ID NO: 46357 - DNA, 449 bp, Glycine max
  unsure (1)..(449): unsure at all n locations
tatctcttatgtcttctctttttgactacgcaatactgtaatgggtgaggtatatgggcttacattgatcgaactcatcgaataaattgttcgccttatctatgctctttgctcatgagtatatgcttataggttaccgattagatcactaaagagcaaggtagattcatgtaatatttaattggatcactgcatcttaatagtttctcgaangtgcaccatttattcattatccattctataatantatttcacaactcatcattggattaaaaaaattacactgatgaatctttatacgagaaatgtacatccttattggtgctctttgttttttcatacaaaatctgactcgtaaaacttacattgcagtatattataagcttataatgttctatagtaattatacatatatctattttctagctattcatattctttctacatta

SEQ ID NO: 46358 - DNA, 432 bp, Glycine max
  unsure (1)..(432): unsure at all n locations
agctnggatttccttntattttgtaatctatccttcctaagatggagccaaacccagtcaccctcattaagaactagctcttttcttcctctattgcctttagttgaatacacctttgtttggttctctatttggttcttaaccctctcatgcaacttctttacaaattctgacctagattccccttctttatgtataaaagaaagtgtcccagtgcgagggggaatgaggtctaacggtgttaggggattgaacccatagacaacctcaaaaggggactgcttggtggttctatgaaccccccttttgtaggcaaattctacatgaggaagatactcatcccaagacttatggttgcctttcagaagagcccttataagggtggataaagacctattcactaccttctgttgccatcagtttgtggatgac

SEQ ID NO: 46359 - DNA, 416 bp, Glycine max
  unsure (1)..(416): unsure at all n locations
nttcgcanagcttacggtanaatctgtgacctagccatggcagaagtctccacagaggccattgcctccctcgcccagtattatgatcagccgttgagatgcttcacttttggggacttccagctatcacccatggtggaagaatttgaagagaccctatgatgtcctctatggggaaggagaccatacctcttctcagggttctatccctcattagctagaatttctgagatagtccaaatctcggcgtaggaattatgccacagaaagatagtcgaanatggggtggttggaataccgagaaaatgtttggaggcaaaagcaagaatcttggcaggtagaggcgaatgagccccgttcatagacattctcgcactgttgatcttcggaggattcctctttccanatgtggatgg

SEQ ID NO: 46360 - DNA, 443 bp, Glycine max
  unsure (1)..(443): unsure at all n locations
agctnggttcgaggtacttacccgttgattatctaagaacgatgaagaacgaatgaagaacgtcgaagaacggttgaaatctttgcgacattcctcacggaaaacgttacggaaacgtttcggaagcgcctcggcttagattttcttcacggaaacaatttttccaagcaaattcgaaagagagagaagtgcctaaggggctgaaccccttccttcttgccttcctcccctatttatagcaaaataggggaggtggttgccgcccagctcgcccaggcgagctcagctcgcccaggcgagcagggttgcttcctccagaagcaaccgccttctggaggaatcttctggagggcccaaatgggcctgggtgctatttgcacccncatttntacttaagtacaccccctctgctatntnttggtgattcttttttcgtanagtac

SEQ ID NO: 46361 - DNA, 439 bp, Glycine max
  unsure (1)..(439): unsure at all n locations
tgtaatcgattacacacatacagtaatcgattaccagagcacattttcaaaaaatattctcaacagtcacatctttttatgtggttcttgaatggctatcaaaggcctatatatatatgtgacttgagacacgaatttaagaagagtttttggagaacaaaaaggtcttatcctattaaaaagcaaatcgtgttatcctcttacaaattccttggccaaattacttgtgattcaataaggaattatttgagtgctcaaattgttcagtctatctctttcaagagagatttcttcttttcttcttcttcattctgaaaagggattaagagaccgagggtctcctgttgtgaaagaattctaaacacaaaggaagggttgtccttgtgtgtntagaacttgtaaaaggaatntacaagatagtggaactctcaagcgggtt

SEQ ID NO: 46362 - DNA, 447 bp, Glycine max
  unsure (1)..(447): unsure at all n locations
ctcgacccgnatccttaagtcacctgcggcatgcaagcttctgcatgtttagagagttctagatagatataggtccaagttccagagagtttgggagaatttgttgtgtgaagatctgcagagaccagagccatcctgagagattgagatgcgtttgtgagtgattgtgaggtcctagaggtggaggagacatccccactacttgtatttctgcaatctttcatctttatcttctgttatttgaaaggaagtttccctgttatggaaagctaaatcctctgttggatcttccttgtaggtacttgatgtaaatatctttttatatgtttaatgatgttttgtgtgttcattgtgctatcagaactgcattctacgatgcttntagcttgatcacgtagatgcatgtgtnttaaggatcattcaacagtgngaactggtctgattctt

SEQ ID NO: 46363 - DNA, 475 bp, Glycine max
  unsure (1)..(475): unsure at all n locations
tacttacccgttgaagactgaagaacgatgaagaacgaatgaagaacgtcgaagaacggtcgaaaaccttcgtgaaatcactcacggaaacgttacagaagcgcctcggcttggattttcttcacggaactaattttcctcagcaaattcgaaagagagagaagtgccaaaggggctgaacccttttctacttcacttctcagcctatttatagaaaattgggggagaagcttgccacccagctcgcccaggcgagcaaggttgcttcctccagaagcaacaaccttctggagggcccaagtgggcctggttgctatttgcacccctattttactaaatacacccnctggtccttttttntggtgattctntntttcgtaaagttacggaaacttacgaatttcgtaacgatacttgttttctttccgtaatggtacggaaccttgcggatacataatcatnccctttttgactt

SEQ ID NO: 46364 - DNA, 436 bp, Glycine max
  unsure (1)..(436): unsure at all n locations
agcttccatcaagtggtaatcagagcacaagagcttcatgtatgtgctccttaaacctccattaattntttgctttaccttctcttccattgttttttcttcatttttttctccatgtatctcctcaaatgtcttgtgctaaatgtttttaacatgattctttagagttttcaccgattaaacttgctataaaagctagattttattttctatggttcaaatttcttgttcttgttcttgaaccatgaattgtgttgagtttaggttcctttgagttttgtcttgttatttttgtggctgaaacctaaaccataaaattattacaaaaatattaaagtagaagaaaacctcaaaaatctagagtgacttgttcacctattgtagttttgtcatataagtcatgtctagtcatgaaacttgtcacataagaattctt

SEQ ID NO: 46365 - DNA, 435 bp, Glycine max
  unsure (1)..(435): unsure at all n locations
taggacacttaaatctcagctgtgtatctagttagtagttgcgctaagcgcgcctcgccgtgctaagcgctaatctttctctgttttaaaaatttgtggaattgcgcttagcgagcctactcgctaagcccattttgcagaaaaaaatattttttgtgttcacacgctaagcgcgtgtctatcgcgcttagcgcacgagtaaatttcataaggcgcgctaagtgcatctattgcgctaagcgcccagccttaatttcagttctattttctacttttcaatttgaataattcctgtctaatcttgtgatttgattnttntgttttgcatatggcttctcgtaaaaggaaggcaccaggttcagtgtcccaagcatgatatgacagatcaaaattcacaccacaagatgcttgngatagatatccagacaatattat

SEQ ID NO: 46366 - DNA, 491 bp, Glycine max
  unsure (1)..(491): unsure at all n locations
caagcttgaattcattctatgcatccttaggggttcattctttgcttgtatgttttcatcttcattcttctactttcggtattctttttcttcgttttaagcgagtttcaaccgatcgtttaagtcataacctcacttaattaatgtttaaatgaatttcaaccgattgtttgtgttgtaatctcatttaatcgcctttaaaataaaattcaaccgatcgttcatgctgtaacctcggttaaataaaaaataataataaaataagtgtcaatcggacattntactttgaaagtcctctntaatgagttgagaaataaccaagtgaaactaaggctaaaatcaacttacaaatcaagcattngcccgcanaaaggtcattcgaaaccgtttgaaggtccaacaccttaacgatccctttnntactttataggtganaacgaaccatntaaaattctaaaatcaacaccccgcataactttcttgctttctaa

SEQ ID NO: 46367 - DNA, 434 bp, Glycine max
  unsure (1)..(434): unsure at all n locations
cggagaggatgcttaatggaggataagaaagagggagagaatgagagatgggggagcacgaaattgaaggaataaaagaggtagagaagtggaacttcgaagtatgtctcacaagactctcattcatcaaagttacaacaagtgttacacatgcttctatttatagactaggtagcttccttgagaagctntctngagaaaacttccttgagaagcttccttaagaaagctcctaaagaagcttaagcttatctacacatacctctctaatagctaagctcacctccttaagatgagaagctagagcttatctacacaccccctataatagctaagctcacccccatgacaataaacatgaatataccaatataaagttcttactacaaagacttctcaaaatgcctcgatatacaatgctgaaaccctatact

SEQ ID NO: 46368 - DNA, 478 bp, Glycine max
  unsure (1)..(478): unsure at all n locations
ggatcttaagcaccgcggctgcagctttattagccagatctacaaaagtgttcaacataacgtaacggtttctaattatatgggccatcaaatctatcatgtgttgacagtaattgattagcccatgaatttcttcaggggctaaacacactttagcgatggcctttgctttggctagtagtcgtgggaggtcttgacttccatttaaggtcaagggcgaacctatccatccacatggtcgcttcttaatgcaatgcatcaatcaccctccctcttgcttccttctcggtgtacgcttgcgcgaagtcctctactagtttttgttcatgggtcaaagactggtttaactcttccttgtactgccctatgatagttagcatgcttcgcttcgtggcttccaagttttgagccaaactcctcttggatcttgagcaagcagctaactcttnctttaagatcatgccatgcacccgtgact

SEQ ID NO: 46369 - DNA, 392 bp, Glycine max
atatactgatggctgtgtcctaacagaaagactgctaggacaaaccaatatacgtggatactgagacacgcattaggtacatggcggacacaaattgactcatgcagagcggatccagatcaaatgagactatggttcagataccatccagaattcctcagagcggctgatccacagactactgtgtgtgtgaacctaaagtctcatctggcatcatatgtagcaagaccaacatctgatgaggtcttagctcaaaatctgatggaagtgctacaaatgttacaacaggaagaagaagttgcatcctcaaagagagaagagacaagttctgtcgtctaataagaagatgatcccttttaccagaacgaagatgagtggcttgagatctgact

SEQ ID NO: 46370 - DNA, 490 bp, Glycine max
  unsure (1)..(490): unsure at all n locations
cgccggatcttagcactgagctgcactataaatgataagttgattttagttttttgatgatgacaaaaagcccaaaagaatgatgtcaagattgagtcaacaagttcttgatcaagattaaagaaaagacatcaagaagaatcaaaattcaagagaatatgaattctagattcaacagaaaaaaccaagaagcaacaagtcaagacttcagaagggaagtattgaaaaatatttttcanaaaccaaacatagcacagttttgttttacaagaaaagatttctcaatttttttctaagttatcagagtatttactctctggtaatcgattaccagtggtagaatttgatttcaaaaagttttaactgaatttgcaacgttccaaatgatattaaatgggataatcgattacaatatattggcaatcgattaccagtgtatctgaacgttgaaattcaaattcaattgtgaagagtcacatctttttcataa

SEQ ID NO: 46371 - DNA, 442 bp, Glycine max
  unsure (1)..(442): unsure at all n locations
cggagtgggagcgaagcctggagtgcgagctaagcctgaagtatgcgctaagcctagagtgcacgctaagcctagagtatgcgctaagcttgaagtgtgcgctaagcctggagtgcacgctaagcgagctgtccaattcttccaacttttcttcaaggttttttcttgagtttttgcatcaattnttcctctaaagcacttgaaatcttcttcttttgacttttgctaataaaaaattgcaaagatgttaatttcttcattatttcattaaaaacaatagtaaagtgaagaaattacaatcattattagccaaaattgactatcaaattaactcagatttcgcaattatcaacaagtcatctagacctaacaatatattttacactatgaatttcattgagatattctctanacctctgagtgtcatcactactttgatcct

SEQ ID NO: 46372 - DNA, 481 bp, Glycine max
  unsure (1)..(481): unsure at all n locations
agcttatcctctgttattggcttccttatgttctcaatttcctacttattcgattntgtctttcttatagtaactctttaacttgtgctagcctgagaagatgtactattcccatttagtatagcttaaacaaattttaattcaacacgtaattaatagtaatgacaataactactattttttttaattagtgagtccatctatcctgttactttgaggatatatataaaaaaaaaaagtgatcaaattacacttggataactntgattaaaatttaccgtcggattaaaagctcatttcatgtagattatatttgtaaaattttatattaataaaaaattatttattacctcatttatatagaattaaaatcagtctaatataaaatattntaaaatatactaaaatataaattattttaatttttttatttattaattttggataaaattttaacacaatcttaataatatattgatat

SEQ ID NO: 46373 - DNA, 485 bp, Glycine max
  unsure (1)..(485): unsure at all n locations
tcttgcnaggctaactgtgatgatcactggtgcatctattgtatgaagccaggtcatactaaggagacatgttttatacttcatggataggagaaggtacttgagcgcatcggaggattcagaggtgccacacaaaggtgtgctaatcaagcaacatctgcttccgaaagtgtataaaacacacttatcccacaggctgaaaaggagatcctagctctcagcanagcataattggaacgtctacgggcccttatggactctctcagtaagacatctagctcttgttccctatccatgactggtaagagttctagcttcctatcctttaatgcttctggtactgataagatctagattatatactctggtgctactgatcatatgacacctcactcttcttattttcatactacacctctttaactggtaccaacacattattgtcgctatggtttcatacctctgtactggttgtgtatattcac

SEQ ID NO: 46374 - DNA, 466 bp, Glycine max
  unsure (1)..(466): unsure at all n locations
atcttaagtcacctgcggcatgcaagctataccgtaagtggttagttngctgttattctctaactaactactaccaatgcttacaatatcaataaccacctttcccacctaaagctgtttatgaacaagtccctgcttgagcctgctcagcccagttgatagtcgtcccaatgcttgtgcatcttctttagtcgcctcgattgtccctgtgccatgccttcgtcttcaacctgngccttgtcctcttcgttcataacaatatccaagattctagcagattgcttagcattgatagctcctaagctaatttctcagcaacaatttggctgtgtagagggcggagatcatgaatgattgaatcccttgaataataattgctaacatggccttcggggcaatacaataaattgacttataactttgaccctgatgaagnctataatgatagagtttggttatgagcttc

SEQ ID NO: 46375 - DNA, 379 bp, Glycine max
  unsure (1)..(379): unsure at all n locations
tgcctcanagtggtccaggaaggataaagcggcctattgaactctttccgctcccgagtatgacagccaccgctttaggagcgctgaacaccagcagcgcttcgaggccatcaaggggtggtcatttctccgggagcgacgcgtccagctcagggacgatgagtatgccgatttccaggaggagatatttcgccggctgtgggcatcactggttacccccatggccaagttcgacccagacatagtcctcgaattttatgccaatgcttggcctacggaggagggcgtgcgagatatgagatcctgngtgaggggtcagtggatcccgttcgatgcggatgctatcatccaattcctgngatatcctttagtgctggaa

SEQ ID NO: 46376 - DNA, 139 bp, Glycine max
ctgcaactcaacgagagagtcgcagcacgtcgatcattggcgttggtagggtagcaaacatccaggctcttagtactgagcctactgtaagaatgagctaagagcattatagatcgctggtcataacaataatggggca

SEQ ID NO: 46377 - DNA, 467 bp, Glycine max
  unsure (1)..(467): unsure at all n locations
agcttttgcatgtntagagatntctagagagagattggtccaagttccaaagagttttgagagcttttgctgtgcgaagactggtagagaacggagcgtgaagaggaagtcatcctgaatgcatgagatgagtctgtgagtgattgtgaggttctagaggtggaggagacatccccactacttgtatttcttcaatccttcatttttctcttctctttgttgtaaaggaagcttcccagatatggagagctaaatcctctattggttcttccttgtaggtacttgatgtaaatacttgtatatctatntaatgatgttttatgtgttctctttgctatcagtacgtcatttcaatgtgcttttgccttgatcacgtagatgcatgctctgttaggatcattcaatagtgaaaactggtttgattcttataacttgataggacggcgctagtttatcgtattatcatg

SEQ ID NO: 46378 - DNA, 472 bp, Glycine max
  unsure (1)..(472): unsure at all n locations
gacactatgaatactcagctcgcttgtggagcttctatagaggctggatctntgagcttcaatgaggtcctctaatggtgattntccaccatggagatgcagcggaagacaaaggagaagaggtgagaggaggcgccatccactatggaataagccatggaagaaggagcttcaccaccaagatgagccttggataagaagcttggagaggatgcttcaatggaggaaaagaaagagggagagaaaaagagaggggggagcacganattgaaggaagataaagggagagaagttgaactttgagttgtgtctcacaagactctcattcatcaaagttacaacaagtgttacacatgcttctatttatagagtaagtagcttccttgagaagctttcttgagaaaacttccttgagaagcttctttgagaaaacttccttgagaagctagagcttatctacacacacccatct

SEQ ID NO: 46379 - DNA, 438 bp, Glycine max
  unsure (1)..(438): unsure at all n locations
cgacccgnatccttaagtcacctgcngcatgcaagctangtatcaaacactcttgatgcattaattctaactatctatntaattntatttcagtattattgtctcttttttgtgcttattatcatgtntgtaacttgatcattcatgttcatgtaatgttatagggtttagacattgaaaaatgtttatctcttaagaaatggaaaataacatctaaataatccatctttagggatagaatggtgtcatttagcctattttatgcatctctgttcataatgcaatttgtctaattcatctcttaagggattaggggaaaaattaggtaagttagactctttcatgtgaggaatcatgactagagtatgcaagtagatgtaggtgataattganataatattgaatagagaanaatcagtaacgttacatcaagagtag

SEQ ID NO: 46380 - DNA, 453 bp, Glycine max
gccatttactgcgagaatatacatttgagaagatagttctacaagacaatgcttatcttaatatacatatgacatgctaatccctctgatcttaagacgaactcatgtgatctatgtatgcacacgcgtatgcgtagaatatgctactatttatgccaacatacgaggacatccgacacattctaatggtcacacatacatatgcattttgaatagaacatacactcttacgctcaaggcattgcgtcaaaatgtacacttaattacatcctaaacatttgctattacaaactacctacacatatttgaaatatatatcatacaaacttttactgtttcactcacacttatgcatattggcaagctattagcattatgcacacactcgcatttaaaagggaatatcgtgctattatacattcatttaggaagcgacctcaatattcattcacc

SEQ ID NO: 46381 - DNA, 441 bp, Glycine max
agcttataatatatcgatacgctcgaaattaattattggaaactctcgagaaattcagatgatcatgacttttcacacggatgtccgattcgtgtgcataatatgtcgagaggctcgaaattgaacaatggaagctcttgagaaattcaaatggtcataacttttcacacggatgtccgattcgagcccataagatgccgagacgctcgaatttaacaacagaatctcttgaaaattcaaatggtcataacatttacacggatgttcgattaggctctaatatatcgatacgctcaaattaacatcggaactctcgaaaatgcaatgatcatacttttcacaggatgtcgattggggcatatatgtcaacgctcaaataacacggaactctgagaatcaatggcatactttacacgatgtcgatcagctataaatatcaac

SEQ ID NO: 46382 - DNA, 328 bp, Glycine max
  unsure (1)..(328): unsure at all n locations
agaatcagacatccgtgtgaagagatatgtgcattagaatatctcaagagctttcgcaggacaatttccagcttctcgacatattatgcgcccgaatcggacatccgtgtgagaagctatgaccatttgaatatctcgagtgctttcgatgtagaatttccagtgtgtcgatatattctaaacctgaatcggacctccgtgtgaaaagttatgactatntgcatatcaggagaggtatcgatgtagaatttcgagcgtatcgatatattataagcctcaatcggacatccgtgtgagaagttatgaccattagaatttgtcaagagct

SEQ ID NO: 46383 - DNA, 454 bp, Glycine max
  unsure (1)..(454): unsure at all n locations
gcttgtccagacactacattgattgaacagtataatacttttcgaagaagaaaataggaaaaagcttagatacaggtcctttggttttgatgttgctttccaatcagaattggagtttcactttagaagtccacataatataganttgcattaaaggattctgtagattattgaaatgaaactccaattctaacttgaaacagcaccaattgcacctaaagaactgtatgcaagttttgtccaaagaaatataccttgtaaccgtgacacaaccgcagatggcaagaagcatacctcgtagaatgaatcatatccaaccaaaagacatatcaagtaaatgactccacagacaaccaccactgcagaagtgagaaacggaatgctntcccaccattggctcatcctagtaggaaacccggcctgagtcaatttagcaatcaagcacaattaatca

SEQ ID NO: 46384 - DNA, 490 bp, Glycine max
  unsure (1)..(490): unsure at all n locations
cagactcanaacagcanaactcaagccataattcgaatgaaaatagatccatgacaagatagggtgctataacctttagcaccgactaactaccataaagatcaagaaagaaagaccctcttagcgcaaccttctagcttccctttcagactcgagtagggtgagaatgtctccttctctcactggtcctttaacattcctcatgatgtgacggttctgatcatccagaaacttcactctaacctgggtcacctgtcctctggatccagtacgacccattactttgacaacaagtgcgtgcttcacctgagactccatcctgctcaaacacaatcaaaccgttatgagatgaaagtggaanacaaatgtgtttaatgaatcaatgacagataaatcaggaataacatcttccaaatgcaaaaggactcaaaccttaaatcattagctcttcaactttcaattntcacagaatcatcctaacagcgaatga

SEQ ID NO: 46385 - DNA, 348 bp, Glycine max
  unsure (1)..(348): unsure at all n locations
cttatactttacttaatattgaaccttgnttatgtnttcttctttctgtgattctncccggagaacaataaaactattatttnttgccatctctcgatttctggctttatgatttattgggttagtttaattcgaagaaaaatttggtgggatgggtttagacttggatcttattgtgtaggttcaaatgcgtcggatctgattctctcctgatccagtgagggtttgattcgtgcttattttcatggcattgttactagatatggaaaaagattgtgttttctattctgggaaagtacagagatctgattaagccacggtattaatcttgtcttgtgctttggaact

SEQ ID NO: 46386 - DNA, 479 bp, Glycine max
  unsure (1)..(479): unsure at all n locations
catcaaatggactaggagaagcaagctaagtattattttaagctcattaacagaatgcattagttaattccaaaagatattgaatcctctgatgcttatagctcctgttctactacatggtaaaaacaaccataaaaaatggactgacaactattatatatacaaaacaccacaaaaaccagattatcattaaaccaaattattactgccttataataaatcatgccaattcaagaaagaatctaaagaaggatatatattaaagggggaaaataaaaattgcaacttacaaaggactatatcagagaggcgactgatgaaaataaaagaaattttgaaatcctagaatgcagtgatacagggtaagccaatcatcangcaatggatatgagatgacacagttgatacctgcaacaaagtatctttagattcttctgagacatggcgaatcaagcgagacaatagctcatgttgcctct

SEQ ID NO: 46387 - DNA, 442 bp, Glycine max
gagcccgggtagtcaaagagaagttcatgttcattttcatcaaagtctgaagagagtatgatgaactaagggacgtcaatatagccaccgatgaagccttggaatgagaaaccaagaaggcccgataagaagaacacgaccaaaacaagttttggggggctttatagggcatcaatagtgagctcaaactccgaagaggtgaaaggaatcatcacgggtcaaaggcatgatctggaacgacgagctaaaggcttgccttatgtcgaaaagaaatttgtcccaacagttaaagtgagactgaagggaatatatgggccatcatcgatgagtgcaaagagaagctaaatctagcggcgactcacgagcaaaggctagaggatgagtacgccaagatatcatcagaaagggaagcaagggatatggtaattgattcattgcacca

SEQ ID NO: 46388 - DNA, 481 bp, Glycine max
atactaagcttgcagactatccttcgccaaacactgccgtgtttctgtctcggtcctgattttatgcgggctgcagcaccggctccgcttccctaactgtactggaagcggctgccgcggctttatcctctatagttttctggagttttaacatgacctccgagatggaagccatttgatcttttaaagccaatagatcggccttcatctgttcctgcacgccctcttcattatccatttttctggatcgagtgttataagggtgccttggtgttttcttattgatgatgaaattcctaaagaaataaacaaaggtgagtatgccaccaaaacatgaatatgcaaatgaatgatcggagcacttggatccaccccaacggttttttagataacgtgatgagtacagaacttctcattctataaaaagaacaaagctctcatctagccgagattatacaaaggtgtttcaacagaacctaac

SEQ ID NO: 46389 - DNA, 269 bp, Glycine max
tgaatcgttgtcctggatgtgtgaatggaatcgactgcttcataggcggatgatcccatgacgtagtgaggaacatctggtgggggcttgccgtttatcacttcgaacggcatgagcccggcgcttgtatgtgtagaggtgatgtccagaattctgagggatctgcaaatgttgatgcacacagtgaagagaaaatttgtcaacatgagctacccatgcttataggtgtgaagccgaagcgtatattccctgataacttcccacaagct

SEQ ID NO: 46390 - DNA, 407 bp, Glycine max
  unsure (1)..(407): unsure at all n locations
agcttntanatgttatttgaaataatatntttcatatcttcttttnttaactttttatattctcttttatttttatcttcaatatatttattcaattgtttagttatcattttaaaataaattatgattttattatttttctgtgattttatatttttttaatgattatactaattaattttattaaataattataatttaataaactaattttcttaacattattagctatcttccccatttattttgtggaatttaacttacataaacaattattatatgtttaaatctattacggcttctgaaagtacataataattactagtgtgtacacacactccagagagaatatgctacactaaaattgttataataaaatgcatcttttcatgtcctgccgcataaca

SEQ ID NO: 46391 - DNA, 497 bp, Glycine max
  unsure (1)..(497): unsure at all n locations
ctaagcttattctacacctganaagaggatgagatggttgcacaaaagagatagctccttgatcatgagggagctaacaaaaattttcatgcagatggaccttcttctactagctctgacttgcagtagcctcttatccctcttccatttccacctagagcaattccaaacaaaaaaatggaagaagtggaaaacgagatcttgaagaccttcaggaaagtagaggtgaacatacctctgctagataccatcaagcagattccaagatatgccaagtttctaaaggagttgtgcacccacaaaaggaagctcaaggtcaatgaaaggattagcatgggtagaaatgtgtcagcattgataggtaaatctgttcctcacattcttgagaaatgttaggacccaggaactttcagtataccttgtattattgggaataataaatttgagaatgccatgctagatctangagcatcaattagtgtcatgcctctgtccat

SEQ ID NO: 46392 - DNA, 220 bp, Glycine max
  unsure (1)..(220): unsure at all n locations
agctngtaactaacacgtgtataaaagtctactcaatttatataaagacangcagaangttaaccctatttcttaaggaggaagccctgccctctaaataaaggcccatactctatttgttctatccctccctcactcagaatacttctctatctcacttcccaccatcatcgtctgtctctaacatccaatgtgaatagctaaccaattgctcttgcat

SEQ ID NO: 46393 - DNA, 183 bp, Glycine max
cgatattcatatcaaagctgcaagtaacaacgttaagtttgtattattactcatttaatctattctaaacttggatagataaatggtgttatcatcgtatataccgttggtgttttttcctaaccaatgcaatgaagatattaaaaactagcgtggatggtaaaactgatcaagatgctcctc

SEQ ID NO: 46394 - DNA, 423 bp, Glycine max
agcattgaaacaaacaaccttaagggttaaaatcccactcctgtacatcatgattgcttcactgtcctattgtcaatttttccactaccatccctggtcctgctttagagcatccatcagtaccttgagcataggctctgacagatcagtaaaaaaaataattcctaaaagataatgaggatgaatggatggagaaccattgaatggcaatggaaacttatgatggtgtcatgatgtgcacatatagaggaatgtagatctcaagatgctcaagactgtacattgaataaatgtgatctttaacgactatggtaagtgagaccacaaattttatagagagacagatcatagactatatatttttatcacaagttttggcaaagaacaatagtgtgtactcataacaactacctgcccatttac

SEQ ID NO: 46395 - DNA, 474 bp, Glycine max
  unsure (1)..(474): unsure at all n locations
ttacacataaacagctccagaaatggacagctattttatctgtggaaatcactgcaactgtaatattggtgatcgcaaacttcaggtgatgtccacatttcaaaatcatatatatgtataactttcttctattaagctgatactttgaatctttagctttagaaattcattaattcgattgaaacgtaccttggatgcatgcggagtgagataaaaaaaaaaaattcatatatatggcttgctttcatctcaagtgaagtcaattatgtttgcaattaattgtcgacttacaataaattgtaatacgtgtatgccttacaatagtttatatttatcagaacacgattacttaggacattgtggctctgcattgataatatgatgtacatcatactgatatatnagtttgataatataaaanatcgaaatataactccacaactnttatactaacgtgcagtttaattnttagta

SEQ ID NO: 46396 - DNA, 469 bp, Glycine max
  unsure (1)..(469): unsure at all n locations
agcttgtttgatgtttgtttggctacataatacctattatgcggagaacactctatctccaaatgttttgggctttctacttttcttgaagaatataacttgagtccacagtttttcacgaaccaggttcttttggaaaaattgtatttattcatctgtcttggtgtaggtgaacttttgttggtaccacaatgtttttcataatataattagtatattcaatggatacaccgagcttaatccggtacattatagaattttctatactaacatattgtccaagactaagttcacagtatatatttataaaacaccgcatagttacccgagatgtgaccacccatgtgaactgtactgaaggtcttcattgttaataaatgattccattgcttgctcgtaatcagtcaccattagaactagttggtcgttgatctgttggttatctataacaatgttnggatttctcatg

SEQ ID NO: 46397 - DNA, 475 bp, Glycine max
  unsure (1)..(475): unsure at all n locations
cctatntctcatacatgcatgacagtcacgttgtattcaactattgcaacaccaccggtgatgtcatacacatatgtcgtaagcacagcagaaccccttgcatatttgaagatcccagtacccccaacaattggcatttctctaacttttataaatgtagggtttctgccaagaatgctgagggtgctgccattgtaaatgcccaaagtgaagagaaaatttgtcaccatgagcaacccaggctcatgttgtgaagccaaagcgtatattccctgagatcttcccacaagctntgaagttggacttggtccttcagttagagggtcatccatcatgtaagtagccccaaaaccatgaatggaccccttangaggcaaaacagttttcatagcagttgggtgttcccccgttatgttgttatggaaatagaagtggagttgggtgaagttttctttcacgggttctgtggatggat

SEQ ID NO: 46398 - DNA, 179 bp, Glycine max
  unsure (1)..(179): unsure at all n locations
agcttcttcctaatcagggggagccttattagtcagttcttgaactctctttgccaatgtcattggaatgtagtcgttaggactaatgtacattaatgngtgaccatgagaggacccagtttatatggctacggggntggctcgtggtgcctaacacatgaaactaagagtgtagtatg

SEQ ID NO: 46399 - DNA, 83 bp, Glycine max
  unsure (1)..(83): unsure at all n locations
ctgttccattnttcttccgccattctttctatttattttcnntgactacccttctgttaaacgtcctcacagaagatatggat

SEQ ID NO: 46400 - DNA, 423 bp, Glycine max
agcttatgcacggagaatgtgattatgaaatttatatgcccgaagaaacaccatttcctagttaaccatgcattaggtaccatgttcaattattttgttttttaagtgaaacgggtttatgatcccaacatggttggctcgtggtgcctaacacatgaaactaagaatgtagtatgaagtttcacgcttcccccttttttgtttttgttttgtagaggaaaacgcaaggatgagcaaacatgaaaacaaatggtatgcaattttgcagatcaaaaagtttgttgaacgcatatgcatgatgatgccatgactcatgcaaaatgtgaggctggaatatgataacggacaaatgcaggatatgtccattatgatgttatgaagagatgcttatgcgatgcatgatatgaatgcattttacggaca

SEQ ID NO: 46401 - DNA, 422 bp, Glycine max
  unsure (1)..(422): unsure at all n locations
tgacaaanagcccaggagaatgatttctagattgagtcaagaaccctccccgaatcaagagaaacttgatttcaagattcaagaaaagatgaattcaagttccaagagaagaaatcaagaagacttcacaagggaagtattgaaaagatttttcaaaaaacaagcatagcacagttntgtttttcaaaagaattctcacaaaattttctaagttaccagagtttttactctctggtaatcgattaccagtttcctgtaatcgattaccagtggcaaagtttgatttcaaaagcttttagctgaatttacaatgttccaattganttcgaaatagtgtaattgattaccagtgcatctgaacgttgtaattcaaattcaatggtgaagagtcacatcctttcatacaaagctttgtgtgatcg

SEQ ID NO: 46402 - DNA, 482 bp, Glycine max
  unsure (1)..(482): unsure at all n locations
cttaagctntagtcttcatgttgttcatgttgttccttctatttctaacaaactccccttttttggctttgatgatgccaaacttgaatatgacattgagtgcatttggaggatttgagtcttgagattagagacttgattntcttaatcaatcctgaaaattcttaacacttaagaaaggatcaattcatatcatcatcatcatcatatatcttactatataattntactgatgctaatgtaatgcaatatgctagttcatctcccaaatgcttatgtaatacaatgcaagaaaatatgcaatgcatatgcaacagttcatatctccccttatgcaaatatgcagttcatcccccttttggcattaacaaggccaaaaattntgaacttatacacaacacagaacatacaaactgaagggaaataaaaaccttagcatttcattaatcatgaaccactacaattcattaatcatagatcat

SEQ ID NO: 46403 - DNA, 421 bp, Glycine max
atctaagctagagatcactgacaggtccaacgctgtatagcttgacacaagacccttcgtttattaatcctgcatcacccacacgtcacagcgcttgtctgttcccctcacagggttggcaaggaacccaattgaatcagattctttatatggtaccataggtccaaacttctcatgtgaagaatcgcgaatttttggcacccttatcttcctaaacgattctttgaccatatcatatgctagaacaacatctagtgttgcatcacactcgttaacatagccccaccagtggcaacaatcgtttgcgtgagtgaaaacccgtgaagaaccgcagatgtcaattggaagagggagaagagagggatcaagttttctccaagagtctgaattgaggctatacaactcagcactccaataccca

SEQ ID NO: 46404 - DNA, 392 bp, Glycine max
gcttcggtcttaatttcgagcgtctcgacatattttatactcaatcagacatctgagaaaacgtattgtcgttgaatttctcagagattcggcataccatttcgagcgtgttgatatattacgggactcaatcatacatccgagtaaaaaagtgatggtcgtttgaatctgttcagagcttcggtattcaatttcgaccgactcgatatattacgggactgaatcagacatccgaccaaaaagtttttgtcgtttgaatatgctcacagcttcggtattccatttcgagcgtcttgatatatcaccggactcaatcagacatccgagttaaaagttattggcgtttgaatttgctcaaagacctcacattcaatatcgagcgcttcgatata

SEQ ID NO: 46405 - DNA, 405 bp, Glycine max
  unsure (1)..(405): unsure at all n locations
ataactnnttactcgatgtctgattgagtcccgtaatatatcgagacgctcgaactggaataccgaagctctgagataattcaaacgacaataactttttactcggatgtctgattgagtcccgtaatatatcgaaacgctcgatattgaatggtgaagctttgagcaacttcaaactacaataactttttactcggatgtctgattcagtcccgtaatatatcgaaacgctcgatattgaatagtcgaagcttgagcaaattcaaacgacaataactttntactcggatgtctgattgagtcccgtaatatatcgagacgctcgaactggaataccgaagctctgagataattcaaacgacaantaacttttactctgatgtctgattgagtccgaatatatcg

SEQ ID NO: 46406 - DNA, 483 bp, Glycine max
  unsure (1)..(483): unsure at all n locations
gcttattctattttccttcttattntcttctcatatatttgtttatggaaaagganaagtttatccaaacatgctcttatataccttagcttccgaagaagttgaatgaaaagagcttttataaaagtgcgtaagttgattttagtttacgtgagaatatcatcttctcatgtaagtacttatagagaagcttatccagagaggaccttatatgcttttcttatgtgaagtataatcctttcttttattctaagaaaataataacagggtcttgcagtggaaaagggcgacatcacaagaggcactggtttcactgctacactgcctctgcctcacacaacagctattgatttcaggcaaacttcagaaacgacatttctatttattatcaaacataatttgttgatttaatattgagcaagactttgacttccttcaatatttaatgtggcaatntagttagttacatgtaatattaagtca

SEQ ID NO: 46407 - DNA, 407 bp, Glycine max
  unsure (1)..(407): unsure at all n locations
atactaagcttaagccccagctagcaacataacccacaccacagagttaaggaactctttgttatgtgccggactctatcangcaggaccaactaacctaacccaatcaccactaacccatgctcatagtaacattaccccaaaaccctctttgattggcacattatgccttacctttntgtaaggaagcatcccccacatataatcattatgtgtgtagactattagattcacctcaattagtatgagaattatacaaaaaggaggggatctaaccccctataaatacccttttaaaaaaacttaaatatacttattttttttatttgctgtctntgcaataaaattnttaatcataaattaagcattcaaattgccaaaaatgtataagaagaaaccaataaaat

SEQ ID NO: 46408 - DNA, 399 bp, Glycine max
  unsure (1)..(399): unsure at all n locations
aggacnnctttgagggccaccaacaattttcacctcacacctccattggaagaggtgggtttgggttggtttacaagggcattctacctgatggctcaatggttgcagtgaaaaggcttgaagaatcatattctcaaggagatgctttgttctaaagcgaggtggagaatgttagcaacttgaagcaccgtaatctggtgccattaaaagggtgttgtgtggttgatgaggaggatgataaccacaattttgagtactgaaggtatctagttcatgaatatatgccaaatggtagccttgaagaccatctcttttcaaccatattagacaaccaatatacaaagaagtcccttacttggactcaaaagaaaagcataatcttggatgaggcatatgctt

SEQ ID NO: 46409 - DNA, 441 bp, Glycine max
  unsure (1)..(441): unsure at all n locations
cagaatngccattccttggattatatggttgaaccaagctcacgctctcacaaaaaggttcatcaagtcaagttgaaatatggaagtaaccgtcttgcaaaattggggcaaaagatgaatcgagtcacatcactgcttcgtctactgccaaacatatttaggattattgatgtccttgttacttccagtttcaccttgacaaagatgtcatggaccatgttgaaaatctaaattgattcaaccccatatcttgcgtaaaaattcgcaatacttcaactgtacatcattcgcatgcatccatgcttttcattggttgcattgctcgttgcattctttccttganaaataaaataaaatgaacttaatcattgttataaaaaagaaagggacacgctgtacgacgcccttaccanactcgtgctagagctagagtaatgggtg

SEQ ID NO: 46410 - DNA, 465 bp, Glycine max
gcttcttatccaaggctcatcttggtggtgaagtcttcttctttctatggcttattccctagtggatggcgcctcctctcacctcttctcctttgtctttcgttgcatctccatggtggaaaatcaccattaaaggacctcattgaagctcaaagatccagcctccatagaagccccacaagcaagcatccatcacatcttctaagaaaacaattacaaatttagaaaaataaattgtaaaattaaatgaagaattagaaaatcttaagactgaagttataactttaagaccaaatgatacaattcattcttctaccatgcatgctgtcgcaacctacccttcggcgggagggcgacgcgtgactcgcgggatgcgtgttccacgaaaggaatatgcgcggagtcgccaccaacgtttatttgatgaaaacgtcggataaaccggaaaagacgcgatctacgaac

SEQ ID NO: 46411 - DNA, 473 bp, Glycine max
  unsure (1)..(473): unsure at all n locations
gctatattcagaanttcacagatctttgtgttcttcccattccacccaaagattatgtttacacattttgagatctttataatctttgtgttattgtgcacattctctccatagatcatatcttttttccttttgataatcatgacgttcattcagctccttcaaattattttgaagatcttttagttttttttcaaactcctgagagttcttgagaagagtagctntttctctagcatttgtctcaatctcaagatatagcttagaatctttttctctaagaattatgatgtaagcttgattgtcaagcttctatggaggctagatctttgagcttcaatgaggtccttcaatggtgattntacaccatggagatgcagcggaagataaaggagaagaggtgagaggaggcgccatccactagggaataagccatggaagaaggagattcaccaccaagagagttccttgga

SEQ ID NO: 46412 - DNA, 550 bp, Glycine max
  unsure (1)..(550): unsure at all n locations
cggggccatggggttgccttgatgtagcgccgcgatccttagagtcaccctcaggcatgcaagcttctagaattgttatgaccacgaatcgtgtatatgtgttgaaggagctgagcagtcgagtatcgtgaaagctgccatatgtcaatggaagaccatctcatgaagtcatggtgcctacttgctacaacgtgcgaccacctatgacgcttccttgatcactagagccctgacctgctaccactgcgcccctgccatagtactgctgcagtacgctacatccctatggcctgcaacgcgccattatgactggcgccaatgcccaaggcgccgtgcatgctggctacttcaacgccacgtacgaaatagcaatggcgctgagaggaatggtggcaccaacaccacatgagacgtcctctgtcaaagctccaatggtggnggtgccatgcgtggcgatacgcgaanaaagagtaccctgtatgaaaattctantatctactcccgttgggaagaacctcttcaacctttaatcattgatcattaaaacttg

SEQ ID NO: 46413 - DNA, 372 bp, Glycine max
  unsure (1)..(372): unsure at all n locations
agtgtccgagcgccaattcgtcttgttctatactccagtcttcttctggcttcaattcttcagggggctcttcttctgtggccaacatcttgggatgttcccagcctttgatgacagctctgcatgctctgctatccagtgatctgacgaaggccaccattcttgctntaccatattcatagttgcttccatcgacaataggaggtctgttcactggtccgccttctttctccatgttcatcataatctatctgcctagatctcactctgtgattacgagagcaggctttgatccaatagagattctgataccatgggacagatgtcgcacacgatgtcacgacatcacgcttctaacatgcagatatatgt

SEQ ID NO: 46414 - DNA, 326 bp, Glycine max
  unsure (1)..(326): unsure at all n locations
agcttgaagtgagatagtgtggaagagtcagtcttcttattnttattcgttgaccacagagtggtacctgaagatatgtcgcggcggtcacgacaccttgcggacgtcaggtggggtgctattgcccaaaaccaagcttgaccaatcccgacccaacctgngcatagtcagtcagtgagaacctgtgacgtacctaaacaggcgagctcctggcagtctaccgataaaagaacaaagaccacaaagcaaggaggcttgtgtggtggctggccacctctggatcttgagtgatatttggaatatggcctctggtaatcgattacaaa

SEQ ID NO: 46415 - DNA, 482 bp, Glycine max
  unsure (1)..(482): unsure at all n locations
ctgtgtaatcgattaccacttattggtaaatcgattaccagtgactgtttctgaataaatcaaaagatgtaactcttcaaaaggtttttgactttttcaaattggttntaagtttttctaaaagttataactcttctaaatggttgtcttgaccaaacatgaagagtctataaaagcaaggctttgttttgcattttcaatcattcattctatcaatcaatcttttccaattcattctttacacaagcaagttttccacattgatttctgagtctctttgaacttcttcttcttcttccttttgccaaaagctttccaaagttntctggtttttctaaaccttgaaaacttgtgctattcatctttttcattcccttctccctttgccaaaaagaattcgccaaggacctaaccgcctgaattcttttgtgtctctcttctcccatttccaaaagaacaaaggactaaccgcctgaattctt

SEQ ID NO: 46416 - DNA, 423 bp, Glycine max
  unsure (1)..(423): unsure at all n locations
tgcaagcttcattggagcttgtaggcctaagatctttcatancattggattcctttacttcttggaagataaatgtcagcggaatggagaccgcaccacagagaggagacgccacttnaaggagaagatgagtctagaagaagctcaccaccataggaggccatggataagatcttggaggaagaaggatatgaatgaagggagagggagagaacagcacgatattttgtgctcaaaaggagctctgacatctgaagttaatattcgaatgatcaaagttgnaaaaaatgcacacacatgacctctatttatagcctaactgtcacacaaaattggagggaaattcaaacttcacttgaatctgatattgaatttgtggagcctaactctggagccaaaatttctctaattatgattagtgaa

SEQ ID NO: 46417 - DNA, 450 bp, Glycine max
  unsure (1)..(450): unsure at all n locations
ccaatgtaccatgtcacaagatgggcctcctagtagttctttgaccattaaaaggtccctttcttcttgggagtcaatatcttcactccacccttccccttttgcttcttcactttcactagaggaaggtgaagcagtaacctcatcttggctactataaatgtcttggcccttcataatcatggctttctttagttgccaaacggtcatgtaaaagtttccatgtaaaagccaagactntattcggagagctgcacttccaaaaaaacttaaacacagtttcattctaatcaacatttatgagattcacactagttctaatatgataggctgaggctacaaaaaatacatgacaattatatatgctacagcaaacacttgagaaagcacactgttctctgtccaatagaactatcaacaacctatgcctcaactgttctaatagtgcat

SEQ ID NO: 46418 - DNA, 398 bp, Glycine max
agcttgcaattgaacaacggaagctctcgaaaattcatatggtcataacttttaactcggaggtctgattgaggcgcattatatatccacacgctcgaaattgaacaatgggagctcttgagcaattccaatggtcataacttttcactcggaggtccaattcaggcgcataatatatcgagacgctcgaaattgaacaatggaagctcttgagcaattcaaatggtcataacttttcactcggatgtccgattcaggcacataatatatcaggacgctcgaaattgaacaacggaagctctcgagaaattcaaatggtcataacttttcactcggaggtccgattgaggcgcattatattttcagacgcttgaaattgaacaaccgaagctcttgag

SEQ ID NO: 46419 - DNA, 482 bp, Glycine max
  unsure (1)..(482): unsure at all n locations
agcctctgtagtaaagatgagtaancatgaatgcangttacattgtaagggnncctgtcttggcaatacaaactacaaagnatatccctgccacactaaaaaaaatgcaagtacatagaaaaaggatttgctagaaagatgcatatttcgaacaaaacaagcctcttaatcttatattccttgcagtattttctggaccttatgttttcattcatggttaatgatgttgtactgctgttgcatcttttctttcttttaactntgatgtgcatttttatgttcttttgggtatttaagggtgggttcaattattgatatactagaagtttggcaccgtgtatacattagcacaattgattaaaactcagaagtcaaaaaataatttagacccaagcatcatggcaacgaagagagaagaattaattattaatttatctgttactgcaagttcatatttatntattgnnngttataatatatat

SEQ ID NO: 46420 - DNA, 343 bp, Glycine max
  unsure (1)..(343): unsure at all n locations
gctggattaccatacattatgtgcganatctttatttttttaaagaatgatgtttttttaacttgtgtttatccatttgattcatcccaaacaccatgttatttttatctgatgacaatatttaaagatagaattatgtactttgaaagttagatgcaagcttgccacttttccactgtcatgctgaaagagataagtaagaaatttatcatgattttatcaattgaggtttaaaggtgtcattatttaagtacatttgtcacactgtgatgctctgtttacactaaatagatatgtttctatataatctaaatatgctctatggagtaaatgatgaactttt

SEQ ID NO: 46421 - DNA, 453 bp, Glycine max
  unsure (1)..(453): unsure at all n locations
tacacacacaaactanaatgttgtcttctaaaatcactactctataatcattaatccacatgcacaaattaaaatgcatatgcatgactagtttaatttcacaaccattcaaaaaatattgcatttgttggctcgaattataagagaccaactttttcatgaaaatacacctctaaagttagtgaaagaccaaatttaaactaacacctatctctaaggtagtaaaaatccataaaagtataaagtgactataaaatatcaaagatgttatttttgcaacactatgcttaaaatgggtaattattgttgagttgtgacatcttagatttaaacaacgtcgactaattgattcttcattctatattctaatgtgatggagagataaactacaactcttgataatgatagtagactttttgtctcatcacacagtatggacatcttttctatcat

SEQ ID NO: 46422 - DNA, 311 bp, Glycine max
  unsure (1)..(311): unsure at all n locations
gcatgcaagcttgcagagattgtgtataganatttttgttaatttattanacttatacatatatcgtgatcaaagatcattagactttaccccacacacctgaagattcgaaccatgaaaactttgtgcatggtttcaatatgcttactaaaccagatggaaaggagttcatctctgttacaaaacattaattaagtcctctcagttaaaagtgcattgatccttgtatgattcacatggataagatccagcaccatttctggttttatctgccaacattaagcccatnttttcagagcaagttgcacgag

SEQ ID NO: 46423 - DNA, 479 bp, Glycine max
  unsure (1)..(479): unsure at all n locations
tcttgaacaatagctagacagcatggttatcggtggccttatactttatgctatcctccctaagcacggaaggcagaggacgacagctgggaaatctaactcgaagggaggtgcaaaataaggtgggcatgaataggagtagaacaggcatgggtggttaggaacatagcaagaatgacatggtattcaacacaggggatgcacgaatatcgaatcaatatccacaccaaaggacaaagtcaaggtcgtacgcgaaggtagtggtgacaggcaatagaagtgtggggaggagagagttccaggggtacaagcatcaaacatcaataacatctcactcatcactgcagttgagcatacccatggaacaggtgaaacgtttctataacacctgagttgggagactgangaaattgtcggtgctcaatagattataagataagctcatgtgggagacaagacaggagttaacgctaactatc

SEQ ID NO: 46424 - DNA, 393 bp, Glycine max
  unsure (1)..(393): unsure at all n locations
agcttattaataagctgattgttggttttctaatgtgttcgnctaaattgttctaactttaaaaaaatacttttttagaaagtatttatttaaaaattgccttntataagtttaaacatgcggatgaatttacatgagatggttttaacaatagtttaacttctgagtaagtagttgcaattgtctaggatatacaaattcattaaatactcgcattttacacggttcataaaaaaatatctttgtgatttgtttagcatgctccaccaaatcacattgtaacacaggtgtaccagtataacatttaacaatatgaagggctctttgtacttgtttaattcacactcttactttatatctatctcttctaattgctgtctactctcttcttat

SEQ ID NO: 46425 - DNA, 476 bp, Glycine max
  unsure (1)..(476): unsure at all n locations
acagaaaaggggtatgaagcanaacatattcaattatttatataactgagtgcttttttatacttaattgacgtgggaaatattcgcgcatctgagcaagagaaggaagagattacatttatgcattagtcaaaagggaaggagatgaaatgacaaaagcaagggaaaaaaaatatagagactttgtttaattatcatataaaccagtaattgtacttctggtttctgtctaaccatatatatgtggtctatatcattcacatcaaattntgcgttaaaggaaatgatcatgactgcaaggatatatatctcttgcatataaaggttgatatgcactttccacaaggaatctcatttagagctataagctaattaaaagattntttttcttcataattngaatatcctacatgttcttaattatgtatcacataatcaataaatttatgcaatntatatctgaagatgtattaaaa

SEQ ID NO: 46426 - DNA, 469 bp, Glycine max
  unsure (1)..(469): unsure at all n locations
gcttcaatattctcacattcgatgtgcatatatatatcttgtatataatataatttgaattaaatgaaatgtcacaagaaggcccaaaatctaaagaattgtcaacatggggaagaggaacacataactcatactcccactaaccaagcatattaaaagattaaaagagctcacaatgcccctatcatatacttgtctcttaaaaaatcatgggcctaagtcccttggtcaagggatcaagtagcacanagtttgtatctatatgctaacaactatggccgtctttcgcaagatctctaatagccaagttgttcaaccccataagntttgaaccactagaagtcttattgttcctcgaatagaacactacaacactattatcatagaanatacttggtggcaggaataaggtccacaatgtaaggtcttgtcacaagacttctcaaccaaacaacatgagtagtaataa

SEQ ID NO: 46427 - DNA, 493 bp, Glycine max
  unsure (1)..(493): unsure at all n locations
taacacgtatgtgatgcaatccaaccccgcaagggcatnggatagataactcctagtagaatgcgccagagatgtaagagaaggccctanggttcttatgagccttanggtagatttcggacccatgggctaagtacgagcccacttatctttgtaaatattagattaaggtttcattatttttgggccttgtatttagggctccataatgtaggtagggtaccctagaaatatangatttttcagcccttgtattttagggcacctagactacgttttgtattaggggtagttttgtaatttcacatgcactaagtggatatttgatgtgtgtggctggaaataaatttaattgaattggtagaagcccaatccaattaatatttagagggggaggtgagcatttgcttactacaccccattgccatatcatatagtcacactttgtgcatgtncttcatngctttcatgcctcatgacacctaagcacact

SEQ ID NO: 46428 - DNA, 425 bp, Glycine max
  unsure (1)..(425): unsure at all n locations
tgtgtagtccaccatctnttcatagtatattactggtaatgtgtctactatcattatcantttttcttcgtcattgaggtgccacttgagttgccaggtctctccacctttgggcgtattctttgaaagatctgtgcccctttttgcacatgttctattgttgcatcctatccggaaccatatcaaaattgtactgatagtgcctaatgaaggcaaccattangtccttccaagagtggactcgagaaggttccaggttagtgtaccaggtaacagctaccccagtaagattttcttagaaggaatgtatcangagttcctcatcttttgcgcatgcccccatctttcgctaatacatctttagatggttcgttgggcaagtagtccccttgtacttgtcaaagtccatcaccttgaacttgata

SEQ ID NO: 46429 - DNA, 429 bp, Glycine max
  unsure (1)..(429): unsure at all n locations
gcttctatanaattcctaaaaccctaaataaacatatttctcttaatatgggtgagaaggaagagaanaaagaataaagtcaagttctatatgcttctgtaaagcttccataactnttctgtaaaattacgaaagaaggnggggtgaacttatcaaaagggggtgcaaatagcaattttcaaatnttcgactcgcttggacgagctgggcggcaacctcctccccatntttcctataaataggtaaaagggggctattccaaatatccctaatcccccttgctatgcatttcagctattttgggtgaaaaaaattgtttccgtgaataaaatccaagtcgaggttcttccataacgcttctgagacatttncgtgagcaaantatgtgaaggttttcattagtcttcaccgttctttgttcttcaacgg

SEQ ID NO: 46430 - DNA, 429 bp, Glycine max
  unsure (1)..(429): unsure at all n locations
agcttctagagaaagctacatgaagctgcctcggttatatcgctgcccagccttcattaaccgttggatcttctcgaaattttgtttgcaacttcacaagacactttaccatgattntaccgttgggatctttgagaagatgactggagtgtgctagaagcctcttaatgaagcttctagaggaagcctcttaatgaagcttctagagaaaactacatggagctgcctcggtaaaaatgcttcccagcctccgttcaccgttggattttctcgaaatttggtttgcaacttcaaaagacacttgtccatgatctgaccgttgggatcgttgataagatgtctggagtgtgctagaagctctccgttccgagagcatctcttatttaagcatttcagcctttgctttcttgtagcttatgaaacatgtca

SEQ ID NO: 46431 - DNA, 405 bp, Glycine max
  unsure (1)..(405): unsure at all n locations
tctctcttcttttttcttttccttctttgcaaggcttactaacccaaataattgcatcttgttgcaatttatattngtgtaaagtcaaaaagtattttgctcaaatggggaacaattntacactaatcaagggcagctttgcttctgcggccagatattgngataggtagaccatcaaagataggtttcgaaatggctgcttgcaagtcaggtttcaagctccatattgcaggcggccaggctgctgctgaattgtntttttcctgctctctgaggctngatgcacttgacgatttgcgcactccggaaaagccatcagtaaatatagattctcccaaccncactggaattgaatctaaccatcctgattctgactcanggaacagcgctgctcgactagccgat

SEQ ID NO: 46432 - DNA, 403 bp, Glycine max
  unsure (1)..(403): unsure at all n locations
agcttgactcacaccanacatggcaagttcaacatgctttatcaaatttcttcacaaataactatcatgaagcagaaacctagcaaaactacccatcatatctcccaaaacccaatacccacgaaaatcaagtgagaaagaagtctacccaaacctgaaatttcgaagtcccacacgtagagatgcgcttcacgactccgaaaatgccttcctttcacgatttggagcagaaatggctaccaaaggttggagctttgttggagcttcaatggtggaggaagaagaagagaatggaaacgtgaaagagagaggaaagagctttctgaaattttggggctgagtgaggagagagagagtgttgctttttggtttaaaaagacttttctctnttctattattttat

SEQ ID NO: 46433 - DNA, 444 bp, Glycine max
gttgagtctcgtatcggtttaatcaattatagttgtctcttaatcgattactctgttggttaagacaatgactgatttattcataagtctctgctctaatcgattaccaagtggattaatctattacttctctctcgtttagttattcagaagtgaacaaaaacactttaatcaattacttagagcatctaattagttacattgttcttgagttatttcccgatgttgggaagaacactttaatcgattgcttagataatctaattgattacttcaattaattaatcgattactttgtatatttaatatattacaggcatttataatttttttctctataaataaccaacttgtgttccctccaaaaccgatcaagagaatactcaatatctcgaaaataacccattagactatgaatgggaaagatctcgagctgtcattagt

SEQ ID NO: 46434 - DNA, 187 bp, Glycine max
gcaacatcaaaaagccaaagaactcggaaatcaacacagtcatcccaatggagtagcaagatataagtatcagagtattaaatccaataagccaaccttttattcagggaataatccaacccgaattcgaataacataaaatgtgtacaaccacacaaatatgccagactgagacacacgagaaata

SEQ ID NO: 46435 - DNA, 431 bp, Glycine max
  unsure (1)..(431): unsure at all n locations
atgcaaaaacatctaaattcattnggtatttgggaaagtcactccatcgcttttcattctcaatgtttccaaaaatccttttgttatgctctgatctaatcaaaagtaagtttcaaaaacactggttgttgattctttccaaagcatgttatgtccaagaaaaaaaattaagtcccaaaaagagttatatataacctataactatactaacataacaaaatatatcanagcacgtgtaaatcagtcaaaaacacaaactcgcataagtttccaaacaaaaataaaaaatagtaaataaggtaataaagtacttaaaatntaatacaaagcgataaatgaacataaagacaagttcatgaattcttgaaaatcatggttaaggagctcagtctgcttcactgaaataatcaacatgatctgccatgtcttca

SEQ ID NO: 46436 - DNA, 479 bp, Glycine max
  unsure (1)..(479): unsure at all n locations
tgcaagcttcacatagctcccactctcgtactcctttttacaccctattcattcggatagagagtgaataatccaaagaanatcagcatctatcatgatgtgcacaaatttctgcaacttcatttgcattactttcttgcaaaatgtgtggaaatgctattatttttttggcatcttaattctgatttccttattgatttggctaataggtcattttaatacgttgatattccagagatgcatgttagtagtaacttttcccaaaaaattataattattagagctatatacaaatgaagttcacacctgaagattaagctcattgtatagggcctttactttagcaacattttctggatctggcttaccatagttctcctgcaaaccacaaaaaaatagtgacttattgcagtctaatcatggcagaaaataaggaaagaaatangaaataataagacgctcacttacttgtagaaatt

SEQ ID NO: 46437 - DNA, 488 bp, Glycine max
  unsure (1)..(488): unsure at all n locations
gctgatcttctcataaagatctatcacttgtttggaattctggttctattgacttctttgctccttgttgaattggtttcctggatgattcctctagcttgagccctgtttgaaattcctcccttggttgaatctcggtggtcctctttggttatagccttggaatctatggcgattctgagctcctatgtagttcacctccttggaagaatcttcttgggctatgcattgccctggctcgtgtgctccactgcagatgtgtcatccccttatttgcatgactgaagagtgagagggacttaccacttgtagttgttgagggagcttgctgaggatctccattagggcctctatctgttgggccaatagcttgttttgggccagtgttgcatcttgngctgtgagttccagaaggcttctctttgtttgtgtgtatgctcgattatgaaggatggtgtgatcactagctgccatattctctatcagat

SEQ ID NO: 46438 - DNA, 429 bp, Glycine max
  unsure (1)..(429): unsure at all n locations
attataaacctttaatcactcggattacatttatgacaaagctatactaccatcgctttatacactacaatgcctattttctatagggtcgatggaacctagaaactatactaagaaatgggtgtcagtgtatacaaagcaacggtaataactttattagcgagatgattgaatttaactcaagttggattaaggttcaattataacacacatgtggaacaaaaaaagaagtaagtggaattactgtaaggcgacgtttggtctaagatttttttattntttctatgtttaaaaattacgattcctaaanaatgatgaattctgataatcatgatctttaagaatgactataatttgtttgattgggcatacactctcctaanaatattatataagtttcttggaaataaagtnttctctatctatctt

SEQ ID NO: 46439 - DNA, 378 bp, Glycine max
  unsure (1)..(378): unsure at all n locations
gcttccatcaagtggtatcagagcacaagatcttttattatgtgctccttanacctccattaattnnttttttgccttctcttccattgctgtttcttaatttttctccatgtatctcctcacatgtcttgttctaaatgttgttaacatgattctttagagtttccaccgattaaacttgctatagaagttagatttgattttctatggttcanatttcttgttcttgttcttgaaccatgaattgtgttgagattaggttcctttgagttttgtcttgatattttttgcggctgaaacctaaaccatataattcttacaataatattatagttgaagacaacctcataagtctagagtgactcgttcacctattgt

SEQ ID NO: 46440 - DNA, 397 bp, Glycine max
  unsure (1)..(397): unsure at all n locations
tcactntcgagcctctcgatatattacgggactcatttttatattcgaganaaaagngattggctttcgaatttgctcagaggttcaacattccctctcgagcgtctcgatatattactggacttaatcagatatccgagaaaaactttattgtcgtttgaattggctcagaggctcaacattcaatttcgagcgtctcgatatgttatgggactcaatcagacatcccagtaaacagttattgtcatctgaattggctcagagcttcaacattcaatttctagcgtctcgatatatgacgggacacaatcagacatccgagtaaatacttattgacgattgaatttgctaagagcttcacattcaattgtgagcgaatcgtttattacgggactca

SEQ ID NO: 46441 - DNA, 325 bp, Glycine max
gcttgttgaaattcatgtgttgtacatgggattctttatttcttacttatcccttttaacataggggtctagagcaacaatacttttgtttattgtgaaatctggaaccaattctaacactagtatgaaagctccaattcttggagctatggggaaatctttgtgcctgtgcaagaaatgacgagggttcatgatgtaacatcctgaatggaaggattaacagaaaattcaaaactttggagaactttgttgcacaaatcaaaggtcagaaaaccaagattcgcacctgatgatgtggaaaagagatgttagagcacataatggc

SEQ ID NO: 46442 - DNA, 487 bp, Glycine max
  unsure (1)..(487): unsure at all n locations
gcgtagcccaccatcttttcatagtagagtatcgataatgtgtctaccatcacgatcatcgtctccctttccatcattgggggtaccacctgtgccgccagatccctccaccttttgggcgtgttctttgaaagatccgtccccctttttgcaaatgttctgtagttgcatcctatccggaaccatatcaaaattgtactgatactgcctaacaaaggcaaccattaggtccttccaagaatggactcgggaagattccaagttagtgtaccaggtaacagctaccccagtaagactttcttggaaggaatgtatcagcaattcctcatcttttgcgtattcccccatcttctgacaatacatctttagatggttcttgggacaagtagtctccttgtacttgtcagagtccagcaccttgaactngggaggggtgatgatattangtactangaacaactcttctaggttagcaaaggcataatct

SEQ ID NO: 46443 - DNA, 380 bp, Glycine max
gcacccatatacaatcaaggcagcttcgtaacctagattatgtacacgtactgccgaggtgtatctgatacttacatcacacacattctcttggctgaatgtacatacatgcatactcaaagcattgtggggtaccagaaattgcacatgtgcacatcttggtatttctaatacctatatatacacaagcttcatgatgaatcatgactatcttcacatagaggtgctacactatatcccttgtttgaagtatttgctacctaaagccgtatgcagattcaagcatattttgctttgcggactagaattgtattcaaactaagaggtatatttgttagaatatgttctcttcacataacacgcaacatattgatatatat

SEQ ID NO: 46444 - DNA, 436 bp, Glycine max
  unsure (1)..(436): unsure at all n locations
gaaaagctagtaaatacttgtatattattcatttgcaacatgttggtataaaaaagtaacaacgataataaaattaattaaggcgtacccaacaagctttctcttgctttgaaaagtcattaatcgtaatgaaaaataacaattaaacaacaattaataaaagagaagtcaagcttattgaaaagctagtaaatacttggaaaatatccatntgcaacatgttggagtaaaaaagtaccaattatctcactaatgaaacttatatataaaaaacattaataaattaatcaacatgcacctttcaataagcgataataaattaatcaaagcgtataactagagacatgttgacagtaaatattaatcttcatctattattgatcttatttataaagaaactgtaatgaataatactatcatgttagaagtcgggtat

SEQ ID NO: 46445 - DNA, 429 bp, Glycine max
  unsure (1)..(429): unsure at all n locations
agtaganagagganacagacatggaaccttgtttttgtgtgttcttttcatgcttaagttgaaaaattaaaggaccatttcgttgctcaatacgttcttgaagatcatcccagattgctttggcagaagaacaatgtaagatactgacttgcatttctttggataaagaattaatgagccaggaagaaacgatactatcattgcgatgccacaaagcatgagtggagtgacccaaagcaggtttaggaattgaaccatcaacaaacccatatttgttcttcccatgaagagccatgcacattgctttcttccaagaattgtagttatcaccggtaagaggatgagaaactaaggcaatgccaggatggtcggaagaatgaagaatgaaggggttagaatcatcaatggcagccatggtcatgagataaa

SEQ ID NO: 46446 - DNA, 475 bp, Glycine max
  unsure (1)..(475): unsure at all n locations
gcaagcttcttagtgagttntgctccctgtgtgtcagcatgtattgccattatctgctcaataagatttgaaacagaagatctcagtatgactcattaatccaagttgcatacacacacaaaaaaaaaggtatcttcaacaagtgtaatcacccaggccaaaaacacactaaccatttcttagaattagagataatttaagcccaataaagtaaacacgcaaaaacatgcaaattcaccatatcaaagtattccccaaaatattcaaacaaaagaagtgaaaaagtacaattagtcactaccattgttgtctgttcaaaataactgcacaaaataaagggtgtttagtttttggaacttgctgaaactattccttcaggtttgatttctgtcatttcagaaagtaataacccaacacacaacaaatgtgagatccatttaaataatattccatagaanaaatgcacttgaaaatt

SEQ ID NO: 46447 - DNA, 463 bp, Glycine max
  unsure (1)..(463): unsure at all n locations
gtactctagagtgctaagctgctaattaatattgttcattcaactggttcacaatgaggttaatatcagtgttggaggaacccgcgatgattatatcatctacataaatgagattaagcaggcagcaaccatgtttgttgaatacgagaagagagggatcacacttggattgttgaaaaccaaaggagatgagagtatttgtcaaactctcataccaagcccttggggcttgttgtaaaccatatattgccttgtgaagtttgcatacaagagtggattcaccctgaataaagccttgaggtttttgcatgtagacatcttcatggagttgcccattaagaaaggcattgttgacatcaagttgaataaggcgccatttggaagtaagagcaatggtgaggacaattctcagtgtgattggtttcaccactggagagtangtgtcactgtaatcttgaccata

SEQ ID NO: 46448 - DNA, 417 bp, Glycine max
  unsure (1)..(417): unsure at all n locations
gcttccacgaagcctcatccgtgttcagcatgatacttctcacctgatgtgtagggcttggtcacgattgcctagtggtctgggtacatgtggacgtactggagtaagtagggtactcctccccctctggaatgatggcaggggtctccagaaagtcattcaatgtctcaacatcaaattgaatgactttcccttgcactcaatagtgctntggtgcaccgtcatctgggtcataggcattctcataaaagtccctcaccagagcaacgtcgatcctcttctttgggaggcgtataagccatctctaccactgtctcctttggagctccccatagaactcgtcgtacatagtggggtgagctccacattcctctccgaaaggatgttctggaggtgaaaattatcttggtatctatg

SEQ ID NO: 46449 - DNA, 265 bp, Glycine max
  unsure (1)..(265): unsure at all n locations
atggagaagcagcggaaggcaaattataagaggagaggggacgcaccctccactangaaataagccatggaagaaggagctntaccacaaagaatgtgtcttggataagaagcttgaatatgatgctttaacggaggaaaagaaagagagaaggggggagcacaaaattgaaggaataaaagagggagaaaagtggaactttgaagtgtgtcttataagactttcattcatcaatggtacaacaagtgttacatatgcttttata

SEQ ID NO: 46450 - DNA, 545 bp, Glycine max
  unsure (1)..(545): unsure at all n locations
cgcacgacgtttgatgcatcgttgncagtacanncnnannnanagaccatacganccanacgngnggaaatnggaatacatcatgatccatatttattttttngttnaactctacgcagccatacaatggataccgaaagtgtcaatcactccatcaacttaacttcaatctcattaattgatgaaaatgacatgtctagaagttaagcatagaatagaatatttcaagtatctgtaatgctcagtcgctatggtgccagtatgtaacggtaatttttattgaagagtagtgcttgagatcatcagtactaatatcagacgattagttcttgcttaattctacttggatgcatcttagcttgttgggtgaatctctacaatgaacgagaaaggcgttcacacacacgcacatattcacactctctgtcactacttcgcactcgctcgcttatttagagacagtaatatgaggtcaccttttgctcttgggcatcacaagaatcttgtcgatatctagatcttcacttgagtaatctgctagtccg

SEQ ID NO: 46451 - DNA, 366 bp, Glycine max
gttccatctatatctcatccttatcattattatataatggacatccaccgccactattctcaggcttgtaagatacaagtacattgaattgcaaaaaaatatatggaacgaaatgcacatataacttaaccaatacattcagacctaataaaaataatgtctaagtagtgctaatgtatggtaacccgaaaaagagatgcatctttgtattcatggaatgcatctaactgcacattagcttcctcaaaataatgggcaccgacctgaaaatgagatgaaaataatcatgtttaacagccttgctttgtattattcaaatcaatgcattataatctacataatattacctgcatattaccctgtact

SEQ ID NO: 46452 - DNA, 281 bp, Glycine max
  unsure (1)..(281): unsure at all n locations
cgcttagcaagtnttggttaatgttaggtacataaagaacatgtgatattaatttgctatctgaacacgttgaaagtgtaacagttactttttcttttattggaatatacccaccattcccaattgtgaccattgagacattagatggcttcaaatgtttaaataaagacctatcatatgttatgtggttcgcacaacctctatcattcagccatttttcacttgattgagtactcaagaagcatgaggccacaaacaggtgatcctcttatttttgatta

SEQ ID NO: 46453 - DNA, 365 bp, Glycine max
gatgcagatagaagggctgcagtgattctctctctcaggctggaatcagaacatgggtgaagcaggtcagagaagcctcatttccaatagaagatgtgattgatgaatacctcagggtgattcatggggtccaacatcttggatgtggggcttcaatttgcaagattacgagcctcatcagcacagtgacttctcgtcatcatatagcaactgatattgatgacatcaaagtgtcactttctctaatcacggatagaagtgaaagatctaagtttcatgtttcacaagaacaacagtcaagcggcatcactgaagcgatagaacgcatggcatggcctgattctacaatgagatcccttgtcatt

SEQ ID NO: 46454 - DNA, 409 bp, Glycine max
  unsure (1)..(409): unsure at all n locations
atgacatttacatttaagttctctttcttttgatcgctngattgacttagaagctaaagagactgaggttaattctcacaatctctgttctagttntaccctcgatatttgttttcaatcaacttgtcagtttaaaagtctttgtttttcttttacttccctccctttactggttcagcttttaaagaaaggggtgttgcaatcacatagattaaacagtggtggccgttcttctattggtcttgatgcttcacaaggaatacctcatcagaaatctctcaatgataataaattcgtttatcatttcatacaacaagattcttcttctagcctctctggagatattgatgcgtcttctagtgcctcgctgaaaaatgatttagatttcacacttagaagaggagatcat

SEQ ID NO: 46455 - DNA, 216 bp, Glycine max
tcgatgaaaatatggtgctactttttgccttattggataatctgtgcgctagaatctgaatctattgtgctcatgaacaatacaatcatattaagatatattatgacccttaaactagataaatagaaattagtggtataatttatggaattgaagttgattctacacagcctggtttggttatagacttatttatatcactgaacgatctgcttt

SEQ ID NO: 46456 - DNA, 223 bp, Glycine max
  unsure (1)..(223): unsure at all n locations
acagagaataaaattggtatngatttatttttctnttttatgangattatctttcataagtttttatattctttnttaacacacagcactttgtggnggcaacaccttgttttctatgggaacaaaaacactaattattttgacacattcaagtaaaacacaaaataattccttatggggggcaattgcctccataaacgccaatgtacatctgtccctgact

SEQ ID NO: 46457 - DNA, 441 bp, Glycine max
  unsure (1)..(441): unsure at all n locations
atgcaagcttcaagctgacagagacttcagaagtttgnnatannctacttgaagctgtgagttttcattgatatattttacatctattcaagctcacttacttcagaatgtctntgaaattgctgttttttttttaccatatacccgatttgaaatatcttgttaaatgtatgtctttatgaaaattagttaaggtgataattagaaggattaagccatatatagtttaagtgcaaggttctaaggccaaagtattatttggaaacaatatttgtcttcatatgaatttgttacccttcttcgggtcttcctctccttagttgccattttcatggccaccttggctgacttgttacactttggctgacttatatatatcatcaaaccacttaaagcacaagcacatgtnttatctgacagcaactgctagccacctcacat

SEQ ID NO: 46458 - DNA, 459 bp, Glycine max
  unsure (1)..(459): unsure at all n locations
tgcatcagcagtttctcgtccctagagtatgttctcattnttcggcaatacatcgtcaggtgattnttggggcaagtggtccccttctatttatcaaaatctggtaccttgaactttggagagatgacaacatcaggtaccaaacataattttgtcatgtcagtgaaagggtaatcaccaaaccctttgatagccttgtcataccctaatttcgtccggggacgatcgttaaccaacatttggattcttgtcggtcgaattgagctgcttaacactaattgtcgtgcaatccgtagggttttgtgacgtttcagaaggaaatgtgtgaaatgttcaaaagagggacaaaatggtcacttttgggacattntccaacccgtgggcctactagaagacttagagatgaagtaaccagctcacctgngcgagcaagttacttttggaggaagcaagcagctc

SEQ ID NO: 46459 - DNA, 422 bp, Glycine max
  unsure (1)..(422): unsure at all n locations
agcttgngatgaaacagatgtgattcatcaaaaatttcttctctgctgagtagaactttcttttcggatgatgaccagatcctatagcctctcaccccatcaccataacccatgaacagaccctttcttgatctaggtaccaactttccttcattgacatgataataagcattgcagccaaatactcttaggtttgagtagtttgttgttttgccattccaaatttcaataggagttttaagtcctatagcagtagagggtgttctattgattagaaaacaagttgtattgatagcttcttcccaaaaacttctgctgagaccagcattatacaatagacatctttgtctttccagaagtgttttgttcattcttttagcaactccacttttctgaggagtgttactaacagtaagctgtct

SEQ ID NO: 46460 - DNA, 476 bp, Glycine max
  unsure (1)..(476): unsure at all n locations
agcttttgtanaaagaatgtgactcttcacattttattttgaatttcaacgttcaagtacactagtaatcgattaccaaaacattgtaatcgattacaactttttgaaatcaattggaacgttgtaaattcagttgaaagctttttgaaaaccattttgcatactggtaatcgataacaataatctggtaatggattaccagagagtaaaaactctttggtaaacatgttttgagaaaaatccatgtgctactcaatttttgaaaaaactttttcatacttatcttgtttaagtcttctcttgattcttgaatcttgagtcttgaatcttgatcttgattcttggaagcttgaaccttgaatcttgattctttattcttgaaatcaaatttcctcttgaaccttgaagtgttcttgattcaatcttgaacatcttanattcattctttgattcttntatcatgaagtgttcttgac

SEQ ID NO: 46461 - DNA, 534 bp, Glycine max
  unsure (1)..(534): unsure at all n locations
aggcatatgttgtgcttcgacgattcggacntatgatactaacgttctcacgaaggttctcaagaagctattaaggaagctcgttattgtatattataagcacgcgggacaactcgggtaactntcatgaatgacagccctgtcagacacgactcacagtgcaacttctgtgcttatgcttccttcaattgaaggctacggcatgcttcttattgtccctatttcaagcctacattgaagacattgactcatagcgattactcaggctcacattgggtgcgaagctgcgtgaacaatggctcatccgctagaggatgacgaactctctaacataagcctcttgggattacctgacaactccatggggagagataccatggaaggacctgcctgagacacatagagcatgactcacatgaatcatgacaaaaattctagaaaggaattgtgttcattatggacacatcgacaaacattaggtgagggaggattataattcacatataagaacacaagatatagattactgatacg

SEQ ID NO: 46462 - DNA, 385 bp, Glycine max
  unsure (1)..(385): unsure at all n locations
agcttgtctacacctttctcagaacacactatttccttcatattttgcggntcangctcttatatctcaacaatctaagctgaaaaatacactccatatgactgccagtacatgtttatacaatgattcaccttgcaactccagtggtgctgctcaaaagggaaagaaaaacaaaaccattgaacaagttgtgttgcattctagcaattctgatatttctacagacaatgagaaactcgaagcacatttacaaggaatgcagtggagggtcatggaattagagaaattctgtacgaaaatgcacatccaaatggcaaagatcacataatcaaaagcatcatgccatagttatgcaaaatcttngcccaagctatgctcatgacac

SEQ ID NO: 46463 - DNA, 449 bp, Glycine max
agcttaacatgttgtgcttggctactctcaatgatttcatgttgatttctaaaggaaaaactacttcatgctcgtatgtcatccgaaatacggtacaaccagttgctttggtgggcatatttcgacaagcccataatgcttcttgtcatattttcagatgatcttataaattcttcttaattatatcaatcaagatcttattggtagcttcaactttctcatttgcttgtttataataatgtgttgaatgtacaagcttgatgtcgaattgttgtacgaacaaattcaccttgtctccagtaatcataattccttggtcagatgtgatagactcacgtatgcggagcaataaaataatggtatgtttaatgaatctaaaaacaacttcttgagtcgcaataaccaatggcttagcttccacccatcttgtaaaataattagtggatact

SEQ ID NO: 46464 - DNA, 475 bp, Glycine max
  unsure (1)..(475): unsure at all n locations
gagnngcaagagacatgttagagagatctcttgantttgcatttgcaannacctnnggntggctttccctgcttaaacatcttagaactttgcccatgaaatccttattaggaaatatctttcctaatgatgcaagatgaataactatatgtgtaaatctcttttgcatatcttgtatgatctcattttgattcattctgaaaagttcatattcatgtgttagggtgtttattctagatctcttaacatctgttgttccttcataggttacttgtaatgtatcccatatttcttttgcattcttacaatttgagactctaaagtattcatccattcctaatgcagaggtaattatatttttagcctttaagttatattgtaccctttntgtttccccttcatcccactgtttcctaggtttttctatagttgcatttcctactaccattgtggggatgtaaggaccggtttcaat

SEQ ID NO: 46465 - DNA, 476 bp, Glycine max
acccagctcgcccaggcgagctaggttgcttcctctataaggcgatgccttctagaggaacttcctggaaggcccaagtgggcctggttgctatttgcacccacctgtttactaaatacaccccctgtctttgttgctgattctttttccgtaacgttatggaactttacgaattccgtaacgatacttgttttctttccgtaatgttacggaaccttacggattacgtaatcatccccattttggctttcacaatgttacggaacctcacagattgtgtaagaatgcttccttttgattttcggcatgttacgggacttcacggattgtgcaacaatgcttttttttttacttccggcatgtcacggaacttcacagattgcctaacaatgggtgccaagtacctcgaagcggtcaagaataggttgcatgccattaaacaatggtccctgaaacgaaatatggtatgacaatta

SEQ ID NO: 46466 - DNA, 481 bp, Glycine max
  unsure (1)..(481): unsure at all n locations
catgacaagtntagcattctttcaacaaatttcttcacatataactatcataaagcataaacctagtaaaactacccatcatatctcccaaacaccccatacccacgaaatttatgtgagaagaagtctacctaagcctgaaatttgaagtcccacaacgtagaggtgcgcttcacaactccgaaaatggcttcctttcgcgatttggagcagaaatggtgtgcaaaggttggagctttgatggagcttcaatggtgaggaagaagaagggaatggcaacgtgagagagagagagggagaaaagcttctgaatttttttttttggttgagtgaagagagagaacgtggctntntagtttaaaatgcttcctctttttttaaaaaaaaaaaaaaagctgtgccacatgtcttcttttgagtggagcananagggcccactttntctcttgatgtgactcatactcagccacaagaagagaaa

SEQ ID NO: 46467 - DNA, 283 bp, Glycine max
agcttgacagaatgactgttgctatacaaacttctattgcttcgttatggcgacaactctattaccatccacaagactattatgcatgacaatgctgtaaaagggaaatacttaattttcctgacaagccgctatgcatgcaatatgtgatgaccagctaaccctgaacagtatagcccccctatatgccgggagtatcatcacgtgatgtgatactacgctgacattgagttctgacacactgctgtgggacaacaacagaacaatagctatgacaaacaga

SEQ ID NO: 46468 - DNA, 460 bp, Glycine max
  unsure (1)..(460): unsure at all n locations
gcttgtgcattggcatcatcataaggtggaatgcattctctatcaacaaaagcttcctcatcgatatagcttaccctatntactgttgatacatccaaaaggtagtggttactggtcacccttggcactatcagcatcatcttattcatacacttgattttgtaccctttccttttacacaacctttttatggaaaacaaaatggagtaaagagggagaactctctctccttttgcttcataaaagtaggtgtaaaagggaagtgtagaaaccaaagtgtaagagtaacatttgtgtaacatcatagtcaatcccaatcaaccaaagaagtggaaggcctaccatataagtatgaatttccgcactctgcctcatgtctggattcttcatttacagaaatggcagtatcacagtcttccataagactattgctgtctttggcagattcaggttccgagct

SEQ ID NO: 46469 - DNA, 444 bp, Glycine max
  unsure (1)..(444): unsure at all n locations
atgtctggatatactgtcttctttccatgctttagnngtangaagctngngnnnnnctcacagataggacatgcatgatgccttttcgcactgcctccacttaaatntccatattctagaaaatcattaatagtacaaaacaccattgtgcgtaacctgaacgtctgctgcacatttgcatcccacgcatctaccccttcttcccacaattgtttcaagtcttcgattaacggcgtaagatacacatcaatatcattccctggctgccttggatccgcgatcgtcatacacaggataatgtatttacgcanaatgcacaaccatgtgggaaatgtgaaatcatcagtaaataggcacgaactgtggttgctgttaagcaccataagataatctcatagaacaagagcagccttagttcttgatcatccaaacttaatacaacat

SEQ ID NO: 46470 - DNA, 318 bp, Glycine max
agcttctcactcggatgtccgattccggagcataatatatctagacgctcgaaattgagcaacggaagctcttgagaaattcaaatggtcataactttccacatggatgtctgattaagacgcataatatatcaagatgttcgaaattgaacaacgaaagctctcgagaaattcaaatagtcataactcttcactcggaggaccgattcatgcgcataatatatcacgacggtcgatatagaacaacgaaagttcttgatagattcaaatggtcatatcttttaaccctgataacctatttagagacattacatatag

SEQ ID NO: 46471 - DNA, 308 bp, Glycine max
  unsure (1)..(308): unsure at all n locations
ctacaaccttttctccccttggtacttattaagccaaagaactcgganatcaacacagttataacaatggagtagcaccacatccgtatcagagtattaaatacaataagccaaactcataatcaataaaataatcaaaccagaagtcaaataacataaaatgtcgacaaccacaaaatatccaagactgaaacacaagacaaataagcaaagtacttagcataataatgtagattctaagacactaaaagccataatacacggcttataaaagatatataagcagaatctaaaatctaagaagacgg

SEQ ID NO: 46472 - DNA, 137 bp, Glycine max
gacaattgcatgtgctactcaatttttgaacaaactatgtcatacttatcctgtataagtcttctctcgattcttgaatcttgagtcttgaatcttgatatcgattcttggaagctagaaccttgaatcttgattct

SEQ ID NO: 46473 - DNA, 92 bp, Glycine max
  unsure (1)..(92): unsure at all n locations
agcttgctcacactaagcgcagagaccncttattgattgtgtgaatggatcaactaagtgcacatcgctgcgcttagcccaacatcttcact

SEQ ID NO: 46474 - DNA, 339 bp, Glycine max
  unsure (1)..(339): unsure at all n locations
agctntaattgccagcaacttactntgttaatgacgttgagctagtaaggaaaaaagggttcagttagctagctagctaggttgtgctctctctatttaaatcaagagtttacctgtgtagtagggttggcagaaaatctagatgattgagaagccaagtgctgaagagcctgaacaaatgcagtttgaccaattgtggctctatattgccagtaaaatatgacatatttccatcctctatccttccactacattaatgttctgtcaatgtcattttcatgctttgatatgtaaggcctcaacagagtctggttaacatatcccgtcccgtgcatgatg

SEQ ID NO: 46475 - DNA, 165 bp, Glycine max
aagagctattcttctcaagaatctttaagaagtggaacacccacttaaagatcttcaaaaggatcatgttgagctgaatgaacttcatgactatcaaaaagaagaaagatatgatctatggtgagaatgcacacaagcacacaaagattatgaacaccataaaat

SEQ ID NO: 46476 - DNA, 260 bp, Glycine max
  unsure (1)..(260): unsure at all n locations
agctngcatttggaattgcgaaagccccactccattattattattagtacctgacatctcanacaaacaaatcaaacgtaacaagacaattatagttgctggttgaatacctcacccactcaagtgtctcacacaattatggcttttctctaatgaaacactcttgccttttaccactctaattccccttgagttcttatgcaattctatagattttggcctcaacacggaacaattcatccatatgtgtaaggcaaggc

SEQ ID NO: 46477 - DNA, 237 bp, Glycine max
  unsure (1)..(237): unsure at all n locations
cccccaacagccaacaagtcagccaccatttggtctcccaaaaggctgatgcctaggttgccaatagggcccttattacaacttgaactaaagcccttttagttgattaacccacaacatattnttggtcagccaactctacaaggattgggccattatttagacaaactaaacactctaatattgaaataaagtggcgtcatttagtcctccatttgggccatgatacaactcaca

SEQ ID NO: 46478 - DNA, 522 bp, Glycine max
  unsure (1)..(522): unsure at all n locations
aggaacatgttgtgctgagtctctcgacgagacccaagagtcgaccagcngcatgcagcttctgcaattagaaatacggacgganntagttgtgattcatagancngcaaccggcaaccatcaataatctataagagtgacttacccacccccatatgatccagtagtgggggagaatgagtctcgcgctgttctacttgagattggatcaaatatataccccatgcagacgtgctgaagcaattgtacttaatcaattctctgttaacgtgaaaaaaaaatagacttaccaccgaacgtatgagagggatgatccattaacttccatataaaaaaattccgaccgttcggtcgtgtcagaacctctgtggaaattaagaggaggttatatataagtacgatagcataaagagatttttatgaaaataatgggaagaacatcggacgtttctctataggagtctcatatttaacagagttgagtaaaacatacgtaaactagcgtaaataatatgtctgacn

SEQ ID NO: 46479 - DNA, 384 bp, Glycine max
  unsure (1)..(384): unsure at all n locations
atgtcagcttcccgccagaactctatgggcngattgtgtgatttattatacatcaanacaagccccttaaaaaaagtgacttgacaaaaacacgccctaaaacatgagaaaaggaacacaatcacggttggggattcataggcaagttaccagcctttcttgttctgaagatcgaccagcgaaacagcttttctttattcttttaattgcaacatgcgatcctctccattttccatggtacacagtcccaaacgtaccagaacgcagctctggcaactcttctagatattcattctttatgaactgccatgtgcactttanatatatgtgataaattaaatgtcactaatcttatgaacgataatctataatgtgatttgagaa

SEQ ID NO: 46480 - DNA, 207 bp, Glycine max
agcttgctcgaatgtaagaggcatcttcttctaccttggtaatccttgaatccatctcatcaaatctcatgtccactagtaactctcaagcatcaaacctatcaccaacataggtttcaagaccatctaacctgtccaaaatcttttgaagaatagaggaatcttctccaccttgttaatgcccttctccatcattgggctgagcac

SEQ ID NO: 46481 - DNA, 481 bp, Glycine max
  unsure (1)..(481): unsure at all n locations
gcttacacacctacaaagagaagtcttcttgagctcacgtctcaagatgcattactagctcanaacaaactcttagccaagcagattgagacccttacagagaccctgaacaagcttcctcaacagttgcatgtagtgcatcatgctccttcttcagtcatacaaattaagggatgcaacatttatgatggagcccatgagtcaggaatgtgcatggctcaagatgacatatccaaagaagtcaactatatgacaaatccgaaccagcaagggttcaattatggnggacattcaggataccaacagggggtaaatttctctcaaggccaaggatagagatcccatcccgagactaacttcaacanagatgaaagtggtccatctatcacgcctaccaatcaagggcctaatctttatgagaagaccaccanactagaagacactntgactcagtttatgttggtttctctattaaatcaca

SEQ ID NO: 46482 - DNA, 456 bp, Glycine max
  unsure (1)..(456): unsure at all n locations
tactaagctctacctcggttgtttttctttaaanaacaaaggaactcatatcttttatctgaataaccccatttagaatatgcaaactacctataaattgatgtcacctacagactttcacattgacccaaagaanaaacagaaatttgacaaaattntacataaaaaaaggataactggataagttcccaaattttagtctcacgtgctgttacagagtatgacctgataatagtggcattntgcanaactttcanagataaatcagaaagttaagcacatntattttgcaagtaggctacacctatgaaagctaaatcgcagggttntaaaaaattgtccgcaaccncagttacggttgtaatgtcaaggatttgggatctcaaatgtggattcactagccaaattaatcgcaattctccacaatattaaaaatcgcaacaaagtcataaccac

SEQ ID NO: 46483 - DNA, 411 bp, Glycine max
  unsure (1)..(411): unsure at all n locations
agcttcttagtctcggctgatgaagatgaattcgtggctacttcatgcactcccctaatgacaatagcatcacttctggcactaaattgctgggagtttgaagccatcttctcaattaaacttctagcttcagcaggggtcatgtctacaagggctccaccactagcagcatctatcatacttctctccatgttactgagtccttcataaaaatattggaggagaagctgctcagaaatctggtggtgaggacaactggcacatagtttcttaaatctttcccagtattcatataagctctctccactgagttgcctaattcctgaaatatctttcctgatggccatggtcctggaagcaagggaaattntttctaagaatactctcttgaggtcatcccaacttatgata

SEQ ID NO: 46484 - DNA, 345 bp, Glycine max
  unsure (1)..(345): unsure at all n locations
tgttcatcatcggaatctcgttagacttcttggntgttgcgcatatgccccgagagaatcctagnttatgaatatatggcaaatagcagccttgacacattcttatttggtaactcacttcaaccatcaatggaataatatgttgaatttttattgccttttcttctcttctccacaatcttacgtatatataaaaacatgggaagcacgttccaaaaaaggttccctcaattggaaacaacggtatgatatatatttgggcacagcaaggggactagcatatctacatgaggaagtccatgtgtccatcattcataaagatataaagaccggtaatatccttct

SEQ ID NO: 46485 - DNA, 310 bp, Glycine max
  unsure (1)..(310): unsure at all n locations
agctntanaatntgaattacaacgtccagaaactgctggtaatttattaccatatatgtgtaatcgattacacagtgcaaattntgaattcaaattttaatagctgttgtaaatcagttttggccattggtaatcgattacatcctgtggtaatctattaccagagagtacatgtgtttgaaaaatactttctaacttaaagttcttggacacactcttttgctactccaattggagatcccttcctatttaatctactcttgcttatactctagagactgtcttgatcatccatctagaatatctttaa

SEQ ID NO: 46486 - DNA, 403 bp, Glycine max
  unsure (1)..(403): unsure at all n locations
ataccttntngtatgagtatgctttagcaactattcttgttttgttacttacaactntaccagtttcatccagtttggtgggaaagacccacttcgctcctacaactttttttcctttnggcaattcaactaacttccaaacatcattcttctgaaactgatcaagntctgtttgcattgctgtaacccatttgtcatcttccattgcatcaacaatgtggttaggtgccattttagagaccagcgcaggaagcgcttgtgttttgagtgatgatcttgtttgaacatgatctactagatcaccaatgatttgactatctggttgatttattctcatgatgcatccagtgggttactcgaccgtcttctgaactatctgttgagaggacactttctatcctgg

SEQ ID NO: 46487 - DNA, 472 bp, Glycine max
  unsure (1)..(472): unsure at all n locations
agcttattagtggaaaaataattcaccccttcttaagttattgaggtcgctggtccaacatttgcaatatctaattctacttttaagttaagtaaaatgtagttttcaatacgtgagattatttgttttgtttgatgcaggctgatgataatggagatggaaagttgacactcttcccttatctcatttattttgttgcaatcaattttgtcttgtatgtttaaagaacattattaaattgattgctgcttcttctgcattcagagtctatcatttagaagggggttaaaagcttattagtggaaaaataattcaccccttcttaagttattgaggtcgctggtccaacatttgcaatatctaattctacttttaagttaagtaaaatgtagttntcaatacgtgagattantttgtttgtttgatgcacgctgatgataatggagatggaaagttgacactccaagagatg

SEQ ID NO: 46488 - DNA, 429 bp, Glycine max
  unsure (1)..(429): unsure at all n locations
attaacaaatgtactgttttcttggaacttgatacagcacgcgctcgaaaattatagtgctagacatagtgtgcagggttctagtttttattatgttgtgcttataatgctgtttaaattaggctaagttcaacaagagacatctatgaacgaagcttagtttaaattagtccaaactcacgagacatcggtgttggtatttttgtcctcagcatagaacataggaataatttcaaatagagaaaaaccctaattgcatcaagtatctcggtggaaggacccaacgcttttacttatttgttttcacactcaattattcatgtttactgtttctttgattacaatagaaatataccttgttttcaattcatgatacttaattctttttacaaacaattggtatttgaatgactctnttccaagtaaaat

SEQ ID NO: 46489 - DNA, 161 bp, Glycine max
  unsure (1)..(161): unsure at all n locations
agcttatctctaacanaattgtagctctgttgcttatcttttgttggactactcatatgccccatttgaatgtatatagcgtcctgtacatcctacaccacacagataggtcaagctagcataaagttttaaagtaagtaacaatgtattatgtaaggtag

SEQ ID NO: 46490 - DNA, 533 bp, Glycine max
  unsure (1)..(533): unsure at all n locations
cggcacgattttgttgatactgtagtacgnacantatatantactaagttctgctcgattagttntcaccggcgaaagaatcgaagtgggtctatttttatgctattttttaccatccngcttngacgaatggaaagcctatggcgactggccaccaccacaccaatggagaaacccatgttgttattgtctttcatattggacactcactctaccatgtgaatacacccataacgcgagcgaaggaacacctttatatttccacccatcttttctgactaaacacccattaactataaagggactctataacatattaaaagtgtccgtctgccgcattgctttatctggttattcttgtccagctgtcaccgtttgaattcttatctccgtggatctagtgatccccatcccttccctgacgtatggtgagatatccttcactttgatcagatcgtacactttttcctctctcaattctccgatcactatcttcttggttctcctgcactttctcaaattacttcactttn

SEQ ID NO: 46491 - DNA, 421 bp, Glycine max
  unsure (1)..(421): unsure at all n locations
agctngagatgaggaagtgttgaagggtgaaactttctgcntttattgttgaccacagagtggtacctgtagatatgtcgcggnggtcaggagaccttgcggacgtcaggtggggtgctattgcccaaaaccaagcttgaccaatcccgacccaacccgggcatagtcggtcagtgagaacctgtgatgtacctaagcaggcgagctcctgtcagtcaacagataaaaggaacaaagaccacaaagcaaggaggcttgtggtggctggccagctgtgaaacttgactgatatgtgagatatgatctctggtaatcgattaccaagggtgggtaatcgattacaaggcttaaaaatgaagacaggaggctaagatggtctctggttatcgatcaccaccgggtgttatcgattaccaggctt

SEQ ID NO: 46492 - DNA, 397 bp, Glycine max
  unsure (1)..(397): unsure at all n locations
cctgcgaaggcaatacattggaaagttatttttaccaagaaatgctactctntaaacgaaaatggcatacaacctcctccaataaagacaaacatcaatgtaaatntagagcaaactcatgcacatacttccttacgaacattcactcgcacaagatattcttctaactaagaaaaatgaacccacgcacaatcaaagcaccttcgttacctagatcacttttatgtacttccaaggtgtatntgctacctacatcacatgcatttcctttgctaaatntacatacatgcatactcaaagcactttggctaccaaanatagtatatgttcacattctggtatttctaatacctatacatacacaaacttcatgatgaatctnggccacctacataat

SEQ ID NO: 46493 - DNA, 397 bp, Glycine max
  unsure (1)..(397): unsure at all n locations
ggcattatcagttcatcactcactttttaaaaattacttataatatgttgtttctaattntgtatatttgaaatgctgtgtctcttgattctaatagttattaaaaaaaaaaaaaaactgaacctggtgagttgcaggtggagaaaacctcgaagttgataagcgtgctcctggcgaggcccggaaactcgaaggatctcggcgactcactccagattngtaaggagcagtacggcaacatcatggactcgatggcggaggccaaaagtcaagtggctcagcgcaacgtcatagaggcacgtttcaagttcagctccgttgtatcctactatgaaagttgcaatgattccttcaccaaagggacctcgccgattgtcgaggaggcgcagggcgtgta

SEQ ID NO: 46494 - DNA, 476 bp, Glycine max
  unsure (1)..(476): unsure at all n locations
tgtctctgatcaaacacattgtgctgtacagaaagtttctttataatangaattctccccanaaatattanggttgtcaagactatgaagtcaacttcattcactntgttgccagagtcactggtatcttccattcacacagatgttcaaaaaggattggttccttgttatctttgtgccactgtgggaacaacttcaaccactgcaattgatccattangaccactgtgcaaggtggcaaaagaatatggcatgtgggtccatgttgatgctgcttatgctggaagtgcatgcatttgtcctgagttcagacacttgattgatggagttgagggtgcaaactctntcagtctcaatgctcacaagtggtttctcactaacttagaattgtgctgtctttgggtgaaggatccagcttctgtgattaagtccctatcaacaaattcagtgtacttagaaaacagtgcttctgattc

SEQ ID NO: 46495 - DNA, 469 bp, Glycine max
  unsure (1)..(469): unsure at all n locations
agctntcatctagccaagattatacaaaggtgttactaaagaaactaacgattcctaattatatgggccatcaaatctatcatgtgctgacagtaattgattaccccatgaatctcctcgggggcagtacacacttcggccatggcttttgctttggctaatagacgcgggaggtcttgactcccattcaaagtcaaggcgaatctatccatccacatagtcgcttcttgatgcaacgcatcaatcaccctccctcttgcttctttatcggcatacacttgtgcaaaatcctccactagctcttgttcatgggccgtggactggttcaattcttccttgtattgccctatgatggctagcatgctttgctcggtggcttccaagtgttgagctaaattccttatggaccttgcgcaagcaactaactcttcttttaagatcatgccatgcacccgtgaccgatctcttt

SEQ ID NO: 46496 - DNA, 434 bp, Glycine max
  unsure (1)..(434): unsure at all n locations
gtgcgggtctgggagacgaaagtcaagtggtcgcgatatttgattatgatgttccaagtaccttggatttggtccgaccatgccctcctgattcccagctgggaaattggcgggtggaggaacgccccggcatttacgcaacaagcataatgtaaacctttacggttttaaaagctctatagttgggcctaggctttagagttttcattttgttaaggctatgtgtcttttgtctttgaatatataatacaaggatctttcttcatctgatcctggtctctacccattctcattcatttgcatgtatacttctttgtctgaaacggcagattcgatgacgagtccnccgaatgtactaatacctgtgacccgtctatcaacttcgagcaagaaatgaaccagactgaagatgaatgagatgaggaggtgggact

SEQ ID NO: 46497 - DNA, 478 bp, Glycine max
  unsure (1)..(478): unsure at all n locations
agctngaagagagttcttccacgccagcacgcgcctaacgcatatgcagctcgctaagcgagatagttgtcttttctgcgctaagcgcacctttgcaaacaggaagcccttttttttaagcctgatttgcggagaatgaggaggaggcaaaaaatacacaagaaggagtaaccgtcagagcttgaagagtgaaatacagaggcaaataagagagcacgaagccaagttttgatcttttaggaagatntgtgagtttttgagtgattgtgacattcctagaggtggaggagacatcctcactcctttgtaagcaagcaatttctcttaattcctcttcttcattggaaaatgagtttccttgctatggaaggctaaaccttcagttagggattcttactgagtaattgatgtaaactctctccctatctaattaaggttgttttatgtgttcattgtttctatgagcactntattattg

SEQ ID NO: 46498 - DNA, 479 bp, Glycine max
  unsure (1)..(479): unsure at all n locations
acttcatttggaatctcgacatttcttccatctgaatgttgtctttttctcgctcccgtaactcgtccatgctgctggaaagcttcttgcacaatctgttagcaagtttgccaagttgtagggctagcaacatagaatgcaacgccacctcaggattaaggttcctaatttggacaacaagctgaccaaatctgcccaaaatttgtagagtggctcttcgtctacctggcttagactagcaagggcggcagaagtcacatggtgcgatcagcttgtcgcatattgagagctgaaatgaccgacaaaggtatcaaaactatcaaaaggtcggggaaggagtgctctataccacgtcaatgcagctcccttaagggacgtanggaagaatcaacataagactgtgttttcattagtgtagaggttggcctgagtgaggaatgcatccaggtgctcgtctatgtcggtggtctcgttgtaac

SEQ ID NO: 46499 - DNA, 403 bp, Glycine max
  unsure (1)..(403): unsure at all n locations
gctntgaatgcactattcaatggagttgacttgatttcttcagactgatcaacacttgcacagtgtccaaagatgcatgggagatcctgaaaatcactcatgaaggaacctccaaagtgaatatttccagattgcaactcttggctacaaaattcgaaaatctgaagatgaaggaggaagagtgtgttcatgacttccacatgaacattcttgaaattgccaatgcctgcactgccttgggagagaggataacagatgaaaagctggtgagaaagatcctcagatccttgcctaagagatttgacatgaaagtcactgcaatagaggaggcccaagacatttgcaacatgagagtatatgaactcattggttctcttcacacctttgagctatgactctcgga

SEQ ID NO: 46500 - DNA, 382 bp, Glycine max
  unsure (1)..(382): unsure at all n locations
agcttatgctgcanacatatacaatagacctcctctacctcaatagcaaaatgaaccacaacagaacaattatgacctctctagcaacagatagaatcccggatggaggaatcaccctaatctcagatggtctagtcctcaacaacaacaacaacaacctgctccttccttccaaaatgctgttggtccaagtagaccatacattcctcctccaatgcaataacagcaacagcagcaacaaccctagaaacagcaaacagttgaggcccagaatcctgacagattaccttctcaatctgtccagaatcctaagaatgtgagtgccattacattgaggttgtganagcagtatcaaggacctcaaccagtatcatcttcctca

SEQ ID NO: 46501 - DNA, 377 bp, Glycine max
cttatataccccctgttgacgtgcttaccccccctacttaagtcatttctcgcttaacttaaaaataaaataaatttccaccgaacgtttgaattgtattatccgttaacttcggttaaaatgaattccgaccgttcggtcgtgccgtaaccacattggaaatcaaaaaagaggtaaaaaataatataataataaaaaagacatcttttagtaaaataaagcggaaaatcaatcggacgttgtctctttgggatttctcattcttaatcgaattgattaataactaaagtgaaactaaaggctaaaatcaattcgcctagtcaagctcgtccataaaaataggctatcgaagtttgtcatttcatttttctcactaa

SEQ ID NO: 46502 - DNA, 373 bp, Glycine max
agcttcttggtgggaaagatatattttctgatgatcatcagacaaggagcagcagaaaatttcttatcacgccaggtctacttgaccacagttcatcgctgcttctttttcgaattgcatgaggtcaataggtcacagatacgaggacaaagcaggggtatttattgtattttaacttgtaaatagcacaattggctatgaaagaaaaagaacggttgcagagtcgctccagttattttgatgtcttgctaacttatattctaaggaatactactgtagaataatcagagaaatgtggggctagtgaaaataaattggtataaacttataattggtactagtattgtattagttacttatataattgaagcca

SEQ ID NO: 46503 - DNA, 413 bp, Glycine max
  unsure (1)..(413): unsure at all n locations
tcttaattctattaatccctacccacgcaccctctaataacttattcacacatacatgacaaatctaaaaaggtgtttaagaacacttacaataagactgcatataatggttttgtccacacatgttttgtgtacacaaactcaattagtgagtgtaatatatgcagcacctaatttggacatgatcttccaccaaatagaagctcccactttaatgtaattaaaaaattctcggtgggaatggtcaagtaattaacacacgagggttattacctttctgtgtgtgaaaaccattgccaccaattaccatgcacatgtttgtccaactgagagcaaggctgtttctattaaattatcaaccagagtctttcaattatattcaagaactgganaaacaataaacaaaataaagt

SEQ ID NO: 46504 - DNA, 175 bp, Glycine max
  unsure (1)..(175): unsure at all n locations
gtatatgtattagaaataccaagatgtgttatgtgcanatttngatatcccacaatgctttgagtatgcatgtatgtaaatttagccaaagagatgtgtgtgatgttagtaacaaatacaccttggaagtacgtgtaaataatctacgtaacgaagctgccttgattgtatatgg

SEQ ID NO: 46505 - DNA, 527 bp, Glycine max
  unsure (1)..(527): unsure at all n locations
nagtttatgtcattacnatctacntcttatantnagccttcctacggcctgcctncggacttnaccccccgtgccacccccgtatttttttgcttagcccctactttcgaggggcaacttccaccttatgaagactatcccgggcaagacgatggggaaggagatacccatcttggccccctgctccaccctcanagatccgtccccgcatgaactacccccaccgaacatagtccgtcatacccccggccctcaccccacaccnncgtaaaagaatctgntcccttntgcngaagatangggaaagattgangcgcttgaaaagaggtgangggagtcgagggcctcgacaattacccattctcgganttggcagatttatgtcttgtgcccaacatcgtcatccctcccaagttcaaagtaccagactttgataagtcaaagggacgacatgtcaaaaggcatcttcagatgtattccagaagatgggtcgtatttgcggacaaaagtgtggtcattctttaaan

SEQ ID NO: 46506 - DNA, 330 bp, Glycine max
  unsure (1)..(330): unsure at all n locations
ctttctttacccnctcctcacgtttggttnttttagggaaaaacaccataactaaacgcgccgcaaggtatccctatcgcaccagatccaaatctagaacgatgggtgatcaagaggagacgcaggaacagatgaaagccgacatgtcggctctgaaagaacaaatggcctccatgatggaggccatgttaagtatgaagcagctcatagagaagaacgcggccaccgccgccgctgtcagttctgctgccgaagcagacctgactctcttggaactgcgcaccatcctgcctcaaacatagtaagacggggaagggacacactggggca

SEQ ID NO: 46507 - DNA, 343 bp, Glycine max
  unsure (1)..(343): unsure at all n locations
acttccttgagaagctagagcttagctacacacacccttctcataactaagctcacctccttgagaagcttccttaagaagattcctaaagaagctagagcttagctacacatacctctctaatagctaagctcacctccttgagatgagaagctagaacttagctgcacaccccctataatagctaagctcacccccatgacaaaaaacatgaaaatacaaaaaaaaatcctactacaaagactactcanaatgccctgaactacaaggctaaaaccctatactactagaatggccaaaatacaaggcccaaaagaagaaacaacctatctactattacaat

SEQ ID NO: 46508 - DNA, 409 bp, Glycine max
  unsure (1)..(409): unsure at all n locations
gcttaatgaattactgttgtattgaaaaatgtcttttgagataacacgttaccaaagactcattacgaggcaaagaagatattatgtcctgttggaatggaataccaaaaaatacatgcttgccgtaatgaatgcattttgtatagacatgagtttgctgaattgtgcaactaccctacatgtggggtgtcacgctacaaagtgggttctggcgcttccagtgaagctggatccacatacattgatcggccagcaaaagtgtgttggtatcttccagtaataccaaggtttaagcgattgttngctaatgcagaagatgcgaagaacctaacatggcatgctgatggtaggaccaaagatggatngctccgtcatcctgctgattcttctcagtggaagaaagttgatc

SEQ ID NO: 46509 - DNA, 477 bp, Glycine max
  unsure (1)..(477): unsure at all n locations
taagctcgaggtcacaatgacattgactgggctagagatgaagatgatcatattagttttattggatatatgtttttcatgggaaatacaaccttcacttggatgtcaaaaaagtagtcgatatatagtcattcttttgacttgtaagccaaaatacgtagcagttgcttcatgcatttgtcatgcaatatggctcaagaatttgttaaaagagttgggcatgtcacaagaagagttgaccaagatcnttgtcgataattaataagtcagtcattgctctagcaaagaatccaatgttccatgatcgaagcaaacatattgatacccgttaccactacataaaggagagcacaacaagaaaggatgtacatgcaggatatgtgaagtctcaagaccaagtagttgacatcttcaccaagccgctcaagcaagaagactntatcaagttaaaaagcttacttggaatgataaatcaag

SEQ ID NO: 46510 - DNA, 393 bp, Glycine max
aaaagataaagaaatgaaggaattgaaatattatttatagtacgacctcccgaattaatcttagttaattaaatcaatgtacgagtttctccttattactacattatttcctacgtgaaaggaggagaaccacaagttgctacacggttatacttaatttattaaaacgcatgacatgctcatacgtttgtaataataagtttagttcctaggatatgtttagttgggcttattagttgctttacaacttgtttagacattaattttaatcaaaaccatattttgctcaaggtttgaacggtgcattaatctgctaaaggataagagcattaaagaacagcattacattttaggtagctcaccgaatctcacgtacgtgtactctatccatta

SEQ ID NO: 46511 - DNA, 415 bp, Glycine max
  unsure (1)..(415): unsure at all n locations
tacactacgaacacacaccctatcttgtacttctttactccatcagntcccactctaaaactactctctctccttgcgactatcgactctaactgggctgacaagaatgggtcagacttctgacccccacggatctcgctcaagagttcgaaggtgactctcaacatacccaacttaatgctactagaggtgatctcacatgccaaactcatgtctctaaactgctctaagaggtccagctctgtaaccatcaaagcagacatttgaagggatttcctacttaatgcatccgctactacacttgctatacctgagtgaaagctaagctcaaaatcgtgatccttaaggaactctaaccatcttctttgcctcatggtatgctctttttgatcaaacaaatatgtaaggctcttat

SEQ ID NO: 46512 - DNA, 342 bp, Glycine max
  unsure (1)..(342): unsure at all n locations
aagaaaaagcgtaaactcatacatcctaagcacgccacgcccggcagttgccaatattatcttatcttgaatatatctttcttttttatatctaaatctttgatctttcttagctttcacgtgtctaatcttctatctttgtgtttatcttggaattntatctttaattcttacatcttgttcttgatcttctaatgctatctttaaatccttgatcttttctttaccttatgatgcagtcctacccctaagggcattggatagaagactccaagatgattgtgccaaagatgcaagagaaggccctaaggtgctcatgagccttagggtagatttctgagc

SEQ ID NO: 46513 - DNA, 331 bp, Glycine max
gtaattaaatctcgctctatgggtaacgctgtctctagaacattcccattgaatttaatgatgagatctgtgcattttcaggtgagaaacaggctaagtattgaagtgccacaagtagcaattgggctaaacacatatgcaccactaagcgcagcttaaacacgaatagcgcacatgagagttgggcagagcatcatcattaaagtcgtgtgctaaacacagcacgtgccttcagccagactcagcgctagactggcgctaatcccaattccacttacttacgctaagcgtgagtggggcgctaagcgtaaggtacaaaattctaagccta

SEQ ID NO: 46514 - DNA, 537 bp, Glycine max
  unsure (1)..(537): unsure at all n locations
cgggccagggttgcaactgatgtagagctgaactatatatactaagntctaacgatcattaagtcgttttctcgcctaataaatgataataataatgtctnccgagcgnncgcatgggggagctcgtttaagaagttagataaacagcaacctacccgcatcgtacacagtcgatatcatggttcatacaattgctcaggcgtggatttacacctaatattcaactgtatctgaataagataacccatcagacaattttgctctacaaatggctcgggacaaacgacggacatccgcagagaaatctaggataagctcagctctctaacatgtccttgttgacatctagagctagtattaactcactggtacctccatttaccacacaatgcagacttaatcatcgacattttacgtcgcactgtatatgcactcataacatcacattctgactatctaccctatggagttgtacattcatcttgacaggtttcttgaggcatttggcatagaactgtacaaacatatttcaaaaan

SEQ ID NO: 46515 - DNA, 387 bp, Glycine max
  unsure (1)..(387): unsure at all n locations
agctagagtataattcattctttgtgttatgagtcttcatcaaacagttggattattgatgtttctgtcacaatcaagggattattgatctctccatatgtgtgtacactgtgatcatgttatcatttctagaattcatctgaaatgtctattgttaattctgaatgaatgatccttcttgatttaaaaattatcgcctcctaatcaattgagggttcatcttgttattggtagctcatcttacaatcatgtcttgacaaactacttgatatatcgtcatgtgtttacttctgttacaaatagagagagacttcactcttgttaatcacgttaaggtgttttgagaggaaaatactngagtaggcatgatccttgttacctatagat

SEQ ID NO: 46516 - DNA, 303 bp, Glycine max
  unsure (1)..(303): unsure at all n locations
gcatctgtgctccttttttggtcaatcacctattattgataagtaagtgtttgagttacacaaggataaagtgcatttgataattccattatctctgtctaatgaggctctttatgaagtttttgaagaaatgaccgttgttagactttggctcanattggagaaactcttcatgattaaatcaatttacaacacgtttcttttgaaacatgtttgtttggcctcctaataagggaaggtatttcattgaaagaacatcttgatgaacaaaactctattctgatggagctacacgacattgat

SEQ ID NO: 46517 - DNA, 197 bp, Glycine max
catgcaagcttggattaggttaatatatagaagattttttgttatagatagataattatgtgaagaataatgcggatgtgagaacacacgcgcatggaaatactactttaatgtaaatttatgaagtgctgagttgaaatataccaaaaacatatatcgaacgtggtagaataatactactcaaaggcatacgtttg

SEQ ID NO: 46518 - DNA, 485 bp, Glycine max
ctcagctcccacatggtgaaaggctcacatgcactctcttctacatcatattcatacttgtccaaataaataataaagtcatctcgactcagagaaagtcatataagtctcatacaattaatatagaacctatatcctaatgtcacatcctatcagagcgtggtgttcctgtgtcctctagcatgaggttcttcatagtcatctacctattcatctgctcccccgaacacaagttcaagagcatcacaggatccaaacaaaacatcacacagggagcgagttatcacatccctagctggtgcacaatcaagacaatctgatctgctgcctgatataatgaccagccacgttgcccgacatcactcacgtaacttcaccacttcgttattcaaaattcacttgtcaattatcaatcacattacacaagaatcccacacttcgatcaagatataataacacatctaatagcaaggatatgcaatagt

SEQ ID NO: 46519 - DNA, 154 bp, Glycine max
acttcatacaaatatattttgattaggcgtaacaccacctgttatagtcacgataactgccttaaaaaattctctcacctctgtcctctacgaatactgggaacttatacatctctgtcgaattgaacaatatcagtgttgtattactgacacg

SEQ ID NO: 46520 - DNA, 488 bp, Glycine max
tactaagcccgatggtgaccaagtattggccatgcacctgaaactgtaggagcttctttttatctttgggcaagtttgaggggattatacagaaacaaacagaagaggattagagaaacaaatccaatggcagtgacatttaggtaattgagaataaaatccatccgagttaattaagtttgtgaattgtaaggcctgaagagatatgcaataatgctgtccttaaatagattattcattgatatgtaaagaatgaaaaagtcaagtgtatggcaaggggtgaagaggacgtacattaaaatttagggctctaagtcaatattaataagacaagataagtttataggataagaattgaacttgattttcttgcacatatttgatgaagaggaatgaggagtttaagtgcatttaagctcctaaacaaaaattagtcttataattaattagtctaaaaaaataaaacttgtaaattctttaaagattta

SEQ ID NO: 46521 - DNA, 381 bp, Glycine max
cttgagaagcctctacatgcacgagagtctggccttggcttgaacgctctgcatgtgtacgaagttctagagagagaaaggtccaagctccagagagctttgagagatcttgctatgtgaagatctgcagagacgagtgctcagagcggaagccgttctgagagctcgagataagtttgtgagtgattgcgagatcctataggtgaatgagacatcctcaccacttatatttttgcaatctttcatcttgttcttctctgtgttgaaaaggagcgttccagactatggaaagctacatcctctgttggatcttccctgttggtacctgatgtacatatattcctatctatctaatgattgtttgtgtgttctctgtgctat

SEQ ID NO: 46522 - DNA, 116 bp, Glycine max
tcgaccttaataacgatattgctactgaagacgtattagtattatcatgcaataataacgatgaacacccaaggaaacctagcatacactaatttgacctacgtatctcgcagaga

SEQ ID NO: 46523 - DNA, 288 bp, Glycine max
  unsure (1)..(288): unsure at all n locations
atcttaaccgcctgcggctgcagctgagatgaggaagtgtgaatggtattctttctgctnttattgctgaccacagagtggtacctggagatatgtcgcgctggtcacgagaccttgaggacgtcaggtggggtgctattgcccaaaaccaagcttgaccaatcccgacccatcccgggcatagtcggtcagtgagaacctgtgatgtacctaatcaggcgagctcctggcagtcatcagagtagaagacaacatgaccacagagcaaggaggcttgtggtggctggc

SEQ ID NO: 46524 - DNA, 278 bp, Glycine max
tctagactctttctgacttatctaaaacttttgagcgagaatgtgatgcctctagagtgtgagttggagctgtattgatacaacgtgggcaccctattgcttattttagtgaaaaactttatagtgccaccctcaactacaccacctatgataaagagctgtatgccttaataagagcccttcacacttgggaacattaccttgtttccaaggaatttgtcattcatagtgatcatcaatcacttaagtacattagagggcaaagcaagttaaacaat

SEQ ID NO: 46525 - DNA, 375 bp, Glycine max
  unsure (1)..(375): unsure at all n locations
agagaatgatcatgtgaatatgttgtatgactganaatgttagtcagntgttagattgattatgaaggaatgcattgaccgtatcccggtgagagtgtgatctttaaattttgagagaaacgattatcatttactactaattttcgcatgaatctctgaagtatggactgaatgcatgaaattgaggacgatgaaggccatagttgattgtgatagccacttanccaaaaagctgaccacgtgcttgaatgatttatcccttgcacttagttcgagctgaatgaattattgattgattgaaccctgagcctatatagagctatctccagctaccttgacttacgtcgtaggagagcatcatacacatgaagcatg

SEQ ID NO: 46526 - DNA, 163 bp, Glycine max
tcgtcatcaatatctatatgctaaagttggagtatgatgaatatactccaatgcccatggctgagagcttgacagttgtccattttcttgactttatggtcattttatgcccctccagcttggcttggttttgtgccaccttgctgccatgtgtcatttcatg

SEQ ID NO: 46527 - DNA, 221 bp, Glycine max
gctctctatgaactgaatacatcatgactgatgagacgttatattaacaactaagaccacacatctcgtattacatatcacattggaacaataactacacgtcaaagcaatataacagtcaaataaaatatattgacttatcaattatatattctattgttagaataatatatctataaaataaacatacaactgtatgtccaccagactcactaccgccg

SEQ ID NO: 46528 - DNA, 236 bp, Glycine max
gatgatgccgcttaccctccatacgcatctgggcggtatatgaacatgacataagagcacactgagatcaatctgctcagatcctgatcgaaagacaacaaaaacacctctagagtaacagagcaatagtgtttcttatgggttcatcggatcactgttgaagcaactctaatggtgatacataggattaaatatgtttgagatacatacatgatactaaggatgacaaaacttac

SEQ ID NO: 46529 - DNA, 427 bp, Glycine max
  unsure (1)..(427): unsure at all n locations
gctatgctganacattacaatagacctcctcatccttttatcaaaatgaaccacaacagaacaattatgacctctctagcaacacatccaatcccggatggaggaatcaccctaatctcagatggtctagtcctcaacaacaacaacaacaacctgctccttccttccaaaatgctgttggtccaagtagaccatacattcctcctccaatgcaataacagcaacagcagcaacaaccctagaaacagcaaacagttgaggcccagaatcctgacagattaccttctcaatctgtccagaatcctaaaaatgtgagtgccattacattgaggttgggaaagcagtatcaaggacctcaaccagtagcatcttcctcatccgcaaatgaacctgcccaactttactgtactctagaanaagaggatga

SEQ ID NO: 46530 - DNA, 292 bp, Glycine max
taccttctgttgacgtgcttacgccatcccactcaagtcatttctcgcttaacttaaaaataaaataaatttccaccgaacgtttgaattgtattatccgtttacttcggataaaatgaattccgaccgttcggtcgtgccgtgaccacattggaaatcaaaaaagaggtgtaaaatagtataatagatataaagactgcttttacgcgagtatagtggagaatcaatcggacgttttctctttgggatttctcattcttaatcgaagcgagtaataactaaagtgaagcta

SEQ ID NO: 46531 - DNA, 371 bp, Glycine max
  unsure (1)..(371): unsure at all n locations
gcttgcttgttagctcactctaaagagaangtttgatacaanaaaagtcgatgctaaatgcatgggtaggtgtacataattgttatcctcctgggaataatatcgtatttcattgttgcaccatattgcaaaagacaaccaacatatccaatagtacttaggtggagcgggggtgggtcacattttgttggaactcctcgcactgttgctattagtttcagaacaagaattgataacatgaggcataatcaggtataatctgtgagaattagttataaattaataatatacaacttaattaagtttcatacattgcaataatattatttaataattcacacatatggactgcatgcactacattggttcat

SEQ ID NO: 46532 - DNA, 440 bp, Glycine max
  unsure (1)..(440): unsure at all n locations
tgctgataataagggaaacaaactcaccaatctagtccatatcttgacaaatataaggcctaatgcccagtcttgataaaggaggaatactggactttcatccactggaactctcattggcacaatgaccaaaagctcaaagagaagcccaataagcactgggataacaaatatctgtgaccaaaaaaagatggattaatcacttaaaagcaaatacagatctatgcaaaatcaaagggtcagccttggtaacatgatcagcaagaggaatcatccttacccatatagacagaagtgcagaactcttcacaagaatgccacaccacttccataattggccaaacaaaaccgaagatctcctttttcttattngctcaattgagtatctaactccagcaacagcagtccagatcacatagcttccaatgataaatgcatac

SEQ ID NO: 46533 - DNA, 404 bp, Glycine max
agcttagagcatacacattcacttgctatgcatgtatctctcgctaagccacacttcaactctagaacttcagtagattaatcggcttagcaagccaccataggctaagcgagtaccaattactcgctaagcgcatcatgcacgcttaatggatcttgtaggacaaaataacctataaatcatgctaagccgggtcaacttgcgctcttcccaaaactctcttaggtttgcacttacccaaattgggcttagtgcacatttacgggctaagcgcgagttaaaaatattaaaataaaaataatgatgagggagtcaagaaggcgagaataccaaaggtcaccaccaatgcacactaagtgggaaaagcacctactaagcgcaacaaattggtactatccaaactt

SEQ ID NO: 46534 - DNA, 150 bp, Glycine max
aaaagctcatatagtcatatactcgcggccagtatggacttatcaaagcacctattataaaacaaatatatactcactaaagcggagttcggaaataactagaaaacattggtggttcaaatacgaaaaccaatatcatcaactacatga

SEQ ID NO: 46535 - DNA, 482 bp, Glycine max
  unsure (1)..(482): unsure at all n locations
gcagctgtngatatggngacccatcacatgttgtctatgtggcggtcgggcgatggtgcacaacaagttttccacatccacaaagcgcgcataaacccaccatccccctgttgcccacctccaactgagctcacgtactcccacgtagcccatatcctcgtttctctcaacaccgggtccccatcaatcctcccaagcttccacaacatccaagtaaaacaacattcaaacagcacaagctatcacagccaagcaaaacagagcaaaggcagaaaactctgctcaaacaccaaccaaaatcacagcttttctcacttaaagaccccagtaacaattccttcgatccaattcgttaaccgttggatcgactctcaaaatntactggaagttatagtacataagcctacattgtgaccgttgggatctactagcaaacttccagaactcattctgtactactctnttcacagactaccacacac

SEQ ID NO: 46536 - DNA, 467 bp, Glycine max
  unsure (1)..(467): unsure at all n locations
tcatctgtctactgtctgacaatctaatgtttgttacattcttgttctttctttgtctaacatacacacttactcaaactcatgaaaagaaacacaaatttcatcacaatcatgcattcaatccaaaatcaaaccatacaccaattgtcacaaaaagataaaagtgttctacttccatatcatcaaaatcaagtcatactgttccatatgcttcagaaggagcaaaccaattacccataaataaaacttgcagtgtatataaacataaaagaaatactatactgaaaccataattataataacaataaaccaaaagaaaacaaaaagcatcatcaggaatcaacaatgtcaacagtgtctacactgnggaatcagtgagagcaactgtagaagcaaagtatcatggtgaatcaagagtgattcagatantgtttgatgataacaaaagatgatgacaaaggtgatga

SEQ ID NO: 46537 - DNA, 297 bp, Glycine max
  unsure (1)..(297): unsure at all n locations
atccatctttaagagtattataatatgtaaaatatttaatgaatcaccctacactttttttggataactntataatatagtataaaatatttaataaattacgttaacttctctttcacactgcaaaacttcggagaaagtattccacgaccaaaaaaatattaactgacaagcgttggttgttcaacccaattcaagtgtatatttcacgtgaattgtcatgcaattgcttcgtgatgttgtatgaatagatcacaacaattattattggaacgtataatggtcaattccacatct

SEQ ID NO: 46538 - DNA, 487 bp, Glycine max
  unsure (1)..(487): unsure at all n locations
tactactatgtattcttcctagactctccttattcttcttttcattctctctatcctttcttcatcttcataactcattcttctcatttgatcaccaagtttaatcatctctaccatgagcctagcggtttttggagatggtggagtagcatctcaacttgtagaagccatacctgcaagtaaagttagcacacaagtaataaacaaaataggacctcaccactcaacttagtgtttcactcaagttcactcgtgtatcactctttcaaggctttntattttataatatgcactcttgcattttaccactcttgctcttcttcagttcttaagcaaaaccttcaaactcaaaataaagaagtattcaatgtgaaatatgtcacaaatcataactcaactcaagaagccaagaatagaaatactctaagacaaactaaggaatctaaagacaagtaatataataatgaaaggatatactcaaatgaat

SEQ ID NO: 46539 - DNA, 384 bp, Glycine max
  unsure (1)..(384): unsure at all n locations
agtggttcaagggtgctgttttgagaagactcnttgaatgaggatggaatgttgctgaaggagaagtatccaagattgtatcacatttctcaacagcagcaacaagttcagcatatggggataacaacaaacacagattgggaatggcaacttcagtggaggagttttttctggaaggagaaatagatgcagctgctagttttatggaggaaagacagggtttggaagtacaaatgcagcaacaagacacttgaacttgtggagggtattcaagtgggaagtaaaaaatgcttatgcgcttctcaacagaatcctgtcatctgcgacgcatgatgaagtgttcaagcaatatggaaattaaaaatcctaagtaaatcctccatc

SEQ ID NO: 46540 - DNA, 486 bp, Glycine max
  unsure (1)..(486): unsure at all n locations
gtgtaccaggcgcgcgggaggaggtcgggatttatatgcaatgcttttataagtaaaaccatgttcattttcaatacataaatatttccaccgacacacatcctaagacgatttcatataaccgtcttagaagttcagtctgaaaaaaactattttcattttcctaattacaaaaatatcactatgtcatattctaaatagttttgaatgaaaattcataataatattacatttagtaaagcaaaaaagatataatagttgaaaaagcacgtgaatattaaagtaatttataaaacaacaatttaactagtaaaaaaaaattaaaagatgcatgtcaattcttaattnttgctagttcatgctaagtgtctatttttttttataacaattaaatacaatatcatagaatntataacactcagatatatatcttatntaacctacatcccttctattcatgctaagtgtctntgcactanaatctgg

SEQ ID NO: 46541 - DNA, 439 bp, Glycine max
  unsure (1)..(439): unsure at all n locations
agcttcaactctgaccgctcctaagggatccatttgtttccaatacagtggtccctaaacgactganaaagggacatatcaactggacctcctccaaatgaaggtccaatgatcctaccagcatgtagctctggctctacctgttgttgttgtgtttgtcatcacaatgctagcatgttgacgcagtcattctacgatgtctatctgcaacatctactccttgttgcaatggaccttcatcggaggggtcacgtccaacaacatatggcatctgcttcattcaagccatttgaaaaaaatgaaaaaaataagtcaacataataaacaactatatttaactaagataataaaataaaaaaagtacgttttcctaanagtaataaaaaaataaaacatacaatggaatcacggttcttttgtgtgtttcatcaaaatgcat

SEQ ID NO: 46542 - DNA, 481 bp, Glycine max
  unsure (1)..(481): unsure at all n locations
ctaagctctttaaactggattagtatattcattgacatagattaaaggatgaatattncgtacgtgatatctttnggggccatcctaatgtagtgaagctatgcattcctctaacccggtatttttgatagatagtacctacaaaacaaacatgtataggtatgccacttccagagatggaagataagtcgagggtagacgccacaagggttcaaccttcataagttcgagattagttcagcaaggaacgcaaagagaagttctcacaaaatatacacgtgttttctcaaaatgccaaaaagtccttttcttgaaaataagttcaatacatatagtgtagctgaggtgtagctgaaaaggcatcaattntatttaattaacattacaaaaaatgaanaatattngacatgggccttcaaattagtttgggtatttagcaacaatcaagaatcttggtagtgcctctgggccttcatccttc

SEQ ID NO: 46543 - DNA, 321 bp, Glycine max
  unsure (1)..(321): unsure at all n locations
accgttcttcgacgtcttcattctncttcatcgtcttcgatcttcaacgggaagtacctcgaaccaagcttttcatccattctatgtacccgtagtggtccacattgtgtttcgtgcatttttattctcgttttgtttactttttataccccctgttgacgtgcttaagccattttacttaagtcatttctcgtttaacttaaaaacaaaataaatttccaccgaacgtttgaattgtattatccattaacttcgggtaaaacaaattccgaccggtcggtcgtgtcgtaaccacggttggaatcaaaaagagggtaaaaa

SEQ ID NO: 46544 - DNA, 384 bp, Glycine max
  unsure (1)..(384): unsure at all n locations
aaaccgacaagggaaagggaaancgcttaatttaaaggatcaacgacccatccgatcgaatgaaccatttaaaagacaggcattctaaagtgaaatgaaaaatgcattgcattcgaaatgtaaagtttacagaaacttaaaatggttcacaaacatacattctccttgcgtactcgtttctctctgtgctgggtactttgagtatataaggatttgtataaatgatttgcgacctcgaaatctgactaacaactgctatatatagacatttaaaaataaactgccctaacggtcgaacattatcctaacgccaagtgtcctgctacgtacaccttgcatgcacataactgctccttagaacggttatccacattgctcgaagtc

SEQ ID NO: 46545 - DNA, 515 bp, Glycine max
  unsure (1)..(515): unsure at all n locations
agggcagttatatgagtcatcacancncanantaaaccccagctgagntatgaataagagtaagtttttggtatattggtgacaaacttacgagatgnaggcttccatcattaaacactccccccggatctcacaacaagcaaagttatctatactggataagaaggtgagtggacaatccctataaatatcacgcacaagaggtaacctttcttctctaggaanaactcaattcctctcgcgacagatttgttggtaaatatttacaacttttttgggcgagtctcgatgtcataccttactataggagcctttaatgcagagataacaaaacatttcaggtcacagccagtcaatccattgtttctgcgagaatatccttggcatatgagaggtggtgcattcaatgaatattctatcctctatactgcgaaattacgatgtcagaagcttctcgcatctcacaaagaagttgaaaatattaaatgacgaatgtagtgcatgttgatcaatcg

SEQ ID NO: 46546 - DNA, 383 bp, Glycine max
agcttgagggacaacttgatgccttggtctttctttaactcagcttgccatgaatcagagatctgcatctacacctgttgcacgagctcgtggtctatattcttctacaaatcatgatacagatctctgtccttctttgcaacaatctggagtcaatgagcaacctgaagcttatgctgcaaacatttataatagaccctctcagtagcaaaaccaacaacaatataataattatgatctttcaagcaacagatataatccaggttggaagaatcatccaaatctgagatgggcaagtcttccacaacaacaacagcctgtcccttctttccagaatgctgctggttcaagcaggccatatgttcctcctccaatgcagcagc

SEQ ID NO: 46547 - DNA, 188 bp, Glycine max
tatcggtgaacggtgattatcatatgaatatcgcgagagatcgcgtggatccattgcgagagtcctgacggataacgcgactgaatcggatctgacgcgcgtaagttatgactatcttactgtatcgagagcttccagcgtttattttcgagcgagaggatgtctaagggctgagaccctgacctctt

SEQ ID NO: 46548 - DNA, 512 bp, Glycine max
  unsure (1)..(512): unsure at all n locations
tttatatgtgatgaacccatttagataccnatgctatanacaacacaatcttgacacctctagcctgcatataagatgtgagagtatcagacgcgtgttatacatcacttgtggctagaggatcaaacactatctcgtggtctaaatcacatcctcttatgatgacgatgaacatacttccataaatgcgtttatattaagtgcactgctccatcgagtcatcggattggataccagctcatgtcaagagatccctgatcataccactgtcctcatctcagtttaggagcaaatcctagcagtattatttatcagaaatctcgtttaatacatggtcacgcagatcattgaaaaactaatctgttgcttacacattgattatgagaaccacattgcttcttgattgtcgttgacaaaaaacctgctggaaagatgaccaactcaaacttgataataacttggcctgctcttaacgggtcaactcctcattttatctataacacgctataatt

SEQ ID NO: 46549 - DNA, 263 bp, Glycine max
  unsure (1)..(263): unsure at all n locations
atgctttccncaaatatctctataaatgcctctactagccatangaccagggtgcccttgtccccncncccctttatatccttancattattattgtattttgaatttgatatagcatacttctttattttaacacccncctagagaaaatgtaatnctctgtctggcattcgaaaaaaaagttatcggcgattgatattttaaagagtttccattttcagttaaaagcttcttcgatatattactggactaaaccatacatt

SEQ ID NO: 46550 - DNA, 467 bp, Glycine max
  unsure (1)..(467): unsure at all n locations
ngatgatgcttcatacatctcanaactcttcttagggaagttgtgagactccatggttngcctaggaccatagtgtcagatagagatgcttagttccttagccacttctggaaaaccttacgggccaagctaggaactaagtttcttttctctgctacttgccatccacaaactgatgggcaaacagaggttgtgaataggtctatatccacccttataagggcttttctgaaaggcaaccataagtcttgggatgagtatcttcctcatgtagaattctcctataacagggggttcatagaaccaccaagcaatccacttttgaggttttctatgggttcaatcctctaacacccttagacctaattcctctcccacttgacacttcttntatacataaagaagaggaatctatgtcacagtttgtaaagaagttgcttgagatggttatgaaccacatagagaac

SEQ ID NO: 46551 - DNA, 56 bp, Glycine max
  unsure (1)..(56): unsure at all n locations
agcttcctccacgttntcctccatacctagaactttaaaccttcgattctcactcg

SEQ ID NO: 46552 - DNA, 452 bp, Glycine max
  unsure (1)..(452): unsure at all n locations
tatgccaaaactgtcattatattcttcggatatagtatcttcaaagcttgagtgttgaagtgaccaaatcttcaatgccataaccatgaatcatctattgtaactctcatggcaatgccagtattagtagtatacttaaagcttattggaaaaaacttatatttcctttctccattttaacattggcaatctcttggcctttgttatttntatcatagataatgcacgtatcttcttcaaggtgaagataatagcctttctccatcatttagccaatgctcaagagattttctttatgatctggaactagtaagacatttttttatgatctctttaccttctttgtctccaccatgacagagccttttcctcttgactctaccatggtgtcatattccatttgaactttgactttgacagtgtcgtcaatttcctaaaaatgctccataatt

SEQ ID NO: 46553 - DNA, 532 bp, Glycine max
tttggtcttagtaccggctcctatcatagtagtgaagtggaacattgaaattctgcatttgtagagctatgtgatgcatgcaatcttctcgatatattatgcgatagaatcggatttctgtgagagaatttattaccatttggcacaacacagcaaaaaatcatctgctctattagtgaggctttgtgatcatgtttattatttaatggagggatgaagatttagagaccagaaattctggtttgtctaagaacaccattattacctatattgttactttgtatttcattatgaactttaatcttgcaattgattatacctcttatgggatgcagaattttgttgttttattatcatgtttattgtagtattaatttttcattatgaatgcgatagtcccactccatagttagggtttgtcctgagatgttaataataaaattaactgacgatacattaatgttcgtggtgaatacatacctatacagtgagtaaactataatgggtatttttaagaaaactgtgcctttaa

SEQ ID NO: 46554 - DNA, 334 bp, Glycine max
gctctccagacattcaaattctcatatactttcacactggaacaccgattcatgcgcataatatatcgagactctcgacattgaacaacgaaagctctctatatattcaaatggtcataactaatcacacagaagtccgattcacgcgcatattctatggagacgctcctaattgaacaacggacgctctcaagaaatttaaatggcataacttgcacacggaagaccgaacacgcgcatatatacagagacctcaaattaacaacggagctctcgaaattaaacggcatacgtataacggagaccattacgccctataaccagacgctcaaat

SEQ ID NO: 46555 - DNA, 346 bp, Glycine max
atttactgcgacattcaatgtgcaaaaagctgaacctatttccagaattctatatctactttagtgcacaggtccttctgacctggatattgataggagcccatctcatgtcaatccctctaagttctatctattcctgctctgatatgggggagcaaatagcgtgtagttgtttctgggcaattctccgtgtatatgcctattatgccccataactcacacacaatatggatggatttttctacagcgacctggcgtcctatctcttgtttgaatctcgcctgccaatgttggcttaagtatattggatgttgagaacttaagcctatatgtcatcaatatctac

SEQ ID NO: 46556 - DNA, 404 bp, Glycine max
aacaattacaacattagtgtaatcgattacacagttatttttcttgaaccgttgtgactcttcatttataatttgaatttccaacattcagagtctctggtaatcgattacatatgatgtgtaatcgattacacactttctaatcattggtaatcgattacatgtgcactggtaatcgattacatgtgccttggatgacttgaagagatcttgaatcaaggctttcgttgttgaaataatcttgtattaatcttgtagcaaatgagccttgtttgattcttcttttgacatcattcaaatcatgtatacatacattcacattgagtatactctgtttttattagactctgggcaaactctatatactttatgtaaactctgtagactctcgagtctatcaccga

SEQ ID NO: 46557 - DNA, 394 bp, Glycine max
  unsure (1)..(394): unsure at all n locations
agctggtgggtatggaaaggtatatcatangaggagggaatgatgaggccccccctcccttataattccctttatccaaccacaaagagacgggtactagaggatttgatggatttaaaatcatcaagaggatgaaaaataatatgatatttaaagggaaaaaagtctttaattgaaggtttcattgtgccttngattgcattcctagacattcatatagctgctgagatgagagggatgatattcatgcgcgtaatctttttatcttgaaatctagcttgatttctgacatccatattctccanataacatttgctttcccaactagccaaagtaacatcaagaagtggtgtgctagagaaattatcacaagcagccaagaaggatgtgaatg

SEQ ID NO: 46558 - DNA, 475 bp, Glycine max
tcgcattaatatatggtgtatcatgtaatcttttaatgagaataatatcttctatggaagagtaatatttattttatgttattaactaattattgattaatttaaacttatttatgtcagtgcataattaaatgacactcgaaaatattttaacattaacaaaaaaagtgaatctaatcttataattgtggtaatcctataacatctacatctatatctattatataagtaaaataaactctcataaaaaatagaataaacttgaaaataagtattaaatatagaatttagtcttaatttcaatgttatgttagtaataattattataatctctattcaacattctctaatgaattgtagcattgagaaaaataatgaatatagtagtaatatttaaccatattatcttatttgatcttatattatattaatatatagtattgtatatgtataaatactataataatatatttga

SEQ ID NO: 46559 - DNA, 347 bp, Glycine max
  unsure (1)..(347): unsure at all n locations
agctggagaatggataatgtactataaaagcatgacgcattggtggcctcacccacatcatctntccgtaaacccaatcttcctcttttacactcctatgtcaattccaccgatcaaantncnnnaaaacttcatcaaatggcagagccatcaaagaagagaaagggatcatcttccaccgccaccgctgctgcccatcgccgtcacggcccatccggagcacccacagcacctatacctccttctttgtcatctccaagatcatcaacactggtttcatccgatgatcaacgtctacggtacctttctcagttgtcttctagaataatcttagaccctaagtacct

SEQ ID NO: 46560 - DNA, 374 bp, Glycine max
  unsure (1)..(374): unsure at all n locations
atgaaccttgtatccctgtcagatacaatactatgaggaattccatgcaaccttactacttgcaagacatacaactccactaacttattcattctatacctcatattcactgtgatcaaatgagcagatttggtgagtcgatctactatgacccacacggaactttgcccaccactagtcttgagtggaccatagaccaaatccatatatatgctcttccatgcgcattccggaatctgctatggcgtcaattctccccatggtcgtttgagcgtcaaccatatccttctgacatgacacacatcttgctacatattacgctacatctttcttgatgccatgccaccaanaacttctcttatatcttggacatc

SEQ ID NO: 46561 - DNA, 545 bp, Glycine max
  unsure (1)..(545): unsure at all n locations
actgttctctaagtcggctaatacaacagcagagaacttgacgcatagattgacgaccttgtanaancacggaccttanagagtcgacctgctagcttgcaatcttgtccgatgggtcgtgtatgacactgtcattgtgcataccagagcctcctctctcanaaaactggtgtcagtttcaagctttgcgatgtataattcgccagaatcggacttcattatatttggatgaagatattgaatgtttcgagagcattcgtttgataaatttcgagcgtttctatatattttgggcgtgaattatacttaggtgtgataagttattaccagttttgaggctctagatctttctttgtnattctttatggactatatattttcttgctctgaatttgactggtgttgataaattatgattatatgtattttatgagactttcgtattaataattattatacttttattagttatctgtcgaataagaactccttgaggtatgaatgacaatttggtattattgcaattcttgttgttcattatgtta

SEQ ID NO: 46562 - DNA, 424 bp, Glycine max
actgatgaagatgaattctttgctacttcattctctcctctaatgacaatagcatcattattggcactgaattcctgcgagttggatgccatcttatcaattaaatttatggcttcagcacgggtcatgtctccaagggctccaccactggcagcatctatcatacttctctccatgttgctgagtccttcataaaaatattggaggagaaactgctctgaaatctggtggtgagggaaactagcacataattttttaaatctctcccaatattcatataggctctctccactaaattgtctaatgcctgaaatatctcttttgatggtcgtggtcctggaagcacggaaaactatttctaataatactctgttgaggtcatcccatctcgtgatggaccctggagcaaaggtatataaccagt

SEQ ID NO: 46563 - DNA, 322 bp, Glycine max
  unsure (1)..(322): unsure at all n locations
cgatgatatccaacatgatgacccaaagcccaacagaatgatttcatgaatgattcaacaagttcaagatcaagattaatttcaagtttcatgagaagatatcacgaagattccagaatcaggagaagtctgatttcgagattcctgagaagatgaattctggattcaagagaagaaatcaagaagacttcacaccggaagtattgaacagagttttcataaaacacagacatagcacagtgttggttttcataagagtttttctcagaattttctaagttaccagagtatttactctctggtnatcgattaccaattacct

SEQ ID NO: 46564 - DNA, 337 bp, Glycine max
tgatgcctaatatgtctctgctgattgctgcggtcctatatgcaaggtagaatgtcttcatgaacaccctcttaaggccatgccctctgagaatacacctgcgagcaccgtgctacaaccaatctatagccactccctccagagaacgacgaaaagcccttacaaagatatgatctctttggacatcagggggcttcatggaggaacaaacaatatggaactccttacaatgcttatgacgatattcacctgcaagaccacgaaacttgggcagcaaatgtattattccaatcttgagaacatatggaacaccctcatcaggatattgtatgcacaa

SEQ ID NO: 46565 - DNA, 459 bp, Glycine max
  unsure (1)..(459): unsure at all n locations
agcttgcagcaaattctaacgacaataactgttcactcggaagtgcgattgagtcccgtatcccccccccatatatagngtgtgtagagtgctatagtatgaggttatacataagtagacacctattcatttttnnnttgtaacacaaagttcaagatcatcacaggatccaaacacaaacaacacacagggagtgagtgatcacattcctaactaatggagaaaaacaagataacatgtgggtataaatatcatataaacaagatacaacttacttgagcgatagtcacattatgtgaccacgttttgcgnacaacattacatcacaacaccacacatttcgtttattttcacaacattctgatactcaaggatcgaaacacaatatcattaagtcaatatatatcgatcaatacacacagcgtatgcaacatatacactaagactcaatcctatatg

SEQ ID NO: 46566 - DNA, 398 bp, Glycine max
  unsure (1)..(398): unsure at all n locations
cgagcgtctcgatctattacgcgactcaatccgactntcgagtgaaaagttattgtcgttagaatttgctacgatcttcgattttaaatttcgagcgtctcaacaagttacgggactcaatctaacttccgagtgaaaagttattgtcgatcgaatttgctacgagcttcgattttaaatttcgagcgtctcgatatattacaggactcaatcggacttccgagtgaaaagttattgtcgttcgaatatgctacgagcttcggttttaaatttcgagcgtctcgatatattacgggactcaatcggactttcgagtgaaaagttattgtcgttcgaatttgctacgagcttcggttntaaatttcgaacatctcgatatattaagcgactcaatcgga

SEQ ID NO: 46567 - DNA, 269 bp, Glycine max
  unsure (1)..(269): unsure at all n locations
agctntagtctcttgaggtattgggactctattggaaaagttgatcttttcaattaagaatccnnctcccccatttttaggagagttcacaaagaatcgtgtggagggagtaatatcaggagagcttcgtcaagaaaaanaatagtctataaatagaaacatgtgtaacacttggtggaactctgatgaatgagagtcttgtgagacacaactcaaaggtcaagttctctccctttatcttccttcaatgacgagctcccccctctctc

SEQ ID NO: 46568 - DNA, 456 bp, Glycine max
  unsure (1)..(456): unsure at all n locations
gtctgcaacaattacatggaaggactataaaacctaatcaagagaatggaaaaactatgatttggcagaagatatcaatatagaaatacctcctccgattgtttcacaggaaatggaacagacactgaaatatctttagaaccctctggcaaaacaacctggaatttacaagaatcaggcagatgtaatagttattcaaactggtataactatattacacagactacaattgggagagggggagagtttaggaaaaattgcaaaggataaaagaatcttggtaaaaaaacatttccaacttatgaacaattgtcaagatgtggttacttgttaacaactcatgtgccaattaattaatataataaaatcacaattatattctcataatttaatcatagacaactgaaatggtcatatntatatatnagaaatcattntcccctggtatatntcttt

SEQ ID NO: 46569 - DNA, 413 bp, Glycine max
  unsure (1)..(413): unsure at all n locations
agcntgcacacaagattctccttacctaaatgtatttttaacatctaactgccccaagtgaccncccccncttcttctcatgtctgctgttatgtattctttagttcctgaatgtctacctgtaaattggttggtcgntcagatccttattttctgcaaaaaagaaaatcaaatgctgtgaaaacatggatgaagtcctaagaaaatcaatatcaaagataacatggatgaaatcacaattaaagagcacaactacctatctgtcagagtcatttggttaatatgtattgactccttatatggtggggttatgtataataatattatactattgccttgcaaaaaaaacttatgactgatcatcttttcattaatccaattatgtatgctattggataaaagatcttgggttc

SEQ ID NO: 46570 - DNA, 474 bp, Glycine max
  unsure (1)..(474): unsure at all n locations
ngcaagtgtagggcgatgggaggcgcggggtgctangcataatagcatggatctcacattnttgttgcattttttcatatgttttattcgcaagcaatcgttatttgtataagcgatgcttactacatgtggcagccacataaacatgtcactggagcactccaatgataaattgtatatataatggcactattcttttgtttaagaaaaatacccggtataagattattttcatattaaaatagatagacggataagataaaggtagtgaagtttgagatgatttagaaaaatatttttttctaattgcaaagaacatgaatgaaatgcatcttttgaaaagagataatattaaaaaaaaaactgcgagaagtgagagttttactgtctaaaaagcaatcagtctgttgtataaataaatacaaataaaacacaattttatatagaatctcatgaatcaacgaataaacatct

SEQ ID NO: 46571 - DNA, 453 bp, Glycine max
  unsure (1)..(453): unsure at all n locations
agcctgaactgaaacttagagtccaacaactgttattcgagttggataattatttggcactccnctcccccctctcntcctttgtccgggaagccggaatgtccatatcaccttcttaattgtacacatggggcactncncccccaaatgcgcaagtaagaagagataattttccgggctctcgtgtccgtaaaatgcattcatatcatgcatcgcataagcatctcttcataacatcataatggacatatcctgcatttgtccgttatcatattccagcctcacatnttgcatgagtcatggcatcatcatgcatatgcgttcaacaaactttttgatctgcaaaattgcatanccattgttatcatgtttgctcatccttgcgttttcctctacaaaacaaaaacaaagaagggggaagcgtgaaacttcacactacactcttagtttcat

SEQ ID NO: 46572 - DNA, 441 bp, Glycine max
  unsure (1)..(441): unsure at all n locations
cgttcaataactgcaggtaatcgattaccatgtgtaatcgattacacagtgcanattttgaattcaaattttaatagctgttgtaaatcatttttggccactgttaatcgattacatcctctggtaatcgattaccagagagtaaatctcttgaaaaagactttataacttaaatttcttggcgaaaacctttgctacttcaattaagaattcccttcctatttaatatgcccttcctaagactctagagactgtcttgatcatccatcttgaatatctttaatttctttgtcttgaataaagctttgaaaaacatgtgatcctttggcatcatcaaaacattcagcttgatcctttgtctacataatggagagcataagcttacctcgacggtggaacaacaaaataaagctgtatggtctcaatgccgacaacgaatca

SEQ ID NO: 46573 - DNA, 266 bp, Glycine max
  unsure (1)..(266): unsure at all n locations
agtctttcgattcattctatgtacccatggcggtccacatggtgtttcgtgtatttttattacctcaccatcannaaaactttgatttgtattttgatgtgtctttacacatagtggacacaataaacaatcactaatttttaggatgagagtacatcgattatatggtcctaataaagatggttatgaaccgtcttattagcaaatggcattgataataaaaaagatttatgacgggttttatataatcgtgatagtaaaactac

SEQ ID NO: 46574 - DNA, 391 bp, Glycine max
  unsure (1)..(391): unsure at all n locations
ttacattgatgtttgtatttatgggaggaggttgtatgtcatttttgttntaagagtagtgtcccgctggtaaaactaactttccaaatgtttgccttcgcatgaaatggccttgaggaagcttgcctcatagaggtccaggaaggacaaggcagccgaaggaactagttccgctccggagtatgatagtcaccgctttatgaagtgtgtacaccagcagcgcttcgaggccatcaagggatggtcgtttctcctggagcgacgcgtccagctcaaggacgacgagtatactgatttccatgaggaaatatggcgccggcggtgggcaccactggttactcctatggccaagtttgatccagaaatagtccttgagttttatgccaatgct

SEQ ID NO: 46575 - DNA, 257 bp, Glycine max
  unsure (1)..(257): unsure at all n locations
agcttctcaaggaggagagcttatttatgaaaagggtgtgtgcagctaccccccccccacactctaaactaaacctaagttatagcgaatcgaacgacataacagtaagcgcnaaatnnaatgagtcccataacatatcgagacgctcaaaatagaaaacagaagctcgttgcaaaatcgaacgacaataacgttttactcgaatgtccgattgagccccgtaatatataaagacgctcgaaagttagaaccgaagc

SEQ ID NO: 46576 - DNA, 477 bp, Glycine max
  unsure (1)..(477): unsure at all n locations
tggacgaataaggtgatgcatctagganacacaacaactaacaagtatgaaaattgtaaatatatattggttntagggtttacacacgaatggataaaaataattgtttgtgttttacaaatgcagggttaagtttgcacattgggccttaaagagactactaccgaatagccttggagacctatgtagtgtttgagaagccatgaacaatatgatcactctacaacatattgaaattaatgcatcgtttgagacaactacacatgtggttgggcatgtntttaaagttaccttatacaagaaactatttggcatggtatcaaggtatgtgttaaaccagattgttgctgagtttgagcatgtaaattatgctagcattgatagttctcattatagatatataatgagaactactcacngtctttcatgtgcacgtgagctaactagatatgttcttggtagcataccactttacac

SEQ ID NO: 46577 - DNA, 307 bp, Glycine max
tagtatttatattttttaaaaaaaatatgtatgacatcaactcgtcattggctcccaggttagtggattaggcaaaataaaccaatacaaactcacggggtaagtcacctaacccattgatccaaagtttacattgtcacctctacattagtgactttttgttgcctttgtttcctttaagctttttgtgtataaaaatatattctttctgggggagatatttgtgtgtaattcaggtttaactatataataaagatgatgggtgagtttaatatatatttaaacagtcttgatcatctggatatga

SEQ ID NO: 46578 - DNA, 435 bp, Glycine max
acttctgaactcttaaattatttcacattcaaatatcatcagaaaccttatatatttggattaagaatctaagtattaaaatcgacgaaattaaagatcaaatctgctaaattttaaaaaatacggacttaatgagtaatgtctacatatcttagaaaatagatggattaccaaaataaagatcaattaacaaaaaaatggacttataagcgaaattatgcagatgcgtcagcagcttcacgtgtgtagaacgattatttattctttactttctaccgtaacgcgtgttaaagttgctccttaccgaagaccttgttagcgctacaaatgtagcccatgtcccgtttgggcttcaacggtactgaaagatgtggttgtttttgaccgtagactatgtattgaaaatgaggctacaaacctaaccaagaacaatag

SEQ ID NO: 46579 - DNA, 430 bp, Glycine max
  unsure (1)..(430): unsure at all n locations
agcttgtgcacatcaagtgactcccgcattttatctctagcatgcaggccccccctctgcatctacgataccagaataactctgatggtagtaatctttacaactggagagaatatctctnnnnnacaattccttgtttctgctgaaaccctttcactacaagtctcgccttgtatctttntctaccgtcagattcttcctttagcctatagacccacttattttgtaacgctttcttttcttctagcaatttagttaaagaccatgtcttattcttcttaagggaggtcatctcatctatcattgctagctcccactcaatagagtcattcccctgcatagcctcactgaaatattatggctcaccagcatcagttaacaacatataatgcaatgaaggggaatacctatctggtggtactagaattct

SEQ ID NO: 46580 - DNA, 451 bp, Glycine max
tctctcagtcgtctgtagagatgatagtgtgttagaaagcggcgatgcctactgtagactgtttctctcccatgtttcagttgtgtgtaacttgtattttcttcacacatggggcatgcgtgatgacccttaacactgtaaccgctgagattcccatatgctgggaagtcattaatggtacaaaaaagcattgcacgcatttcaaatgtctccttgcgaaacgcatcaaacactacaaccccctcgtcccacaactttctcagatcttcaaccaacggacttagataaacatcaatgtcatttcctggctgtcttgggcccgatatcatcatagacaacatcatgtattttcgcttcatgcacaaccaatgaggccaattgtaaattacttgcagaactggccatgaactgtgttgagtgcttaaggtgccatatggattcattccatcac

SEQ ID NO: 46581 - DNA, 385 bp, Glycine max
agcttgccgcccagctcgttcaggcgagctcatctcgcccaggcgagccccccctcgcaaaattctaaaagaatgctcttgggtcatggctggaatagaactttgagaaagaaatatgtatgaccatagtcctaacaaattagagtcattaattgtagttattattcaattgataccattgttaggaacaacatagtgttaggatgcaaagatggcaatgctggtgggtggctctaacttggtccacttggaagcttaggaacaacatagtgttctctaatgcaacctttaatgctaacaaactgtttgaagatgcaatattcactctatggacgtggctcaggcactttgagaaagatttactatccatctaatcaatggcaag

SEQ ID NO: 46582 - DNA, 412 bp, Glycine max
  unsure (1)..(412): unsure at all n locations
tatgctgcanacatttacaacagacctcctcaacctcagcagtctaatcaaccacagcagaacaattatgacctctccagcaacagatacaatcccggatggaggaatcaccctaatctcagatggtctagccctcaacaacaacaacagcagcctgctccttcctttcaaaatgatgctggcctaagcaagccatacattcctccaccaatccaacaacagcaacagccccagaaacaacaaacagttgaggctcctccgcaaccttccctcgaagaacttgtgaggcaaatgactatgcagaacatgtagtttcaacaagagaacagagcctccattcagagcttaactcgccagatgggacaattggctacacaattaaatcaacaacagtcccagaattcttgacaag

SEQ ID NO: 46583 - DNA, 403 bp, Glycine max
ctctaagtcactgcagctgcaagcttggtcttttacatagggcatgctgagacccttgaccctcatttcatttacttttttataccccttttgacatgcttaagccattttacttaagtcatttctcgcttaacttaaaataaaataaatttccaccgaacgtttgaattgtattatccgttaacttcggttaaaatgaattccgaccgttcggtcgtgccgtaaccacgctggaaatcaaaaaaagaggtaaaaaataatataataatcaaaaaacatcttgtttagtaaaataaagcggaaaatcaatcggacgttttctctttgggatttctcattcttaatcgaattgactaataactaaagtgaaactaacgctaaaatcaactcgcctagtcaagct

SEQ ID NO: 46584 - DNA, 455 bp, Glycine max
  unsure (1)..(455): unsure at all n locations
tgtccaatcaagtacggganatgccttcataagcatatctgcatattgatcacttgcaaggtagatgaaggaattgtagttgcttatcgagttccaaatgcttggttcaagcatggagtacatgattatgagcatgagaaatagtggtcaaattatcaccacaaagttcaggaatagtgtgaggaattttcagcttaaacaacaaggtctgaaatcgttggacctctaaagtacctggagcaaggttccactacttagcttgagtactgcttgaaccagcaatgacagtttggtttttggaccaccaagagaccatgcttggtcctagaaagataaaagcattgaatgtagacctcctgtcattaggatccgaggccgaatgtacatcacaataggcttgaagaataaaagagaatgagagggagcnacaagaacatgaagtctcccatttcact

SEQ ID NO: 46585 - DNA, 390 bp, Glycine max
aagattaatgtgcccccccccgttcaatcccgtcttctcaatggatgatgagagacagagcatggtgtagatgggaagtcggctgaggtaaccttgctaataatagaggagacattaatttttatggacgcatattcttagactggtgtatcattgaatgaatgctatgagacaactattaatcacaaccggtggtgtataagaaaactcttcgatcatgacaagtgagctcctaaacttagcagggtgagatgagatttagtgacgagttcatattataatgtaaatattttttgcggtggtggaagatctgtaaaaaaaacgaggattatggatcacatagcgctggataaagagattatccaatatttgtaaggaaaaccagtacct

SEQ ID NO: 46586 - DNA, 433 bp, Glycine max
  unsure (1)..(433): unsure at all n locations
cgtntgtcgtcttcaacggtccctctactggcttaaacaagccagctgacaatggttcacaaagttatctagtttcttagtctctcatgggtttcagcaatctaactcagaccaatctctcttcttaaaactcactaagtcagtcactaccatactcttggtgtacgtagatgatatcatactcacggtgaacagtatactggaaatacaagatatcaccaccctcctggatcaggaattcaaaataaaagaccttggcgacttgaagttctttctgggactcgagattgcccgcaccactgatggaattcatttatgccaacgaaagtatgccttagacattntattngattcaggtatgctaggttgcaagccacactcgacacccatggattattccatgaagttacaaatgaactcaggcaactctctt

SEQ ID NO: 46587 - DNA, 408 bp, Glycine max
  unsure (1)..(408): unsure at all n locations
agcttgtcaaacagaaaaacaccacttggaatgcaggccngctctgcttcctacagaagcaacgccttctggatgaatcttctggagggcccaaatgggcctgggtgctattngcncacccatttttactaagtacacccccctctgctgttttttggtgattcttttttcgtaaagttacggaaacttacgaatttcgnaacgatacttgttttctttccgtaatgttacggaaccttgcggattacataatcatcccctttttgacttacggaatgttacggaacctcacttaattatgcaacgatgcttccatntgatttccggtgtgtcacggaaacttacggattgtgcatcaatattttttttggtttatcggcatgtcctggaatatacaaaatgcctaat

SEQ ID NO: 46588 - DNA, 395 bp, Glycine max
  unsure (1)..(395): unsure at all n locations
cgagacattatatattaaaactagactcaatatcactgagactcgccataattctatattaattgccatatatatgttactatatattntacctttctaaatttatatatgaatttaatcagttgtaataataagccaatgtcgattaatagttaatttatgtaatatatgtctaattttatttaattaagatgtcagaaatacttttttgcaaatgaaaaaacactatatctgaaaattaatccaagaatactgtaaatattatgaactcaaacagaattgttttatatataaaaaaaaaactgtgattntaatagtacttaatccatcatatgatgcatatatctatgaaactacatgaatatctgcacgtatctataaactctaattaaact

SEQ ID NO: 46589 - DNA, 457 bp, Glycine max
  unsure (1)..(457): unsure at all n locations
agcttaagggtttggaataattgttctacttcttcaatgttcaagtcttctttatatagcttgccccccaacttatnntgggggngatacacctaagaagaatggctagatgtttgtgatgaagcaagaattgggccgggttgacaccaccctacactccacaacacaatgggttagcagaaaggaagaatagaaaaattatgaatgcggttaggagaatactcaaatgcaaggatctgccacaaaacttgtggagtggagctgcttccactgatgtgtatgtgctgaataaaagtgctacaaaaagactaaatggtgtgactctagaagaagcttggtcaagcatcaaacccaatgtgaagcatttgagaatttttggtgctatntgctacaaacacattactagctagttgagacagaaactggatgacacaggtgaattgatggtatttcttgg

SEQ ID NO: 46590 - DNA, 384 bp, Glycine max
agtgtcatgatttctatattaccaattttactagctgttaatgttgcatcatagttttgctatgtcatctacctttggtctcatctctttaccttacaatttagtcaattctatcattaccctctgtcaatatacagaattagcaacatgcgaacatatctaatccacgaaattccaccactaatagtcagcctataatccataaccaatgaaatgcctcatatccgatttattccatcttctaattttattgtagtttctgtagatgtaaaataagcgtttggttctccgtttcaacataaatctattggttagtttataattcactcaattctgcctttagtcattttcaacatgcagaactatcaacatgcaaagagatct

SEQ ID NO: 46591 - DNA, 405 bp, Glycine max
  unsure (1)..(405): unsure at all n locations
ttagaccgacctgctgcatgcaagcttggagagtgttgtttcaccttctcgctaagccaatctgctggattagcgagcgtcactcccctcctcttantatcggttgtgatagttgaggtcctaagtggacaaacatgaaataggtgatcgttcaccaaanaatgagctgcatgaaataatataaacaaaaagtacgtcaagtacttcatcactatgtacataatgaaatatttatatatttgtgccaataaaaaaaaccatgcagagtataggaacacactaacaacagtaccatatatcacacatatgagagcgtctgagaataattccaccaagaggagattatgactacagatagcagaggcaataaaagaccanaacgcaacacaaacagggctcagtacc

SEQ ID NO: 46592 - DNA, 470 bp, Glycine max
  unsure (1)..(470): unsure at all n locations
caacacacaatctatgtatccaaaacccctcaatttaatggattttcaaggtttgagaagtgaaattgagaatgaggtaaatttggagcaaactctcacctcacacaagtctataacatcaattcaaacttgctcaaactggatttacacctaaaattccaccgaatcaaaatttgactcctcaacatccaattttaccctaaaaatggctctttgttcactntagtcatttgtttttctctctagcacggcccaaactntctcataagtcctaaatgacatttcaagctaggattaactcactttaacctccaaattccactaaatccagatatggccttccaactctcagaacctcactctttttccactcataacaccatattctcactttctaaccctatgttaactctacccttcatctctaacagttgtccataagcaatttcagcacatatacatcacaagca

SEQ ID NO: 46593 - DNA, 423 bp, Glycine max
  unsure (1)..(423): unsure at all n locations
agcttgtcattggtaatgagtttccaganacattgatatcatttgaattatcatcatcatgccccccgcgcctacattgctgctgagcttctcggactagattccgatgacggcactgcggcgcgttaactttnttcnctagaagagacacgaagctgtaaccgcgcgttggaggcgcgtggaatctccgatgacggcgcgttatgcaaggttttggtcgcgcttttccgacgatcctaaccctggtctcgacggagaagatgacggtggcggacggctgcggacggcggtgacttctgtggacggtggaggacgattgcggcggacggcggaacccgctctgatgccaacttgaaaagtcttgatatttagtgagttggaaagttacctcacttagcgtagctttattaactgtaacacaca

SEQ ID NO: 46594 - DNA, 437 bp, Glycine max
  unsure (1)..(437): unsure at all n locations
gtactcagtatcagtcttgttcccctgttntgttgctaaagccttcatctttacgtcatacacttgagtaacatcttttgctntattgttatcgttgcttggataccaatcaaatacacttcaaggttccaaattgtgtgtgaatttgtgataattctagttagaggtacaaatgatttgcgtatgctaaatcatgtcatttgctcctgttgatgtgcaggtggtatttcctagttacggcgagcgttatttatcttcaccattgtttgaatccattcggcatgaagctgaacagatgacatttgattaagaacaaaaatactatgtaacagtgctctgcgaatttgatagtattatagtttttctttttttttgtctggtgatctcctattcaggacgatccatatgnttgacttcaataatacataagaaattta

SEQ ID NO: 46595 - DNA, 61 bp, Glycine max
agcttaataaagtccttggtgatccatattatgtgtgtgtgtgtgtgcgcgcgcgtgtgtg

SEQ ID NO: 46596 - DNA, 387 bp, Glycine max
  unsure (1)..(387): unsure at all n locations
tgatgacatgggctgatcatganataatttatataacgaagcttcccttggattcataaggaatcccaaggagtttgcatgagagactaacatcatatgtaccctactatcccaattgtctttacgcatcttccacgagctcttggtcaaatgagttttcttctcaaatgtgcaagtgcgaacctcaaggttattcttgctttttatatatactctactccttttgccttatacattaatccttattacactttttgtgccttccttgtaaaatctggagatcttttgtctcttttttttctttacttgcctttggcggattttatctctctttttcctttcattatttcccaacttcatgcatgtgttgtttgcattgcccttgct

SEQ ID NO: 46597 - DNA, 289 bp, Glycine max
  unsure (1)..(289): unsure at all n locations
agcatgcacttcaaacgaagtgcttacaaatatataaagcaccccaacctcattgtaactttaaaanaaatttttataacagaccattttaatttactttaatgattggtcatagtttaatttagggtcaagtattatgatatttagtatgactttgtatttaatgtctaactttaatgtttgaaattaatattgatttctatgtgatctaaaaaaacaaaatatcttggctataacaatactctgcagaccttcatatctattaaagaaaaaaaaccaaattacatat

SEQ ID NO: 46598 - DNA, 458 bp, Glycine max
  unsure (1)..(458): unsure at all n locations
cactatgatactaagctgcgcgcaagctgaaagcttctctagaatttaacattttgaattgggcttagtgagcagatgcgctaagcgcaagggctcttaaaactcaaacgtcatatgggcacgctaagcgcagctgtgcgctaagtgcaccatacgaaactgccaaatattataaggtacctgccgtaggtagttaccatttcactcttgttgtgcattaaggccattcattgcatctaccctcaacttgcttcatttccctgcattcctgcacctttgctattctttgcattcatctacacaatccaagtaagtttctttactttacttcatttcgttctaagttttcaaccttaggatagataatttagtgattgttaggtagaatntctggttatgcttagtgttaggttagttgttagttagaatagcttcanggttgtactgtagtcacaatg

SEQ ID NO: 46599 - DNA, 427 bp, Glycine max
  unsure (1)..(427): unsure at all n locations
ggaccctaatcactcagctgcagcttttgcgtaccgctcttgtgctagtttttccaagacttccgcgccatctgtttattgatcgaagagatggctttatcttcatattcccattcccattctaagactctccnnnngttgagaacatcttcacatttctccttcatatgtgtcttgattagagcatagagagacaaaacaattatctagtttattattaaaaaagtgttttcatatttacagttcaccangaccttttacaatgatttgtacaccacattacaaagattgattggtctaaattccttaaagaggtggggtgatattttttaggaaataagagcattatagtttcaaccaaccttatatcaaattccttatttcanaaactttctttactaggcaccaaacatcatcaccaacattg

SEQ ID NO: 46600 - DNA, 464 bp, Glycine max
  unsure (1)..(464): unsure at all n locations
ntcaccccataattcctccaaatatgggcttatttcctttgttccaaaagttccttttatgaatgatgctctcctacaacctatgacaagttataaggagataaactgtacaggctcaaggttcaatcatacaacggataaatcaatcatgcagaatgtaagctctttcgctaaatggctatcttcaatcaaaacacggccttcatcctcttcaaactcatgtattcattccatactcatagattcatgcaaaaaccattacttactgctagtcgttctctcgcaattaaagatcacactccaccgggttgcggctaatgcattccttcacaatcaacctgacaaaccaactaacattntcagtcataatccaaattccatattctttctcttctaataactgcatgctcattcaacgcttatgatctgcgcatatcagttcactcacatcatacaattgatca

SEQ ID NO: 46601 - DNA, 344 bp, Glycine max
  unsure (1)..(344): unsure at all n locations
ctagcgcgaggaagaatgcagaggaatatgagttgtacaggttcgctgngngnnnggttcatctcattaatctcactacttcagttcatccgctaagcgagaaaggcgcgcgctaagccaaaaatcactaacgtgcgctaagcggtccatacgtgcactaaactcacgagcatgaacaaggccacctatttaagcctgaaatcaaatgttgagaagagagtttggattgggattcagagctntgcatgtctaggggttctagagagagaaagggccaagttccagagagttttgagagactntgctgtgaaagatctgcagagaccagagctggaaacatgagc

SEQ ID NO: 46602 - DNA, 418 bp, Glycine max
  unsure (1)..(418): unsure at all n locations
tctagccaaatggacttaccttgaattaattcctttgatagcctctttgagccttgtgtccctttccttgttttgaagctcactacaagccttaagtgaaaaaccatgatattaccatatccttaaggaattttggagctttggaattgttttgggaataagtgtggggggtttttgtttcattggacaacttgttttgttggctatgcttcatgatgntatttgggccatacttgatgtacattgtatattggttaaatgttgggcatgctgaatgaaatgttgtttctcanaggctaaagagtaaaaaaaaaaatattctaaaaaagaaaaagaaaagcaataaagttgagtgaataagatcttaaatggcacaagaatgatgaaactcttggntctactcttcatgttaaatttt

SEQ ID NO: 46603 - DNA, 426 bp, Glycine max
  unsure (1)..(426): unsure at all n locations
agtcttctccgcgttttctcttcatacatangactacataccttcgatccaccgcatcattgcattntgtactgaagctagtgcagcttcaatatcccatataataatctccccgccgtggcctcagaggcaaccacattgctctaaaattcacgacacttctaaagaatcagaaaatggattngataagattcaaactttaaattcaatcaaactatgtcatatttgaggacataaaaacaagaagaaaaaaaaacttttcttggtgtgcgattcataagaagcatgaaaagttcatagtacacattacatttttttctgccacagcaaggcaagtaacataatctgagtgttgacggagtgtcctaatacatgttcctgtggacaaagcattccatgtctagcacatacatacaaccaccaagt

SEQ ID NO: 46604 - DNA, 401 bp, Glycine max
taaggctgagcgtgatagaggaatcacaatttatattgccttgtggaagtttgaaaccaccaagtactattgcacagtcattgatgcccctggacacatggatttcatcaagaacatgatcactgggacatcccaagctgactgtgctgttcttatcattgattccactactggttggtttgaagctggaatttcaaaggatggacagactcgtgaacatgctctgctttcattcacccttggtgtgaaacagatgatttgttgctgtaacaaggtaaattatgtgctgtaatttaaggcccttatgtctcctttacatcacacaatatcttcattccttttgtgtgttcatatgagattaaatagtgttctcttctcattttatacagatggatgctact

SEQ ID NO: 46605 - DNA, 434 bp, Glycine max
  unsure (1)..(434): unsure at all n locations
gctgttgaaccgattatggtaagaagatcacacgcgtttgtcctcnccttnaataacatgattgcnaagttggtgattattactacagacgaaataaatgaagtacactgttctgtagcacttgtgtgcttgagagaaacactagccttgtgaggagtgaagcataattgatttttctttgatacctgtcatgggggagatngataattcctatgcttacgtaataagaatatttaaatcacatagcaattatctaattatactattttttatcgcttctattgtgatattacattaggaatttagcttcttctgagtttttgtctagtagatactaaagtaatttaattcaaagtgttgtggggtgtatttcttttttgtagaattacacaatatgacgtctgacagagggtcgaaaaattggagcaatgcac

SEQ ID NO: 46606 - DNA, 403 bp, Glycine max
cttgaatgctctattcaatggagttgacaagaatatcttcagactgatcaacacttgcacagtggccaaggatgcgtgggagatcctgaaaaccactcatgaatgaacctccaaggtaaagatgtccagactgcaactattggctacaaaattcgaaaatctgaagatgaaggaggaagagtgtattcatgacttccacatgaacattcttgaaattgccaatgcttgcactgccttgggagagaagatgacagatgaaaagctggtgagaaagatcctcagatccttgcctaagagatttgacatgaaagtcactgcaatagaggaggcccaagacatttgcaacatgagagtggatgaactcattggttcccttcaaacctttgagctaggactctcggat

SEQ ID NO: 46607 - DNA, 420 bp, Glycine max
  unsure (1)..(420): unsure at all n locations
gctaacggaatgaatctttaagaactacctttgaaatgactggtttcttgctctcccttttgatttgtgttcactccctacaagtaagtgcacttcccctttgctctttggctcacattgatgtgttttagtgctttatttgtcatttttgcaataatccgtgaagcaattcatccttgaatntatgcttgctttgttngaattaaggagttgtaaggaatggccgtatgcctatggtgtattttacaatgaatgggcatgccacattgcccncattccccactttgtcatgccgaaatatgcacccaccaagtgctcggtgaaatgcctcaatgccatntgtgcatgaatttgtgaattttatttgtggatttgacttggcacatatggctgccattcttgagtgtatggacagcttgt

SEQ ID NO: 46608 - DNA, 388 bp, Glycine max
  unsure (1)..(388): unsure at all n locations
cccaccatcttnttatagtagagtaccgattatgtgtctaccatcacgattatcgtctccctctcccttattgggggtaccacctgngctgccagatccctccaccttttgggcgtgttcttttaatgatccgtccccctttntgcacactgtttgtagttgcatcctattcagaaccatatcaaaattgtactgatactggctaacacaggcaaccattaggtccttccaagaatggactcgggaaggttccaagttagtgtaccatgtaacagctaccccagtaagactttcttataaggaatgtatcagcaattcctcatcttttgcgtattcccccatcttctgacaatacatctttagatggttcttgagacaagtagtcccc

SEQ ID NO: 46609 - DNA, 250 bp, Glycine max
ggaattttgcagcaaaaagcctgttgggttcaccccaaattccgttgtcatatgctaaacttgatcccatatctacttgataattcaagggtagccataaccctagccaaggttcatcaacctccatttctccgagaatacgactcgaacgcaatgtgtgcttgtcacggagaaacctcggggcgttccattgagcattgtagggctctgaagcgtaaggtgcaaggtctaattgatgcgggctggctga

SEQ ID NO: 46610 - DNA, 400 bp, Glycine max
  unsure (1)..(400): unsure at all n locations
ctggcctcccccacggtaatcctaaatgcagggacatcaattcaataagcctaatggcatcaatcaatctactgccttntctagactataattttattttattgtcagattctatcaacatcagcaatctggattttctcttattctctcttgattgaattgtcaatttaatgattaatacatgctttatctattaatgtttattatgacaggctaacatttactttacaagtcagatacatcaaatgaaactcagcctaatctgtctgcactatagtttttgtttccttacatctctttgatgtatgcttagtaagtattgaatggtcacttgtttattagttctgaaaacttgatgcaagttcttgatgaagatgcangtatatcgaattttatgatg

SEQ ID NO: 46611 - DNA, 200 bp, Glycine max
atgatttaacacacgatgaagaggcctcatacgaaagtctgctgtgatcacgcatagttcagcagctcccgacaaccgactacagctcgtgacgcgtacgagattgtgatccacatatcggaacaatttagtgagtgctgaatccctgcctgttaactagtatcatcgactctgtacttgctgttcctttccattaaact

SEQ ID NO: 46612 - DNA, 422 bp, Glycine max
  unsure (1)..(422): unsure at all n locations
agcttatgaccattcgaatntctcgagagctttcgttgttcaatttcgagcgtctcgatatgccccccgccctatgtttctaccatacgaatagtcgttgtctatttgcgcgagttcttttgttgcttcctatcnnnnnncttatcagaatagtactgatactgcctaacgaaggcaaccattaggtccttccaagtatggactcgggaaggttccaagttagtgtaccaggtaacaactaccccagtaagactctcttggaagaaatgtattaacagttcctcatctatgcgtatgcccttatcttacgacaatacatctttggatggttcttggggcaagtagtccccttgtacttgtcaaaatacagcaccttgaacttgtgaggggtgatgatattgggtactaagaacaactcttct

SEQ ID NO: 46613 - DNA, 305 bp, Glycine max
cttacaacagcaagccccaagagactcaacataaggatgcacaggtcaaagttgagtatgagaaaagattgtatgaccaagtgaaggtgcaaattgcaaagaagaatgaaagctatgccaagcaagccaacaagaaaaggaaggaagtggtagttgaaccctgtgatgatcctggacatttgaggacaaatgtttttcaagaaggagggaatgatgagaatcctgaaattggccaaatacaagctaaaggcccaagtggagaatggcaaaggcccaagtggagaaagataaagtccccgagtgga

SEQ ID NO: 46614 - DNA, 456 bp, Glycine max
  unsure (1)..(456): unsure at all n locations
agctccctctctaagcttcttatgcaaagcactttcttggaggtattcttctctttccatgcccccatctcatcctatcccctattttgaggggcatcttcctgcttatgaagactatcccgggcgtgactatnnnnnaagagatacccatcttggccccctgctccacctcatagatccgtccccacatgaacaaccccaaccgaacatagtccaccatatnccgacctcacccacacccgtaaaagaatctgttcccttcgcggaagataaaggaaagattgacgcgcttgaagagaggctaaaagcagtcgagggccttggcaattacccattctcggacttagaggatatatgtctcgtgcccaatatcgtcattcctcccaagttcanagtaccaaactttgataagtacaaagagaagacatgtncaaaagggcatctttggatgtattg

SEQ ID NO: 46615 - DNA, 429 bp, Glycine max
  unsure (1)..(429): unsure at all n locations
ctttgaatctatgcttgttatntgatcactntgtatagtatgacgcacctagttgctcatgatcctgtgaatntaaataaaacaagcgcaagctcggaaggtagtcatacctcacaaaatatatatttgtatgtttaggtagtgaaaataccttaaatatgcatgtatgtaaaaaaaaaaaaaaacacttcacaaaatatatatatgtatgtttaggtagaaagataccttagatatgcatgtatgtaaacaaaaaatacttcacaaaatatatatatgtatgtttaggtagaaagataccttgaatatgcatgtatatagcaaaaatatctcacaaaacatatatgtttaggtagcaagataccttggacacgcatgtatatggcaaaatacctcacanaatatacgtatgtttatggtagcaaatac

SEQ ID NO: 46616 - DNA, 307 bp, Glycine max
  unsure (1)..(307): unsure at all n locations
agcttataatatatcgaggcgctcgaaattgaatggaagctcttgagaaattcaaatggtcctccccctcccactatctgtatccttgagagatatgttatgcgccaccattccactctacatactagcctgattnntnttaaccaagactgaggtgcctagtgagcgagctaaatcacaatacatgctatgcgatcactgaccgtttatcaaaccggaaactagcacgcgccaacatctttagtgaatcaaacaacacgaatcctttgtgagctaccagtgagttaacaaattttcttatttgaca

SEQ ID NO: 46617 - DNA, 394 bp, Glycine max
tcttcaccatcatgtatgacacgcgaactttgtccatagctcttgcttcccgcgatgcatcttttcgtgttcgcctgagcgggcttataacctacaccatacttgccacgaccatcttgggtatttatcaggctacgtatgccgacgttgatcgttcctatacccattccgcgttcataaccgctccgcaacataacgtcggaccttattaccgctgcatcggacacacaaggctgcccaaagacggagtccacggaggaaatgctgaccacctcataagactggaaagcagtgtctaacgaatcttctgcggatttcacataaggcatggacgatgggcagcttaccaagatatcttgctcgcctgacacgatgaccaagtgcccctccacta

SEQ ID NO: 46618 - DNA, 364 bp, Glycine max
  unsure (1)..(364): unsure at all n locations
agcttccatgagtcangcaaaggagatggcttgaccctgtcctttgagatggtcatgatggcacctctcacacnnatgtcccgctatgcttataatatatcgatacgctctaaattaaacatctaaaactctcgctnnntcaaatggacataatatttcatacggatgtccgattcaggcgcatcatatgttgagaagcttgaaattgaacaacggaagcctatgagaaattcaaatggtcataactttaccacggatgtccgattctggcttatcacatatcatgacactctaaattgaacaatggaagctcttgagaattcaaatggtcataacttttacaccgatgttatattaaggcgca

SEQ ID NO: 46619 - DNA, 448 bp, Glycine max
  unsure (1)..(448): unsure at all n locations
tagcgcanatccttgtagcaatggttaggcttagcgggcgcttgccagctaagccgattatgcagaagctgaatttctgcaactttcgctaagcggcctcacatgtcgctaagcggtagtgtgttttttgtgaaggctagctaagcggaccatgtcttgctaaacggccagtgtctttttcagtatttgaatttgaataacttgtgtcctgtntaactgtttggttcttttatttgcagatagcttataggaaatgcaagaatattggttcaagacccacaacacaatatgatacaaggagatttcactccttagatgcttggaaccggtacacagataatgtcctatggagaaaaacatcttgcctgagaggaaggtggagctctaccacactgagctagatgaatttaagactgaattggagagggcataattccataaatgcctc

SEQ ID NO: 46620 - DNA, 344 bp, Glycine max
gcacttgacaagagagagaaaattataaatcaaagattaaagatgtacccattctgttttagggttctttgatgatgtttgtgatgtttatatgctgaaattgctaatggaaatctgtgagagaacaacggtagaactaacccatggttataaagtgagaatgtgatgttatgagtggaaaaagagtgagactttgagagttggaaggctaagtcggaattctgtggtaaatggaggttagagtgagtcaatactagcttgaaatgtcatgtataacatgtgatataggttacgctgatctatagagaaaaataaatgaccaaagtgaaccaagagccatttta

SEQ ID NO: 46621 - DNA, 482 bp, Glycine max
  unsure (1)..(482): unsure at all n locations
agcttaatgaatatcccatttaattggacctcaatactcataattacgagttaaatgtaatgcactgcacctatttttgtattattgtaattaatgcgctgcactgtaacgaaagggtttgggttagagcaccatttcctatttgcggctgtgaccactaacccatttctttttccctcctgtgaccactcgattttcatttgtgatatgaatttactcatttangaattttattgtttgaccgttgctacggtggatgaagtgatgattgatacaccatggagttatgatagttgtccctactgtactacaacatttgatccattaaaaataggtgcagcctaccgttcgtgctagaaccaagttactcacacgattcctangtaaaatgtatttctccccaaatatccatcgaagtcaattcgaatgagttatcatgtaattgacatttgactctttactgaaatggatatnntgtctgt

SEQ ID NO: 46622 - DNA, 426 bp, Glycine max
  unsure (1)..(426): unsure at all n locations
cagcttatccttatggcttgcctccggacttcactccccgtaccgccctcccnccctcccattattggacatcgcgtgatatgttatgaccatttgtatttgtctagagcttccgttgannaannnaagcgtctacatgtattatgtccccgaatcggacatccgagtgaaaactgatgaccattcgaatttctcgacagcttccgttgttcaattttgagcgtctagatgagttattttcccgaatcggacatccgtgtgaaatgttatgaccattcgaatttctgcagagcttatgttgttaaatttcgagcgtctcgatatattatgtccccgaatcgaacatcctagtgaaatgttatgaccacttgtatttctcgagagctttcgttgttcaatntcgagcgtctcgatgatatatgttcc

SEQ ID NO: 46623 - DNA, 351 bp, Glycine max
tcaacatcagaccacttccaggtgctggaactacttcacatggacttgatggggcctatgcaagttgaaagccttggaggaaagaggtatgcctatgttgttgtggatgatatctccagatttacctgggtcaactttatcagagagaaatcagacacctttgaagtattcaaagagttgagtctaagacttcaaagagaaaaagactgtgtcatcaagagaattaggagtgaccatggcagagagtttgaaaacagcaagtttactgaattctgcacatctgaaggcatcactcatgagttctctgcagccattacaccacaacaaaatggcatagttgaaaggaaaaat

SEQ ID NO: 46624 - DNA, 413 bp, Glycine max
  unsure (1)..(413): unsure at all n locations
ctgcagctacgatcaacttgattcgagtgtattttttggtatgttccctcctccctttgtggatggtgctcctctcactatttgtgatgtatggaagaatatcaccattgaggggcnnnnncgagctcaaagatctagcctccatagaagcttctcaagcaagcttccatcaggtcaagacatttatagtagtcaagaggagactacttttttcccttcttctagtgggagtgaagatgaagcaaggggtgaagactctagtgaggaagtctacctcaatgaagaaggtgacatgctaatggttagaaggctccttggaggccaaacttgtgatctatcccaatcccaaaaagagaacatcttttatacaagatgcatgantgtagataaaaattgttctgtcattgtggata

SEQ ID NO: 46625 - DNA, 436 bp, Glycine max
  unsure (1)..(436): unsure at all n locations
tatatatcatatttgtaagccctaaaacatatcaaatattgaatggaagtctaactnttcatcctttttttacgatgatatcctgtcaaacctgcaaaattataaggctttgggtcccgagaatgatttcattcaatggttaagtccctcgtcaattttttattttattttttagaattaagtccctcttctataatcaatataccgtcgttattttattatagaatagctttcttatccttaatttaactcttccttgcgtgtggataaaatttatccttaatttagtgagtaataattttgagcaaatcaaatggactctntttaaaaattaatatgaaattaaatgaaaattttgttgagaatcccttcacaaattgatggagagttacgatttatttcttgtgcctattaaattatcatataaaatattcta

SEQ ID NO: 46626 - DNA, 430 bp, Glycine max
  unsure (1)..(430): unsure at all n locations
agctggaaattgaacaactgtagctcttgagaaattaaatggtcatactcccttctcactcntatgtccattcatgcgcatcacatatagagacgctaaaaaatgaacaacggaggctctcctaggttaaaatggtcataagttttcacactgatgtccgatacaggcttatgttatatcgagacgctcaaatataaacatcgaaagctctcgagaaattcaaatggtcataacttttcactcggatgtccgattcaggcgcatnanatatacagacgctcggaaatgaataaaggaagctcttgagaaatacagatggtcataactttttacactgaggtccgattcatgcttataatatatcgagactcttgaaattaaacatcgggagctcttgagaaattaaatggtcataatctttcacacggat

SEQ ID NO: 46627 - DNA, 260 bp, Glycine max
taagagtagtgtgccactggtcaaactaactttcctaatgtttgccttcgcaggacatggccccgaggaagcttgcctctcagaggtccacgagagacaacgctgtcgaatgaactacgtccgctcctgagtatgacagtcaccgctctatgagtgctgaacacctgcaccgctttaatgccatcaagggatggtcgtttcttccggagcgacgcgttcagctcatggacgacgagtatactgattttcaagaggaaata

SEQ ID NO: 46628 - DNA, 444 bp, Glycine max
gcagctgcatttgaattttaccatcaaattctcaataatacatgttccctccttcaaaattgctatgtgagaaccatgaagggagagaagtcgaacttccagatcagagcatctttcttttagccaaacacgatacggattgtgatagaaacagcataaattgtgtagttcttcatcctctggaagatagccctgcttgtcaacacagcactcacaatcacactgagtccgggctccgtcaagacaatgtcagaggcactccttgctgcgtcggttgcatcatacactgcaatgccaatgtctgctttcttcaatgctggtgcatcgttcacaccatcttcggtcattccaacaatggtgattctatcctggaacctcttcacaatctcatacttatgctctgcacatgtagaaaatctcactcagttttcttattaaccttat

SEQ ID NO: 46629 - DNA, 387 bp, Glycine max
cgcttgtggagcttctatggaggctggatctttgagcttcaatggtgtccttcaatggtgattttccaccatggagatgcagcggaagacaaaggaaaatatgtgagaggaggcgccatccattaaggaataagccatggaagaaggagcttcaccaccaagatgagccttggataataagctcggagaggatgcttcaatggaggaatagaaagagggagagaaagagagaggggggagcacgaaattgaaggaataaaagaggtatataagtggaactttgaagtatgtctcacaagactctcattcatcaaagttacaacaagtgttacacatgcttctattatagactacgtagcttccttgagaagctctcttgagaaaact

SEQ ID NO: 46630 - DNA, 398 bp, Glycine max
  unsure (1)..(398): unsure at all n locations
gagtgttctcaaagtagagacatctcttctcannaaaacatcttctatgaaataaccagtataattaatcatngtatcaacgttttcaagatgttataaacttatgaatataaggtggaaaagacaactgtcctcttagctagacatatattctttactgtgcgttataaaataataatattggtgttagggttacattaatttttcttatctttaantctttgtctttttgttgatattatctctaaattctatgttttattatggattgagcattccagatttattgtctttcggaataaatttgaaaaattatcttagttttgcttgttacaatatgtcgttagtaaacgtgtatatggattctttgatcatagaactgtttttttctacattat

SEQ ID NO: 46631 - DNA, 488 bp, Glycine max
atcacgcgtaatgataatgcgctcaaagtgcttagctcgattgtttacgtgaaccgctgaccgcactagatctactatccggcgtgatacaccctcatcttgcagcggagcgctccgtatcagatggaaatcctgtctaaggcgctcctgatgcgacatgagatagaccatataactggtcctaatgttccagatggcaacacacgaagcgtgggctctgaaccgataggcggaatatacaggtggagcaactggcggtgatgctcagagcacagttcttgctgaccaatggtgaggctacattgctacttggtaatcacaaccgggggctcggtatcccgaaaggagttgaatggaagacttacttaggcttgtggtaaagatgcctgctaaagaactacgactctcatgggccttattgcacatatctgacccttgggatcaccgtgaccccgctcatcttgtggcatgttacaataacgtacatg

SEQ ID NO: 46632 - DNA, 336 bp, Glycine max
  unsure (1)..(336): unsure at all n locations
agcttatcatatcgattaaagatctactctttcatagcccccccgcatctgtatttgcattctgcttctattttttcattatttgctttttctttaaataactnttnnnttttatggccattttttgtttgatttggttagatggatgaagatgagtggatgtatgaaataatgtctgaacgagcggatatgaattatgaaaatgcagaatcatgtggtgcaaatgaaccacatgttgattgttcggatgcactcaagacttctcaggttataatgttaatgtttgtcacatatttaataaaatgaatactggtagacaacttaaattatgtggat

SEQ ID NO: 46633 - DNA, 371 bp, Glycine max
ataactgaacttcgatgcgaatagcctgtttgtacttccagaacataaggaatttctatttattggtgcactacaatatgttatgtgattcaaactgatagacaatgtattatgcacttcaattttgatatgcttgaatgagatttttttctttttaaaaaaacatattattcatgtgatgccagctgaagttttaatgaactttcatgtttcacatttattgaaataacttgagtttgacatcacataaatggcgtggaccaagaaaatccaccccacatattgaatttgaattcctttttataaacaatatcaaacttcttactttctcttaatactttaatattaagatataattaaccaattcctca

SEQ ID NO: 46634 - DNA, 414 bp, Glycine max
  unsure (1)..(414): unsure at all n locations
agcttaaagtatgcccgagtcattcatccgtatgagatccccctcctcctctgatgttctctacagatgtatgttgcaatgtgacangtcatcccgtggtcttactggcatnctnttaacaagaacagtgttcctgattcatggtagaggatgataacatatttaaaaagaaatgtcaaaagcctttatatgttgatgaatccagaaaatcttggtcgttatgttgaaatgtatatatgcatatgtaataaaggcttcaaataccatatttcttatacagatgatggttgaacctatctcctataatggggttacaatcaatcattagtggttgtatctgctataaattcaactagactcctcccctgcataaaatcccgcaagattctgatatgaattattgtacctcgatga

SEQ ID NO: 46635 - DNA, 339 bp, Glycine max
  unsure (1)..(339): unsure at all n locations
tgcctcnagaggtccagganagacaaggcggccgaaggaactagttccgccccggagtacgacagtcaccgctttaagagcgttgtacaccagcagcgtttcgaagccatcaagggatggtcgtttctccgagagcgacgcgtccagctcagggaggacgagtatactgatttccacgaggaaatatggcgccggcggtgggcaccactggttactcccatggccaagtttgatccacaaatagtccttgagttttacgccaatgctnggccaacagaggaaggcgtgcgtgacatgagatcctccgttaggggtcagtggatcccgttcgatgccgac

SEQ ID NO: 46636 - DNA, 260 bp, Glycine max
  unsure (1)..(260): unsure at all n locations
aaggttattttctaaatattcaaaaaatactttgatgtggtttcatagtgttattaaagaatttatcatatggcattatcaagtgaatgtgccaagaaagtcttacaattatatgtatttcattgtggatagaagtcgggagcatggagaatagtaaatatcgatactaagaaaataaaattattttataaaaaatattatatattgcaatcatattactcatagttggcatcaatatatgtatacanatatactatata

SEQ ID NO: 46637 - DNA, 408 bp, Glycine max
aagcttccatggattctatgctagatgaacaaaggaggatggctttcagattatacagatcgatttaaaaatcagaacaatcagttcagttatgttcctttatattctatgacccctgtaacaaagattcatacttggctgcctgtcctggtatcagcattacattggaaagacttggaaacctcttaatttccacccccatgcagcattcatagacatagccaatgtatgtatagaatcatattaataatagttataattataactgaaggataacgaagaagcagaagttagcattagatccttgtctatcttggtttatgacaatcagcaccggtggatctatatggaggctaatgggggaaattgcccccacaaagtacattctcttagttgaatatattgaat

SEQ ID NO: 46638 - DNA, 441 bp, Glycine max
gctctttcaactgcacaaggctcttaatatttgaagagtattcttgtggaatctcttacccgacgaagacactgacaaaaacttatcttctccttattggacaaagtatggcaagctgggggcaagtaaattctcttcccattataccttggatgcaactgtgatcatatgcccatatcatctagatcttgacgggtattgaagccgtgcttcgtcttgccttaaatgttaaggagctgtccaatcacactgtcacaaacatatttccccacatgcataacatcaatacaatgtctaacgtctagatcagaccagttcagaagatctaagaatatgaacctcttcttccatatgcaactcttacttttatccttcttttgggtctttcgaaattcagtattcaggtattgaacccgctcatatacctgctcaccagtcaac

SEQ ID NO: 46639 - DNA, 383 bp, Glycine max
  unsure (1)..(383): unsure at all n locations
aactattggcgatcagattgacattccttggattatagggttgaaccaaactcatgcttttacaaattntttatcaagtcaagttgaaatatggaagtaaccgtcctgcaaaattggggcaaaagatgaattgagtcacatcactgcttcgtctactgccaaacatatttaggattgtngatgtccttgttacttccagtttcaccttgacaaagatgtcatggatcatgttgaaaatctaaattgattcaaccccatatcctgcgtaaaaattcgcaatacttcaactatacatcattcgcatacatccatgcttttcattggttgcattgctcattgcattctttccttgaaaaataaaataaaataaaatgaacttaatc

SEQ ID NO: 46640 - DNA, 515 bp, Glycine max
  unsure (1)..(515): unsure at all n locations
ttggatttctccaaacctattaatagagagcaatgaaacttgatgacncattgttanaatcaacattgatatataaatatgagttaatcattatgtgttttattgtatattatgatttttatattcttaggcctccttcttaatacagtcttgtgtgtaaattatagagtggtttaatttgagtatgtaatggttggtttgttgtnttagagtagaaatatgaaatgttatgactggtttagtgttataaataataaaatgtatgggttaatattttatacggagtgtaagtaaatttggttttatttatctaaatttaaattttttgtatattttttatatatttttaaactattaatttatttattataaaattaaaaaattattgtttagatagtgataagatgttattatacattgtaatatattattagttgtaattgaaagttttgtgatttgatattaatgttgtgataggatatgtaattagaagtactttgtaatgtaaaattaan

SEQ ID NO: 46641 - DNA, 186 bp, Glycine max
gtgtatggaccatgacgtaaccaattgtgttcatcgattttggtgccagcacagacgcgacgcctaagagcactttggagaaattaccattcaatgctttccacttaaagccgagttcaatggtgtgtcgtgccttctacagcacccgtcgagaggttacgggagagatctatctaccagttccat

SEQ ID NO: 46642 - DNA, 264 bp, Glycine max
ataagctctaagagagcttttttcgtattattatggccattgcaatttgtatttatttattattatgcaaggaatgggaagtactttctgtttaaagggaaaggttcatgaaataatccgaccagttgttataaccaaagctctgtagtacagaatatattgattttatggggggtggactgcttttagaaacctaatcatgtatcagcattttctgtatagaggttaatacacattctgtgctgagaatcccatttataatac

SEQ ID NO: 46643 - DNA, 563 bp, Glycine max
  unsure (1)..(563): unsure at all n locations
cgggggtgggcganacgtagccccccagagcgccgtggagcgtggattgagcnattgaggacctggacnntctcgagtgngtgtgcagggatgcatgcgtgatggacagatacatgtgagtgtgagatggtttagtgttggtgtggtgccncctccgcgctattatatgtcgcggcgtcgagcgtggtatagtgcgatggagagtggtcgttctggcgtgtggtgtgtgaaaggagtatggtatgactcatgagatatgttcacaaattcaggagttgtttgggatatctctgcacacaggtgtaaaggaacagagtgttattaaattccatgcttcagtatgtgagtacagtcagaatagtatacaggcagtagagtttatgttggaacgatgggcgccgtatgttttcgaagagatgggaggagagagaaacaaatcatagaagaatattcttcatcgagatgaaagggaatgagataagtgagagaacaaaagagctaggaggggagaacagactctatgttgtgaggcgcaatgtgttctgaatggagttcaaaagttn

SEQ ID NO: 46644 - DNA, 469 bp, Glycine max
  unsure (1)..(469): unsure at all n locations
tttgtgtattaatattattagaaaaatgaacttaatgagactttgaaacaattgaattaataaatatgtagttacaatatatttataattttaatatactaatttttacattttaggcctcccccctcttantatcgttctttgaatgttgtagttattgttattatatatataattatttttattgattattaggatgaaaatggaaaaatatgtattttatataatttttattatttatttttattaatattttgtatgtgaaatattattattattgatatattaaattttttttttttttattatttttttttaaatttaatttttattataagtttataataattatgatatattagatgattataaattttgatataaattatgttatttttatagtttaattattgatataattataaatttatttatttaatagaataattactatatttaattgtaattg

SEQ ID NO: 46645 - DNA, 359 bp, Glycine max
  unsure (1)..(359): unsure at all n locations
ttgaatcgaaatgttcaaatgtatcatatcnntncnntttcattatatttattaagttaatttcaaatcactgcatccaactttcatcttttgtactgattgaaagtcaagcatttttcactatccgaataaaatctgttaaagcaaaattttgcttcccaagcggataatcttattcaatagctggtttcttaaaaattttgtcaatataaatatatgtgcaaatatagctattagatatcctctaatataataacaaaaatactataacctttttgttccacttggctagaatgcttacttgttagatagagaagtatatgatatgaatttatggctaactattcctgatactatga

SEQ ID NO: 46646 - DNA, 82 bp, Glycine max
  unsure (1)..(82): unsure at all n locations
tagcgcgattcttagancgacctgaggcatgcaagcttgaatcagatattcctcagactgttaatcatgtntaatactcaaa

SEQ ID NO: 46647 - DNA, 261 bp, Glycine max
  unsure (1)..(261): unsure at all n locations
tgtacctctccnctctccctncctctccacaacctgtacaaattctctgtagtctaaatgaattactatgatgcacaaggtgagaactgagaactgcacccccaatctggcagcaccaagcatgcaacttgtgacagatgttccccttccaatcagtaagaaaatcaagacaatcagtcgacacgagtcnaccatccaaatagttttaagatagcaaccaatcaatcactcgctactcgctgtcagtgtgcaagtaacaaa

SEQ ID NO: 46648 - DNA, 417 bp, Glycine max
  unsure (1)..(417): unsure at all n locations
agcttgtcgtcgagatcaccaaaagcagttgtggcaaaacgagactccaaagcctggaggagnccnnccccctncttttgcttgatttgtttggtgtaaggcatattagatcntgtctgtgctattatgtgcgtatttannaaattcttcaactgaaactatatgttccaagtactctatctacaatacaccaaaagagcatttagacaacttagcaaacataacattttctttcaacactgtcgaaacaacctatagatggcataagtgttcatgccatgtggaactatataccaatatatgatgaaaaaacactaacacatatttccttaaagcatgttggaaagtatggttcacaaacattgaatagaagccggagcattggttaaaccatatggcattacaaccactcataat

SEQ ID NO: 46649 - DNA, 298 bp, Glycine max
  unsure (1)..(298): unsure at all n locations
tacccatcacatgtggtactatgtggcggtcaggcgatggtgcacaacaagttntccacatccacgaagcgcgcataaacccaccatcccatgttgcccacctccaactgagctcacgtactcccacgtagcccatatcctcgtttctctcaacaccgggtccccatcaatcctcccaagcttccccaacattcagatgattcaacaatcaaacaacatacactatcacagccaagaaaacagggcaaaggcagaaaactctgcccaaaacaccaaccaaaatcacagcttttctcac

SEQ ID NO: 46650 - DNA, 66 bp, Glycine max
  unsure (1)..(66): unsure at all n locations
catgcaagctntatatggtccatatatttcatcataaatattaattataatgggcatataaatatt

SEQ ID NO: 46651 - DNA, 338 bp, Glycine max
accttcattaattttcagctttaccttctactccattgttgttcctacattattctccatgtatctcctcacatgtcttgtgcgaaatgttgttaacatgaatatttagaatttccaccgattaaacttgctatagacgctatatttgaatttctatggttcaaagatattgttctttgtcttgaaccatgaattgcgttgagtttatgttcctttagagctttgtcttgctatttctttgtggctgaaacctagaccatagaattcttacaaaaacatattccatatcacaaaaaatcatctatgaatgaaatgaataatctattaccacagattgt

SEQ ID NO: 46652 - DNA, 375 bp, Glycine max
  unsure (1)..(375): unsure at all n locations
cttcccaacctannattcagctaccacaccgctctaagaacttagctcacctccttaagatacttgcttgagtatcttagcgttactacacacacccatctaaaaactaagctcacctccgtgagaagcttttatgagacgctagagcttagctacacacgactattataactaagctcaccctcatgataaaaaatcatgaagatacaaaaaaaattctactacttagactactgtaaatgcactgaaatacaaggctaaaaccctatactactagaatggtcaaaatactatgtccaatataagaaaacaactctatttactatttacaaagaagagtggacccaaccttggcccatgggctcataaatatac

SEQ ID NO: 46653 - DNA, 313 bp, Glycine max
acaccactcagatttccatatcgggaaagtcattaatggtacagaaaagcattgcatgcatttcaaaagtctccttggaaatgcatcaaacactaaaaccccctcatcccataactttctcaggtcttcaatcaacagacttagataaacatcaatgtgatttcctgactgtcttgggcccgatatcatcatagacaacatcatgtattttcgcttcatacacaacctatgaggcaaactggaaattactagtagaactggccataaactgtgttgagtgcttaaattgccatacggagtcattccatcactg

SEQ ID NO: 46654 - DNA, 454 bp, Glycine max
  unsure (1)..(454): unsure at all n locations
tgatctttccatttggatccttcttaaatggttggcacttaattcccctctccacataaattctttcaatatcatcatctaaatagttatttccagtgacatctattgattcctcaaagacactaatgttttcactttcataatcttcattgtcatttccatcctcatccactggctcatattcacttccagaaaaaccattatcaataccagccaacaagtctcctcttcactggcataaaatccattaacacatggattaggattgagaatgttaggttcttcatgcatatcangaacattatacatattggttgcaggcacactaacaagattagtaagagacatatttacagaattaacatgtggtccacacacacaagtaaccaaataacttattgtgctcatatgacaaaaaatatatatatttagtgcccccctataaataacaaca

SEQ ID NO: 46655 - DNA, 418 bp, Glycine max
  unsure (1)..(418): unsure at all n locations
cagctgtgcatatcctttgataaccttcatagttaccagtgaggtgtcccccctctcttttatctttntgggtgacacttactgagcacaatttgattctcaattcatcaacaccagatcnnnnccctactaacttaggtcagctacatggatcacttgatgccattcgacacggttaaaaaccaaggttntagaaatattgtttaacctaagattccccttgatgatttcctacaacctcctttgtggtctcccacgactcctttntaccagactaacaaccatgcaatctattcttctaacgggcacctcctcttgtggccttctttgtatatgcctaaatcaccataaccagttttctgtcatcttttcctaatcgggtcctacaccatatttttcttgtataatagcatcatgc

SEQ ID NO: 46656 - DNA, 368 bp, Glycine max
atgatcagctcccatcacattcatactctttaaaaccttgaattgctctcttagctcaacaatatctaacttcaacttatgttcattttccatctctttttacaacttcaatagttcatcaatttgagtctttctctccatttgcaaaattaattaattcataagccatgacatggggcaaaatgaaaccataaaacctcacttaaattatgaagaatcaaataacatatgacacacctgatgtttctcaagcaaattgacgaagtcgaatctagccttcacctgctcctgtgatgctaaaattaatgattccattttcttcacagttaaggtagaatatttcgtataatctggataccgtcattaac

SEQ ID NO: 46657 - DNA, 285 bp, Glycine max
  unsure (1)..(285): unsure at all n locations
cacaacaatgatatgttcttctgcaagggtagcatggtaatcaaagagctgtgagactttgaaaatcaagttgtgagggttaaggctgccgaaaggaggaacatcaaactttangaaatgacactgtgaggaagtggttttaactgtggaatcgtacgagttggcagtagaacgaacctccgatgctagcacgagtttggcaatgtcgtccatgtggtcaataaaggatgattgcaagcgggtcaagcgttgcactatatcnatcaagttgtcagggtgggtact

SEQ ID NO: 46658 - DNA, 441 bp, Glycine max
  unsure (1)..(441): unsure at all n locations
taccggatctctaatcattgcagctgcatcttattagaaaactgtttgagatgatttttgagaaactggccctcacctcataattggttcgtgtgtttcccttttgatttaatatgggctccttgtacaatattgtgtgnttttaggaaatgagtgtaggaattggctttacacatttttgaaagcgaccagtttaatttagaaggatcctagttaataagtatgctattcactaccggtcatggtgttctagataccctgtcctactaactatactcaagttaaatttgaattttgatatacttaagtttnagagattatatctagtatacttgtagatgaatatatattatattttgggatgctgcaatttgcgtgaaatccttattcattaaaaaatatttggttcatattatgtttgataataagattctgattaat

SEQ ID NO: 46659 - DNA, 459 bp, Glycine max
  unsure (1)..(459): unsure at all n locations
atatctcttttatcattatgtatacttatttttgttataatnnnnanntaagagtgatgancctgtgaacctgcttacgacctctaatactcactcccaagaggcagaagatccctgtaaggctctctgcgccccagcaatgtgacttgaagaccaggttcacaggaggaacatctctcatttgagcattaaagattgtcattctcaggacagcgagtcagctgaggacaagaggtaccagttcaaagagagtaacgccaccctcctggggagccccggaccctttatgagatgccttaccagtttgggcgtcatggtttgaaaagctatgcggattaccaagaagagcagcttggctcaaaagaatgtggcgtctggcagattgcctacgtgctctaagagacatttaggtcacttgacatgctatgtaacccaagctagactgcacaggacacacgg

SEQ ID NO: 46660 - DNA, 152 bp, Glycine max
atcttggatttcatacataaaactcagacgtgcatgctggcattttctcccgactctatctaagagagatattttgtgctaaataaacaacgcaattatttttggagggcatgaatccctttataaatttacggttgtgcgggttaaacccc

SEQ ID NO: 46661 - DNA, 472 bp, Glycine max
  unsure (1)..(472): unsure at all n locations
tatagactgacaggaaacatgaagttntctcaactccaataatcacaaatcataaagaaaaaatagtttggacatgctctactaggatggtgtcgcatcaatcaccgcacaagataataaaaggaaaggatcagttaagccttcaattaaagcaaggctaccaaattgagacaaactagaactcccacatttgtgtaggaactctaagtcatgacttcatatgatcaccaagtgccatgatgaaactgaatgttgattgttggaggataatcatccacttgcaataagatttattattgtggattgtggcaatgtttgttcattgtgtttaaatttaagcttctccctatatttttctcttaaacagtatagtttcgttgacatatcactttgacatacaccttataatatccatcagaattttcagaggaccaaaaactatatatctctttngcagtacatgcaccaaaat

SEQ ID NO: 46662 - DNA, 382 bp, Glycine max
tcttcatagtcctcgcgacctctatcactttaacaagtatcgtacatatgcactgtatgctctaactctatggagagcgtcggaaagtatcttctaaatagtggctgcatatatggctgcatatcttcttttaaataattacgcattgactcgtattgttttcctaaatttctactttccttattttcctagattcttaaattacaccatgtaaattatgtgtatataatgtatcatgctgaagatcccctcaagcattaagaaatccttgatccatctcaaatgaaagaacagataatcttaatccacaacatctacaattactagtggatagcatgaaatcgattacgatgaaatacctcgtccacattacccattatgt

SEQ ID NO: 46663 - DNA, 381 bp, Glycine max
  unsure (1)..(381): unsure at all n locations
aatcatggtcatagctgtttgtgccccccccattttttgcgggtagcgatggtgtaaggtattgttctaggatagtgacgagtgtaaaggtattttnaaagtaataataatgacaagagagagatgagctagttaacaacatacgcaccagaagataaaggctcattaacgtattatcaataaatatcaagactacctgcgtcacctaaagggttccataatgctctaaaatacttgacgaatgataaagagggtggggtggatagggatcaaaggagtgcaccagatcgcacgagtagtataaaacgataagaaccgagtatcgaactcgtcgggaactagtgttattggggaagatatttcagcaaataagtgtctagt

SEQ ID NO: 46664 - DNA, 426 bp, Glycine max
  unsure (1)..(426): unsure at all n locations
agcttcccgacaaacacttaaaggagaagaagaataaaaggaatataatagttaatattaatcgccccccacatttaatcngctgtacacatgtggatactatgatgaatgagattctgggagacaaaatcaaagnnaagtttctacgtttttcttacttcaatgtcgtgctcccccctctctcttatctctacctctttcttttcctccatagaagcatacattccaagcttcttatgcaaagctcatattggtggtgaagctctttattgcatggctgataacttaatggatggtgccaaatctcaactattttcctttgtcttccgctgcatctccatggtggaaaatcaacattaaaggaccccattgaagcttaaagatgcagcctccatataagccacacaagcgagcttccatcaaata

SEQ ID NO: 46665 - DNA, 427 bp, Glycine max
  unsure (1)..(427): unsure at all n locations
gcttgtggggacagtaaagaaagaccattctctggaatacacaatgtcaggcaaaaatattagcagaacaaggagaaaaattgcacctataaggattacgcgagcaatagccatggtgtaagagaaggaatataagaagaggaggtagaggcctgtgacaagggcaaggatgttgaggcagagaaaaaccgatgtatcgcgctgaatggtgtcaacagaatgtggttgaggctgtggttgattgagaattgggatgagtactagtccagaaattagcacaggaacaatggcattgagtaatagatagacagtgtcatcattngtgtttattgcattggcaatgagagtgtacaaagctgcactcacaccattgaaactaatgctcaaggataatgcaagggaacggtttgccggaaaatgtctgatg

SEQ ID NO: 46666 - DNA, 378 bp, Glycine max
  unsure (1)..(378): unsure at all n locations
agacttataaccctgtttccaatactaaacatgctgagttcaaacaatcacaagcaatcaactcactctccgttaaagtgacactccattcctagatgttgacttgtgtatattgagacttttgcatcatgcattnttnttctgcacaaccgaaatgatattgaatatgacagtttccacttgatcttattatgtttgatttttatcattatcatcaccacaaaaggttttttgtttatcttctatcatgagatctgaattaattgaaacaaatctgtgttataactgtatcttgtaaatcttatagatcaatgaaagacatgtgcttaaaacaaggttggattgttcacactatatatagatatatatattatatat

SEQ ID NO: 46667 - DNA, 523 bp, Glycine max
  unsure (1)..(523): unsure at all n locations
cggagtgttttgaacatgatgacgcgaagatgaatgatcatctgcgctcatataccaaataacgatgcatgctgtgctaaacactgtgcacccgccatagaccactgagggggaacttgtgcttacaaccatgacagcctctgtctattatcactcacggcatcgcattctgactctctaacgatacgttagtgctgccctggctctctaatgatgggccatcgggcttactctagcgtactggcgtggagccatcttcacacgaccctttaacgagatgggtgtgtctaactcatccaaacgtggcaattcaagaagttgtcagctgatgccttcacaaatagtgatcacacaggagaaacctagcgagactacccagcagtatatccccaaccccatactctcgataatcagaggagaaagatggcgcctcaacctgactttggaagtctacttgagccagcgcttaagacccgaaatgtctacttacgagtgggcagaatgacacaacgggagcttggtn

SEQ ID NO: 46668 - DNA, 390 bp, Glycine max
  unsure (1)..(390): unsure at all n locations
catgcaagctngaggatagagacttcttaagctatttatcttctctcttagagaggcttactcaagccaaaccccttaccttcttgataacagataagctgattaacaccagttgtgatggatgcaacccctattggtntaaanttaggggatagtagctctgatgttcccaagaactcgacctttaagagagctgacatggtgtttgttactatctggtctgcgtgccctcgtaatgaccttatgactgaatgtacatttttcctggtggaattaatccaaggaaaggatatgtgggttcctgcttatgatgaagatgatttttgcctgcgctataagtggtcaaaacctttcagactcagtttacatagtaaagctactcatataatg

SEQ ID NO: 46669 - DNA, 403 bp, Glycine max
  unsure (1)..(403): unsure at all n locations
gagttntccgactatgctcttgtgtggtggaacaagctacaaaatgagagagcaagatatgaagagccaatggttgatacatggatggagatgaaaaagatcatgatgaagcggtatgtgccggctagttactcaagggacttgaaattcaagctccaaaaactaacccaaggcaacaagggggttgaggagtatttcaaggaaatggatgtgctcatgaatcaagcaaatattgaagaagatgaggaggtaactatggctcgatttcttaatggtttgactaatgatatccgtgatattgttgagctgcaggagtttgttgaaatggatgatttgcttcacaaagcaatccaagtggagcaacaattaaaaaggaagggagtggctaagaggagttttacca

SEQ ID NO: 46670 - DNA, 373 bp, Glycine max
  unsure (1)..(373): unsure at all n locations
ctctatgaggagatacatacttgataaataaactaggcaanttttttggtggtcatgaagccctttataaagttattaatgtgcagagaaaccccaaagacaaatttggccatgggttcaaaggcaaaaagattgtacatagtgaagaagtcactgtttggtacttttgtggaaaagtgggtcatgaaactcataaatgcaatgacctgcctataaaggggaacccatcatagggtccgtctagtgcttaccaacttccataatctaacaatgagaaaggacccaaaaagatcttggtatctaatagcaagataatttcttttgtaacctccttatagcangaaaaaacatcagtcatggtacctggacaatg

SEQ ID NO: 46671 - DNA, 410 bp, Glycine max
  unsure (1)..(410): unsure at all n locations
ttattcatttagtgctaatttctctaccttcacagtttatttagcttaagatctcttataaatgtcagaagaagaaatgatctcttaatgagctcatttcatactgtatgtgcaagaagaggaaaggttgaagcaagaaaggactgaaagtgctcatgttgtgagtacctctaaagacaagggccaaagaaatagaactgaggagcccaagaatgaagctgctaatggtccaggacaaaagagacataatcagggtgacaactgtttgcgttgtagtaagcttggacatgtagagaagaaatgtaccaaatatcatgcttaacgtgcaaagataggtatgtntcttactttggtctgttctgaggtcaatttagctctagtacctggaaacacttggtggttagattctg

SEQ ID NO: 46672 - DNA, 70 bp, Glycine max
tgcttctcaaggaagtattatcaagagagcttgtctggaagctgcctccccccccacattattctccggt

SEQ ID NO: 46673 - DNA, 524 bp, Glycine max
  unsure (1)..(524): unsure at all n locations
gagctttgacccctgtttgaaccatgatgacgcgccttaccatctcatcgtggccaatggctggacacgatgcatgtcgtggtccagtataatgtacaggtgancagaaatcttccacgatatcttcctgacacaaatgacgcactcactatttggaaatagcgagcgaaactagtcctgcatgcacctatgcctacactcgagtgtaggacaacttttggacgagcgatgctgcggctcatcattcatggccacgagtctactcaaccccggatctccgaagatgtactcttatctattcgtgcattcatgcgagactattgagggtgctcggagaaactttacagcagtgaccctccaggcgtctatacatagatttcagaaactagctatgatcagccaaaagaattttaaataaaagtcggagttatctcgtttcacacccatgttgttttaactccacgagcttttatgcctatcgctgcctcttttccttcttcatgtggttgctcagcacttatacg

SEQ ID NO: 46674 - DNA, 387 bp, Glycine max
  unsure (1)..(387): unsure at all n locations
cttacatttattagatctttctcatcttactactccaaangttgactgcataacgtgattnnnncnnnncggagaagatttatttattttacctccctatttcttctcctataggtgattgtagaatgtacagaagcttatacaaattgaactattactttgcttatccaataagattaaatttatatacttgctagatgcatagtctattaaaaagtaatattacacgaagttttggattattgaatttagtctcgtagcagtttattatttattataaattgaaaatcctttttgaacactgtgtttaatcgggttgtactagttattgaactaaccattacttgacctattaatgttagtatacatctcatatcatctcactga

SEQ ID NO: 46675 - DNA, 282 bp, Glycine max
tcatcatttccaattcatacatgtcattctatacttagagattgatgcagaaactattactctatgctagtcgactgtcacaattaaagaaaactttattgggttatgatcaagcgtttttttcacaatcaacccatctactgactaacaattctaactgagagcctaacttcatgttctttctcatctaacatacacacttgctcaactcatgataaaacatactcttcattcaatcatgcatttaatccataatcaccattccaaactcatatcaacact

SEQ ID NO: 46676 - DNA, 430 bp, Glycine max
  unsure (1)..(430): unsure at all n locations
agcttgcgcatgctctatgattggcatnctgtaaaccaggtcccacttaactaaatgcaagaaaaatgaattaaaaagggtcgggttgccttccagtaagcactctatgaacgtcattaacatgacgcataagtctttgtcagcctggtctttattgaactaattaccagggtgagttctccactgtccctgttgttgattataatgttggccatgttgaaatccagaatgcccacctgcattaaagtttggtcttggttggatcctcatatagctcacttcatgtgttgaatattctgtgggaatgcagcagccagaatcatgtgctccgtcacatatatcagaacctgcaacctgcaaaacagaagatggtgaaggatgtacataatgtaattgggttggcaacttacttaatgtttctgttaatgct

SEQ ID NO: 46677 - DNA, 356 bp, Glycine max
  unsure (1)..(356): unsure at all n locations
caaaaactttgtcatccctctgtaagatagcaatgggaataaagacatcacattctttattcatcttacgaataaagaaaactaaattatatttgatggtcaaaaaaggaaattatcaacatgccttaagatacaatgtaaggcgaagttctcttggaatcagcttctcaggatctgtctcctcagatattgtatatgagctaacatntgcctctacttcccaaacatattgcttatcggattctggactctttgttgagacaaccaccttcatacaaccaaaaattatataaataccagatgacacagatagtactacagcatcacatttacttttaccaaaatgcatacccgat

SEQ ID NO: 46678 - DNA, 408 bp, Glycine max
  unsure (1)..(408): unsure at all n locations
ctgcaagcttatgcgcatgtatctgtactaatgtacacttgcggaagacatcctccacgaccaanacttcccaagtatttatcttctctctcagagaggctctctaactttctagctttcttactctaaacagtggattcactcttgtcttggatcgactcactctacggtggctcactcaagcttgaggatagagacttcccatactatatatcttaaaaatcctcccaactacttaaaaaatttcctttgtactattaacccactctaataatattttttctaagctatggataacactactcaatcgtcaactatttctgtccctatcttcaatggtggaaaatatgatttctggcgtgttaaaatggaaacatatttttcatctcacgatttatgggacatagt

SEQ ID NO: 46679 - DNA, 272 bp, Glycine max
aaactcttggcatattcatatctacagagctatccacgcggatgttcgagtctggcgcattataatttgacaggctcggacctgagcagcagaagctcttaccatattaaactggcataacctttcagacggaaataccaatcgtgcacataatttgtccacaagctcaatacttaacagcgaaaggtcttgacaaattcaaatggtcaagagcttcccacggatagtcgaagcaggcttataatatatcgagccgcgacgagacatccgtc

SEQ ID NO: 46680 - DNA, 105 bp, Glycine max
aactaaatatcacggcgctgattatagcatcttttcatgggagaacggtgattttgggagatgattggtaactgtcggacaaagcacaaattatattctacaata

SEQ ID NO: 46681 - DNA, 401 bp, Glycine max
gaattctactctaataatttccatgagtgctcacgtacatgccaatattacaattcatgcatagatatcatgaagaactatataatcatctgtcatagatattactctcttgaactattaaatatataatgagagattcacttgcttcactccaagagtataacagcattgcccattcgtattatttatctttctataaatctaatgatgaagactagttacttattaaataataaaaataaaagataactctaacagaattatctttggaataagtggatctctcctctctttaatataattagcttaattgtagttgtgtagttcttactttatgtctattcataaaacttagtctaattgttgtatatattctgttgtggaccggaatcacatggaat

SEQ ID NO: 46682 - DNA, 265 bp, Glycine max
acaacaacagcttatccttactttctagaatgctgctggttcaagcaagccatatgttccttctcatacaaaacaacagtcacaaaaaagacaacaaacaattgatgctcctcctcaaccttacttataagagttaacgatgcaaatgaccatctcaaatatgcaatttcagcaagagacaagagcctccattcatagtctaacacataaaatggggcatatggctactcagatgaaccaagctcaatccaaattctgacaaatt

SEQ ID NO: 46683 - DNA, 487 bp, Glycine max
  unsure (1)..(487): unsure at all n locations
tgggattgacccttgttgaccccttganttcgcactcccttgaatacccacctttnatactgagcctctnacctatttgtgtggttattaatctacttgagtcgagcttcacttgtatgttacacaagcttatttcagttacttagtcttctttagctacctcaggtaccttatttgataaacctcttgagattgcttatgagaaataagtttatttaaaagctactagattttgtgggtctcaattggattacctttttattaaataataagtcgcctatatatctatattatatatatatatattattatatcccacgcccaccacttgagtagtttaacagagactgggtttatatgttcatagactgccagtgaatatgtgacatgcagaaatcttggtaacgggaaggttgcgttgaggcttattgagggacatagaacacacagtttatttagtctcatcaatcctttctgcctggaaccg

SEQ ID NO: 46684 - DNA, 215 bp, Glycine max
  unsure (1)..(215): unsure at all n locations
aaaatgcaccctattcaatcaaggctgttttgttacctagattattttcactgtacttcaaagtttnagtgttagatacatcacacacatgttcttggctaaattcaaatacatgcatactctaagcatttgtggtaccaaaaatttgcaatgtgcacaatattgttatttataaataaatatacatactcgaacttcatgatgaatcttgacta

SEQ ID NO: 46685 - DNA, 365 bp, Glycine max
cttggatactggtatatatggtctttcaaagaacgtaaaattggagatttctcgatcggagaaaatttttcgtgagcctgacatattatttatatgagaatgtccagaacaaatatcacaccatttagatgcatgtaagcatgttaacatgcatgaattcatatggaatttctttttcttttggttacaattcttacggtatatgcttcggcaaaatgtattgcatagctctgattacttgaacattgggtttataattatataagcaaacataccaaacttgccatgtgcagagaaatgtgtacttcatcagtggccaattccttctggtgtataaattccggatcaagagaatgggactggac

SEQ ID NO: 46686 - DNA, 423 bp, Glycine max
  unsure (1)..(423): unsure at all n locations
agcttcctgcctgctacaccgttatatccacaancctttgactgataggatgccgcagcagcccccccccctatttttcccccaaccgcactacatcttgattttnttgagaagttgctcggatgcggtaactcgccctgtagagaaacccaacggtttgtacccattgtagtcaactattacttgcatttactatttttaccatagaattagtttattctagttattaaccatcaattaatagtgttnggtccaacgataccttacttntgaataaaactatgacgtaatgaggacgttcctgagtatgatactcggatcactccggtttaattttaaatacttagcgaccctgagcgcttaccgatatatcatttccttgaaatatttggtaaaattggagaaaaggacaactgggaaggg

SEQ ID NO: 46687 - DNA, 345 bp, Glycine max
  unsure (1)..(345): unsure at all n locations
gtattctatgggattgttttttttttttttttatgaataggtgattacataatcgctttaatattatagcctttattacataaccatttcaatattatgcgtgaacttattgaagattaaaatagtttttttttatgaattacatatatatatatatatatatatttcaggtggtaccaatttcatgttctctctaccaaaaaaattcatgttctaaattataccaaaaataatatatatatatatatatataaagaacaatggaactgaatggaataaaatatatttaattntttagtcaacttaataatattgtgttaggatgtttccctgtaaaactttggg

SEQ ID NO: 46688 - DNA, 263 bp, Glycine max
  unsure (1)..(263): unsure at all n locations
ctgctgcagctctagtaatagtctaacttacgaggatcgaggttagttcttttgctacaatcccccctccctatattcgactgcttttcttaatttgatgaaagtttagtaggatctcgctttgatcncnnnnccttggcatgaaagctgtgatatgaatcccaccacaatcaagtatgcacccagaaaatagagtgaaatgcactataccaaaatttnatcaaatgtaaaagattaaaattaacctatacatatgaatctac

SEQ ID NO: 46689 - DNA, 386 bp, Glycine max
  unsure (1)..(386): unsure at all n locations
actttgagtaaagctaaacttgtttgttacacaagcttatttcagtaacttagttttcataagctacctcaagtaacttattttgataaactacttgagatagcttatgaaaaataagttaatttaaaagctactagattttttttgttctcaattgtattacctttntattcaatttaaaaatcggctttatatatatatatatatatatatatatatatatatatatacacacacacacacatatgattagttgtaaatagaagatgtggtttttatcatgtttcatagtcatgcaagtgagatatgtgtacatacaagttattcttgtataaatgtgaatgtatgcgtatgaagggtttaatgatgtcaaaatagaagcaaca

SEQ ID NO: 46690 - DNA, 541 bp, Glycine max
  unsure (1)..(541): unsure at all n locations
tatgttcttctgcttngctcctcaantgtagtgcttttgaacatgtattgacgcatttgataccttcgtgatcgctgattcttgtaagataaatataatagttttatatataaacaatgcatatcctttatatctactcacaactcaacaaaatttgcgttgacgaaatgtgtatattgtcatcagagggaatgatgggaagatggtgattcatgttttaggcttggatgttacagaaatgaattgcaacttgatgagcataggtttactggtggagaagggtttttcaataatcatggatggtgattcactgatactgttagatgtagagaataatctggtgctgaatgataatttgttaaatatcaggatctacattggtaacatttaacagtgataagatgatgtgcatgtctggagataaagcgaataaactgatgctttgaggtatatgagggatggttatcttaactttataaagctgaatgaattgtattctatatattaagataatggcttgctaagttgaacgctaaaatga

SEQ ID NO: 46691 - DNA, 306 bp, Glycine max
ctacatcgattaaatgtactctaataataaactacttatattgttaagaatcttcatcgacaactattatttataaacgtagctgataataagtcggactaatcactgtcatacctttcattcaaaagtttctttgaacgtatacaaactacttttatatacgttatgagctatatcaatttagccactattccttcctactactatatcaaagaaacatttcaaatatcttgagagaaataatttatctttagagtcattccttatcatatttaagatgaggtgtgagaaaaactagacaatata

SEQ ID NO: 46692 - DNA, 138 bp, Glycine max
  unsure (1)..(138): unsure at all n locations
agctngcaatccaagagccaagcatggcaaatggaaaccaccattgaccctgtactggcatcccacaacaacacatcaaaatcaatcatgatccacatgccctacctttatttttctatcaccgagacccttctactt

SEQ ID NO: 46693 - DNA, 440 bp, Glycine max
  unsure (1)..(440): unsure at all n locations
tcttcctgaacttctaacatcacatgcctctntnttcttaaacttccctgcaacatgtaataatatgaagatattaaacgtgattatttgggtagtatagtcaaaatatactctggatatgtcattgattatctctatttatttacttattctattaattgttcctttcttcctttgttttcttggtttttttctttttcagaaattaagcttaatggttcaaaaatagctaaatggttcttattgtacttatattgatagatcaatattaatatataaactatttgtgacaggattctttttataataacttgacggaggaggaactctcaacgtaagattatctttttaatgcgtaactgttatgcaagttttcttggagatccgatagcattatatcccgcaagaaattatntgatcgtgtcntaacataaagaaag

SEQ ID NO: 46694 - DNA, 279 bp, Glycine max
  unsure (1)..(279): unsure at all n locations
ggatcttaagtcactgcagcatgcagctgtcaaatgccatgttggtgagttatactcacaaccgtgtctgaactactaaaaaacaaaaccccagatttgatatctatggttgtgacagaagaatgcgggggaaacgacaaagggggtgtgagagttgggagttgagaaggggaaaaataataaaaatgagcttttgaattgaattgggggtagtgaagaaatgaaacagatgggtatagaaagggggaaataaaaagaccctttgtngtgttatggtga

SEQ ID NO: 46695 - DNA, 302 bp, Glycine max
  unsure (1)..(302): unsure at all n locations
cgctctanattacattgatgtttgtatttattggaggaggttgtatgccatntttgttttaagagtagcattccttggtaaaactaattntccaaatgtttgccttcgcaagaaatggccccgaggaagcttgcctcaaagaggtccaggaaggacaaggcggccgaaggaactagttccgctcctgagtatgacagtcaccactttatgagcgctgtacaccaggagcgcttcgaggccatcaagggatggtcgtttctccgggagcgacgcgtccagctcatggacgacgagtatactga

SEQ ID NO: 46696 - DNA, 303 bp, Glycine max
  unsure (1)..(303): unsure at all n locations
tcaccatgtggcttccttatctctagagcccccccggctctattcgcagcgtcgttgatgttttctgcgcttggtctatcgatgggtgtgcatcagaaacnnncactcagcaaaaatctttgttttaagggcgaaatctaagttaatttgataatcaattttgactgataatgattataatttctttattttattattattttagaggaagtaataaagaaattaatatcttgtagtttttctattacgagtataatcttgaggganaagacaagtagcgtctcaccagtgaagaaagaaatc

SEQ ID NO: 46697 - DNA, 410 bp, Glycine max
  unsure (1)..(410): unsure at all n locations
actctttctctctttttctctcaactgttcttcattcttcttcctctcttcaattctgttcttccttcttcttgcacaaatttcatcgctcttccaatggtgatgatcatggaaggctaaacacttaatcaatccaaggatccattccaagcaaggctaaatttgagttctggtttagtatttcaattttgtgtgaatgttcatcttgttcttcaatcctatttttgattntaatgattatgaatatgcttacgattgaaaatgaattacgctatggattcatttcctaatttcaaaatttaatcacagattgtttggatgatattccaacctaatttgcaatctcaatgaatttacggaattaattgaataaactatttctaatgacatngactaaactttcacaatct

SEQ ID NO: 46698 - DNA, 251 bp, Glycine max
  unsure (1)..(251): unsure at all n locations
agcttctaaccaaatggacttaccttgaattaatttctttgatagccctccccccnccnccattaatatgatttatagatatatgtactcatatgcatttacttgatcattgaaaagacccnncgcncatacccattgttgtcaacttttacttgcatttactatttataccatagaattagtttatttttgattttaaccatcaattataaatgttcgttccaacaatcccttacttatgaataaaactc

SEQ ID NO: 46699 - DNA, 416 bp, Glycine max
  unsure (1)..(416): unsure at all n locations
tactcagcttctcaggaagtttctcaggaagctacctaagctataaatagaagcatgtgtaacacttgttgtaactttgatgaatgagagtcttgtgagacacacttcaaagttcaacttctatccctcttttcctccttcaatttcgtgctcccctccccccccccccccctctctctctttcttttcctccattgaagcttcctttctaagcttcttatccaaggcactctctggatggtgaagctctttcttccatggcttattccctagtggatggtgcctcctctcacctcttctccgttatcttccactgcatctncatggtggaaaatcaccattaaaggacttcattgaagctcanagatctagcctccttagaagcttcacaagcgagcttncatcaatatccatga

SEQ ID NO: 46700 - DNA, 363 bp, Glycine max
  unsure (1)..(363): unsure at all n locations
gctcattcatttcaagcgcgtcctctctcataaaaatattttttctgtaagagaaagaggttccagaatgatattatgacatataggattttaattntttgagtaatgaatagtatgacgatttcttttctttttttttgaaaaaaaagatgatgagtgaggtttagatggaattctagttatattattacatgttatttaaatgattgtgtatttacatgatttttaatttcatattttatttaacaaaaaaattattcttttataatttttttaattcagatgtatatgtttttctcagatgggtccctatttaatttcgtggaatatttatgattaagataaatatattttaatatatat

SEQ ID NO: 46701 - DNA, 442 bp, Glycine max
atacgttagaataatgaagtactttgtatgaataaaaaatatatatttcattatttattctcagaaaataaatatatctatattattttttaatcaaatagcttccacttttgattggtagtcaacaaaatacatactctttgatatagttttttttataccaaactctctaatatagttaaatgctatatattgaaaacacactaatatggcggtttctttcgaacatatattttattatttacattgacaataggtgaaaagttacaaagaattagatttatctatgagatacaaggtgaatttgatgattgagaaggggttatgagccacaaatagagagaaagggtatcaattcgaacatcgtttactcatgtctttataaaataataaataatatttgtcataaaaaagattacttattatcttaaataaaaataaa

SEQ ID NO: 46702 - DNA, 370 bp, Glycine max
  unsure (1)..(370): unsure at all n locations
actcaaagttaatcacttttcatgttcccccacattccagaccccttctagatattatttacttggcagttgatggggctgcaatctgggttttctgttcaaaggtctacntttggagttttctgctcaaaggtctatgattntaggtaactctaaatttgttccaatcattatttcagtcacaacattatttttttggaatctttgtgaataattacattgactatatttgtctataattctctataatattaaggattaaaacaaatttagagtcacgatgacanattatattcttgttatatggtatcaactataaagtgaaacatgttggaaactccaaaagtagacactactctntgtccatatt

SEQ ID NO: 46703 - DNA, 422 bp, Glycine max
  unsure (1)..(422): unsure at all n locations
tcactngatgaattgatgtcaattctaagatctaaattaattgaaacacgcccatttgtcattntgctatagttattcacgttaatacatttattgagaatgaaatcgacatttcactcatttgtaaaggattgtttcctaaaaagttacacatggtatcacataagaagatggcaactttgggataaacgttaacacacaaataatgcattatatcatacaatgagcacaaggaaaaattaaatcaagggaaagaattaaatagcctgagttgaagcgcgtaaacgctatccttagagagaaaacgcccncactgcacgggtaagaaaatttgattgcgctcctctcccaagatacgacaaccccgtgtgtccgatcgtgtgcagcgaaaggatccctgaaccttatgaacaccaatgctc

SEQ ID NO: 46704 - DNA, 408 bp, Glycine max
  unsure (1)..(408): unsure at all n locations
aatatattttttgcgacgcaccctcctaaaggtcgattttctcttatgtgatatgttancttgaataatataggatgaataggtgaggatgatggctcctttttagacgggagagagccatggaagtaatgaccttctccaacaattatgagccttggtttataatcttggagaggatgttttagtggaggaaaatatagaaggatatattgagagaggggggtattttttttttttgagtattattttgagagttggttttttgtagtggggttgatagagtttctttttagagtacataagtgttatggtgcttttattgagatgtgtagcttctgtggaggttttaataaatgtttttaaagctttgagagagaatggtgtggaactaagttaatagccatgtat

SEQ ID NO: 46705 - DNA, 563 bp, Glycine max
  unsure (1)..(563): unsure at all n locations
atcaatgagtttgaacccttgttgttcgcgttgtgnntttgattaccctctctattactcgacctatataatactcatgcactttcctcgtcgattggatttaagatgttgaatgatcttgtcttaccttgaaccatggaggttatatctaaccgtgcgacaaacaatccaggtggtctctcgctctggtaatgcccactggacctctattgaaaagtgacatgctttggcgaatgcgttcacttttcacacatattgagtctcttgtgagatcactcagcgggagtggggttcttatggtgtgctggggctcatntttaagaccttaaagaccttcaatgcgttgccaagtgtggatatatatcatataactgtattatatatgcttaaccttagatggccttcacatctttttcgccacaatgttatacaaatctgagttaaacatttctcctagctatcaacttaatttatgttgtcacatattgattcagatctcttaattcattgttctgtgccccttcttttggaaaatcagattggaaatctttaaacttcaacct

SEQ ID NO: 46706 - DNA, 383 bp, Glycine max
  unsure (1)..(383): unsure at all n locations
ttccctttcctgttttgaagctcactacaagccttaagtgaaaaaccatgatattacccccncccaaggaattttggagctttggaattgttttgggaataagtgtggggggtttttgtttcattggacaacattgtttgtggctatgcttcatgatgtattttgggccatacttgatgtacattgtatattggttaaatgttggacatgctgaatgaaatgttgtttctcaaaggctaaaaaaaaaaaaaaaaaaaaaaattcgaaaaataaaatttcaaaaaaaaaaaaaagaaaagcaataaagttgagtgaataagatcttatatggcacaagaatgatgaaactcttgggtctactctccatgttaaattttatctta

SEQ ID NO: 46707 - DNA, 383 bp, Glycine max
gaggatgtcctgtgaccctaattgaaccttaatcgcaccataagatcacttggcaattcttgacatacttatccggggcccgtggtccgtgatattagacgctggaaaaacctactctagaaattaactatatacctaaccggagtcggtgagccgtaaatatctgacgctgcattgaaaagaagcttttgtaatctacatatacgctttctggagtaaacgatctgatgataagacacggaggggactcacttcgcaatgaatgcatactcgtcgggggacgggatccgattttttgacctcaaatgaatctaactttgaaatggtgtataatcttccgtgcccctatccgttattatacctcgatgtaacgggcttgaatc

SEQ ID NO: 46708 - DNA, 332 bp, Glycine max
gcgtctcgagatattatatcctcgaatcgaacatccgagtgagatgttatgaccattcgaatatctcgagagcttccgatgggcaattttgagcgtctagatatattatgtccccgaatcggacatccgagtgagaagttatgaccattcgaatttctcgagagcttccgttgttcaatttcgagcgtctagatgagttatgtccccgaatcgaacattcgtgtgaaaagttatgaccattcaaatttctcgagagctttcgttgctcaatttcgagcgtctggatatattatgtccccgaatcgaacattcgagtgaaatgttatgaccat

SEQ ID NO: 46709 - DNA, 468 bp, Glycine max
atccttgagtcacctgcggcatgcaagcttccttgagaaaattcctaaagaagctagagtttatctacacacacctctctaatagctaagctcacctccttgagatgagaagctagagcttagctacacaccccctataatagctaagctcacccccatgacaaaatacatgaaaatacaaaaaagtccctactacaaagactactcaaaatgcctcgaaatacaaggctaaaaccctatactactagaatggccgaaatacaaggcctaaacaaaggtaaaatctattctaatatttacaaagataagcaggctcatacttagcccatgggctcgaaatctaccttaaggctcatgagaaccctagggccttcccttggatctctggcccaatctacttggagtcttctatccaatgcccttgcgggatatgaatggatcattcctccctccttctcattctctcta

SEQ ID NO: 46710 - DNA, 469 bp, Glycine max
  unsure (1)..(469): unsure at all n locations
ctcctacattttatctctagcatgcattgtatgttggtctcgtcctttgtcacgggaagccggaaggtccatatcaccttcttaattgtacacatggggcactacgcccccaaatgcgcaagtaagaagagataattttccgggctctcgtgtccgtaaaatgcattcatatcatgcatcgcataagcatctcttcataacatcataatggacatatcctgcatttgtccgttatcatattccagcctcacattttgcatgagtcatggcatcatcatgcatatgcgttcaacatactttttgatctgcaaaatcgcataccatttgttttcatgtttgctcatccttgcgtattcctctacaaaacanaaacaaaatagggggaagcgtgaaacttacactacattcttagttcatgtgtaggcaccacgagccaccatgttggatcataaacccgttactttaaaaa

SEQ ID NO: 46711 - DNA, 502 bp, Glycine max
  unsure (1)..(502): unsure at all n locations
ttaagtcacctgcggcatgtcagcttataataacaaaattgcctcaatcatttccaaatatgcatgtgaattangaagcatcaacaagaatcaagccaaggctattgtgcaagcaatcaatggggcaaaacacaccaaatgattatgatgatggatggctcaaattctcacaaaggtaaactcatcactttcaaattgagctttcaaaactatcatgacatgtataggagaattaacgatttcaagtcacaaaatgtcaagaacttttattttcaaaacaattacccatttcttgaacatatcctataattcaaagaaaaacatgcaaagtcgtacatgcacacaaaattgacccanaatattaaactaaaaatccgacgaaactaacaacattaacaaattaacacaactaacaatataacaaaaccaacaaaactatcctaaccaaagaacactcccccncatacttaaacaacacattgtccttaatgtatcacaatta

SEQ ID NO: 46712 - DNA, 333 bp, Glycine max
  unsure (1)..(333): unsure at all n locations
ttatgtgcatgccttacatatacgtcatctgtcttcaacacatatctcattcgtatgcgatacttgcctctagatactctagtgcgcttcttatggtgtacaaacactgatggatgtgcggtcttgtgcatanttctgccactgtctccatgacagaacttgtctgcccagaagacgacataaatcttcacgtgtcaacaggctacgtgcccggaaatgacgcagggtccttactaccactatttctgtctgcgagctatcctgcctagagtctgctagatgcccaacccctgcctgtgcacgaatgcactcaatgctacctccatgtcatgt

SEQ ID NO: 46713 - DNA, 468 bp, Glycine max
  unsure (1)..(468): unsure at all n locations
agcttggccaatcccgacccaacccaggcatagtcagttttttagaacctgtgacgtacctaagcaggcgagctcctgtgagtcaaccaataaaagaacaaagtccacgaatcaaggaggcttgtgtggcggctggccatctatatatcttgggtggtatttgaacattagcaactgctaatcaattaccattcgtgggtaatctgatacagggtttaaaaatggagacaggatgataagtagtttctggtaatcgattaccaattgtgtataatcgattacacagggtgatatggcactggtaatcgattaccagttgggttgaatcaattacacagtgttatctgctactggtaatccattaccatttatgtgtaatcgattacacagngtaaattttattttccaatgtgcaatgttgtgtaatcatttttgggcactgtaatcgatacatactttgtaatcgat

SEQ ID NO: 46714 - DNA, 453 bp, Glycine max
  unsure (1)..(453): unsure at all n locations
ngcttctacattggtcatgcgctaagctgagagtctctagtgcttatagctcaacccttgcatctcaggctgatttggtccgctaagctggccaagattgagctaagcccatttctatttgatctgaattgggctaagcgatggccggcacgctaagcgcatcgtattcactggctaagcgcgagaggttgccactaagcacatttcgatgcggcctatattggggttcattgagctaagcgctactcatgtcagctaagcccaattccttgcagccatagcagcgctaagcgatccatcaatcgctaagcgcatgcccatctgtactcataatgcatcatattagctaagccagcctagatcccggctcagcaagagttgtatgttgtatgacctgcagaattcgctaagcgccgcttctgtgcgctaagcctagcttaaaaaaaatattaa

SEQ ID NO: 46715 - DNA, 324 bp, Glycine max
ttccgctccggagtatgatagtcaccgctttaggagcgcggtacaccagcagcgcttcaaagccatcaaggggtggtcgtttctccgggagcgacgcgttcagctcaaggacgaggagtatactgtatttccataagaaatatggcgcctgcggtgggcaccactggttactcccatggccaagtttgatccagaaatagtccttgagttttatgccaatgcttggccaacagaggagggcgtgcgtgacatgagatcctgggttatgggtcagtggatcccgttcgatgccgacgctatcggccagctcctgtgatatctcgt

SEQ ID NO: 46716 - DNA, 486 bp, Glycine max
  unsure (1)..(486): unsure at all n locations
ntcactctntgaacanatacccctcagccaaatagaatccatcttgtgtccttttcccacaactctcgtaaatgggagagaaatattcatctaaagcatacaagtccctaatattatcaaatcttaaaatttgagctcctaaggagaaaaacaatgtgtgtctcctagagaaggcatcagctaccacatttgtttttccctttttgtatttgataacatatggaaattgctctatgtactctacccattttgcatgcctcttgtttaacttgctttgccctctaatgtacttaagtgattgatgatcactatgaatgacaaattccttggaaacaaggtaatgttcccatgtctggagggctcttattaaggcataaagttctttatcatacgtagggtagttgatggtggcactgtgaagcttttcactaaaataagcaatagggtgcccacctttgtacaatacatgcttaacttccactcttg

SEQ ID NO: 46717 - DNA, 408 bp, Glycine max
attggtcttcgctggcgaaatgatctaagtgggtctataaagagacaaatctgatcatcatgctttgataaatgcaaaaaacaaatagggcaaatgaagagggtgagaatgagggagaaacccatgttatgactgtcattcctatacagccaagtttcccaccaacccaacaatgtcattactcaaccaataacaaaccttcttctacccaccacccatctattcacaaaggccatccctaaatcaaccacaaagcccgtctaccgcactttcaatgacgaacaccacctttagcacaaaccaaaacaccaaccaagaaatgaattctgcagcgaagaagcctgtagaactcaccaccattccggtgtcctatgctgactctgctccatatctacttgataattcaat

SEQ ID NO: 46718 - DNA, 328 bp, Glycine max
tctacggaggctggatctttgagctttaatgagacccttcaattgtgattttccaccatggagatgcagtagaagataaaggagaaaaggtgagaggaggcgccatccactatggaataagccatggtagaaggagcttcaccaccaagaatgtgccttggataaaaagcttggagaggatgtttcaatggaggaaaagaaagagagaagggggaggcccaaattgaatgaggaatacggggagagaagtgaactttgagttgtgtctcacaagactctaattcatcaaagttacaacaagcgttacacaagcttctatttatagcct

SEQ ID NO: 46719 - DNA, 424 bp, Glycine max
gtcacctgatgcatgcaagcttttcttaatgaaattttagagtgtctatttatggctctggtgactgtagaattcttcccatcattgttggccctaccttcttatacgatttatctatgtcaatccttaagagaaagttgatttttgtgatgtctaactagttttattatgttagcctatattctagtagtggttcgaagcttgcttataatatgcactttgcgtaccgagattatatgataaatatttgaggcttggattctaaaagaaacttaatggatttgagtgtacaaatcatcatcttattctgcagaaatcgttaggtagacttggaccatcatggtccctattaatctccatatggcatgtaatcaagtgttattaattcctttcttgtaattatacaacctgaacacgtgtcaca

SEQ ID NO: 46720 - DNA, 100 bp, Glycine max
tatgccatattgggcactagacactctagtgcgcatattataacagacaaacactcatgcgatttcgtccatagcaatcattcatactctgcctccctta

SEQ ID NO: 46721 - DNA, 338 bp, Glycine max
tcttgccttcaagttgaccaatcgttacactgtcgacaaccgtgtgaaactcgtgcacctcgaatacaatggcgtctctgaatcatgttcaacgctatcatacaatggaacatgtgattgttcagaaagagtcttgtccaagatcacggatcatgtcctctatacgatcttcggtgtctacatctatcgcttgagtgccagaaacagttggaatgtttgacaattccccatgccatatccattatgtgtaattgatactgatgtcgagacattaagatgtgatctgattgctttattgactgtagactcccatacaaacattttgtgcatgtgcacca

SEQ ID NO: 46722 - DNA, 384 bp, Glycine max
  unsure (1)..(384): unsure at all n locations
gatgtctggggcgtattcctgggggagaaatggttggaattataaagaaattcattaacttagatgcaggaactgattaactaagaaagttaggaagtggtatgagactttttcttttctcactctaaaatcaaagtgatttcaatttcaggtacaaaaaatcaaattttgaacttttgtactaagtgtaaaataagaagctttgttctcaaaataaccaatgtaagctcaattttctttatgatgcggcaattttttatgtctaagatcagaatttgcttttctgccttttatttccttcaattttctttaatggatttcttgatatttntcatatgagacatcaaatgactttcattcacaactagaagctgtgggtatggg

SEQ ID NO: 46723 - DNA, 542 bp, Glycine max
  unsure (1)..(542): unsure at all n locations
agagatgcatgattagctgcgatntacgtgacctatacaatactanagctcgctcttacgatggttcatgctcttacatggaagacgcttctgctgattagctatccgaaagatgtcatgatgctacacggccatgtacgggcacacgatgatcctatgtcgtatcatgatcgacatcaagtgtcacaagcgcatgtatatgcactaaacgcacagttgaagtgtatcatacatagatgctgacaaagaatatgtgtcaacgtctcatcgaaacatgaatattatgacggtcgcgcatgatcacagcatgagctatatcaatgggttcataactacgatattcgctacctacaatgctaatatcacgttatcattgccttgagttgcgccaaatcttacatgcctcactagatacggttatagcatgagctgttagttctattacacgcagactcctgtatgatcaggtaccgtgcacaacagcggcgtgatgatagatgctcattcggaccactaaacttgtgcatacaactaaatgctag

SEQ ID NO: 46724 - DNA, 274 bp, Glycine max
actgaggatgatagcactatgtgccttctgcattcaagctcctttattcacatcagccatcatcttttgcagctaaggagatacatcaagtgcttccaccagaccctgcttaacctgaaaggctctcatcttccatcgccatagcccaaacatattgtgccctatgaatgtactaacctcatacttggccgatcccatttctcgaatcgaactctatatcgtacatgctcaccggaccagtttgatgagccacgatcagatttgctcacaagga

SEQ ID NO: 46725 - DNA, 142 bp, Glycine max
ctgccgcttatcgaaattaacttactcgaaatttattttttttgtgtgcaatatactatgcacatcatttaatatgctttattctaaaaattgatggtgaccgacactactctatgattcgctggatcgatttctgtgacca

SEQ ID NO: 46726 - DNA, 276 bp, Glycine max
ctcctctcatgacaatagcataatttatggcactgaatagctgggagttgcaagccatcttctcagattaatgtttggcttcagccagggtcatgtgtccaagggctccaccattggcagcatctatcatacttctctccatgctgatgagaacttcataaaaatatcgtaaaagaagctgctctgaagtctgtgggtgagggcaactggcacatcattttgtatacctctcccagtatccataatagctcactccgctgaattgtataatacctg

SEQ ID NO: 46727 - DNA, 451 bp, Glycine max
  unsure (1)..(451): unsure at all n locations
actttagttgaaatcaatagttttcactgtgtgaatntatactatgtagataatttaattatgctttttcctaagataattaatcttgagtgaaatctcatttagttattcgtgtgattgattttttgtgaccaacatctattgattgttgatatttaattgagaacaatttggactatgtagaatttatactgtgaacttgcattgtgtaaattcgcgttgtacatagttactctatgtaagactaacaatgtgtaaggttagatttaatgactcttccctagataattagcacaaggatcaaggtcaattacctagaggattgccatntacgattaaagtgatatttccatttttgccctaattctactttagcctttttaagcaaaagattcaaaagtcattttagccataaatgaaatttcttgtgatagctatgttgggcacccca

SEQ ID NO: 46728 - DNA, 437 bp, Glycine max
  unsure (1)..(437): unsure at all n locations
cccactattttctcatagtagaacacaggtagtgtgtctactatcattggtatcatttccatttccatcattgggggtgctacttgagctgccagatccctccacctttgggcatattctttgaaagattcatgctccctcttacacatgttctgtagctgcattctatccggagccatatcagaattgtactgatactgcctattgaaggcaatcattaggtctttccaggaacggacccgggaagattctagattggtgtaccaggtgatggctaccccagtaagactntcctggaagaaatgcatcaacaatttttcatctttcgcgtatgccctcattttcctacagtacaccttcaggtgattcttgtggcaagtagtccccttgtacttatcgaaatttgacaccttgacacttggaggaatgaccacgtc

SEQ ID NO: 46729 - DNA, 378 bp, Glycine max
  unsure (1)..(378): unsure at all n locations
agcttctaaactntatacaagaatgaagctctgataccacttgttagacaagtggcctcagatatcttaagaaggggggggggttgaattaagatattccaaactatttcccctaattaaatcctatttcactttttactcaagttctgaattcccttaatgacaatcttcttaaatattaattcacaagaaacaatttgaatatgaatataaagcaataataaatattcgagattaagggaagagaacatgcaaactcagttttatactggttcggccacacccttgtgcctacgtccagtccccaagcaacccgcttgagagttccactatcttgtcaatccttttacaagttctaaacacacaacgacaattctt

SEQ ID NO: 46730 - DNA, 362 bp, Glycine max
tgatgataataatgatgatgacgtaaggtccaagagaatgagttcaagattgaatctggaacacttgcagaatgaagaggaaatttgatttcaggaatcaagtttcaagattttagttgcaagaatcgacaataatgatgtggaagattcatgaatcaagatgagtactaaaatagtgttcacaacattgagtagcacatgaattattcacgtaacctttgaccatagagttattactctgtagtaatcgattaccagcttattgcaatcgactacgagtcgctaagtttgtttctcgagagctttgcgctgaatgtcgacattccaattgattcaaaatggtgtaatcgattactgtgatg

SEQ ID NO: 46731 - DNA, 370 bp, Glycine max
ggtcatatagatgtcttcctctaaatccccatgcaagaatgcagttataacatttaactgctcaaagtgaaagatctctacagctgctatactcataataactctgatggtagtcatctttacaactggagagaagatctttgtgaaatcaatttcttgtttctgctgaaaccctgtctccacaagtctctccttgtatcttcttctaccgtcagattcttcccttagcctatagacccacctattctgtaacgctttcttttcttctggagatttagttaaagaccaccttttattcttttgagaggatgcatctcatctttcatcgtagctccacttatagagcattccctgtgagcctcctgaacat

SEQ ID NO: 46732 - DNA, 461 bp, Glycine max
  unsure (1)..(461): unsure at all n locations
ntgatccgttgagagatatcggntatccgttgtctaataacttgtgcgctttacactaagcacgttactatgcaaagaaagagtgtagaaaccacaaacatcttctacaacagggtatggcatagtggaattaagataccaatagaagaaattagaaaaataacaagccaatccaacatgcttgcacaaatattaatagaaatgaaacattagttgtaatacttaaatataaatttctaattgttaaggtatgactagtatatcatagtcatcatgctagcatcaaaatcaagcattcagagtttacaaggatagattcatacaagaattggagaaggcctgacaggtgagctcttttctactttacagttgacagaactaacattaacaacaaaagagccagatgcctagataccataaaccanatggacagtataaatattcattgtgatctatatatc

SEQ ID NO: 46733 - DNA, 482 bp, Glycine max
  unsure (1)..(482): unsure at all n locations
tagcttatagaatgtgggtgatatatatcaagatgaaatctttcacttgttgaacactttgccatgatattatgaagaaagtcaaaccattctttaggtgttggtaatgaaccaataacaaagaagttttcacacaaacaaattattcaaaatcaacttgagaatgcacaaaatcgaacaaataatttggagttgaaagtgcaaaagtggacaaatattataaaaaaaaagcaagaggatgtcattaaccaacttcatattgaaaatgaagtgaaacatcaaattatagacatgttggaagaactatctcacatactaactcaagtgctcatgttagtaatataaagcttttntattgaatattttattctatgacttattatgtgattatctctctaacatataaataccaattatttgatcttatgtgatttattattctttattgtgcaggatcgaaactcacaaagatactacttact

SEQ ID NO: 46734 - DNA, 471 bp, Glycine max
agatggcctcagcatattccttatctccagaatgtgaattctatcaatagacctccaatctttaatggagagggttaccactactagaaaacccgaatgcatatctttatcgatgcaatagatctaaatatctgggaagccatagaaatagggccttatatacccaccacagtataaagagtttcaatagatggtagttcatcaagtgatagcataaccatagataaacctagagatagatggtctatagaggatagaaaacgagtacaatacaacttaaaagccagaaacataataacatcttgcctaggaatggatgaatattccagggtttcaaatagttagagtgctaaggaaatgtgggacactcttcgattaacacatgaaggaactacaaatgttataagatctatgataaatgcactaactcatgagtatgaagtatttagaatgatgtaaatgaaatattca

SEQ ID NO: 46735 - DNA, 515 bp, Glycine max
  unsure (1)..(515): unsure at all n locations
atggttgtcctcattcgacctttanactcagcttatagtgcgaggtaagacacgaaggccacatcgctgcgatatgctatgatgactccccgaggagatcggatcttgtactggtatgttctcctcgtttccgactatgaaattggcgagtggtggaatgccctagcatttgcacgacgagcttaatgtaacctcttgtagctataaaactctatggcttggccttagcgttatagataccttttattaacgcattatgtctttgttcttgaagctatattatatagatctttcttcgtgtggtcctacgcctctacccattctcattcattagcatgtctatttcgttacgcgttatatgccacatacgacgatgagttcctcaaagggtcttataaccgggacccggtccgcaattttagccatttctggattgatggtaagtggatacgacaaagatttgggctttccctaacttganagataaccctttgacactggagatgaggctctcg

SEQ ID NO: 46736 - DNA, 304 bp, Glycine max
tctcatagttgaacacaggtatagtgtctactatgataggtatcagttacagtttcatcattgggggtgctacttgagctgccagatgcatgatatctggtgcataatccttgatagatccatgctccctctatacacatgtactgttgctgctttctattctgtaccatatcagaatggtactgagactgtctattgaatgcaatcattaggtctttccacgaacggaccctggaagattctagactggtgtaccaggtgatggctaccccagtgagaactttctggaagacttgcattaaca

SEQ ID NO: 46737 - DNA, 344 bp, Glycine max
  unsure (1)..(344): unsure at all n locations
agcttgtgaagatatgaatgttcaaactcatttttgagagaataagaagccaattgttattttaatcgaccataaaaaggtaaataaaaataaatgtggactttgaaactctgattattttcgctattattatattaantaaattaaacacatttagtaaggacgtctatctagctcaatagattgatatagtatctaatttctgtggataaaaaaaaacttntctngatactgtaattttattttattttacaagaaattatttttattaatagcttaattatataatgtcgcatttaattataattaaaaattcaatcgagttcggcaattattaaaaaatt

SEQ ID NO: 46738 - DNA, 511 bp, Glycine max
  unsure (1)..(511): unsure at all n locations
aggatttgatcctgcattacggacctatnaatactatactcaactaattgataggcttcggtcactcctcgtctaattactgtgaattctctccactaagctacatactatactggttagttcgtctcctctaatacgactattgcactcctggattgttgctttgaatctatatttccgtgattccacctggatacggccctaatctctcgcttgtgcccactgagctggtccaccacttgatccttctttgtatcactaaacaatcaaatctcataagtaggattattggatatatttatactgtgcttgcagcttataatctatgtcattattaccatggtacataggtataacaattgtactctgcctgcgacgtgtagtaatgttgaatttaagttgacataccttgcatgatcgtcctagaactcatgacttagataattcaaactatagaccatctgctatctgtggagctatatgatgacttgatatgtctgattatctcttt

SEQ ID NO: 46739 - DNA, 365 bp, Glycine max
tgcagcttgcgagtctatggatccatctctatttattgatcaatcgctttcttcccgatgccactggtttggctgcatcatctgctttgcatgtttctactaacttaaaagagaaagatcgtgatacttgtatctattcacggtgtcacacaaggcattcatatgcttcttctccaaaggggtgtggcttggaactactctttccgggcgtatgaagcatatactttgttttatagagagccctgtgctgccatgttctactaatctgcacaagctttagcgcaactccaaacagaagaaacacctgtacttcacaacctatcattcgtgtacacacatgatagaatttgatgggtgagaaatgc

SEQ ID NO: 46740 - DNA, 237 bp, Glycine max
catatccagacgctcgacattgtacgttgaagctctgagccaatacaaacgaccattacatttttctcagatgtgtgagtgagtctccgaacataactagacgctcgaaattgtatggtgaatctccgataaaattctatcaccatatatttttcttcaatgtctgattgagccccggacacatcgagagcttaaaatgaatgttgaacttgtgcaaatcaacgacatactttttct

SEQ ID NO: 46741 - DNA, 313 bp, Glycine max
  unsure (1)..(313): unsure at all n locations
tatatgtggaaaaggtagcgatctacgtatccaatttgcgggtgatgagacaccctntaccccacacatatttgtacttattatcaattaaatgattataaaaatttaacttaactcaaggttttaaacaatattatattcacgcccttcaaatggagcaggactacattaaccttctaacatcatcatatacatttctaataaaaataaattcacttcgctatacaagccgttatataccctatacccaatgcacatctatcaatctcgtgcccgacatcttaacacatgtcctaatcaataactagaattg

SEQ ID NO: 46742 - DNA, 315 bp, Glycine max
  unsure (1)..(315): unsure at all n locations
actcatcacgctgtctaacaaaagccttgaggtggatcccagtgctctgatcattcattagcatattcatggttttgtggcatactcaccactgcttgtntctttaaggaactcaccataactaaaaaagcgcaaaggcacccctataacacccgatccagaagtaatatggataacgaagagggagtgcaagaacagatgaaggctgacctatctgtcttaaaagatcagatgacttctatcacggaggccatgcttaaacttcaaaaaactatataagatgatgctacagcggccgcttcaatacagctaggg

SEQ ID NO: 46743 - DNA, 431 bp, Glycine max
gcgcacctgatcatatggcgaccatgaacgcaaaaagatatcccaccctgggcaagagaatagggggaggatgaccgagaatcccgagctgcgactgtcattcctatacactctagtaggccagctaccctactatgtcattactatggcgatgacctaccttctccttacccaccgcccagttgtccacagaggccatccctgaaatctgccacatagactacctaccgcacttccaatgacaatacaccacctttagcatagaccaaatcaccagccaagaaatgaattttgcatccagaaagccttgttaattcaccccaattccaatgtcctatgctagcttgctcccatatctacttgataattcaatggtagccataaccctagccaaggttcatcaacctccatttcttcgagaatacgactcg

SEQ ID NO: 46744 - DNA, 422 bp, Glycine max
  unsure (1)..(422): unsure at all n locations
cataaccctagtcgaggtcagccaaaaactaccatcacccgggtaggctgaaaatagtcatggccaatgttggctgaaaacaaccttgacaaaggtcagtgaaaaacattcttggtcaagggtgacctaaaatattcctaaaagaagtngacccaaaatagtcccaatcgatgttgaccaaaaatagtccaagcaaggtcaaccaaaaactatgttgaccaaggtcgatcagaaatgctctggctaacgttaacaaaaaacaatctattagatgtagggaaaaaactcttcattgagatcgtcccaaagttatacataagtctttaaaaatagtaggcgctattattaaaagaaagaatatcaacatgactattntaatgagattggtaacacgaccaccgaaatattaacgataaatcaca

SEQ ID NO: 46745 - DNA, 287 bp, Glycine max
gacaagggggtgccttctatcctcttcgtcaatgatggttctttcatggagaggttcaagcaacttcaacatgagcaggataaacggaataatgtctaattggacgattctaaaccaaataagggtatatcacggtctttgtctcccaatccttcccttaccaaaacgcctgcggacttgatggttattgacaccaggaatatatcccaccgcggttccactggatagctagctttcacgtttttactacaggcaaagctggtgccaccccctgtaattctagtgct

SEQ ID NO: 46746 - DNA, 387 bp, Glycine max
  unsure (1)..(387): unsure at all n locations
gtaagcttttttttttttttatggttattcaaagacttgctagacacctttgttactttcttgaaaagttntgttagcgtggtccaactaaaagaagcatggaatatgtatatatgcatgcaaaaagtgatatttatttttcattacattgtatagtgattaggatattaatatatatatctaattattcttgtccatcacaataatatcttttaggatttttaaggagatgttcttaaaacattntcttctttttttaccttttacatttaaaccaagagtcagcaaaagttcctacaccatagccctgttggaatgcatggaaataaaaatttagtcttggtctgcattcatgactagtcatggccttatgtaatatatatgtgg

SEQ ID NO: 46747 - DNA, 57 bp, Glycine max
  unsure (1)..(57): unsure at all n locations
tctgagacanataaggttgtaaatgatgtagcagttgggctggaaaaaggtgatgat

SEQ ID NO: 46748 - DNA, 386 bp, Glycine max
  unsure (1)..(386): unsure at all n locations
agctttgagccanatcctgactcaccataaactcttgactccaggtgagaatgtcaatccttaccctcggaagcataaaaggaatagaggggaatattccaatcaaagaaaaagagaaggataattttcaatgaaagcataatagaaaagaaggaaaattccccattcaaagagtgggagaaagcaaaaaatgaaaagaatgacattttctcaatcaatgagtgggagcttgcaaaaagaaaagaaaggaaaattcccaatcaaagaatgggagaaagtaaaaaaggaagaataagaaagaaagcttctgatcaatgatcgaaagaaaacagaagatatgtgcagagaggtctttggacccgacaatatctgaacaattcataatt

SEQ ID NO: 46749 - DNA, 149 bp, Glycine max
agcacaatcagaaccttgcttatatggactctctatgtctggccaacaggacattggataagacttgtagatataactttgctccagctcttaacagtcattaacgttttgaagagttacatgggctgatttattcagaaacatgcact

SEQ ID NO: 46750 - DNA, 357 bp, Glycine max
tttaaaccgaccccatagctatgatgttctgcgaatcacattccatgatagtaatggtgaccgttgcctagactggaacatggtatatgccccttgcagtgtttccttatatatctgtaatggggaaatcctggattaacagttctatacttttacagagacattcacaatcgttatctttcctcctgtaccttctgacatgtaataagtagcggccatgaaaaataagatctgaaatttcttcttatatagttgggtgaacaactattgactgcaagtctaatctgttgcactttattgctgagagctgcttgtaagcccactagcctgccgttttttttgttttgttaatttcaa

SEQ ID NO: 46751 - DNA, 471 bp, Glycine max
ttctccttgcctagcacttcagaaccttctagttgggtcatatagatgtcttcctctaaatgcccatgcaagaatgcagttctaacatctaactgctccaagtgaagattctctgcagctactatgctcagaataactctgatggtagtcatctttacaactggagagaagatctctgtgaaatcaattccttgtttctgctgaaaccctttcaccacaagtctcgccttgtatcttcttctaccgtcagattcttcctttagcctattgacccacctatgctgtaatgccttcttttcttctggcaatatagttaaagaccacgtcttattcttctgaagggatgccatctcatctttcatcgctagcgtccactcaatagtgtcattcccctgtgtagcctcattgaaacattctgactcaccatcatcagttaacaacaaataatgcaatgaatgcgaatacctatct

SEQ ID NO: 46752 - DNA, 483 bp, Glycine max
  unsure (1)..(483): unsure at all n locations
gatcttaagtcgacgcggctgcagctgcctaaagagtccatgaagacaggtggtttatgaactagttccgctcctgagtatgacagtcaccgctttaggagcgctgtacaccagcagcgcttcgaggccatcaagggatggtcgtttctccgggagcgacgcgttcagctcagggacgactaatatactgatttccaggaggaaatatggcgccagcggtggacatcactggttactcccatggtcaagttcgatccagaaatagtccttgagttttatgccaatgcctggccaacagaggagggtgtgcgtgacatgagatcctgtgtaaggggtcagtggatcccgtttgatgccgacgctatcggccagctcctgngatattcgttagtgctggaagagggccaggagtgctagtttggccagaggaggaacccttctgatgggttctatgaggacgccatcgctcagctgctatgtata

SEQ ID NO: 46753 - DNA, 334 bp, Glycine max
cttgtttcatgaggaggagatcgcgatagtgaatatctccctgagtcttttgaataatttagggaagaggacggaattcatcacacgatctttttaccccaagaacaccttatccagatggtgttgtggacatgacaactactctgttgaagaacgtgcatgaacccttctaaatgatacatgattacctaactacttctgggcacatgttgcacatactgttggttacaccttgtacagaatacttattagacctattttgaagaacactccgcatgaattgtgttatggaagactaccaaccgtttcacacctgagacatttctgttgcaag

SEQ ID NO: 46754 - DNA, 308 bp, Glycine max
tactcaagctaacaatccttgtgatctattatggaatatttctatgcctatcacatagcttacctcatccatatctttcacttcaaagtttctagagagaaatttcttagtctcatgaagaagacccagatcgttagttgcgagcatgatatcatctatatacagaattagaaaataaccttacgtccactgaccttcagatacatataccgataaatagtattgtccttgatctaaaggaaacaatggtatattaaacctcaaataccattggcgggaaggttgctttaagactggatattgatttc

SEQ ID NO: 46755 - DNA, 308 bp, Glycine max
agtgaacaactaactttgagtaatgggctttgcatcaatctccgaaatctacaatgaaatgtatgaatgatgatatgatgaacgccataattgtatacactaatccacaatgacacaaaaagacttacacttgaacttataatatggatacctttgcccctctttgtgagctaacatacacttttaaaatctaaccctgaactatgatgagtaccttcagatacctcgtttacactctacgagaacatatggttgaaagcaaattgactccacaattgggggagtggagatgattgggatgtaaaaaa

SEQ ID NO: 46756 - DNA, 359 bp, Glycine max
  unsure (1)..(359): unsure at all n locations
atggatgcatangctattattattctgatggcttctaatctagcaactggagcatatatttcctcataatctatcccctcttcttgaatatatcctttggggactaatctagccttatttctaattactatgccattttcatctaatttatttctaaacacccattttgttccaatgattgggtatgtttcatgttcttaactaacctctcaaaatatttctttcaaattggttagttttcctcatagctattatccaatttatctattatagcttatttaaattttaggtcatcataaacaaagccatgttttgataatcttgaagaggctactgtaccctttgaaataccatatgtg

SEQ ID NO: 46757 - DNA, 594 bp, Glycine max
  unsure (1)..(594): unsure at all n locations
tttgctcgactatttnttgtttacgcatcttattanagtggtttatatatnttnnnngttnccgagtgttgatgcctccgtngncntacgtgtacactcncaaactctccgtccatctagtaatgacactatctactatgattccagctagaatcttatgctccacctacttctatacgccgcactaaacaaaaataagaacggagatggcccagacactcagagccagaactcccaccatgaacagtattcctaacttaagtgctatagatccattatcacgcatgtgatctttgatttaatacgaaatgatacgccgaattcactcatgacatatctatggttcataattacggtgaaacacttgcttgtgtgagacttacatgctctgagtgatctacttatatattcaattggacccatcgttgcctctcaatggatgtttataaacagaacgcttacattccaaatctcatatggagtacaacaatagatttatgatcatactctccttctcgcatagacacaatgttgctgtccgaatatacatgttgtttaattaactaaggcctgttcttttctaaacatgtccag

SEQ ID NO: 46758 - DNA, 260 bp, Glycine max
aaaagaatgccgtcgatatcaccacataacaatttagagagtgagccacgactttcaaatggattcccactggagttattcatagagagagccagatatcttaatggcgaaagcttttccaatgatctatgaagagcacccccaattgagttgtatgaaaaatttacagctcaatatttttaaatgccccaatatgagctgtcataatgcctgaaagtcatgaactcttaactgcaaatactgtgagtccatgggcaata

SEQ ID NO: 46759 - DNA, 481 bp, Glycine max
tctatcttattctcactgcgtagaactggaataacatgaatatgggtcttatacagagctacctagtaaacctcacgctagaatagcatttcaacatttatctgcaccatctgaagaatactatgctctacatcagcctaaaattcattcgaaatagcactcttatccagatggtgctgagtacatgcaaaccactatgttgatgatcgtcatgaaccctgtcaccaccaatcagagtatgcaaacttctttaacgccatagtgtacctactgactattgacccgcctactctatagtgcctagatctattcctgacataacttttaatacctcgtcttattgatcataaccgatggttttgcacatagaacttctatgttgcacagagtttgtccatcacttgtgacctctctcagaaaatattacgctagcgcgttagtcacataaatattagttgttgctaaatcgtatgtagagttt

SEQ ID NO: 46760 - DNA, 604 bp, Glycine max
  unsure (1)..(604): unsure at all n locations
gctctagttctttatgcttngtcaattgntgatcgtgnattntttaantanntnnnntaagagcgttgattctagtgttacngtccgatnncatctcaagctgncatgcttcacccaagcttgcctatgtgagtccacatgatagcggtctcgatcttgttccatgatggagtgatctcgattgacaagctctccctgtttccttttgcgataacttgtgtgaagactggtggaatactactcaagatctttgttccccaataacactttctaccgcatggtgttttgcagataggacactctctatcgaacatcggctataccccaacttgaggcgaattgccatgctacggttgtgcctctgttgcacatacgtgtcgtgttacacacacctgcattaatgactcactctgacctactattgtgttacttactgcccgatgatttttgtcatggacgaatacccaccatttcccacgacgcaaagatcttgtgtaagtggctgttttaaaccttggtacatactcttggctaacttgacacatatgccgatgacgctccatttctcggtattcagtcgctaatgaatgatatagggccttcc

SEQ ID NO: 46761 - DNA, 566 bp, Glycine max
  unsure (1)..(566): unsure at all n locations
ttctaaaatatttatatatatttaatttaatcattttaatgnnnntnnnncagagagtgatcgtgtgatacgtggaacnccnannacactctnctcagcttgcatgtctcgatacgaaagacctcaacgtaacatgctcaatctttgcggaacaaagatcggaagtggatatcagagtacgagcnttaaccaaatccgaatctgcgaagcctggatcgatgagggacaaagacctctttctcacaataactatgtttccaattgcggatagtgagaataggagctctacgaaaaacaacgacaatatgccattaacatgaacgcacggtggcgattctaacagcatgtcagacgtatactgaattgcgggaacaaatacgcatacggcgcatgggcgatgtacaaagctcagcggccgcctatttaaactgcggtgattgacaccagtgccccaactgataattggaatacaagcctgtccacataatgcaaatccctatcattatctggatacggagcgcgtagtaatgtgcaaaacgcctgctcgggaattgaatagaatcccg

SEQ ID NO: 46762 - DNA, 402 bp, Glycine max
  unsure (1)..(402): unsure at all n locations
cttgagcatgcaactatgttcatacaccttgcttntgttgctggtttctccctctccactgagttgactgattcacttgacctcttctccggctttgttgggatacttgcatcctcggtgtttagtcaagaactattccttctccattttcactccacagaccatgttggacttgaaggccattaccactggctgctgcagctcatagtgcttgtctcactagtatcatctttggctggcaactattttcctaacaatttcaacgcggctctcgtgctttctatttcactcatcttccaaggatgttggtttataaacatggggtttatgctatggattccatcttttgtccctgaagggtgtgcggtgaatttggccaagccagtggccatgaaatcattg

SEQ ID NO: 46763 - DNA, 472 bp, Glycine max
  unsure (1)..(472): unsure at all n locations
gtatcgtgaagtgtcgagggcatntacattttctgcagaaggaaagacgcaatcatgtccggggcttccagctcgcgtgtttatatcgcacgttcctgaatggacctccaatgttggttactacaataaaactgagtacttaaggttggagcacgcaaggaatcacgagattcgtggatctattgctcttcctatatctgatgtgcactctcaagtgccatgtgctgtattggaactagttactacaaaggaaaagcctaactttgacagagaattacaaattgtttctcaagcactccaggtggatttttctttgtgctacttctagcatatacttcaatttcttatattgattctgtctggcaaatctgtgttattctattagagatttggatgtcttattaaaaagggtatcatggagaagttcttaccttgtctgacaaacgatgcttgattttttatttatatgatg

SEQ ID NO: 46764 - DNA, 467 bp, Glycine max
  unsure (1)..(467): unsure at all n locations
atccttaagtcacctgcggcatgcaagcttgtggcttgatcacccatttgtgtgtaaggttatgagatatagcattggaaaatgtactgcatcattagaactggataggacaaggctaggttatcgaactaccagacatggagtgcggtaatttagtttttatcatgctgtaattgtaatgctgttcggttaggctaagttcaacaagagacatctgcaaacaaagtttaatttgaattaggccaaactcgcgagacatcggtgtttggtattngtgccttcaacatagaacacaaaaataatttcaagtagagaaaaatcctaattgcatcaagcatttcagtagaatgacccaacgcttntacatatttgttttcacactcactttctgataattactgctnttacttagaatagaattactaantctttacttcatgataatcaattctttacgcacattccta

SEQ ID NO: 46765 - DNA, 416 bp, Glycine max
tgcctaattatcctgaaattgagagacaatgattattatacacacacagtgaaaatattaagtatttattacctctacttaacagaatatacttataacattacaaaataaccataaatggggagagtatgatacaattgatacagatcttatacacgacagttagtctgtttcaccgactaacattattcggcactcaatgagccctttctccaatctaatcatcttggttgagaagaaagacgaatcttggcacatgtgtgtgtattttttaactctgaacaaggcttgtgtcctatataggtaccttatcccaaccattaatgagttactagatgaactccatgtttctaaattcaatgtgaagagtgatcttaaatcacgatttcactagattcatatgcacgacagtgaca

SEQ ID NO: 46766 - DNA, 309 bp, Glycine max
  unsure (1)..(309): unsure at all n locations
ctcagcttctcatatattatgcgcctgaatcagacttccgtttcaaaagttatgaccatatgaatntctccactgtattccgtgtgacaagttatgaccatttgaatttctcgatagcattcgctgatcaatttcgagcgtctcgatatattatgcgcctgaatcggacttccgtgtgacaagttatgaccatttgaatttgtcgagagcataccgnggttatatttcgagcgtctcgatatattatgcgcctgaatcagacatccgtgtgacaagttatggccatatgaatntctcgagagcattcgt

SEQ ID NO: 46767 - DNA, 59 bp, Glycine max
ctcggactaacaagcgcggctaatgaaaatacatatttagagaccgcgcgccaaccgat

SEQ ID NO: 46768 - DNA, 447 bp, Glycine max
  unsure (1)..(447): unsure at all n locations
agtataaacatgggaccaacacattttatntcagaaagtcgtatctagtcaagatctgagagaccatacaagtttcctagcggtttctaattatatgggccattaagtctatcatatgctgacaatagccgagaagcccatgaatttcttctgggccggagtaggtgtctgccattgccttggccttggctaataatcgaggaagtttttgactcccgttaaggtaagagcaaaccggtccatccacatggttgcctcttggtgtaaagagtcgatcacccttcctctagcctctnttttcgcgtatactaaggcatactcgtccgcgaccctatgctcgtgggccgtggctagacttaactcttcttggtacttggcaatgatagctagcatgttggtctccgtctcgcataaacgctgagacaagactcttttggacctcaacag

SEQ ID NO: 46769 - DNA, 412 bp, Glycine max
  unsure (1)..(412): unsure at all n locations
agtcctctcagtatgaaaaataacagccgaatgctcaaaatcaaaatatgcagaatcactagcaatagaatactcataatgctcaaaatgcacagaatgatcatgatgcacaccatgcctaactaatctatgaaaggttctatctatttcaggatcaaagggttgtaaatcacctggattgcccctagtcatgcactatatgcaacaaataatgtgttctcaaacaagcacctaataagggggtaaaactacaactatagtcaaacgatatccaaatgagctgaaattntgtgagcaataccctataatcatgaaaagatatcacacaaaagtttcaaacataaattcatagtcatactatgaaaactacctaagcaaagcttataaaatatgacagtattacttgaaaata

SEQ ID NO: 46770 - DNA, 496 bp, Glycine max
  unsure (1)..(496): unsure at all n locations
tgaagttgaatcctctaattccatccttaaccacnaanctngactattattctgatatcgagagaatatgattatgctacacacaaagtgaatatattagtgatcttacctatgctcaccacaaaatactgatntcattacatcattaccattaagtgggagagtatgatccaatgtatacaaatgtactgcggtatatttaaacttatataccgactaacatatagtcgccacgtcgagagcattttgttcaatataatcattctaggttaaaggaattactatactaggacatgtgtgatatcaatagcataagaaaaagattgtgaactatatgggctcctatgccaatgtgcttgattagtagatcaactgcctgtactatacgttatttaacagtgtcctagttattattttctctataccatgcagaagagactccattactacttccactttgagccatatagatacgcattctgtgttaggaaccccc

SEQ ID NO: 46771 - DNA, 455 bp, Glycine max
  unsure (1)..(455): unsure at all n locations
tgcagcttgcagctgngtggaactatagcaagtgtaattatatgttatcagatctgacaatggatctaaatatacctgtgaaaaacttaataagttctatgaacatgtgggcatagaacactattttacatcaccttattctcctcaactaaatggcacctcataaatgaagaatatgatggctatggagatgactatgtgcttactttaatgattaataaattggccatgaaattctgggcggaagccgcacatactgctgttttcttgcttaacagactactaacaaaagcttctcataagaagacaccatttgaagcatgttatggctatacacctgatttgctcaatctaaagatatttgtnntgtngtgctcttcttacattccttcagttatgaagtacaatctagactagaaggcagattcctgtatctttgttggctatagcttatt

SEQ ID NO: 46772 - DNA, 415 bp, Glycine max
atgccttgacatttgttggtcaagcaatttctaatgacttccaccttggctttatcaacttcaatcccaccaacaaagatcttgtggcttaaaacaatgccttcagttaccataaaatggcatatttcccagttaagtacaagattggtttccatacactgctttagtacggtgtcaagtttataatggaatgaatcaaatgaagacccaagaacatagaaatcatctatgaacacttcaatgctcttttcaacaagatccacaaatatggcaagcatgcattgttgaaatgtagcatgagcgttacaaagaccaaaaggcatcttcctgtaagcgaaaacactataggggcaagtaaaagttgtcttcccttgatcttcaggtttaacagggattcgattatatactgaataac

SEQ ID NO: 46773 - DNA, 401 bp, Glycine max
  unsure (1)..(401): unsure at all n locations
gcttgtaaaagcccanaagttcttaatggttatatcctcctaatcttntgnttcttcgataatggcgaaaatgtgttccaactttggatctaattatctaagaattttctccatatattttacatcatcaagaatttcaccgtttctattaagttgactggtgattgttaaaattctacagaaatagttggagatgacttcaccttctttcatatgcacagtttcacactcggctcttaaagtttgaagacgtacctttttgatcagatctgctcccttgtacaaggttngaagcttcttctatgcttctttcgctaactttgcttctganacattctcaaaagcatcatcttctaatccttgatagattagatagagagcattcttgctctcttgagtat

SEQ ID NO: 46774 - DNA, 623 bp, Glycine max
  unsure (1)..(623): unsure at all n locations
aatggagcgacgcgtcgcttnttgatnaatatcttatgaatntatttttatattnnntnnnnnnnnnaagtgcgttgagtccatgtcaatacccctgcgatnnccnncnnnnnctnnnntttnnactntnntgntntnctgtcacaggtgcacatctaatancataggtcttcatcacgggagacaacgacagtggatatctctatccacatagagagtcccatcaaaagacaggacgacatntgagatgtataaatagacgtagtgtgacaaatttaaccgtagattatagtgcatatcggatcctatcccatgttgggaagaaccctgaaaaactccatttacatatctaaaaagatacatctacgtcaaattaattatcaagtaaattatcgatcacattgtaactcaaaaaataaatattatctaataagagtaactgacatcaacgtacttcagaagtaaaatatatcttgagtaaccagagaaccttttacactcctatatggagtattatatatacatataccactcacgtagtaaacacatagaatcaccacctcggctctctacttatgccacacaataaaaactccaccagcatgtaatcattgaaactcccc

SEQ ID NO: 46775 - DNA, 430 bp, Glycine max
  unsure (1)..(430): unsure at all n locations
ggatcttaagtcaccgcggctgcagcttctacattgagattgagacactcatgagagatcaagccanagtcttcatcactacccatccattcccaacctgtgataaatgtgaggttgtgcatgggtaaagagaatgcactattgatgacaagttaggtacaaccatggatgatatcaactttgttggggcagaaaataattcttacaatcaatatcccaacaatnttcaatacaggacaatggcttcaggaaagtcaagggatgtataggcctcaaaccatgcaaaatcaaaggcctagacaagagaaaagaaaacctactcttcaagagaccatgcttcaatatatggcccaaaatgatcagagaatgaagctggtggagtctcaactcaccaacatacaatttcttttgtcacaaagacagacgatca

SEQ ID NO: 46776 - DNA, 470 bp, Glycine max
  unsure (1)..(470): unsure at all n locations
acacttgaatctcagcttgagtagttcccttatctccacctctaattatcatctctgatgcatcatcatatgaagctactgcccctcctgatacaccagctgaagaaacagctgacccccctgcttccccagttggagaaatcgctaatctttctgattcgtcatctggagaagttgttgctctcactgattccctagtgtagacactgttgacattgttgattcttgatgatgcattttgttttcttnttggtttattattattattattataataattatggtttcagtacaatatctcttttatgttgatatacactgttagttttatgtataagtagttggtttgctcatcttgaagcatatggaacagcttgacttgactttgatgatattgcagtgaaacactcttatctttctgtgaaaattggtgtatgactcggttttgaattgaatgcatgattgtgatg

SEQ ID NO: 46777 - DNA, 428 bp, Glycine max
  unsure (1)..(428): unsure at all n locations
atccttgagtcacctgcggcatgcaagctnttgcangtatnttacccaagaaaacaggatagctttataaaaggaaaacagaaatataatagagatgaagtccaacaatacatacatccaatgcgctcagcttcaaccatacgaagatctaaaggaatttcttgaaactgtgcagcaatttgatgatctccaagagataaattgtgtgaaacatatgcttttatggtgcctgcttcctttgtgaatcctgtgtcaacggtcaaatggataggattgggtacttctcgagaataaaattcatggattaatgcactaccaccagttactccaagaccagttgaatacctgcatgaaataaccataattagctacagtgaaaggaggttcataaactggtataatagaacattctctaagaacataaagag

SEQ ID NO: 46778 - DNA, 438 bp, Glycine max
  unsure (1)..(438): unsure at all n locations
tttcttaatcttacanattaatgcaataaatattatattttgagactaaaatttcttaattaccatttctattaactttattaataattactattcgctaagaaaacctgactcatcagtgttaatgaagcttcctgtctctttaataatctccaagactcacttttaagactttgttcggtgactgatgatatggtggttcttgacggactaaaatagtaatttaataaaaaaaactgttttttaaagaaattactttttattatcttcaagtgagccataagtacaagtagttaatgtgtaaattaaaattaaatcatgttagatattatttaaatataattattaataaaaacaaattttaatcagatttatcttaccttttaccaaattacataacagtcacactctcattacacgaatttggattaatactaa

SEQ ID NO: 46779 - DNA, 258 bp, Glycine max
  unsure (1)..(258): unsure at all n locations
tctatgatctgaagttattcggatggattacactacattttggtctacataactaattaaggccgcctctctaagtttcctttaattgtctcattttattcttatgttataacttcatacggttgttgaccctctttacggttattttcatttctaatgcttcccaaattattatagtggctacngagaatttattgctaatggatattcaatgttacggggaatttaattctaagtggaaaattatttctagaacga

SEQ ID NO: 46780 - DNA, 463 bp, Glycine max
  unsure (1)..(463): unsure at all n locations
agcttctacttatgtggcagggcgggcttcctttactatcttgtctccaacgcgagctttgaccactgttctttcttcccgcgatgcttcttttcatgtccgcctgagtgggcttatagcctaaaccatacttcccacgatttccttgggtatttatcaggctagttatgccgccgctgtttttgcctaaacccatccctggtgtcataacctgtccccaacataactctggccatcattaccgttgcatcggacagacaaggctgcccaaagagggagtccacggaggaaatgctgaccacctcaaaagactgganagcagtttctaacgattcttctgctgctctcacataaggcatggaggatgggaacttaccaagatatttcctcgcttacacaagaccaatgcccctcactctaattcatctttggtgagtgtagatgccaacttccactgagggat

SEQ ID NO: 46781 - DNA, 432 bp, Glycine max
gattctcaaggaagctacctagtctataaatagaagcatgtgtaacacttgtggtaactctgatgaatgagagtcttgtgagacacaactcacagtacaacttctctccctttttcttccttcaatttcgtgctcccccctctctctttctctccctctttctttttctccattgaagcattccttccaagcttattatccaaggctcatcttggtggtgaagctccttcttccctggcttattccctagtggatggcgcctcctctcacctcttttcctttgtctttcactgcatctacatggtggagaatcaccatttaaggacctcattgaagctcaaagatccaacctccatagaagccccacaatcaagcttccatcagttgtagacccctaagaccaagaacagacagctgtctcatgtccctttg

SEQ ID NO: 46782 - DNA, 206 bp, Glycine max
gaaaactataccatttgacattctcgagagcattggctgcttagtttcgagcggctcgatatattatgcgcctgaattagactttatggagacaagtgttaacatttgaatttctcgagacctttcttattctacgatatctttcgtaatctgattccctgaatcgcactttgtctgaaaggtgtaccatagtaattattctaaca

SEQ ID NO: 46783 - DNA, 574 bp, Glycine max
  unsure (1)..(574): unsure at all n locations
aatctcgtattctttgtantattantaagtatgttgtggntcactnnaatnttatnnnnntntnnnnttagagtggtgataccctgcgattacgtgacactatanaatactcatgccttaatataatnttcttaatcctacataatacaagctaataatattatatcatgagactataatcctctaattgccatttctattaacttaattcataatgtaccatctgcttacaatacctgactcatcactgttcatgaagataactgtctcgtcaataatcctcgagactctctattaatactttgttctgtgactgaagatatggtggtnctccacggactaatctactactctataataaaaaaccggtatgtaagaaaattactatccattatcttcaagcgaccatagtacaaactgtcattggtaaataaatttaatattcacatctgaacaattgacaatcatacttcactttttatatcgcatgcaacccttatctcttactaaacatgagctacttgcctaatacgatccaaatggataccctataatggcactcgaaggaaaaacg

SEQ ID NO: 46784 - DNA, 330 bp, Glycine max
cgatatctatgattccatgaagttcagaaagcactactatcacataattcgtattatttattcggccgagcaaagataatatgaggcacaatcttgtaaattctgcaatctgattatcatcatcatcatgaagattaattcatgtcagagtaatgttatgacacgtcttaacacgataatatgagtgagatgggttatgaattggcatttccttttactacatgctatgcgcgggaattactaaaatcactccccttactatatatatacagtgaaaattgtgacataatagagatcactcagatattgcaccattaatgaacgatatgc

SEQ ID NO: 46785 - DNA, 166 bp, Glycine max
gcgactgcccctcctgatcaccatctgaggaaacagctgaccaccctgcttccccaggtggagaaatcgctaatctttctgattcgtcatctggacaagctggtgctatcactgattccctagtgtagacactggagacattggcgaacctcgacgatgctattgg

SEQ ID NO: 46786 - DNA, 410 bp, Glycine max
attgaagagtgatacactcatgatatatcaagccaaagtctccatcactacccatccattcccaacctgtgataaatgtgaggttgtgcatgggtaaagagaatgcactattgatgacaagttatgtacaaccatggatgatatccactttgttggggcaaaaaataattcttacaatctatatctccaacatatttctaatctatgacaaggcttcaagatagtcaagggatgtataggcctcaaaccattcaaaatcaaaggcctatacaagagaaaagaaaacctactctttaatagaccatgctttaatatatggcccataatgatcagagaatgaagctggtggagtctctactcaccaacatacaatttcttttgtcacaaagacagacgatcaaccttctttt

SEQ ID NO: 46787 - DNA, 243 bp, Glycine max
  unsure (1)..(243): unsure at all n locations
tgcatgtgaattangaagcatcaaccataatccagccaatgctattgtgcacgccatcaatggggcgtaacacaccaaatgattatgaagatggatcgcctcaattcttacaaaggttaactcatcattctcaaaatgagctttctaaactatctatacttttgaagacaatcaggacttcagtcacaaaagtctagaacttttttttcaaaaaaatcccatttcttggacatatctaagaat

SEQ ID NO: 46788 - DNA, 348 bp, Glycine max
attttttttgaatctactctaatcagtcatacaaaccacacgacaatggagaatatacatggagaataagatcaagaacaaggaattaaagagaattcaccgaacaaaaagatagaggaagcaaaagaacatcacctagatgaagatgctcttgataccacatgatgtaagctccatcggagcttgtaggcctaagatcttcttcatcaatggattcctttgcttcttggaagatgaatggcagcggaatggataacgaagagagagaggagatgccacttcaaggagaagatgagtctagaagaagctcaccaccatacgaggccattgattagagcttggatgaag

SEQ ID NO: 46789 - DNA, 353 bp, Glycine max
  unsure (1)..(353): unsure at all n locations
caaatcaaaagatttgcttgttgggaatgttgactgactaaaactattaatgacttacaaatggatatataatcagctctttaatcctttctctcaatatggtcaaggtgtttttagagattnttcactnttctaccatatacataaaacctttaccggttgtaatcatntattggcttatgcttgctatcatctataatctcatacacataatagcatatcataatttgatgatgcattatacactgcttntaccatttgtatttatttgcttttaatcagaaacattagaagtcatgagtcgtcttaagttataaactaactctttgacttaacgaacttcccttttttta

SEQ ID NO: 46790 - DNA, 366 bp, Glycine max
  unsure (1)..(366): unsure at all n locations
tgttgaaaggtgaaactttctgctcttattgtagaccacagagtggtacctggagatatgtcgcgggggtcaagagaccttggggacatcatgtggggtgctattgcccaaaaccaagcttgaccaatcccgacccaacccgggcatagtcgctcattgagaccctgtgatgtacctaaacaggcgagctcctgncagtcaacagagtaaaggaacaaagaccacaaagcaaggaggcttgtgtggtggctggccagctgtgaatcttgtgtgatatatgggttatggcctctggtaatcgattaccaaaggtgggtaatcgattacaacgcttaaaagtgagacaggacgctgagatggtctctg

SEQ ID NO: 46791 - DNA, 350 bp, Glycine max
gcttgccgacctgcattgaaacatttacggctacaccgaacaaaaaagaatcctctaacgtatagaaaaattatcgggcagcgtttggaaaaaaaaattgccaaatgtgaattgttacaccaacatcgaacaataaaagaatcctctgtataaagaaataatatcggtcagcgcttggaaaaatgattgcacaaagtcgtctgaaaaatatcagtcagggtttttaactaccgatatcggctattgtgttttctattctatcccagaataatcattggctgatgtctataacgaaatgttcgatcaccatcatccgactattcctcctttttaaacctcgatctgtgatc

SEQ ID NO: 46792 - DNA, 421 bp, Glycine max
  unsure (1)..(421): unsure at all n locations
tcngtattcaatttcgagcgtctccatatattacatgactcattccgacatccgagtaaaaatttattgtcgtttgaatttgctcagaacttcggtattcaattctgagtgtcttgacatattacgggactcaatcgcacatcagagtaaaaatttattgtcgattgaatttgctcataacttcggtattcaattccgagcgtctcgacatattactggactcaatcgcatatccgagtaaaaagttattgtcgtttgaatttgctcagagcttcggtattcaatttcgagcgtctcgatatattacgtgactcaatccgacattcgagtacaaagtttttgtcgtttgaatatgctcatagcttcggtattctatttcgagcgtctcgacatattacgtgacttaatccgacatccgagt

SEQ ID NO: 46793 - DNA, 490 bp, Glycine max
  unsure (1)..(490): unsure at all n locations
gtcacctgcggcatgcaagcttgtaagacttgattgtaaccagtagcattttataccttgaaaatccaatgttgttctcaaacacaaagtcgtaagcatatgtagcataagaatcacaacatatgatgtgttgaacattttcatactgtggatctggaaagaagtgaccatactgcaataaaatagtaagttattctatagactataataagtatatgcataattgtgaatgcaaatccatccatacaacacacttacagaattgccaggtttaaattcagtcgaggttcttaaccgcaagacacaactcaaaacatatggtcgactcagcattctatacctgcaaagaggacagatcacaacatagtcacccaaagtgatatatgtgaaagtgagtacacaaatatcatngataggtaatggtgctatcgtaacacttgtgatttcactacaggtgagttatgtacccaatagagtcatgttatcacta

SEQ ID NO: 46794 - DNA, 439 bp, Glycine max
tcatgatgaaccaagcatatttgatgatgccaaaagcccaagtgattgattcaagacttcaagaatccaatccaagattcaagacaagaaatcaacaacctaatagcacagttttgttttacaaaagagtgttctcaaattttctaaagttaccagagcgattactctctggtaatcgattatcagttggcagtaatcgattactagtgaccatattggttttcaaaaagttttcaaatgacttgtagcgttccaaaatgattttcaaatagtgtaatcgattacactatattagtaatcgattacaagtgattctgaacgttggaattcaaatccaattgtgaagagtcacaacttttcataaaatacattgtgttatctattaccacaatgcgaatagttttgaagacaaagttaatagttataacgtctaacatga

SEQ ID NO: 46795 - DNA, 549 bp, Glycine max
  unsure (1)..(549): unsure at all n locations
ctcattattaaatatgctataatgttaatgttggggattanatttannnnnnnnaagaggttgatcatgctgtaaccatactatacccacncaanctntaatatgcctccctttgcttacagtccactgcttaaatttccatattacattcttgcacctataactgagacttgagataatatacgcagcgcatggtagctagacgatctatactgatgagcgtttatccactctcattatgtgcaattcctcttcgaggtccggccaaatctgtagtgaaaaactgtgagttactctgaatgcgaactgttggttgttgaatggtatacgggcttgctgccatattacttacgttcagtttggaagtcagaaactaatgtggtgagcctagaggctactgcttgcatgcatgatcaccacaggtgatgactatatggccgctcattgtcaaacccttgtccattacctggtggaatgtcgttgcgctattatgggtcctgtaaacttgaccctatcttgtatgctagttctgcatccggattatccatt

SEQ ID NO: 46796 - DNA, 388 bp, Glycine max
tatttcatataggaagtcgtatctattcaaggtcttatagaccatacaaggttcctaacgatttctaattatgtgggccattaagtctatcatatgctggacatagccgtgaatcccatgaattctcttttggggcggagtatgtgtctgccatcgtcttgggcttggtctaacaaatctggggaattatctttgactctctgttgcaatagtaaagagccaaaccgatccatccacatggttgcctcttggtgtaaagagtcgatcaccctttctatatcctcttgtttcgcgtatacttgggcatattcgtgcgcaatcttatgcttgtgggcctgggctagacctaactcttttggtacttgtcaatgattgctgcatgttggtc

SEQ ID NO: 46797 - DNA, 314 bp, Glycine max
agctcttgtctagtagatgaaacacaattttctattctatggaagatcgatctaatgtgaactagccttccatgttcaagggagccaactatgatgactggaatgaagggatccttgcctcctttgaatccactcactttcatatgtgggatgatgtagaaaagggtagacatactcccctacgtgctttataagaacaatatgcccccggatatattgactgggtgatcttgaattcatatttcttctcaactcacgagcaagatatgctttgttgtgtgctttatcacacgaggaatatttcatggttgata

SEQ ID NO: 46798 - DNA, 208 bp, Glycine max
aaaatgtagccaaaccctaaccaaggttcatcacactacatttctccgagataccactcaacgcacgagtcttgtcctgaaaatcgccgggcgtccatacgcagggaggccttaatccatggcaagtcaaatgatgggcactggctaatatggtgagaattgggtgcactaactgacaatgtcaagaaaagccacacatggggcaatt

SEQ ID NO: 46799 - DNA, 480 bp, Glycine max
  unsure (1)..(480): unsure at all n locations
ctgtatcatatatcgagcgtctccgattatgacatgacccattccgattgatnctagacatgaagaatccaagccagagattcttgacacgacagcaacctctccatagcacagttgacgttcaacaagagagcatcctcacattctatacagttaccatagtgatgactctatggctatcgataatcggttggcctgaatctattactactgaccgatagtgttgtgaactacatcgcatatgacatgaagcgatccatgaatgatcttcaaatagtcggattgatcacacaatattccgtacctattccaagtgaatcagcaccgtggacgtctattccttcgtgaagagacctgctagaactatggtcttcgttgtaagcgtagcccatttgcatgactagtcccaatcctatataatgctgtggacgtgaatttatccaagacaagggatacactggatctgcaccaatatgaccg

SEQ ID NO: 46800 - DNA, 405 bp, Glycine max
gtgggatgaccatgctcgctaatgtttgattcaatacacctttgtgttagttctgtacgctataatgtatggtaccatccatatttcaacgagttggttgactcaagagtttacttttgagtctactcttctaaatagattacacattggttctcacttatcattcacacagtttgacacaactgattatatttataggactccctattcttggtagcaacttctttaattctcgcaataattgtcttatctctgttatcatatccatcctttcccttaacaatagcttatagtagcttgatgggaatgatattggaggttcgagtacaccttggataccatatgctcaatagtgactataacctctacaaatgaccatataggcaccctcatgatgcaaaacaa

SEQ ID NO: 46801 - DNA, 572 bp, Glycine max
  unsure (1)..(572): unsure at all n locations
tttgtcagttactctacatttattatatttaattgtataattnccnnncncaagatggtgatgatccctgaccacgcaccncncnnnatttnactttgcatatttgttcttggcagaaacacgatttaagttacacttttaacatgcaatcctaatcatcatgcttcgatatatgcatataacactggtgtcgttgaacagggtgtataagaaggagaaacccatgctgtgatcgtcattcctatataagcgagcttaccaccaaccggacaatgtattactcattccatgacgaaccgattacttctcaccaaatgataatccgtaaacccatcataaacatccacaacggctgtgtaccgacattctcccctttacacaaaccaagacaccaaccagaaatgatttcgcatcagaaagtctgataagtcaccccattatcatatgctatgctgatctgttccttatctacgtggtgatttatggctagctatagccctagaccaagatatcctacctcaatttgtctagaatacgaattgcaacgtatctggtgctagtcatggaagaag

SEQ ID NO: 46802 - DNA, 368 bp, Glycine max
  unsure (1)..(368): unsure at all n locations
taaaaaaagtatatatgagaccctatattatgtcaattttcttatagtatcttccttaaagaaagggtaattntttctttcttaaatatactttcatattaatatcacacatgtatttataattacttatccaattatcctcttatgacacaaatccaatgtttaattgtatatactatagaacactaagggaaggcgatgagttgaggctgaggtcccctctcacttggcgaacaccaatcctaattcttttgaatatttggaaaaatggtacggtcatgggaatattattattattattattattattaatactattattattaatattaatactattactattattattattatcaatattatta

SEQ ID NO: 46803 - DNA, 523 bp, Glycine max
  unsure (1)..(523): unsure at all n locations
tagtgatgatgatcctgtgacctacgataacctctaanctngacatgatgcttntcaggaggagagcatagtgaggacaggggagctcgtctcttgaccgattctcacgagggaagcattgtcactgaaacttgtttccgaacagatctccatgaagctaggtagcctatcactatacacatgcgtcccacttgttgcaacagtgcttactgagagacgtgctagacacacactcacattgatagtctcgtcctatatttcttccttcactttcgtgctctcacgtacatctacctctctcatctatggcctctccatagaaacaagctctccaatctatttatacatgtcctactcagcgtgtgaagctgcttcttgcatggatgattccctactggatggcgtctactatacatactctgatatgtctgcgtcgcatctccatggtggcatagcaccattacatgacctcattgagctacatatctggcatcatataagatcacagccatctttcttaatg

SEQ ID NO: 46804 - DNA, 161 bp, Glycine max
ctcaactttgtttgttttcatgaagatgagggtccaaaagcaattttcatctgtggcaataaaactgggcaagaagggagataagaaaccctgtgtatgcattcattggcattccccaccccatgcttctaccatacaccatttttaccttccttttccaa

SEQ ID NO: 46805 - DNA, 318 bp, Glycine max
cctctttgcttatagaaagttataatggatttttactccattatatggattattttcccttgtatgttcactagttactttttaattccactaataatgtgtctcactttctagctgctaagcaaaactaaaactagtatagtagtatctaccaaataatatattgacatggcttggttctcctgcccatcatgttatatttaccagactgttcatgaaaggcgtatccaccacttgaaattgttttgtggcaaggattatccagacaatcctccatctcgtagatttcaaacaaagattaacatgacatgtgtcaat

SEQ ID NO: 46806 - DNA, 418 bp, Glycine max
  unsure (1)..(418): unsure at all n locations
agcttcttcttggttttcttatacgctcnttgaccacaggcccatggtcatcatcctctattaccttccctttgggtggcctttgcaatgcatttcgcccttttgtattcctttatcctctccctattcttcttatagggcttactataaatctctcatcatttaaaagaaaaggtcaacgattaaagttaaaaacatttgacaaatacttattaatatttctattaaaaaaagtaaatataattacaaatatgagaaaaaataccacatcaatatcacgtcataaaanatataaagtcaacaataatgtcacatccataatgacaagttatcatgatgtcaaatagaataaaagcaaaaaaaaaaatacctagcaaaaaaaactttggagattaaaaaatgacttataatgaataaa

SEQ ID NO: 46807 - DNA, 435 bp, Glycine max
  unsure (1)..(435): unsure at all n locations
ngaagaggatgctntaatggaggaaaagatagagagaaagggggagcacgaaattgaaggaataaaagagggaaagaagtggaactttgaagtgtatctcataagactntcattcatcaaagttacaacaagtgttacacatgcttctatttatagactaggtagcttccttgagaagctttcttaagaaaacttccttgagaagctttcttaagaaaacttccttgagaagctagagtttagctacacacacccatctaaaaactaagctcaccttcttgagaagcttccttgagaagctagagcttagctacacacccttataatagctaagctcacccccatgacaaataaacatgagaatacaaaaaaaagatcctactacaaagactgctcanaatgccctgatatacacggctaataccctatactact

SEQ ID NO: 46808 - DNA, 453 bp, Glycine max
  unsure (1)..(453): unsure at all n locations
agcttgtgcaaatcanatcactcctacatctcatctctagcatgcattntctttctntacccactcctcacgtttggttttttaggaaaaaacaccataactaaacgcgccgcaagggatccctatcgcaccagatccaaatctagaacgatgggtgatcaagaggagacgcatgaacagatganagccgacatgtctgctctgaaagaacaaatggcctccatgatggaggccatgttatgtatgaagcagctcatggagaagaacgcggccactgccgccgctgtcagttcggctgccgaagcagacccgactctcttggcaactacgcaccatcctccctcaaacatagtaggacggggaagggaacactgtggcacgatggcagccctcacctgtgatacaaccgagcggtctacccttatggattgccgtcaactattcacacccatc

SEQ ID NO: 46809 - DNA, 335 bp, Glycine max
tgcttctacaatctcctcctatttgatgatgacaacttctgaaatcttgagacacactcacacgcacacacgctgtatcctagtcgatcactcacataaattcccattctcccgctatggtcttgaatctatgcatatctaaacattcagttgattactcatgtgagttcttgatttaatctctattatctctaccgctatagcatcaacaaagagccaatgtgtgttacgcttttgaagcgagcatagtcaacttagcatacacactacattcatgaaagatgtaaacgcgattctgatgcaagaaccatgacgcgagaacaatgaatatatca

SEQ ID NO: 46810 - DNA, 418 bp, Glycine max
  unsure (1)..(418): unsure at all n locations
actatatgccttggttaacctggtaacccaactggccatgaatcaaaaatntgcacttgtcgccagactttgtgatttatgctcctctgccgaccaccacacagacctttgcccttctatgcaacaatctgaagcaattgaacagcctgaagcttatgttgcaaacatctacaatagaccttctcaacctcatcagctaaatcaaccacaacagatcaattatgacctctccagcaacaggtacaatctcgggaggaggaagtatcccaaccttagatggtcgagtcgttcacaacaccagcaacaacaacagccttattttcagaatgctggtggcccaagcagaccatacgtttctccaccaattcagcagcaacaacaacaacaactataacctcagccccataatcaactaaca

SEQ ID NO: 46811 - DNA, 405 bp, Glycine max
gagatgtgaagtagaaatgggttctgacttttaagcacttctctctctttcgaatttgcttacgataactgctttcgtgaagaaaatccatgccgaggcgctatcataatgtgcccgtatcgttttcctgagtgatgttgagaaggatttcgaccgttcttcgacgttcttcattcgttcttcatctttcttcaaccttcaacgggctagtacctcaaaccttgctcttcaattctttctatgtacccgtggtggtacacaatcggttacgtgtatttttattatcatttcatttactttttatacccccttttgacgtgcttatgccatgatatttatggcatgtgtcgcttaacctaataatcaaataaatgtccgccgatcgtttgaatctgattattcgtt

SEQ ID NO: 46812 - DNA, 467 bp, Glycine max
  unsure (1)..(467): unsure at all n locations
agctngatgaatcanacatcatagtatggaacaatgcttgattggttacaaaaggatacaatcaagaggaaggcattgactatgatgaaacctatgcccctgttgcaagatcagaagccattaggctactgcttgcttttgcatgtattgaggattttaagttataccaaatggatgtgaagagtgtttttctttatgaatacattgaagaatagatatatgtagactatccttcaagttttgtagactctgaacattctaatcatgtgtacaagctgaaaatggctctgtatggtttgaaaaaaacacctagatcttggtatgaaagattgagcatattcttaattaaacaatcttttgtaagaggtcaagtcgacaaaacattatntatcaagagattaaataatgagttgttgattgtgtaaatttatgttgatgatataatctttggtgctactaatgaaact

SEQ ID NO: 46813 - DNA, 381 bp, Glycine max
  unsure (1)..(381): unsure at all n locations
cttttganagacacatctcttcataccatttgaaaaggcacgaatggcctatatatatgtgtgtatgacttccaaaagcaagagagagatattccaagagaatttcattgtcaaacgctctctcgacaactcttgggcaaacacttgcaaatctattgagagttcattcaggaacttcaaattggattatccactctataggagcgaaatctttttgttcttctcacaaagtcaattgtaatcaagagactggttgtctcttgaattgtgagtttcctaaacacaagggaaagggattccttgngtgttcaacagttgtaacaaatatttttacatagatagtggaaaatctcaagtgggttgcttgaggactggacgtat

SEQ ID NO: 46814 - DNA, 65 bp, Glycine max
ctcgagcaaaaaaagagaagaaatgtccatcgcagagaagcagagtaaatgatagatagtgaaaa

SEQ ID NO: 46815 - DNA, 151 bp, Glycine max
  unsure (1)..(151): unsure at all n locations
taaactcgacactagacatcatntagagttactaaaaactttttatgtccctagtttatctagaaatgtatgttcattatctaaacttgatgttactggatactcttttaattttggttatggatgtttcagtctatttaagcataatcat

SEQ ID NO: 46816 - DNA, 255 bp, Glycine max
tagcaactgcctaccaagaatacctatagctaaccaatgaatctcttgctcaaacttggaacaatcttattttattctgtgctaattccttctggaattgtattagcatgaaaaatcacagaatccacctaagtcattactgtgagattgctgctgccctgctgcttcatgtagaggccctgctgcttcttgacaagctcatcttgattcctgtggtcttggtcttctttgatgaggcagttttccacctgtgct

SEQ ID NO: 46817 - DNA, 191 bp, Glycine max
ctaactgctttacatctccacattagatgacgacatcttctgaaatctttagacacacacacacgcacacacactgtttactaatcgatcactcgcatatattcccattctcacgctatgcgtttgaatctctgcatctcataatactcagttgaatgctcgatgtgagatattgaattactctctatttg

SEQ ID NO: 46818 - DNA, 441 bp, Glycine max
catgcaatcttgatgtgatataaaggggaatatttattttttctactttcgtctgatgaccatagagtggtacctatagatatgtcgcggtggtcaggagaccttggggatgtcatgcggggtgctattgcccaaaaccaagcttggcttatcccgacccaatctgtgcatattctggcagtgagaacccgttacgtacctaagcaggctatctcttggccgtcaatctatataagaactaagtccactaagcaaggaggcttgtgtggcagcctgccaactatttatcttgagcgtatactaaaaataccctctggtaacgaatacattctgggtaatatattcacggtctaaaatggaacatgatgtaagttcttctgggatcgattcatgttgtggaagctttttctattgtactctcactggcttctacatcattat

SEQ ID NO: 46819 - DNA, 243 bp, Glycine max
aaataaaagataaagccaaaaatcaatttttctgtactatagtgagtatattgaagaagtatgaaactaaaataaaagaaaacaacttagttgttttatatctctgacaaaaggagacgcttcagaagcctgcttttttaacttcttgtgggggctgttatgtgctacatcagtgtacacactttcgttggacggataattgaagagtgtgaattctgaagtctgtgaattcttctcttcccc

SEQ ID NO: 46820 - DNA, 504 bp, Glycine max
  unsure (1)..(504): unsure at all n locations
caagtgatctgtgtgcctccattacctctatctngtcctccacatcctctgggcggaatccatcgttaaccctggttaattacaccgtcaagcgacctctctgtatggacggcttgtacgatgattgaggactcattccttcctgctatggttcgcatctgacaacatcatcctcaggcacatacaccgttgagagatgattataacaatcctgatgggtggagaacgatatgacactgctacacccatgtggaattcatacgcaccacttatgagtttggtggaaccgtccctaccacacagatgccatgatttcgaacctactacaccaaccaagacgtgttagaaaggacacacatcttacgaatacagccgagagcccacttgtttggtgtcctatgctcgcatgcacgtatttcataaactcttcacttcaccctgcctagtggtgagagaggcatgataaacatcaatgttgcctttaacatcttagcgtgaccaatt

SEQ ID NO: 46821 - DNA, 336 bp, Glycine max
tagcttggaacaagaaaatagacacctttctcttgcaaattggattcatgagatgcactattgaatattgtgtgtatgttaaaggagaaagtctttcagatatcctcattatgtgtttatatatggatgaattactgataacacgaaaggattgcttagtcttctttacttcataccagagatgaactctgagtcgaaatgtcagatcttggagaattatcatcatttctgggcataaagttcaagatggcaaaggctggaatttttatgcacccaagcatatacacaatcgatgcctaaagagggtcatatgctggactacaactcattttcact

SEQ ID NO: 46822 - DNA, 449 bp, Glycine max
  unsure (1)..(449): unsure at all n locations
tgctcctccacaattccatggcatggagaagcaaatcatcatgaaggagaagatgaacaagcagcctagctctccaggtggaaggcttgcaagcttcttgaactctctcttcagccaatcagcatcaaagaagaagaagtcaaagtcaggctcacaatccatgaaagatgaagatgagagccctggtggaaggagaaggagatgaagctgcattagccatttcagaagctcaagcaccgcagattcaaagtccttgtactcctccttgagttcagagtttcgaactcctccttatgtacaaacaccaacaaagagctgcaaggaattcagaaccttctcatcagaataaaagcatgcactgtccttntcagcgtagtacaacgacaacaatggacaacaaataagatcatcaacaacaaccactttgcataatgagttgttgtgggatg

SEQ ID NO: 46823 - DNA, 480 bp, Glycine max
  unsure (1)..(480): unsure at all n locations
agcttgccttattaacctganattgagaganaatgattattaaacacacaaaatggaagtactaagtatttattacctatacttaacataaaatacttataacactacaaaataaccataaattggggaagtttgatacaatttacataggttttatacacaaaagttagtcgtattcatcgactaaaacccaacccttgcatctgaggctgatttggtccgctaagctggccaaggctgagctaagccaacttcaattcgatctgaattcagctaagctacagcctgatcgctaagcccatcatacactttggctaagcgcgagtcgtttccgtcaagctcagttctttgcggccagaactggggttcatgaagctaagcgctagtcatcgaggctaaacttgatcccttacggtaatgtgagcactaatcgagtcctatcatctaagcgcatgcttctctatacataagatgcatcat

SEQ ID NO: 46824 - DNA, 519 bp, Glycine max
  unsure (1)..(519): unsure at all n locations
tgtatgatgattctatccacttccgttccgtacnacttctactactccgcctactaggactaaccgctgagaacttcgtcttaacactgtttacgggccattctaagcctgacgcgtagacggttcatctacttggggcgatgcaactaggagcaggagagggtacttctcttgcggatactttctatcgtacggtagcctacactacgatgttcccagcgatctacggacggtgcctacctcgaggatcttccctagccaacgattatacaacgatgaaagcacaccttatagactacacgtcgcttgtcgactagacttccagctcacgtacgctgcctttccctcataccactaacgccgtcgcctacttctttcctacactctataatcccgttgagccatccattatcactgttacttctgacagctccctacttcctgtctttcatgctgccattccctcccacggtgatcnactccacgttctagggttcactcaacgcactgtgctacttt

SEQ ID NO: 46825 - DNA, 435 bp, Glycine max
  unsure (1)..(435): unsure at all n locations
agctttactatgcaaagaataaccaatgaaaatttctttatcttatttatcatcaaactttcctaagttttcttttccattgtttaatacaaaacatttgcaaccaaaaacatgaagatgtgagaggtttggtttcctaccattgaacagttcatatggagttttctttaaaatgggtcttattaaagccatattcatgatataccatgcattattaatggctttagcccaaaaatattgtggaagaggagtatcatttaataaagttctagcaatttcttccaaagacctatttttcctttcaacaactccattttgttgaggagttctatgtgtataaaacattatgttnatgccatgcttatcacanaataaatcaaattctttantttcaagctctcccccatgatcactcctaatatatatatatttaat

SEQ ID NO: 46826 - DNA, 410 bp, Glycine max
agaagaagaagaagttcaagagattccagcttgttatggatgtatgaatcagtgttcaagattattgaaatgcaaaacatagccttgcttttatagactcttcatgtctggtcaagacaaccattagaagagttatgacttttagaacaacttaaaaaccaatttgaaaaagtcctataactatttgaagagttacatcttttgatcttattcacaaacaatcactggtaatcgattacacaaagctcttatgtgaaaagatgtgactcttcacttttgaatttgaatttcaacgttcaaaggcactggtaatcgattaccaaaacatcgtaatcgattacagctcttagaaattaaataggaacgttgtatattcaattttgaaacttgttcaaaacaatgttgctact

SEQ ID NO: 46827 - DNA, 349 bp, Glycine max
  unsure (1)..(349): unsure at all n locations
agcttgacccgcatgttcttctttcacatggcactcgttttttctgtcgnaattaccattgaaacgagacccaatagctgcgatgtgatcctgctatgctctatcgattgtatgcttgacgtgctctttcatatgagcatatgtaaaagtcgaagtctgagctactaattatatcagaatagtggcaagtgagatcatacagctattggtctttcataaccgctaacactgatgttctactcctgttccgctgtgcatgttattaaatgtggcatagagtatttatagctggttctttctaatatacaatatatgaagtgagacatcatactgttatgagaagtctgga

SEQ ID NO: 46828 - DNA, 443 bp, Glycine max
  unsure (1)..(443): unsure at all n locations
ttacggacctttaatctcagcttcacattcaattcaagcgtctcgatataatacgggactcaatcagacatcggagtaaaaagttattgtcgtttgaattgcctcagaggttcaacattcaatttcgagcgtctcgatatatttcgggactcaatcagacatccgagtaaaaagttattgtcgtttcaattggctcagaggttcaacattcaattatgaccgtcccgatatattacgtcactgaattcgacatccaagtaaaaagttattgtcgttggaattgctcaaagcttaaacattcaatttcgagcgtctggatatattacgggactcaatcaaacatacgagaaacatgttattgtcgnttgaagttgctctcaactacaacattcaatttcgagcgttccgatatattacgagagtcaatcatacatccgagtaaa

SEQ ID NO: 46829 - DNA, 393 bp, Glycine max
agctttagtgaccttaattttgaaacaatattttacattcccataatttattccctaatatttccttttccttgatacttcatggaaatcaagttctgaaggagagtacttgtttccacattatcgcttcttgcatagcgcttttcaatttcaacaaggaattctttggcactagttatatcatctaaaacacgtggccctaaagaccttacgaataacacaccttatgatcataagacaatcatcaatcctaatcgcatgctgctttctattcatgtagataaaaattattgtacaaagatgaatagaacctctttgtgttcccttactcaaaatcatgataaaacaactaaatgtggaagcgtacctggattattcataatggaatgatga

SEQ ID NO: 46830 - DNA, 478 bp, Glycine max
cggtctaccaagactaacacggctgagaagattcgacataacacttagtgtgacgcagatctagcggcccaactctacgggtgacatgcttgctggcttgttgaactctctatgaaagggttcatcttcttgggatcagaactctaggaggggcccttcattcgggagatatgaaaaagcaaggcatggtgcaatgctagtgaatcgatgcttgttacggcatttactaagctgaagcgccgtcttaacgacttcctggtactcgtccacagtatgtaggctcagattgctgcctatgcactatcaccctctagaacgtgccaggatttcacatacgttccataatatccgtagcacgctctcgtcttctctcaactgtcgcaaagctatggacaatcatgacatctctagcactccttttgccaatagtggttgagcgtacataacaaagggcaccacactctaccacacccttttg

SEQ ID NO: 46831 - DNA, 419 bp, Glycine max
  unsure (1)..(419): unsure at all n locations
actaagatacttccttctttttcatttatgttctggcattaaccaaagattaagcttcgtatcttgccgtctttattgtggtttttttaatttatttaattttgctctatatcagttctttattgtggtcttaatctttttattaagttttttattggggtatttctttttgttgagtacttatttngttgagttctttatggtggcctgttgtttttgttgtggtctttgtcttattgattcatccatattcttaaaaaacgctatcatgaagtaatactatgattttttcttttctttgtggattaattgaatgaacattacatgagtatcaaatgatggatataatcttacgtggcaaccttcttgagatctaatggactattgtattggcctacttcataccttaactttattaa

SEQ ID NO: 46832 - DNA, 357 bp, Glycine max
agaccataccttcgagtcgaatgttcattacattgctaccaatcgaatattgtccaaaactgtaatattacatctgtcaatccattcaatcgggcactgaatagcattgcgtgctttatggagctattgttacattcgatattcactgttgtatctattgcttatctagcctatgctttggggtcagctgtagaaatacaatatgacttggcatcattatttacatttacaacactttctctagttttgaacgtaaaacaccgatctcacatatcttgtttttaattattgaactccgtaccttaatctcttgtactcgagaccttcacctatgcatgctcatcatcagaaccaact

SEQ ID NO: 46833 - DNA, 370 bp, Glycine max
ctatcaagatatatggtctggtgtgattacaagtttttgcagggtcatggcaaagacgcacatgtggcaataataatgcccccatagttctgtaacagctcatgtcataactcatattgcaaatgagctccaagtttctctgctgacaatctcaactttggaccctaccctttctttacttcaattcctattcttcattagaacttgtcacagtgatctttatcaaatgactgcaatatcagaccttgttaactaccatgattggaaagatgttattgctgtctaccttgatgatgataatgggatatatggaatacgcgcattatgcgattagcttgctgagaggcgttgacgatatcatataatcacc

SEQ ID NO: 46834 - DNA, 322 bp, Glycine max
  unsure (1)..(322): unsure at all n locations
gctccaatctcgtgccctagtacgttggatgctccatcaaacaacatgatccaatttccttcttttggtgtttcttcctcctgaagcaccaccataatgtcttcgtcggggaattcacactgcattgactatcattcacgggttgatgcgccaatatatcttgcagagaaccacctttaactgctctttgagtcacatacacaatctcatactctaataagagaactttccatctagcaattctccctgtagagcaggcttntaaaaatatacttgattgggtcatttagacccaaccaagtctatggcttacatgttttct

SEQ ID NO: 46835 - DNA, 366 bp, Glycine max
tgggataattaaagttgattaacggtgatctagattccatagaattggaaaaagggtaattaagtcataagagtttaaagtggagggcattttcataaatgactatataactagtttaaaaatagaattttagtttaactagttggtgactaattaaagtgtctaattatatgatgtagagtaattcaaataagttatagttgtaacaccctcaaaaattacaattcaaactaacaaacgagactctatgttgtgttatctgttcatctatgaacttaatttcagtagttatattgttttaatcatagaatgtcgtactatctatatgtgtgtgatccattaggtaagcttgaaaaaaataaaact

SEQ ID NO: 46836 - DNA, 253 bp, Glycine max
  unsure (1)..(253): unsure at all n locations
ttactaactccaatgaatctgcctttgttgttgtcgccatatgtaacgtggtccactttcttgggggaaatgattgtaaactttgatgcatctcccgtcatatgcttggaacattcactatcgatggccactttttgatggaactctgttgtgtggcttctatggaggctggatcttagagcttcaatgaggtctcttaatggtgattctccaccatggagatgcagcggaagacaaatgaanagaggtgaga

SEQ ID NO: 46837 - DNA, 483 bp, Glycine max
  unsure (1)..(483): unsure at all n locations
acaatgtgatcgtgtataccntacctttccncnnnacccntcctnattctaaatagtttgaacaatacaatcttatctctatacttgcgtgtcacacatttagaatcttatgaactgagaggatgcctcaactgttggaatgggctgattgatgcccgacggcatacatcgtctattctaagaaaataaaaggtttcccctttagaatttaataatgaaacgattgtatgccttacaccggctttaaaaagctgtggcattactttattccaagattttcattcttatgaccataaatcctcaatatatcatgggcaggcaacttaacacatgcctcgactgggtggacttcttagcacttccttatttatctaacaaataacgaaaaagggttttgtgaccatgctttattagcgtctgcattaattctttacttgaacaatattattggcatcatgtttgaaagctcgttaaaaatctacg

SEQ ID NO: 46838 - DNA, 284 bp, Glycine max
gaggatgccgttgctatgaagctatcacctgtcctgaactattagttaatcaatgcacacatgtcatagtacatcacattacaatgggggctaaatgatcataaagcaaccgtcgtgaaataaagttgaattggacccatctcgaacttatgaatgaattggatgtgtacgtacagattcaatggtgaagacttcttaagacgactcacacggaagaatatcttgattgtggaggactccttgagtttgaacgcaatggcaatcactcactcgcatgcttcaca

SEQ ID NO: 46839 - DNA, 386 bp, Glycine max
  unsure (1)..(386): unsure at all n locations
atttggagaaacttatcttaaatgattcctgaagggtttggtaacaactttaaggatgataaagcaatccacagtttattctgtcctctaatatatattcatggagtaaaatggcagcttattcaaagctatctttttccccttcactaggtatggaaaattttttctctttgaatctcacacgtattctattcatggtagcttcagtgagttttaatttctgaattgttgcaaggctggacaactttcttactgttttgagtctttatctctctgtttttcagtggtccataaatcgttgatttatttactaccactttgcattacatgtatacacttgcaggaaacatctattctattgngcataagatattattgctcttgaa

SEQ ID NO: 46840 - DNA, 416 bp, Glycine max
cttctatggaggctggatctttgagcttcaatggggtcctttaatggtgattttccaccatggagatgcagcagaagacaaaggaaaggaggtagaggaggcgccatccattaaggaagaagccatggaagaaggagcttcaccaccaagatgagccttggataagaagcttggagaggatgcttcaatggaggaaaagaaagagggagagatagagggaggggggagcacgaatatgaatgaagacaaagggagagaagttgaactttgagttgtgtctcacaagactctcattcatcaaagttacaacaagtgttacacatgcttctatttatagactaggtagcttccttgagaagctttcttgagaaaacttccttgagaagcttctctgagaaaacttccttgagaagcta

SEQ ID NO: 46841 - DNA, 448 bp, Glycine max
  unsure (1)..(448): unsure at all n locations
agctgcatactgaatttgtagggaaggggtgtgttatgctatgtttgattgtgcattcttgtatatattaactcttcaccacaatttacaagtttccattcaactgtaccccattccaccatattcttgtggctatgattgtggattagatgatagtattctgagaaattaccgtacttttgaaataatacaccttaacaaaacaagaaaatgaaagaataaagcattttgtgccaaaagaaaatacagattttgcatgggccacacaatttatttacgtgattttttacaagaatgacatatggagctgctgtttcagcatatggcctattctatctatgcttatggntntgcacttcagtcaatacaataatgaaccaaaatacacagaaggccaaatggatttttcttaactagcagaaatcctaaatatggttgcacatagcat

SEQ ID NO: 46842 - DNA, 458 bp, Glycine max
  unsure (1)..(458): unsure at all n locations
agcttcttagtctcggctaatggagatgaattcttggctacttcatgcactcctctaatgacaataacatcacttctagtactaaattggtgggagttggaagccatttctgatggaagcttgcttgtggggcttctatggaggctggatctttgagcttcaatggggtcctttaatggtgattttccaccatggagatgcagtggaagacaaaggagaagaggtgagaggaggcgccatccactatggaataagccatggaagaaggagcttcaccaccaagatgagccttggataagaagcttggagaggatgcttcaatggaggaaaagacagagggagagaaagagagaggggggagcacgaaatcgaaggaagaaaaagggagagaagttgaactttgagttgtgtctcacaagactcttcatcatcanagttacaacaagtggtacacatgc

SEQ ID NO: 46843 - DNA, 472 bp, Glycine max
  unsure (1)..(472): unsure at all n locations
tgcgaagacaaacattcggaaagttagtttacaagataacgcttattttagagcacaaacgacatgctaatctttccgatttagaacaaactggtgcacacatttccttaacgtaaaacatttatgaacatgcgtatgtgtaaactatcctactatttacctcaacatacaaggatattcaaaatattctagttactacacatatatatactgttttgaaaagaatacatatgcacacgctcaaaatattgtgtcaagaatacacatgttcatatcctaagcatttcgttaccacaaactacacatttgaagtattttatttaacatacaaatctttgctgttttattcacattatttatacacatatgcacatcggagagccaatctcacgtcacgcacacacttgcatttgaatagagactttcatgtcatctatttacactngaagggcaatcccacatcatatatcca

SEQ ID NO: 46844 - DNA, 434 bp, Glycine max
agctagcttgtggagcttctatggaggctggatctttgagcttcaatggggtcctttaatggtgattttccaccatggagatgcagcggaagacaaaggaaaagagggagaggaggtgccatccattaaagaataagccatggaagaaggagcttcaccaccaagatgagccttggataagaagcttggagaggatgcttcaatggaggaaaagacagagggagagaaagagagaggggggcacgaaattgaaggaagaaaaagggagagaagttgaactttgagttgtgtctcacaagactttcattcatcaaagttacaacaagtgttacacatgtttctatttatagactaggtagcttccttgagaagctttcttgagaaaacttccttgagaagcttctttgagaatacttccttgagaagcttctttg

SEQ ID NO: 46845 - DNA, 453 bp, Glycine max
  unsure (1)..(453): unsure at all n locations
gaacttttctttacatgtgctatgtggctcattctcctttgcaagcaagtaaaattttttggaagttcttctaatgtagaaccatttctcatcaatgaacacaatattttccatagacttaaactntggatcataaggcatgatcctatcatcgagcattgacaagaaaaactttaagcaagcaatcatgttctcaggctttaaatatggcttaagtgcatttgaatggcatngtataactcctgctnttngcaatctaaacaatgatgtcgtgttaatattcaaagcacaagataaagaccgaagggtagtactatggaacttcacatagtctctcaccgtttagttgaactctttttctttcatagttctttgttttgttatgagaagcatcacccacaaccttcaattgattccaaatactaccaatgacacttatattcacatcgtaca

SEQ ID NO: 46846 - DNA, 215 bp, Glycine max
  unsure (1)..(215): unsure at all n locations
aacacagatagctaacctcctcaacttagagttnatcaacaaacatgctccaacatttgtcaagttgcataacttttctaatgaccttagcttttccatagaccaaaaccctcttagcaaaatcaaactcaacaagttggcaaatatattatttttccttgttacaacatccttgaccaaacttttcatacacatgggcaacccttctttcacct

SEQ ID NO: 46847 - DNA, 493 bp, Glycine max
  unsure (1)..(493): unsure at all n locations
atgcgcatgtttccttacgaacgttcacttgcggaagacattctattaaccgaaaaaatgcacccatatacaatcaangnanntaagttacctagattatgtacacgtacttccaaggtgtatttgttacttacatcacacacatctccttggctaaattcacatacatgagnannnnaagcattttggggtaccaaaaattgcacatgtgtacatcttggtatttctaatacctatacatacacaaacttcatgatgaatcttgactatctacacaataaggtgctacatttcatgccctttttttaagtttttgctacctaaagccgcatgcaaatttaagcatattttccttggctgactaaaattgtattcaaattatatatatatattttggaatatgttgttttcatacaacattcaacataattatatatatatcttttgtgagacatgttgactaccaacaattatatatacatacattcaagta

SEQ ID NO: 46848 - DNA, 529 bp, Glycine max
  unsure (1)..(529): unsure at all n locations
ttttgcgacatatttttctataatggaaagagatatgaaaagaagnnnnaaaatgagttgacccttgatccntttccacaccacgagcaccgaagnnnatctgatataatgaagttttaaagtttaaattccacacagaagatgcgactcgagtccatgacgtcgaaacacgaatttgacataacaaacgaccgcacgaaaagtcgataccttcattcaggatgaacatagttcctttgtgaatcttccagacgagctggactacataccaaggctcaagtttcatgctaccttatgcggggacaacctacaatataagaactaagcaagtcttttcgttggcccttcataattataccatgtcatatatattgacagttaagaaatcaccaacgcaggaggaaaaaataataaccaggtgaaggaggggtactgagtataaacacccagcgggggttgtgacggaatcaacattactcatgtacttttgacttcacagccttggtggctattcggaacattttgaacg

SEQ ID NO: 46849 - DNA, 371 bp, Glycine max
tgcttaacttctctcttaacttgtaataattgaaaattcccccaataccacaacccttttctccaaagggctattttaagttattaacatttgaaattctcataatatctcttacgtgtgtttggataacgtaatttaattacgtaatgcattctttaccgcgaatgtaaattcttcctattaaaattaactgtttggatattctactaaaacgaatttaaaatttaaggattctaagaaagaatttatttagctaaaaaaatagaatttcaaattccatctcaagagaaagaatttagaagatttcactctttactaatgggaagcttcatgctctctacgcgagtactcactcacttgctttcgcacac

SEQ ID NO: 46850 - DNA, 308 bp, Glycine max
  unsure (1)..(308): unsure at all n locations
ctgcggcatgcaagctngtaagtatttgttggtataatttgcctgttccattangctcttaatgtctttagaggttactgtctcanaaccccaggttttcataaacaaagaaccgaagcggcggcagagccgcacaggatcggtgaagggagaagagagaaagatgacaaatacaattttattgaatttagaaaggagcgcttacaaaaatcttgtttcagagcacctctcttcagaaacctganaaatggctaaatgaaagggtgcctcacaacatgcttgaggactccttatatagccaaaaatct

SEQ ID NO: 46851 - DNA, 460 bp, Glycine max
tcttagtttcagatgatgcatatgggtgtggagctacctcatgcactcctctaatgactatggcatcatttctggcgctaaactgttgagagttggaggccatcttctcaattaaatctctggcttcagcaagagtcatgtctccaagggctccaccactggcagcatctatcatacttctctccatattactgagtccttcataaaaatattggagaagaagctgttctgaaatctgatggtgagggcaactggcacataatttcttaaatcgctcccagtactcatacaggctctctccattgagctgtctaatacctgagatatctatcctgatggttgaggtcctggaagcagggaaacagctttctaagaatactctcttaaggtcatcccagctcgtgatggaccttggagccaggtaatacaaccagtcctttgccactccctctaatgaatg

SEQ ID NO: 46852 - DNA, 466 bp, Glycine max
  unsure (1)..(466): unsure at all n locations
agcttgtagaatggctagacatgatacatgtcatggcttgngttggttcaaggataaaagggatgccccacattatttccatgacacaaatgcaaaaatgatgattcggaaattttatgcaaaactggtcatgcatgcgcctatgcggacgctcaagtgtcaaatttttatggtcatgtgatgctagggctcatgattcatttcctctatattaaatcaacccaatatntccaaaatatgttcttttatcagattgtgcattcctccaagtccatttcgggcgtccggagaaattttcacagcattcacccttcaggtgtagacacgtttttttcttcaaaaatcggntatgatcaatgaattttttttcaaagaaaagctggaaatcatctcttttcacaagcacgtctgtttttagctagacaacttatntcctctttttccaccattttccttacttgctttc

SEQ ID NO: 46853 - DNA, 453 bp, Glycine max
  unsure (1)..(453): unsure at all n locations
ggaagaggatgctntaatggaggaaaagaaagagagaaggtgggagcacganattgaaggaataaaagagggaaagaagtggaactttgaagtgtatctcataaaactttcattcatcaaagttacaacaagtgttacacatgcttctatttatagactaggtagcttccttgagaagctttcttgagaaaacttccttgagaagcttctttgagaaaatttccgtgagaagctagagcttagctacacacacccctctcataactaagctcacctccttgagaagcttccttaagaagattcctaaagaagctagagcttagctacacatacctctctaatagctaagctcacctccttgagatgagaagctagaacttagctacacacccnctataatagctaagctcacccncatgacaaanaacatgaaaataccaaaaaaagtcctta

SEQ ID NO: 46854 - DNA, 458 bp, Glycine max
  unsure (1)..(458): unsure at all n locations
agcttcttcttccatgacttattccctagtgaatggcacctcctctcacctattctcttttatcttctgctacaactccatggctgaaaatcaccattaaggacctcattgaagctcaaagatctagcctccatagtagcttctcaagcaagcttccatcaggtgtttgggtttaggtctcacttcctatttgtggttgaaagatgcaagttcaaattggttaataatttggagagatggagaaaggttggacaatggcttatgtattgcggatagatgatgattgggcagcgggtgtaggttggacgataagaattgatcttacctcttggatgataggtttgtccgcaaacataatttcttcatacactntcttgttagtccttgttctcttcatccttggaaacctcataagttgaactattggagcctcactaatattagctttagtggtatct

SEQ ID NO: 46855 - DNA, 424 bp, Glycine max
  unsure (1)..(424): unsure at all n locations
aaagtgatgatgtacaagccctaaggcagagctttgaagagcccgggtagtcgaagagaagttcaagtccatagccatcatagtctgaaaagagtatgatgaactaaaggacgtcaatatggccaccgctgaagccttggaacgagaaaccaagaaggcccgtaaggaagtacacgaccaaagcaaagttntgaggggctttatatggcagcaatagtgagctcaaactccgaagaggtgaaaggaatcatcacgggtcaaaggcatgatcttgaaggacgagctaaaggcttgccttatgtcgaaaagaaatttgtcccaacagttaagcgagactgaagggaatatgtgggccatcatcaatgagtgcanagagaagctaaatctatcggcgactcacgagcaaaggctagaggatgagtac

SEQ ID NO: 46856 - DNA, 453 bp, Glycine max
  unsure (1)..(453): unsure at all n locations
catgcaagcttgtattcatttgttgtatcttattgagcatcaaagagttgttcatcaacatcagacattggcctaagacaaataagagtagctctaggatctgtctaatgatatcctcgtttgcttccacaagagatgcttcaatgattgactgaagcatggcttcttcaaaagcttgcctttcagcaaggtccatgtctttaagagtagtggcaacttctatttttgcttgtctttaagcaagatctacagaaaagatttgtgttgcaagttttgcttcaaatagagctcactctagttcttccatctaagcattcttcatctcttggttaaattatgcatgtattgattcaacaatgacaaatcttggcactaccttcaatatataagacatcgtctgtggaagctaanaaaggaatatcaattttacctattccattaatctttccctta

SEQ ID NO: 46857 - DNA, 426 bp, Glycine max
  unsure (1)..(426): unsure at all n locations
tgtatatngtcttattctatacaagaccactttcatattcttcctttgcattggcataatgttcaattactgtcaaggcttttggagcatctataacttgttcaactatattttgtgcaacatttcggttgataagctgcatcaaatctctctttttcctctgtattctttcagcacgaaagtattttttggttttcaattgcttggcaactttagtttgtatctctcctttgacaatcttcttccgtatcgcatccagagaagcccccttctcaagctcttctaacaattctnttcttgcttcctcaaattccatctaattcaattaagcagtgagtgccacaaagtattgttagagaaaatgaaatatgatcgacaatctaagtaattaatatttaatactcagcagaagaaagaagaaatcat

SEQ ID NO: 46858 - DNA, 178 bp, Glycine max
atttttcatgtaaaacacttggtatgtgactactattattatgatcatctccttctctgtcacggaggcgccacttgagctgtcatgtctcttcacctttgagtgtaatctttgaaagattcgcgcccctttataccctcgttctggagtcgcaacctatcccggagccatgtcagaa

SEQ ID NO: 46859 - DNA, 441 bp, Glycine max
  unsure (1)..(441): unsure at all n locations
tatgcgcatatttncttacgaacgttcacttgctctagacattctattaactaagaaaaatgcacccatatacaatcaaggcagcttcgttacctagattatntacatgtacttccaaggtgtatntgttacttacatcacacacatctccttggctaaatttacatacatgcatactcaaagcattntggggtaccaaaaattgcacatgtgcacatcttggtatttccaatacctatacatacacaaacttcatgatgaatcttgactatctacacaataaggtgctacatttcatgctcttttcaagtgtttgctacctaaagtcgcatgcaaattcaagtatantttcctttgctgactaanattgtattcacattaaaaggtatactttctttttgtaatgtattctctttacataacatgcaacatatttatata

SEQ ID NO: 46860 - DNA, 432 bp, Glycine max
  unsure (1)..(432): unsure at all n locations
agcttacataaccctaatcttaaactaattctatctaaacataagaaacctataaatctacagctatagntaaagactcttacccctagctcagacaagaaaaagagaaataggatcacggaacttacttggacggtgtatgattgatgcttcatagtcgaaaaatgcacaaagagagtactaatgcaaaatgtgttaatctttagtgagagagaatgcagaggcgaggtttctgtattctggaaaatgtgagtgtaactgctgttacactcacttaagttgattcgaaactttcgcttagcggactggtgtgctaagcgagcaagagagacgctcggtttctcaattacgctcgcttagcgaacatgcgcttagcttgacgttcaaattcaaatctatattgtttttgacaagaactccgcttagcgtgag

SEQ ID NO: 46861 - DNA, 527 bp, Glycine max
  unsure (1)..(527): unsure at all n locations
tgaggtttgagacgattgaannncggcaattgaaccccttgatacctcggagtaccggacacatagactcgnacacttgtcatacttccgtgtcaaagagcagctctgttgatgctcaatgcatcctcataaagattgtgaagcagccatgtactcaatcaagcttactctggtttacctataggcacaacctgcttatgaaatatagccagagttaacttacaaattcgcaaaaagaactccacttgcgtttatagctgaaaccgctcacataaacaacagttttatgttctcaaaaatcactctagatgtttagtatattgaggaaatcccttatatgctaaaaaggggggtgtgagcgtccttatctaaaaaatcacatatcaggtgaggctagccttcacgtatatactcattctatgtctgcctaacactatccgtatgagacatatgatggctctcaatcgagtcaaaggaatgaaaatgtcaaaatgtaagacgctcctatgtcgagatcacgtactacc

SEQ ID NO: 46862 - DNA, 417 bp, Glycine max
  unsure (1)..(417): unsure at all n locations
gaagtatagcaatataggagatctgttttggttgattgataaggactcaaattntaatcatgggttaaggagttgtacaattgatggagatatattacattagagggatgcttttgaaaatgagaatgagataaatttttattttcatcatgaagtagatccaattatagaagaagtcccacagatgttgtacttggaatgtcatccaattccagaccctgttgctggtgagtagagggatgttgatgttggtgagcaaagagatgctgatgctggtgagtagagggatgctgatgctggtgagcagagggatgttgacgctggtgagcagatagatggtggtggtgaagagagagatgttggtggtggtgcaagcctattatcaccatgcttgaagaaattagaagttacatcatg

SEQ ID NO: 46863 - DNA, 431 bp, Glycine max
gacctgaatcaagagtgttacgcacatcgtacacccacatatagttcaagtttatacaaatatttcaagaaggttataatccctgatgatacagtattctcgagtttcactcgaacacattctgagtgagggagggaggcgggttttgcttcattattgacaatgaaatgcatagagagacatcattgatcaccccttaccacttacccttcactctatccacacaccactgacactgtactactgtcatcacactgcatcttacactactctaacaaccctctttaggaggccatgaagatttctctcctagctgattacgagcagaaatatcatatatatgcattctcacaagatattctcgcccttgcaagtttccacagaaacgctaatgccatgtacagtgcactgttatcgcccataatatatta

SEQ ID NO: 46864 - DNA, 457 bp, Glycine max
  unsure (1)..(457): unsure at all n locations
agcttgtaatcaattacacacatactgtaatcgattaccagagatagttttcagaaaatattctcaacagtcacatctntttacttgattcttgaatggctgtcaaaacctatatatgtgtgacttgggacacgaatttgctaagagattttcagaacaaaaaggtcttatcctcttaaaaagaagaatcgttttatcctcttacaaattccttggctaaaacacttgtgattcaataaggaattatttgagtgctcaaatcgttcaatctatctctgtcaagagagatttcttcttttcttcttcttcattctgaaaagggattaagagacctagggtctcttgttgtgaaagaattctaaacacaaaggaagggttgtccttgtgtgtttagaacttgtaaaaggaatgtacaagatagtggaactctcaagcgggttgcttgtggactggacgt

SEQ ID NO: 46865 - DNA, 448 bp, Glycine max
  unsure (1)..(448): unsure at all n locations
tgagaagctagagcttagctacactcacccctctcataactaagctcacctcctggagaagcttccttaagaagattcctaaagaagctagagcttagctacacatacctctctaatagctaagctcacctccttatgatgagaagctagagcttagctacacaccccctataataactaagctcacccctatggcaaaatacatgaaaatagaaaaaaaaaatccctactacaaagactactcaaaatacctcgaaatacaaggctaaaaccctatactactagaatggccaaaatacaaggcccaaacgaaggaaaaacctattctaatatttacaaagataagcaggctcatacttagtccatgggctcaaaatctaccctaaggctcatgagaaccctanggccttcccttggatctctggcccaatctacttggagtcttcta

SEQ ID NO: 46866 - DNA, 480 bp, Glycine max
  unsure (1)..(480): unsure at all n locations
agcttctaatatgttgaacagacagaaattcattattagtatttgaccaaagcataaaaaccttatgattcanatatagatcttaaacttctggcgaanaacataatgaaatgagtcaaaagtagtggaaatttctccttatataaaaaaaactaatcaaaattattaaaggcaacccaaacttaagaattgaaaaatcctaatcccaagtaggcaataaagtcctaatccaacatagggataagatatctcaagactcaaacttctagatcttcaataaaaaatcctaatatccaaattacgataatccaagtgattgagttgattacttcaagttcagactcagttgacattaaatataacacgaacaataaaaataaaatgctagaatttcaagagaattcttataaaatcaaaactggaaaaggaatgtttatatgttgaccggagatcatcattntntaacttaccaaatcaaca

SEQ ID NO: 46867 - DNA, 485 bp, Glycine max
  unsure (1)..(485): unsure at all n locations
tgactgcagtctaagacagggtagacagctaattcaattcaacacatcatattgagacagtgaaaactctctttcataggacactctttcaaagtaaagtttcagcccaatgtcagtagattcacccgaccactgcactggcttcaacaacaggcaagatataaacggtatataaacaaaactttaacaaatatgaaaattagtaaattactgtggtgctgtttactttcagaaaatgtattgcagttttatttttatttttaacttcaattacaaaaatgccaccttttttcactttgtttcctgttctcaaatatttctataggaaatagtgaaacaactttntattgttttcactgtttgtaacaaatactctggaaaacaagaaacaaagtgtaaagagttgaaaattgngtaattaatagtaaaaataaataaatgaaaacaacacattntcttgattttctcataccatacaacaccta

SEQ ID NO: 46868 - DNA, 317 bp, Glycine max
  unsure (1)..(317): unsure at all n locations
ctctctggaacttggacctttctctctctagaatctctagatatgcaaagctatgaattccancccaactcccttcacaaaatcagatttcaggtttaaataggtggctttgttcgtgcttgcgcgcttagcgagattataattcgcttaacgcacattagtgaattttcgcttagcgctcttttctcactcaacggatgggctgaagcggtgcgcttgatgagatgaagcgatgcgctcaacgaacctgtacagctcatctttctccagatccttccttgcgcttagccactaagggttgcgcttagtggacgctc

SEQ ID NO: 46869 - DNA, 469 bp, Glycine max
  unsure (1)..(469): unsure at all n locations
cgtaagctctattctataggttgtgtcagacccttctctggacatgaagggtcattcccagttagcaatctattttccctctactgaatcctttntggcatcacctcagactctccaaaagagatttccttctttgtatttccttgatttgagcttcgatttgaaacgccaagtcattcgtcacttgcatgctttggtcatgatcattgcgccttctcgcacttgttcgatgagatctaagtctatttgtagtgcttcattgttctcggcttcgataaagttttgaagtctaattcactactagtcgaatntatctgggaccatggtgtttatcccatataccattcgaaaaggggtctctggagtaacgaaatatggagtgcaccgatatggccataagacttcaaggagttcttcgaccatttngcctttgcttgtccaagacacttatntaattcttccacaatca

SEQ ID NO: 46870 - DNA, 244 bp, Glycine max
gcccttttgagccttgtttccctttccttgttttgaagctcactacaagccttaacgacaaaccatgatattaccatatccttaaggaagtttggagctttggaattgttctgggaataagcgtgcggggtttttgtttcataggacaacttgttttgttggctatgcctcatgatgtattttgggccatactcgatgtacattgtatttgggctaaatgttggacatgctgaatgaaatgttg

SEQ ID NO: 46871 - DNA, 404 bp, Glycine max
ccaatgaacatatatgtgtacaccaagttataattcgaagagaaaaagattgaaaacttacataatcaatagtgtccaatggaagaccctctaggtgccgcctaatcatatcattaccctcccgatggacaagttttatgttcaccaacccacgaactaggagccaagagtgcctctaaaacctatgaaacaacaatgattaaggaaatcttataggataacgaactcacaaacccactggaaatattaatagtagtgaagatatagtattgaaaaggttatctaaccattatcatctcctttcattaccttagatataaatttcttaaggttgcgttgtgccccgaaaaatgacggcgatggcggacacgacggtgacaatcgtcagtggtcgcgaggtaatg

SEQ ID NO: 46872 - DNA, 408 bp, Glycine max
  unsure (1)..(408): unsure at all n locations
agcttgcctaattaacctganattgagagataatgattattagacacacaaaatgaaaatactatgtatgtattgactatacataacagaaaattcttatacactacaaaataaccataagttgggagagttagatacaatttatacaagttttatacacaaaagttagtcgttttcaccgactaacaataggctgaactcagtggacaagcaagtcagaaagattcattctaacaaaaagttgttgttctccaatggtaatcaacttcagaagactcttaatgacttctttgagagattcctccactttgaggaatgggtttatgacaagaccataccttccttgattcctgaagtttctcctatctagcatgagcctncatcatcaccaagagaaccaactacaca

SEQ ID NO: 46873 - DNA, 468 bp, Glycine max
  unsure (1)..(468): unsure at all n locations
ngatgtgaganagcgtggaagagtctgtcttcctacttttgtttgttgaccacagagtggtacctggagatatgttgcggnggtcaggagaccttgngaacgtcaagtggggtgctattgcccaaaaccaagctttaccaatcccggcccaacccgggcatagtcagtcagtgagaacctgtgatgtacctaaacaggtgagctcctggcagtcaaccaataaaagaataaagtccatgaagcaaggaggcttgtgtggcggctggccagttatgtatcttgngtggtatctgaaatttagcctctggtaatcgattaccattcgtgggtaatcgattacagggcttaaaaatggagacaagaagttgaaatggcctctggtaatcgattaccaatggggtgtaatcgattacacatggtgatagggcactggtaatcaattactagttgggtgtaatcgattacaca

SEQ ID NO: 46874 - DNA, 465 bp, Glycine max
  unsure (1)..(465): unsure at all n locations
agcttctatggaggttggatctttgagcttcaatatagtccttcaatggtgaattttagccaaggagttgtagctgaagataaaggaaaatatgtgagagaggcatcatccactagagaataagccatgaaaggagaagcttcaccaccaatagagtgccttggataagtagcttagagaggaagctntaatggaagaagagaatgagagagagagaaagagaaagtggcgtggaaattgaaggagaataaggagagaagctgaactttgaagtgtgtctcacaagtttctcatttgtgacaagtgttacacatgtttctatatatagcctacgtcactaactaaatgaatattccaaagaatatgccaaaggcatcttagcatattccctttagatgccacaagcttagctacttacacctctccaatagctaagctcaccccatgccataatacatgataata

SEQ ID NO: 46875 - DNA, 463 bp, Glycine max
  unsure (1)..(463): unsure at all n locations
tccatcatataggaagccattgaaataggtctcttcattcctacaatggtagtgggaaatgcaactatagaaaaacctatagaacgatgggatgaatattgaaaaaagaagggttcaatacaatttaaaggccaaaaatataatcacttctgcattaggcttggatgaatagtttagattctcaaattgtaaaaatgcaaaagaaatgtgggatacattaaaaaagtttagaatgaatctatatgagaccatacaagatatgcaaaatagatttcctcgtatagttaatcatcttccatcattgggaaaaatatttcctaatgaagatctcattaacaatntgttgagatgtttaagcaggcaatggcaaccaaaagtaacagcaattgtagaatcaagagatctcacaatatgtctcttgccactctctntggaaaacttcaagaacatgaatnggaactta

SEQ ID NO: 46876 - DNA, 417 bp, Glycine max
  unsure (1)..(417): unsure at all n locations
tgcatgctagcttgggcctatttctgctaatgactatcgatcaatattagngcctctagagaagtcgtaccttagggtttgtattcaaactcctgaaacatgtgccctgctttacctttcacttaactaagtgttccttcttttttttttttttaatataatttaggctcttttggatgatctggctgataaagatgcaatagagaagtctgatgctgtaagtgaagcacttttggctgaaattgctcttgattccaagaaggctgttaaggggggaagtgagagcacatggcatgtcgagaaaaccaaagataagaagaagaatcatgatcacagaacagcaagagatttgaaggtgttcatcatgcttgaggaatctgttcatttatatgggccattgtctatgacaactgactt

SEQ ID NO: 46877 - DNA, 473 bp, Glycine max
  unsure (1)..(473): unsure at all n locations
ntctaaaactnggattggaannttgggtaacaaagttntcatgtatttgtcaattnttgtgccaggtctctgcaattccgatggaggaagaacaggtccagaatcaagacaccctgtgtcattcacaacaacaacccgtgttccctgctgaaactagcaaaatcaatgggtttccagcgatgccagtgtatcagtttggggttggttcttctggagtgatttcagtccaaggtactggaaacccaatggaagaactcactctgggacaaggaaacgtggaaaaacacaatgtgccaaacaaggcctctacagtgtctggtatcatcacccccggttcttctagttctgccattgacccaccaccgacactgtccctggggctatccttctcatctgaccaaagacagacatcatcaagacattcagctttacatgccatgcaatgtttcagcaatggagatagcatcattagt

SEQ ID NO: 46878 - DNA, 380 bp, Glycine max
  unsure (1)..(380): unsure at all n locations
agcttcacgaaagcaaatgttgatntgcttaaatgagaaatactctcgagaacggaagcttcacgcacactccagacatgttctcaaagatcccnaaggtccatcatgcacaagtgtcttgtgaagctgttgaccaaattttgggaagatccaacggttaacgaaagctgggaagcttcattaagaggctttctcaagaagcttcctcgtggcttctttgagaagttttctcaagaggcttcttagagaagctagatccttatctacccacacccctctattaactaaattaaccttcttgaaaataattacagataaaataacacaacanatattatcaaacctccaacataattattaatatatagatatatatatca

SEQ ID NO: 46879 - DNA, 426 bp, Glycine max
  unsure (1)..(426): unsure at all n locations
tgctctanattacattgtatgttgtattgatgggaggaggttacantgccattttgctttaagagtaatgtcccactaaaactaactttccaaatgtttgccttcgcangaatggcaccgaggaagcttgcctcaaagaggtccaggaaagacaaggcggccgaaggaactagttccgccccggagtacgacagtcaccgctttaggagcgttgtacaccagcagcgtttcgaagccatcaagggatggtcgtttctccgagagcgacgcgtccagctcagggaggacgagtatactgatttccaggaggaaatatggcgccggcggtgggcaccactggttacacccatggccaagtttgatccagaaatagtccttgagttntacgccaatgcttggccaacggaggaaggcgtgcgtgacatg

SEQ ID NO: 46880 - DNA, 86 bp, Glycine max
cgctttctgacagaaatactaactgttggaaatttctagtttggcatacgatattctactcttactacttatggttactttggatt

SEQ ID NO: 46881 - DNA, 420 bp, Glycine max
  unsure (1)..(420): unsure at all n locations
cgtatctagtcaaggtctgagagaccatacaagtttcctagcaatttctaattatgtgggccattaagtctatcatatgctgacaatagccgagaagcccatgaatttcttcgggggcagagtaggtgtccgccattgccttggccttggctaacaatcggggaagttcttgactcccgttcaaggtaagagcaaaccgatccatccacatggttgcctcttggtgtaaagagtcgatcacccttcctctagcctctntttccgcgtatacttgggcatactcgtccgcgaccctatgctcgtgggccgtggctagacctaactcttcttggtacttggcgatgatagctagcatgttggtctccgtctcgcataaacgctaagacaagctccttttggaccttgaacaggcaactaact

SEQ ID NO: 46882 - DNA, 399 bp, Glycine max
agcttgttatcctaatccattattaatgatcacatgcaatgcatacagatatgcaagttaatgaaaattagtttgtaatcaaacctgcacaaatgagggatgcaaataaatgtcctcttatatacaatgcaactgcttatttttaccaaaatatccatcaaacatacagctacacaacttaaggcacagtatccacctgtgcaaagacctctctaacctccacacaaaatcaacgtgtgactcattatgatacaatacaatttcagcaaacttgtgattttaaatccaaaccttaatcctaatcacaacaatcatatgcaggggatacaaatacacgcgagtttgtgactctgccgtcatctccttcattcctgcttatttcactaaacttcacaagta

SEQ ID NO: 46883 - DNA, 465 bp, Glycine max
  unsure (1)..(465): unsure at all n locations
tctntaggaatcttgttaaggaagcttctcaattatatnttctcaagaaagcttctcaaggaagctacctagtctatagatagaagcatgtgtaacacttgatgtaactttgatgaatgagagtcttgtgagacatacttcagagttccacttctctacctcttttattccttcaatttcgtgctcccccctctctctttctctccatcttatttttcctccattgaagcatcctctccaagcttattatactatgctcatcttgagggtgaagctccttcttgcatggcttattccctagtggatggcacctcctctcacctcttcttctttgtcttccgctgcatctccatggtggaaaaccaccattagaggacctcattgaagctcanagatccagcctccatagaagccccacaagcaagtttccatcatgttatataagaggtcacatggtgttgtcct

SEQ ID NO: 46884 - DNA, 351 bp, Glycine max
  unsure (1)..(351): unsure at all n locations
acctgcacgctgcagcttaacggatgggctttaattgnggtggtgtgacatagcctcagcacatcagtatactgccactatagtgcgtaatagacacgtctgcttataatccatgccaaaccttcggcaccaaactcaacagacatcagaaaaattgcattagcaaaattatcaattctgtgcaactaagatgcacactttgaatttagaccctaaatatagcttgaactaaaagaatctagtctacatatcaaatgcaatataatggatacaatattttgacctacacaacacttaataatatatcttgggcatctcttgcaacacgtacatctggaggtaacatctctt

SEQ ID NO: 46885 - DNA, 315 bp, Glycine max
acgggaggcctacggttgaacagtaagtatctatactgaccttcttatacatattgtcgggtatcgtctcgaaattccgaatgtgcatgaaccatgacctttgtcctctggtcatgatgcgggccacttagaatatcatatgctgaccatagccgatgaacccatgaatttcttcggaggcagagaacgtgttctgcattgccttggccttggctaacaatcggagaaggtcgtgactcccgttcaaggtaagagcagaccgatccatccacatggttgcctcttggtgtgaagagtcgatcacccttcctctag

SEQ ID NO: 46886 - DNA, 448 bp, Glycine max
  unsure (1)..(448): unsure at all n locations
cgcttaatgattaaggggttgtgaagcattcaataattaaggattggtgagccttattcttaatcagcgcaatataataactntgagaaaccacgacacactcaataactactagccaagagcttattgttcaatgcatatattctatgtcgtgaacagcttcattttcttttatcaaaccaaaatgtactttgtaaagatcccaaaggaactgatggaccatagcttatactttttgtatttggacagtatgatacaccattatgaaattgtaactctttattagcatcacgaattgcaatacacaacagcaggggtacataagtcgaattggtaatctgtgaataaatatcggcttagttcatggccatcacagtgtacgtagtgattaatcatgcatcataattgatacataattgaccattatgtcacattctcctttctcatt

SEQ ID NO: 46887 - DNA, 459 bp, Glycine max
tacacactctaagtacgcgaatttcaaccatggaccatatgtgtgtatatagatgagagatccctaattcaactctaacattaataaaaaattcacattgaacaatcaataacgagcatttgttgataaatatatgtctcaatctaccattccaccacctatatggaagcacattgtgtcattgtgtgtatgtattaaggtgaagctatataaagttatatgatatgacatcatttatattataacttaaaaaatttatactattttttaaatgaaaaataaattctcttaaaaaatgaaaactaaatataaattatcgtatgaaattttttctctatagatagtggatagttattacttatattatgaaacacatattcagaataacaaacaacttctacagatcaatgtttttcataccttaagcaagcataaataattgaacacactaaatgtata

SEQ ID NO: 46888 - DNA, 449 bp, Glycine max
  unsure (1)..(449): unsure at all n locations
cctgccgctgcaagcttagttnttttaacaagtcaaacccatgtctttagttgtgctagnttaactaaatgaacaagtttgagccacctttttttttatcacaagtcaagcctatattctaatgttaagcttgtcttgacttatttatacccatacccctcaatattatactataataactttatgtacactatgatgttgttgagtctaattaataatcaaactgctattggatattgctttttttgtcacatgttattgatgtgaaatatttatcaactttagtgataagttaatgactaatttctattaacagacttggctaaccacatttaacagggtctcttctcaactattttatttcatccacaaggagtggcaaattcaaatattttgttaatggggtgaaaaaatagttataatacttccatagatgaanaataatataa

SEQ ID NO: 46889 - DNA, 434 bp, Glycine max
  unsure (1)..(434): unsure at all n locations
acaatgatctgtatggtgatctacagattatcatataccacaaactcttgcaacgggtgtagattttttattcatggcaagctgagttaccaggttgaccaatgcatcaaggtttccttcaagctttttattttcagtagatgaagatgaatctgtggccgcctcatggactcctctaagaacaatagcatcatttcttgcactgaattgttgggagatggaagccatcttctcaatcaaattcctagcttcagtaggggtcatatcaccaagagctccaccactggcaacatgaatgatactcctctccatgtcgctaagtccctcatagaaatattgaagaaggagttgctcagatatctggtggtgaggacagcatgcacacaatttcttgaatctttcccagtactcatacaagttntctccactaagtt

SEQ ID NO: 46890 - DNA, 469 bp, Glycine max
  unsure (1)..(469): unsure at all n locations
gcttattagtgcacaactccttcaagtatttagcatatcttagaatttgctntattgcatccagcagaggtatgtttacctctactttcctaaatgcttncagatctccttctctgcctcttccatttttttgttggaaattgctcttggagggaatggaagagggatatgctgcttctctttatattcacctgcatagaaattggtaggtaacttactcttttaatttttgtcttcatctttttctggagtagagtgaggttgggcaggttcatttgcggatgaggaagatgctactgtgtgaggtccttgatgctgccttcctgacctcaatgtaatggcactcacatttttgggattttggacagattgagaaggtaatttatcataattcagggactgttgttgatttaactgtgtagccaactgtcccatctgattatgtaagctctaaatggaggctctggtc

SEQ ID NO: 46891 - DNA, 479 bp, Glycine max
  unsure (1)..(479): unsure at all n locations
atgaggaagtgttgaatggtgaaacttcctgcttttattgttgaccacagagtggtacctcttagatatgtcgcggaggttaggagaccttggagacgtcaggtggggtgctatttcccaaaaccaagcttgaccaatcccgacccaacccgggcatagtcggtcagtgagaacctgtgatgtacctaaacaggcgagctcctggcagtcaacagataaaaggaacatagaccacaaagcaaggagggcttgtggtggctggccagctgtgaatttgtgtgatatgtgggttgtagcctctggtaatcgattaccaagggttggtaatcgattacaaggcttaaaaatgaagacaggaggctaagatggtctctggttatcgattaccaacgggtgtaatcgattactatgctngaaaacgaggtcagaaagccatgagggcttctggtaatcgattaccaagggggtgtaatcgatta

SEQ ID NO: 46892 - DNA, 583 bp, Glycine max
  unsure (1)..(583): unsure at all n locations
cgatgacgctttgatagccttcgattancnacacttagaaacttaagctcgcacgctngccatctacttccaacttatcgtctagaatgtttgacttcttgtcacgaatctattctaactcaatggctacttgagagaatctgcgacgacatggaacatgtatatctttgagagacacgtcactgcgtatacagattacgcactacatgtgttgatggatccgcacacttaacacgactgtcgactcgttcatgtgacgcaattgtcgtagaactccggacatcgtgtagtcactcacagcctgcgtctatgncgcatcatcactgcatctatgggtatcatcgtatcatcangcatatggtacattgcaactgagaagaaccaatagctgcctacctgggaatccactactaccttctcggaacctagtacctgatagcatacctcttgtgaataaacctgagatgctacttgcgaattcgcgtatcaaaaacttgtaatctactcttgttgctctctatccttcacgaacttgatctatatgttagcgtatttttttcgacagaatctgaactcttactcg

SEQ ID NO: 46893 - DNA, 251 bp, Glycine max
  unsure (1)..(251): unsure at all n locations
agctngatcctcatcatcaatggtgacatcaatattntcaagatctagaatcagnttattaaactaatccaattgctctcctacttatctatcttcatgatttcaaatgaatacaaagactgctttaggtaaagacgattaactaaagaattggtcatgtacaaaccttcaagctttgaccaaactccaacagcagttgtttcttatagactngcctcacacctttgctccgagactgagaataatacact

SEQ ID NO: 46894 - DNA, 456 bp, Glycine max
  unsure (1)..(456): unsure at all n locations
ntctggttgtacataaaagggttatttctatgtttatttctattattntatttaagctatgccacatgtctccgtttgagtggagcaagaagggcccactttctcttttgattgtgacccatactgatgcaagctccattggagcttgtaggcctaggatcttcttcatcaatggattcctttgcttcttggaagatgaatggcagcggaatggagaaaggaagagagagaggagacgccacttcaaggagaagatgagtctagaagaagctcaccaccataggaggccatggataagagcttggaggaagaaggagatgaatgaagggagagggagagaagagcacgaaattttgtgctctaaatgagctntgaaatctgaagtttaatattcaaatgatcaaagttgaaaaaaatgcacacacatgacctctatttgtagcctaagtgtcacac

SEQ ID NO: 46895 - DNA, 442 bp, Glycine max
  unsure (1)..(442): unsure at all n locations
agcttgtctcagcgtttatgcgagacagagaccaacatgttagctatcatcgccaagtaccaagaagagttatgtctagccacggcccacgagcatatatcgcggatgagtatgcccaagtatacgcggaataagaggctagaggaagggtgatcgactctttacaccaagaggcaaccatgtggatggatcggcttgctcttaccttgaacgggagtcaagaacttcctcgattgttagccaaggccaaggcgatggcagacacctactccgcccccgaagagattcatgggcttctcggctattgtcagcatatgatagacttaatggtccacataattagaaatcgttaggaaacttgtatggtctctcagaccttgactagatacgacttccttnttgaaataaaatgagttggtcccatgtttctactccaaaaagc

SEQ ID NO: 46896 - DNA, 478 bp, Glycine max
  unsure (1)..(478): unsure at all n locations
gttgaatctaaatcaatatgtattntagttaaatgttatccaaattatcaaagtgcacaaaacaatttgttcctcaaaccaagtatattattctcttcactaatttaatgtagctttgtgcatcacatactatatttacattcatagaaatccatgaatcttattaattataatgataaaaatggtaaatgtttttaaacaagaaaaatttgttttgggaaaataatcttgtaattgatgttatcaatggcggatgacagaaggccagaattctaccatataaacacaccattgcaccttatggcaccgccatggtgggcctcccttcacaaattgcctatggaggttgggttgttgtggttgtcaatagtttgtttcatagaatatactatagcttanaatgcatagcacatgcatttacctggctaccaaagaaatttctatgcactgtacaatcaagtccaccaacgaaatatcg

SEQ ID NO: 46897 - DNA, 447 bp, Glycine max
  unsure (1)..(447): unsure at all n locations
nagtcttgtanatcataagtgatcttttaatttcctttagagattgaatataatgattcttgcggatagtatgcctccatcactgtatctaatcttanacagacctccggatggcctgggaatagtcatatcttgatggtagatctcttgcggaatggtaaaattattttgcttaacttgatgaaatttcggacaatgcatttctaggtcttctttgagtgcacacttgattgtcacggaattaatctcaccattttcatgtcgcgtacttggagatcaatgcgaaatgttgccgatgtttcatcacatttaacagagagagacttatccttgatgttcaaatctactataaaaatatgtcttcctgaatgggatacagtcacacctttaatgaagaatgtagattttcatgcatcaaataactatgtgagtatcacggagttatta

SEQ ID NO: 46898 - DNA, 399 bp, Glycine max
tatgttgtatattccgagcctgtataatgtgacgacactcagccgacttgaaaatatgatgggcgtataattgcagagagcttcgctctaatttcagcctctttatatattacagatactcggcatttattgaaacttagggtcttttggatgggtcaaatcattcagcttctaattatcgagcgtgatcgatatattacgggactcattcgaacattcgagcgaaatgttagtgttgctcgaattgcctttatgatccgcctactatgttcagcgtctcagtgtattgcgagactcaatcatacatgagagtagaaggctattgccgttcgaattatcttgggtcttacgatgataatatggagtgtctgcatatattacgagactgagctatacatc

SEQ ID NO: 46899 - DNA, 377 bp, Glycine max
tgctactatcaatggggatatatcgtgtgctatcagcaacattattaatttgattgaatagacatgatgactgtatactaggggtacaagacttgatgctatatatcaatttatcgtatactcgtaataataatactgatatccaagttggtgttagatgaaatctatattaactggagaatccgaacgattaatactttggtgtttcttatgagatgaccttgttcttatgtgtacggagtcggaggaagagattacctcatggcaagaacagtaagagcccacgcaatggaagcaactggagccgcacatgggaagctctctgaagtccatgaacggacatgaatgactgctgacgtgattgatccaacaccttg

SEQ ID NO: 46900 - DNA, 425 bp, Glycine max
  unsure (1)..(425): unsure at all n locations
cgtgttgcgttggatccatttgcctcatacatgaggctcttgtttccgtatggaactcacgacaccattaccacaatatcatctattggttctgttctcttcatttttataaacggtgtacaaatggattttggtttgataacaaggatgggtaagagggcatggaccattgccatatccggattgctagtacccatattttgtgccatttccatactaagcttatttccatttggccactctggatactacgatgatttggttgttgcataggtctcccacaccgtaatttcattagcgggcatttcttcctttcttaatgaacttcacatccaaaactccgaacttgngaaattggcattatcttcagcattgatcagtgacgtattgtgcacaatcgttacctccaccggcactgctgttat

SEQ ID NO: 46901 - DNA, 430 bp, Glycine max
  unsure (1)..(430): unsure at all n locations
agcttatgcacggaaaatgttattatgaaattgagatgcccgaagaacaccattactaggtaccatgccttatgtaccatgttcattatgttgtatttaagtgaaacgggtttatgatcccaacatggttggctcctaacacatgaaactcagaatgtagtgtgaagtttcacacttcccccttctttngttctgtnttggagaggaaaacgcaaggatgagcaaacatgaaaacaaatggtatgcatatttgcagatcacaaagtatgatgaacgcatatgcatgatgatgccatgactcatgcanaatgtgaggctggaatatgataacggacaaatgcaagatatgtccattattgatgtattgaaagatgcttatgcgatgcatgatatgaatgcattttacggacacgagaagcccggaaatatc

SEQ ID NO: 46902 - DNA, 391 bp, Glycine max
agtgaccatgtgaataactcaagagcttccattgttcaattttgagcgtctcgatatattatgcgccttaatcggacctccgagtgaaaagttatgaccatttgaataactcaagagcttccattgttcaatttcgagcgtctcgatatcttatgtgcctgaatctgacctccgtgtgaaaagttatgaccatttgaatttctcgagagcttccgttgttcaatttcgagcgtctcgatatcttatgcgcctgaatcggacctccgagtgaaaagttatgaccatttgaataactcaagagcttgcattgttcaattacgagcgtctcgatatattatgtgcctgaatcggacctccgagtgtaatgttatgaccatttgaattgctcaag

SEQ ID NO: 46903 - DNA, 437 bp, Glycine max
tctttggaccttgatcaggctactaacttctctttcaaaacctagccatgtgctcgcgactggtccctttcttcccttcgcacttgagttcactattgctaccccatagagctccgcgaaatttgttccggccatactcttccttgcgagccctctaggtctcttgttcaagggctcttgcggtaattgcattctctttccgtaacccggcacactccttccgaacgtgtgtagcggccaacttgaacttctttttgcctttcctaactcgcttttgagagcttggacttctttgtcttcttccggtgcttcaaaattctcttcgctgacgacttttaacttggcgagccaatctaaacctcgtatgcgaactttcagcctatcgtggtacccaccaatgatgccattacgaatgcctctaacttcttgatctttct

SEQ ID NO: 46904 - DNA, 211 bp, Glycine max
gcctcgctacatatatgcgcccggctcggacatccgcgtgagaagctatgaccatatgaatatctgcagagcttccgacgctgaagtccgagcgtgtcgctatataattcgccagactcggacctgcgcgtgagaagctatgaccatattaatatggcgagagcttccgcagctcatgatcgagcctcgctaaatatgatgcgccacaatc

SEQ ID NO: 46905 - DNA, 609 bp, Glycine max
  unsure (1)..(609): unsure at all n locations
tgtctgtgtagcatggtgtatgtgtgtggtgtgacgtatntngtgtgatatagtattanngaatataannnnaaggattagtttttgtaccatctnananccnnnnnnaccagtcgcccgcacgcacgccacgctttgtaaatagttattaancatcaatcaattagtttgttttacttacaattgcaattgctaaatataaaatttgagtgattacatgaatctcagatcttttgacccacacgcgctgaatatcagcgatgttgatgaccagggctccagggattggtggaatttcaaccactctctcttcgcagcatcactctcttcttccatgttaacatataagcctccaatttaatcttggaggggcggtgtagtggttcccaagtacgaaaggcgccctacacctactgtgagctttggatttggaaatggtgggtagtatatcatgttaactattcttacacacaggattaattgttgagtcatgtggtgacatccccagcttagcttataagaatctgacaatgcctataccatttggtgtgaaatataaatactcaagtgcacttccgtgaatatacaatgaaattgtggagcaaaccg

SEQ ID NO: 46906 - DNA, 287 bp, Glycine max
cttctacctcatattatgccaccatcattgttcattgcagcagacaacatattgattcaaactttgtgccacaactctgagacacctgaaacttgtatgaggtgtgtgcaatcttctaaaaaagctgtgaatgtgaattgtactgttggagtagccatgatcgttatcaattgcatcaaagacaaggcaaatgccttggctctcaacatgacaaagttggcttacacatctaatggtcatctaaaagtcatatgtgaaaaatgtgcaaaagactatggccaccacat

SEQ ID NO: 46907 - DNA, 633 bp, Glycine max
  unsure (1)..(633): unsure at all n locations
tggattganaccattgaaacccctnanagcggcgacctcgacgcatgcacgctntaatgccaattaaacgacaagaacattttactcggatgtctgattgatngcccgtcacatatcagagatcgctcgctcatcgaatagctgacatcatctgagactaatttctagcgacggctcaacttatctactcaggattgtctagattagacagcacctgtatatacacacgtacactgcttctagagattgtaatgtaagagatctgcttgagctccatatccataacgacgaactaatctcttntacattaggtattgtctatattcgagtgcagagaggaggtggtggagaacgcttcaganttggaatgtagacatctactgaagcgaatttcataccgaccatatacgtgttgacttcaggatagttctgatctgtgncgctacgaactatacgttacgacttcgctcaagatatgagtancctgatacctatgagaccttatgcaagacaacatgatgtctttatgactcgagatggagaagatttgaggtccagtacaaacatacgtaaacgctctatataagattggtgtgaagctatagatccaatttacactatactatctaatcg

SEQ ID NO: 46908 - DNA, 192 bp, Glycine max
gagcgtctcgtaatatcactggactctatcatacatccgctgagacacctattgtcgtggggattgacgcatagaaacagcattcgataacgagcgtctctatatattactggactcattcacacatcctagcaaaaagttattgtcgcttgaactggcttaaagactaaaacttcaccgattaacagattg

SEQ ID NO: 46909 - DNA, 613 bp, Glycine max
  unsure (1)..(613): unsure at all n locations
atagtgtgtagcatgtgtcacattatttgantattagataagattattatagatgacatatgagtantgtgtntaattatgtagatagtgtacattgagatccccnnnnaaccgctacctgcacgcatgcaagcttgcatatagtgtntgttatgctggtatgtgtggccgacaatggcgctgagttgttctgcatgagcgcggatcgaggaagcggagttggcatggacatggtgtccggagcgtggctgatgaatggctctcgagaagataaaaatggatgcgtgggtgagttgcgttgacaggcttcctacatctttatgcgatgaatgagattatctattgtggcggtgacatggacgcggttggatgctaactcggctatagatatttctatgcattccatacgggtcttgggtctaattggctcacacaatgtgtgattgcttgaagaaagtaccatattgttatgagcaaaatttgtgttataatatcctagtgngcgacgtctatgtaccttcagatatagtgaagatttaggataggaattgttgtgattctttagctgcaattcttgacttgngtcaattgtttatctaggcacgtgaatgct

SEQ ID NO: 46910 - DNA, 292 bp, Glycine max
  unsure (1)..(292): unsure at all n locations
gtgactcttcacttttaaatttgaatttcaacgttcaaggacactggtaatcgattacctaaacattgtaatcgattacagccttttgaaaatatntggaaaattgcaaattcagtatgaaaactttttcaaactcattttactactggtaatctattacaacaatatggttatcgattaccagaaagttaaaactctttgttaaggtttcgtcaaaaactcatgtgttattccaaagttttgaaaaaacttttaatacttatcttgattgaatcttttcttattcttgatc

SEQ ID NO: 46911 - DNA, 485 bp, Glycine max
  unsure (1)..(485): unsure at all n locations
tgctgtgactngagttatcaagagattataattatgtgaccatggcttaagattcaaataaagaccaatcatctatcatcttagaatcatctatctctcactcgttttaacatgatctctcacgcatggttcaatcagatctttgaatatctttcgacagaaaatgctgaggcattcctctgcatctttctaaaaagtttgtgatccacactttctcttacaagataagttctctgttcaaaaacttgagctattcatcgttttcattctcttctcctttttccaaaagaacaaaggactaaccgcctaaattcttttgtgtctctcttctccctttgccaaaagaacgaaagactaaccacctgaattctgttggctctcttctcccttacaaaagatncaaaagactaaccacctgagaattcttttgattcttcccttccccttaagtaaaagatttcaaaggactaaccgcctgagatatc

SEQ ID NO: 46912 - DNA, 459 bp, Glycine max
  unsure (1)..(459): unsure at all n locations
gtattctntgtcttactaagccactactggctctaacataaataagaagatttgttagtttgattgcacactaactagcactttgtcatcttacacacagataaacaaattcacatttagtcttttctttaaaaatgaacaaaatgttttgagagcttttctaaactttacaagaatttacacaaagttcttttaacaaacagaatttgaatattgagcatttcagttcctttttcatattttcaaagcttttggtattcataggtctccttcaatcaagtatctattgtctctaaacggacatatttcctctcttaatcttgcatataaagagtgtggccgntggggcattaaatgcacatacttcttcatgttgagaaaccattcttcatcattggcatattgaacactacaacaagaaaccacttccttttacgttagagtaagtctgtgcagcat

SEQ ID NO: 46913 - DNA, 449 bp, Glycine max
atgagtgacttgttttttacaagcttttatactatcatgtatattcttccacaaatattagagtgtggcaacaatgtctttgatagtacaaagtcaacaatatatataatatgtaaataaatatgttgtctacaaaaatcaatgctacgaagacatgtgtaaatgactcttgagaacatcacatatatatagagatattctaacatacttttatttatttattttagtgttaataaaggagaaaagagattattaagattaaaatcttatttttggtccgtttacacacataaacaaagaaaattcccataatttattactaagaatgacatgttaggtgtgattattactctttcttctattttcaaattaaataattctgtcaaaatataaacattaaataatttgttgaaaacaacaaaacttttaattattagtaaattaatttt

SEQ ID NO: 46914 - DNA, 217 bp, Glycine max
  unsure (1)..(217): unsure at all n locations
gtgtgatgcattaattattcatnggtgtgctgtccttgctcaaaataatgatatatagcctatggtgatatattatgcttctaggactttatacgcccccaagcgaattatactactactgagaaagagttactagccgtaattgttgctcttgaaagcctatgttgattcgatggatgctctggctccaagagtttgacttggagatccgtgatat

SEQ ID NO: 46915 - DNA, 472 bp, Glycine max
  unsure (1)..(472): unsure at all n locations
ntaccatcactagagttcttgaacctttaaccagttgggtattaagcttgacccattactctactcgaatcatctgtgagtttcactatcccatttgactccatttctgctactcctctaagggtcatgatgttgcttcccaagaatccatctggttaggctgagatgaaaccaggatcagaaggaacaacaacacatgcaagagctggaggagcatgttgaggttgggcatgagaccagatgtggaaaatcaaggactntgaatgattacaacttacaagggcctgagccttgaggcttcaaaatattaattgctatgaataaaatagaattgttgtgagtaaaaaaggtggcatataataaataaataaaaggtcacattntgctcatgttttttaaagagtttggagaaaaatgtgtttcgatgggtggctatgtangaacaggaacgaagcaagcatagacaggaacc

SEQ ID NO: 46916 - DNA, 465 bp, Glycine max
  unsure (1)..(465): unsure at all n locations
agcttttgatgaggatgaattaataaaatattgtattaatcttgaaattnttttaaggtttaatgaatactctgatattaatagtcttgatttattttcgaattgtaagtattaagagaaatgttaagagaagaaattaacacaccaatagaagtattgagttatattaaaactttagattcttttccaaatgtttacattgcatataaaattntattactgctgaaagaagtttttcaaaattaaaattgcttaaatcatatctaaaatcaacaatattataagatagattgaatgagttagttattntatctattgaaagtgaagtgttagaattgtttgattataaaactctaataaatgattntgcagctaanaaagctacaagattaatataaaaattagtattttatgtaatatactaagtctctctaaaattcttggtaaaaatagacccctttaaca

SEQ ID NO: 46917 - DNA, 477 bp, Glycine max
  unsure (1)..(477): unsure at all n locations
tcagaccaatgcaattcataatctaggtacctgagacccctcaatttagtgggatttcaaggtttgagaagtgaaaatgagaatggggtaattntggagtaaactctcatctcaaacaagtctataacattaatttaaacttgctccaactggttttacgacgaaaactccaccgattcaaaatttgacccctcaacacccaatttaccctagaaatggctcttgctttcacctttgtcactcatttttctcatttgctcagcccaagctttcccccaagtcctaaatgacattttaaactaggattaactcactttagcccccaattaccactaaccccaaatttagcttttcaaaccctcaaaacctcacactnttccactcacatcactaccattctcacatttaaccctaggttaactctccccatcatctctaccagttttctaccaacaatttcagcccacaagcatcaca

SEQ ID NO: 46918 - DNA, 402 bp, Glycine max
  unsure (1)..(402): unsure at all n locations
ctgcagctgctctnattacattgatagtngtatttatgggaagaggttatatgccatctctgctttaagagtaatgtcccactataactaacttttcaatgtttgccttcgcaagaatggccccgaagaagcttgccttataaaggtccaggaaggactaggcggccgaaagaactagttccgccccggagtacgacagtcaccgctttaagagcgctgtacaccagcagcgcttcgaaaccatcaagggatggtcgtttctccgggagcgacgcgtccagctcatggacgacgagtatactgattttcaagaggaaatagggcgccggcggtgggcaccactggttacttctatggccaagtttgatccagaaatagtccttgaattttatgccaatgctt

SEQ ID NO: 46919 - DNA, 456 bp, Glycine max
  unsure (1)..(456): unsure at all n locations
tgtaggattatagggtacccgtcatatgtggtactaggtgatgatcgggcgatggtgcanatcaactctcccacattcacaaatcaaacatgaacccaccatccccagttgcccaccttcaactgagctcacgtacccccacgtagcccttatcctcgttcctctcagcaccgggtccccatcaacccctccaagcttccacaacatccaagcaattcaatatccaaacatcatgaactatcctaaaccaagataacaaggcagaggcaaaaaactcttcccaaaacacatcccaacaccacagctntccctacttaaataccccagtaacattctctntgttccaattcgttaaccggtggatcgactcanaaattntactggaggtctctagtacataagtctacatgtngaccgttgggatctgctaaaaacgtccagaacccaatatgtact

SEQ ID NO: 46920 - DNA, 605 bp, Glycine max
  unsure (1)..(605): unsure at all n locations
agtttactgtacgtctctattctggattattcgatgactgtattatatggtattgtatttgtattgtnattatgtacataacggatatattgagtccccnnnaacggttcctctacatcgacctgcagcatgctatctttgtataatacacaagtgacatgtgttctgtgtccaagcctattgttgttcccaagtcccattattgttgggctctcttccaactgctgattgttatacacagcttgctttttaatctgcctattgctagcaatttttttattagcaaaggcgatctatatattaattggagtaccagaggtactgaataagacatagaggaccatacaaatgggtcctcaatcagacatctatattctgaaagggaaccagagtatggatattttttttgcatgaaacttacattaaataggctccgtacaaagtgagctactactgatacataaagctttgtgtgaagctgcttgcccattcattgaaatggactgtgaaacctctctcatattcccttaaccatagccacagtttacaagtctcatcttcaaacaggcttaattttgaaccggcttagagaacattgttgtttc

SEQ ID NO: 46921 - DNA, 473 bp, Glycine max
  unsure (1)..(473): unsure at all n locations
tatcctcagtcgctaagccatgggtgtctcacttagcgatttggtctcgcttatcgcatggttcaggcttagcgagatagcaacttttgcaccttcataattttctcctttttacctgaaattgaggtgaaatttacattaaattcataaggaaggcttctattgagcacatataaaaactaaactagaaatatttacaatcctaccaaaaataaccataaattgggagattatatacattttataaaagtgttctatacaaaatttagtcttatgagatgactaacagtaatcaagccacaagcatgttaaataagcatatatagaagcaatgaacacagagaaatagcattaaatagatagtaagagtattacatcaagaggttcagtagtaacttcccaacaaagagatntatgccttcattacaagcaaaacttcaaaaatacaagatagaaactatttttgatgaaag

SEQ ID NO: 46922 - DNA, 440 bp, Glycine max
  unsure (1)..(440): unsure at all n locations
atattatgtatanttattatgggtatatacattatgctgcattaatttaatgaggtacagctggatgannattttacagacttggataagaataaacgtgacttctcagtttattggagtacgtagaaataatgcatgtgcatctgatagtagagaagctttagcctaactataagcgtaatcagtagttagatccaatgggcgtcagcacagtcttaaatgtatagaataatgttaatgtgtctgaataggcaagagaccagatcatcaccatagtgtaagatgaatgccgagcgagatgtntaatccttcattatgttatcaccaatatcagcatggtctactgtgctcggtagaacagattcccatctgtactgagtacaatgtgaaggaataggtttgatcctctactagtcaaggggtgcatatatacaatgatg

SEQ ID NO: 46923 - DNA, 440 bp, Glycine max
  unsure (1)..(440): unsure at all n locations
cttgcngtgcagcttggcatctgtccgaattaaatcttataaactgtgcaattagataactgtagtttcttcttcatgatattccattcatttcaatagaaaattctgtcagataaatcgcattttctacgttattgatgtgttaccttcaaccgcaggatgatttgatattggcagaatctccccttacttttgttctatatgtattaatctaacaagattttatcagtactatatgactctcaaatggaatctaaaagtcgatatgtgacatgtctcacactatatagagaacttggaactcatgtgctacattttgattgtgattaacttctatgcttatcactatcgaatctctcgaatcatgagttatctcttgtgtactgaaaatggcgacagtcttgagcttgaaaacatctgagtacaatgcttgcgatgct

SEQ ID NO: 46924 - DNA, 532 bp, Glycine max
  unsure (1)..(532): unsure at all n locations
ttcgaaaccctttaganaccccnnnttagcgagtgcgtcgtacacgcgngatccgatagagtnnanctgtatgatgcgagctagattctctaggtgagtcttacataacattctacatccattgtggcaaggagtctctggagaatggtgccctgattattttcacgcgactgccttaagagactcgtttggagactgcatgagctctacacaagaacgccacgcgtggtatacatgcattcgcatactctcctgatgtgtactgagctctagctcattccactccaggtaaagacgggttgcgtacactatccctgtccancatatataaaagcaccaatatcctaacaccgatacgtgacactggtacgatagatgttganacaacatggttaagattgacagantgagaatcttggaaatccgtggaagatctcgaagagctccttccacatattaccataggacacatgtggttgctcaacattctattaccttggaaagaagagaccataacactgtcgattcagcn

SEQ ID NO: 46925 - DNA, 448 bp, Glycine max
  unsure (1)..(448): unsure at all n locations
ccctattattttctattagtttgaggttgcgatcatgatactacagaacatntacaacacttccaatgtctctaccatggcagcattaaaatgtttaaatatctaacgattgtctggatgaaagacaccctacattactttgtacatgctatctatggttaataggctactgagacaatacccgtgtaaaaacagatgtagaaggcttcttttaattttcaagtcttttatcaacagatgacttgggtaaatagcgagaaaatgttttttttaaaaagagaactgagaaaactaattaaactatggctaacaataaataataaatagaggggattgcatactttgacgacaaaactacctaaactggaaatttcaatgtgaagaatcttagtgggaccaaatagccatttattaataaaaacttaatcatttgtaatttattactgat

SEQ ID NO: 46926 - DNA, 378 bp, Glycine max
  unsure (1)..(378): unsure at all n locations
agctttgaaccaattcaaacgacaataactntttactcggatgtctgattgaggcccgtaatatatcgagacgctcgtaattgaatgtgaagctctgagccaattcaaacgacaatnaacttttactcggatgtctgattgaggcctgtcatatatcgagacgctcgaaattgaatgttgaagatctgagccaattcaaacgacaataactttttactcggatgtctgatggaggcccgtatatatcgagacgctcgaaattgaatgttgaacctctgagcgaattcaaacgacaattactctgtactcggatgtctgattgaggctcgtgatatatcgagacgctcgaaattgaatgttgaagctctgagctaattc

SEQ ID NO: 46927 - DNA, 466 bp, Glycine max
  unsure (1)..(466): unsure at all n locations
tanacattcaacttcgagcgtctcgatatattacgagtctctatcaaacatccgagaagaaagttattgtcgtttgaatttgctcagaggttcaacattcaattttgagcgtctcgttatattacaggactcaatcagacattcgagtaaaaagttattgtcgtttgaattggcttagagcttcaacattcaatttcgagcgtgtcgatatatgatgggactcaatcagacatccgtgtaaaaagttattgtcgtttgaattggctcagagcttcaacattcaattttgagcgtctggatatatgacaggactcaatcagacatccgagtaaaaagttattgtcgtttgaattggctcagagcttcaacattcaatttcgagcgtctcgatatattacgggactcaatcagacatccgagtaaaaagttattgtcggctgaatntgctcagagcttcaacattcaa

SEQ ID NO: 46928 - DNA, 460 bp, Glycine max
  unsure (1)..(460): unsure at all n locations
atgttaatagctacaaccatttagctntcagcanaaagaagaagctaccaaccattagttaacccgttattatagaggaccttaatttcaacctcctcagaattattcttccagttggatgacacgactctcacacaagattcgttaaatgggaacaaaaattcaataattgtactttcgttctcattaattaattagttttgctttctaaacctggtaatggttacctaactggtttgttttctaacaaagaaattattgcaaatcatttcatataacttttaaggttgtaaaataaaatcgagcaaaatataattctaattctgtatctaaaatatatacaagggataaaattaaattcgatgttagcaaatacgaattttgcatgtcacttcacatttagttggagtttatcatccactcatgctatgtcctacatcatcgcaattaataatataat

SEQ ID NO: 46929 - DNA, 106 bp, Glycine max
gatattgagatttttgagagctccattcttccaagctcgtgcttcctcagttgggtagggtcttattaatatgatgtcaggctcaattattctctgatataaacca

SEQ ID NO: 46930 - DNA, 442 bp, Glycine max
gaacatctttcttaactatttgtccttcagattttactgtttctgtatgtgtgtgtgtgtgtgtgtgtgtcatgcgtgtgtgtttctctgcgtgtgtgtctgtgttcgtgtgtgtgtgtttctgtgtgtgtgtgtgtagtgcatctgtgtgtgtgtgtgtgtgcggctgtgtgtgagtgtgggtgtgcggctgtgtatgcgcgtgagtgtgttgaagatgcacactaatcgatgcactgttataagggtccagaagttagacgctgagcttaactagcttgattttgaagctgacacacgcagttgactttcctagaaaatatggaaaggaagaagctggtgcatgatctttggtcatcagccccagctcactattctataatgacgcagaacgcgtatcacttttggataagacgggccatatatcttatgtttcactgtc

SEQ ID NO: 46931 - DNA, 357 bp, Glycine max
  unsure (1)..(357): unsure at all n locations
tgactgagaagcacgttattctgttgttttccagatcggttccttcgccaagtatgtgtatatgtgtatatctgtattatattcattgttctggttgttgtttgtattttgttttgtgcagaagaaaaaaagcagaagtagagatgagagtcgtcatcgcgataaagggcaggacggacgaaatcagtgtcctatctttgctttcctcttatctccgatgagaggtcagtaaagaggggcaactgtcataccctaatttcgtccggggattattacttgatgacatgcaatcttnggttagccgctttgagatacttggcgtcttttgttgcacaataaatgaagtcccgagacgtc

SEQ ID NO: 46932 - DNA, 282 bp, Glycine max
gaatgtgcatcttagtccataacatatattttatgcatcatgtatcctcatgactgagcgacacaaaagtctccgaccttagaaaagctcttccgaaggtgatactatctgatctaatcgattataacctcatcgtaagcaattacacaagttgccttaatctcgtacggtatgctccgtatcgcgtaatcgatcatagcctatccaatcgattatccactgctttgacacaacgaccatttattcatgagtctctgcttgttcgagtaccatgagatatac

SEQ ID NO: 46933 - DNA, 547 bp, Glycine max
  unsure (1)..(547): unsure at all n locations
tgatgggaattgagacccatgcgtaataactgacacgttagaancctttagctntcnctacatncanacacaatgtgtgatctatgttacctccgttgaacacaatatgacatataatattttcgtgctgactaagaataactatattgtgtccgagcttactaatacaaatgtcagacatacatactcacataccgttacctaatatgcatgccatacatgtgcattcattagcggacaatgaatagatgtaagtataatctattgccttaacataaaaagcttacttggcagctatcagcagcacttaatgatgtggagttgatgtgtagcaactccactttgggatctcatctatgaatagaagcattctagatggtggcgaatgtgattgaatgctgttcatgatgggagactaaagctacgaattaggctccgtgattatactgcactaaagatgttaacgaaatataagaagtggtttcggccattggcacttattagggactatccttgtctcaaactggttataaagatagtgagcccg

SEQ ID NO: 46934 - DNA, 595 bp, Glycine max
  unsure (1)..(595): unsure at all n locations
ctgctgtgcatccgtatgtgtgttatcgatgtatgttcttganagttgtgattcggatatctgtattgtgactcagactatnnncctcttccgccgcagccgcttttngcaggttgctaggtgggagcttaactagtttggcagctcataaatccatcttactttggcattacgctggcattgatcttcaagatgcctnncctccattgacgatgactattccaggccaactgcctccgcatggacctacatcacacttttagtttatgtgatatctgcaggtacagaacacttttagcttttacgccagaggaagtccattgctatttcacgcctagcctctatgccggaaacccttaccctgaccccatactctatactgggataaaaaaacctaaccctaatataataatgttaaccgtattattaagaggagaaattacttattttctctagactttcttctttgaaattatcgttaatgaagaaaattgttatataataaactattcaatattcacacaatagtccacaggtagctagcattgattacttcttttcctcttttgctctcactcatgagttcacaacttcg

SEQ ID NO: 46935 - DNA, 475 bp, Glycine max
  unsure (1)..(475): unsure at all n locations
acacatacctctctaatagctaagctcaccttcttgagatgagaagctagagcttagctacacacccnctataatagctaagctcacccccatgacaaaaaacatgaaaatacaaaaaaaaagtccttactacaaagactactcaaaatgcctcgaaatacaaggctaaaaccctatactactagaatggccaaaatacaatgcccagacgaaggaaatacctattctaatatttacaaagataagcgggctcatacttagcccatgggctcgaaatctaccctaaggctcatgagaaccctagggccttcccttggatctctagccaatctacttggagtcttctacccaatgcccttgcggtgtaggatagcgtcattccctccaccttggacagatttgacctcaaatcccgaggttcttcatactctgggctccttccctcaacacctgtaaaaagaacaaaaacatatgt

SEQ ID NO: 46936 - DNA, 400 bp, Glycine max
tgctgcatgcagctttatcctggcttgctttgtggtgagtctttcctagaagtggcgccaccaatcatctttccttcttctccatgtcgctgccattgatctttaaacgcaaatgactccactgatgaagaacattcaaggcctactagctccacatggacctacactacactttagtgttctgatagtgcattacagacactttatctttacgccaaggaatccaatgcttcaaaccctaaccgtaggtcgtgaacccttaaccctgaccccaaactctatacttggatataaaaacctatccctcaaataataagtcaaccctacttttaagaggagaaattacttattctctctaatctttcttctttgaaattatgtttaatgaaacaaattgtta

SEQ ID NO: 46937 - DNA, 415 bp, Glycine max
  unsure (1)..(415): unsure at all n locations
ntgagggattggtctntgccagtgaaaggatcgatgtgggttctaatagaggaaaagttgatcatcctactangacgactgagaaaactggggcaaatgaagagagtgagaaagagggagaaacccatgctgtgactgtcattcctatacggccaagtttcccaccaacccaacaatgtcattactcagccaataacaaacctcctccttacccaccaaccagttatccataaaggccatccctaaatcaaccacaaagtctgtctaccacacttccaatgacgaacaccacctttagcaaaaccaaaaaaacaccaacaaaaaggaattttgcagcanaaagcctttagggttcaccccacattccgttgtcatatgctaaacttgatcccatatccactcaataattcaatgg

SEQ ID NO: 46938 - DNA, 390 bp, Glycine max
  unsure (1)..(390): unsure at all n locations
agctntacaaggagatattactcttgatgcatagttggatgaaagggataagattatcttgatggataatgctcacaatgcaatcatcttgagtcttaagacaaagtactacgacaagtctcgaaggagaagacaacaactgaaatttggttgaaactagaaggtttatacatgaccaaatctctggtaaatcatctttatcttaaacaagccttatattcatttaagatgcaagaagatataaatgtggaatctcaattggatgtctttaataaactgattcttgatctagaaaatatagatgtgactattgatgatgaatatcagaccctgttactattgtgtgctttgccaaagtcttcctctcattttaaagaaactctcttgtat

SEQ ID NO: 46939 - DNA, 474 bp, Glycine max
  unsure (1)..(474): unsure at all n locations
tgtaattgtgtctttccctactttttgcataaagtttgattcataagctttgctctttgcctggctaactgccttttaatctctatgtttgctacttgatacttctgttatacaaaggtgtaatgctttgaatcactctcttaaattaatgaatctcttggattctattaccatgattcttacttagattgaaaccctttctgcttcaccaataactactcctgatacctctcanatccgttgagtttctttatatggtttagaaggtgaaatataggacttgtatggtataacttacaagactatagctatggtcttggttctgatcttaaatatgacttgactntattattgtgtatgcttatacaagtctgctaagacatgtatgtacaaaattgcataagaatgcaacctgtacttgcatgcctgaagctgtcaatgtgtagacacagtagactgtcaagtaaattgacg

SEQ ID NO: 46940 - DNA, 356 bp, Glycine max
  unsure (1)..(356): unsure at all n locations
tggcaatttctttaaaactagtcacttanaaaggttgtgactttngaatacatcttcagaaacaagtcacttgaagaattgtgactttggaaatttatctttcgaaatcagtcactggtaatcgattaccattaaggtgtaatcgattacacatcaatagatgtgactctttattttaaattttaaaaattataacgtttagaagctctggtaattgattacaagtattgtgtaatcgattacacaagtttaaaatgatctgaaaatgttcaaacacaagtcgtaactcttgagatttgagatcttaacattataaaacactggtaatcgagtactaccttctcggaatcgattac

SEQ ID NO: 46941 - DNA, 417 bp, Glycine max
  unsure (1)..(417): unsure at all n locations
tgtcagccatctcttaactctngctcttatagcaagtcatactgntatactattcacctgatcgatattngggtcgaacgacttacattctttccatctgatggattgaggtacgagtatgtatatgagtcgatgataataatacggcttcgaactacattaccgacatttgtgtgcatgacgaggtagtctaatgaaatcaatctcagctctcttatactctattattatacttcttcttatcgctctccatgtgtgcaataacatttcagaaataggatttgtttatatatactcttgctatttacaatttcgcaatccaatcattataattgttgtttccaaaagacatagctagtgaacatcactatcttgtcaagtagtattcgagtccctgtggatacaatactcggattt

SEQ ID NO: 46942 - DNA, 187 bp, Glycine max
ctgaccgcttgaacactataccgatttctcacaaaattcagccactactgagagagaaactacttgttctttgaggccaacgctcgcatcctagctgagaccgatagagcttagtggtactgaggccatatcatctcataagtaaggctctttcatgacgataggaaaaccaattattgaacaaaat

SEQ ID NO: 46943 - DNA, 631 bp, Glycine max
  unsure (1)..(631): unsure at all n locations
acttgtagaatcatagcttcgtggatataaganatattaaaatatgcatatatgngtnaggacattaacaatgagaacttgacgcatntagatacnnnnntttcgacgttcgcagtgactgcggatcatnttatatnnnanatgtaagcatgtatncttgttntgtgtcattcttgttaatgtaaatatttacgaagttactactatcagagggtcccaactctcacagcagatatggataacccgcgcgcccataataccatcgaaagatgatactttacagtagcttatgcgcataccttgcatagaaatagttcactagcataagatataattattatctcgatacaaatgcatcccattttacatatcttaagcaagcacacggagagcctagcatcatgtgacactgttcttctaatgtcgaataagatacctatcatcaacacacaatcgacctggctgcattctcatacgtgaatacccacagcatctttggggtaccagagattgcacatgtacacctttcggtattcctaatcctagacatcacaatacatatgatgaatcttgactatcagccaataggtgcttagtatatgcttgtaatgttttgctactaagacgaacn

SEQ ID NO: 46944 - DNA, 224 bp, Glycine max
ttatgccgaatggatgcctgacagatatgtactgctttatattggtattgatattgtgtagggaggtaatacaattggataactcaccatccttcacttgccaattagttaaggcatttgatgttggagcacctaagacgtctagtctccaagggaatctatttcctttctgatggcataagtcagaaacccaccagagaaaacgacaataattttgactcttt

SEQ ID NO: 46945 - DNA, 307 bp, Glycine max
  unsure (1)..(307): unsure at all n locations
ttggggctgctgttctcgtagttcccgggagctttggggtttttgaagtgaggnggaagacttctgggtgaagaaaatgttccccctccacccctttatattttcatacaggggttgctcgcccaagcgagctaacctgtacttttttttttttgagaaacattaaccttgcctcccccccttacgggttagcgtttgcctactcgaacctacttaagttagaatcaggcgtcgattaccttattataacaaataatagtataaaatactgtgaattcaaaggatactgggctgccatgcaacaacg

SEQ ID NO: 46946 - DNA, 447 bp, Glycine max
  unsure (1)..(447): unsure at all n locations
agcatagagtgagagatatngactatgcggagtgtcgcaacctacccttcggcgggagggcgacgcgagactcgcggtatgcgtgttccacgaaaagaatatgcgctggtcgccaccaacgtttatttgaggaaaacgtcggaaaaaccggaaaagacgcgatctacgaacttttaagtgaaaggttcgggagttgtatttacgcacggtgaaggtattagcaccccacacgtccgtcccaagggacggcagcctttaatcgaatgtgcaaacatgactntgatttctatgttcccttttatgttcttatatcctttataccctatatatatttttcttttctgcgagcgacaagggtgtttccctttgctcctacgtattcctcaatttgtgatgaggaaatcacacctacgtagttcttgcataagcggtaaagtcacatgttga

SEQ ID NO: 46947 - DNA, 449 bp, Glycine max
ctcttccaatttatggttattttgtagtgttataagtattttctgttaagtataggtaataaatacttagtacttccattttgtgtgtttaataatcatattctctcaatttcaggttaattatgcaagctctgaaaagtgttgtgtttcaccttctcgctaagtcaatctgccttggtgtgggcggcccaccgtctaaggcaatacatgctgagccatactacctgtttggtgtccaagatggatccagttaagtatatgtttgataagcctgcccttacgggatagatcactctatggcaagtgttgctatccgaatttgacatcgtctatgtcaccctgaaagtgataagggaagcgccttggcatatatctggccatctatcaccaattattatcaccctgcatctatgtttcatataggacatcatggcctatcatggaaaact

SEQ ID NO: 46948 - DNA, 412 bp, Glycine max
  unsure (1)..(412): unsure at all n locations
acttacataatnttctttagtgttaaagatcaagagatacaactttctagtgatcatctactagtatatgagagagaatatggctaccaaaaataatagttcatcaccttccaccaattagtgtaccactaatgagccttgaaagtggtcaggcagttagttttgttgatcctgtatacttagcagaatcctcatgttcagagtttccatcaagtattgtagggtatttgtatagctcattgaggactcctntctcagtatatgatgataatatgaaggcacgcatttctgtttgaagaagattgctcagtaagtaaatggacagtaaacttcccaatgtcttaatttgcattggctttttctgcttaataattggacgggattcttggtatattgcaacctactattcttt

SEQ ID NO: 46949 - DNA, 441 bp, Glycine max
cctattatattgtaacatacaagacgtgcaaggatttctctctaaatactacggtgtattatatgattacatgacttctgatcaacgcacaataacaattttctcctatcacatttgttgtctagaaaaatgaaaaattgccttgaaaaacacaaaatggggttcctaattgattcccaaaagtttaatcttgatagcatattgtgaatcaattgaaccaaaagtttacatggttacgttaccagtaaagcgtacactggtcacataacaagagattgatcgcataaataaatatgtttgattaaataataatcgtccgattagttttggtttattgtttataaataagatctcataattggttgtcctaaaacttccacgagagaattaaaaataaaaagtttgtattagcaattgtgctgtgagtgcattaataaaatc

SEQ ID NO: 46950 - DNA, 604 bp, Glycine max
  unsure (1)..(604): unsure at all n locations
tctctgtactagttgatctncatgatgtatgagtgaagtggtatcattgtactattantgctacctatgagtttagtatangctactttgcacgtnnnnnnnaacgacagctagcaccgcgcacactaggatttganttatatatatntttacatccttagatctatatactagttctgcaattaattatattcgagcttggcgaccatgatcaacaaagtactttttcacctactatatgttgaatccacttagatctggatcagtttgatgcgacaatcgcttcataccttatttacacattctgagagattggttgtcatgtgaccatatttacacccttctttacaataagctcatggtccatatttcctttgaaaagtgatcaatccatgttgctatggctggactaaattgacgaaattcttctaatatttgatcaaacgtactcttgcaaggagtgtaggctagataaaatctacttgcaaccataatgagaaggcatgatgactctttggtgcatcatattagaaattaaatcttacccatatctccaacatgttcttttgtgtggcattggtgatattgcgatagaattagtatn

SEQ ID NO: 46951 - DNA, 384 bp, Glycine max
agatgtgtaagttaaaaaattaaaaattaaaaatacctgtttttccagttttggactggtttgacattttttttactggttgtgagatgctctgattttttagagttaatggactggtcaccaatgaccaacctggttcccaattggaccagttgaacaggccgatccggttatgatatgatgcatgtgaacaagggtttgatgtttgatgatttcccttatttttaaaggtgaaggtgagatgccagtcaaactaacaattgaatgacaagttttgttagttcaaatcctctttcttgtgtgatatgtcacttgtgttgacaataaatgaaatgactgtatacaggcatccatggataatttcaagagttcttggaaagatgt

SEQ ID NO: 46952 - DNA, 403 bp, Glycine max
ctctcataccgaacgacataaaatctcaatgcgagatattcattactgctactacagaatgtatctgtaatagaatgaaggcatatcattatactgatattacttgctatgcaaaggaagctgactacattattcgtagttattaacaaggataatcaacttggttaactaacttacgcacaactaacctaagcaaactatctaaaatcagctaatacaaaatcaggagttagctaacaacttatgtttgtggctacaacataaaacctagggttcacatatcgcaagagagagcaaaggattatgccaagagatagtgatggcgacaaatctggttggtgatatttgcgacggatctggatcgtggcggcggtgttggaggtaggaagttgcacatgtacca

SEQ ID NO: 46953 - DNA, 574 bp, Glycine max
  unsure (1)..(574): unsure at all n locations
agagattgtgaacttgtagtangattgggagtagaagaagaaagtggtatttagatgattgcatggacatcagagagctcgttatggacnnnnnnccgcgcgacctgcgagcatgcacgcttnagaatgataaataatgtgatatggaagtttatgaagttctctaacaagactatgctgatgaagcatngagactaacctctgactagcatgaccaaactcnnncccatacccaataatgatgttgatagagagtgaacataacaccctttgactggataaatcaccaagatgaatctggtaaagattgctatctcttacattgaagagagtgaagtagtctttggtgtggaggaaaaacatatacttgggataaaagactttatgcttcantcgcttcagaaggaaaatatattcataataggagggatggagagaaaaccttccttcgcctttatcatattgtctgaggcctgtggagagacacccccaagaataggaatagggggaagaaaaatttttcctatattgtgtgagagcacaatgcagagaatgataggctgtttttgtataa

SEQ ID NO: 46954 - DNA, 472 bp, Glycine max
  unsure (1)..(472): unsure at all n locations
tacctgtgcttccgtacacttcagtttaggatgtgatgcatgcccagccaaatcatgctccatgtattcgaaaacaaggtataagctgcaagacatccttgatgtaacaaggccttccagttttatgacatttggatgatcaagcctacgtagaatgtgaatttcccttgccatgaagcgaacactctctggctcaagattatcaaacctgacttttttcaaagcaacaatattattttgctcaagatcacgagccctataaacattactataagttccctgtccaatctgaaaaataaggaggaaaatcttaccattcaaggaaaactaaaacaggctgaagacaatatcatcatttaattgcaatccaagacaaaaaanaacaaanaggatatctataaatctagaaactacaagtattgtacctcaatgttgtgttatctacatcagaggatgaaatcaagaatattaa

SEQ ID NO: 46955 - DNA, 450 bp, Glycine max
  unsure (1)..(450): unsure at all n locations
ntctcaaaatccttatctatctacccctctattaactaaattaacttccttaaaaataattacggatgaaaataacgcaacagataatcaaacatcaaacataattactaataatatatagatatatcagggtgttacagagactaaagtagtctcggtgttctttcactaagatgtgagcacgcttagcatagaagcaaacctccaaaccgatcagagcagcacatactttttttttgaagaanaacaatgtgtctactggagaaggaaagcatgctgatagaactttctcacaaccacaaatgagatttaggatattagcatttcgtttctaaatgatcatttagaggaaagactgggtccaactganatagaagaaaatcactcacagtgtataaatcttacacaggcaagtgtttcatcctaattccgaaccatagatatgttatg

SEQ ID NO: 46956 - DNA, 463 bp, Glycine max
  unsure (1)..(463): unsure at all n locations
agcttatgcgcatacttctttacgaacgttcacttgcacaagacattctattaactaagaaaaatgcacccatatacaatcaaggcaccttcgttacctaattatttacatgtacttccaaggtgtatttgttacctacatcacacgcatttcctttgctaaatttacatacatgcatactcaaagcactgtggctatcaaaaattgcatacgtgcacattctggtatttctaatacctatacatacacaaacttcatgatgaatcttgactatctacacaataaggggctacatttcatgctcttttcaagtgtttttttttactacctagagccgcatgcaaattcaagtatattctcttttgccgactaaaattgtattcaaattagaagggtattttggaaagtatcttctctacataacatgcaacatatcatatattttngtgagacattttgacta

SEQ ID NO: 46957 - DNA, 336 bp, Glycine max
gatcatagggctaccatgaacaagaagcctgtgacaaacgaccaaatgatccactagctaagcgatatccatactcagacagtaccattccttctcattacgcaccatcctaccgatcaataacacccactcatccacataggtcgtacctacctcaaccatagaactcatatgctgcacattcaatgcctgacaccatctttaatacatacaaaaacaacaatcatggaacgaatattccagagtgaaagcatgtataattcaccccaattccggtgagggatgctaacttactcccatatctactcaataaagcaatggtagccataagtccta

SEQ ID NO: 46958 - DNA, 426 bp, Glycine max
  unsure (1)..(426): unsure at all n locations
agcttgcatatagatctttcactataccactgatcctgcanaatatagttaactaattgggctggatttatcacattatataacagtattttacacaaaatgtacaacatctcagttactgattaatgagagaataaagacataaatcttaataatttaaattataatttgcctacgtaataaatattatttgatattttcatcaataatttaagactttgcttacttttccctctaaattaagaactcattctaaaagtcaaaaccgaattggttaattaaagatttataacatcaaatacgttttttttttataaccaaaacgaaccttattatgagaaaatgagaagccaataatagcacaagaaatggcttgctaaccttgttggngttaaaagaaagagtaagtgaagtgaataatataac

SEQ ID NO: 46959 - DNA, 420 bp, Glycine max
  unsure (1)..(420): unsure at all n locations
tgtgaactataccttcgaccgaacacgggcgtgtttctgtctatgcccggattcaaggcgggctgcagcaccggctccgcttccctaactgtactggaggcggntgcggtggctttatcctctatggttttctggagttttaacatgacctctgagatggaagccatttgatcttttaaggccgatagatcggccttcatctgttcctgcacgccctcttcattatccatttttctggatcgagtgttataggggtgccttggtgttttcttagttatgatgaaattcctaaagaaataaacaacggtgagtatgccaccaaaacgtgagtatgcaaatggatgatcggagcacttggatccaccctaagattnttagataacgcaatgagtccagaacttctcattntataaaaagaac

SEQ ID NO: 46960 - DNA, 477 bp, Glycine max
  unsure (1)..(477): unsure at all n locations
tctacttatgtggcagggcgggcttccttcaccttcttgtctccaacgcgttctctgaccattgttcttccttcccgcgatgcttgttttcatgtccgcctgagtgggcttatagcctaaaccatatgtcccacgattgccttgggtatttatcaagctagttatgccgccattcttttttcctaaacccatcccgggttcataaccgttccccaacataactcgggccatcattaccgctgcatcggacagacaaagctgcccanagagggagtccacggatgaaatgctgaccacctcanaagactggaaagcagtttctaacgattcttctgcggcttccacataaggcatggaggatgggcaacttaccaagatatcttcctcgcctgacacgatgaccaagtgcccctccactacgaatntcagcttttggtggagtgtagaaggcacaactctcactgagtggatccaccg

SEQ ID NO: 46961 - DNA, 533 bp, Glycine max
  unsure (1)..(533): unsure at all n locations
tacgtatgtacccctcgaangccccnnnaagacgtcgcacagccgggatccttagagtnnanttgatgcatgtaancttttatatgacgtctctctataagaagttgttaggactaatatcaagatgaccctcttccatctcaataaacttcctcatgccgaccacccactccaactttcatgtttctgttattcattaatgattcgcttcttatttcgttatttgacaatctcacaagctttagattctattgtaacatactaaacaattgtggtaactaatttgtttcttaatgataatcctacatcatctgaaatattaaaaccatgttttagaacatatcttcatatatatgagactgcgttacgaaactcacaagactcatctattttgtactactcatttaaatctcccattctctcgaaatttattcaaaatttatcctattttggataacaataaaagccatgttgatgcatactactattcatacaatgtctacgtgttatcaacctttacgatcatatatacg

SEQ ID NO: 46962 - DNA, 433 bp, Glycine max
  unsure (1)..(433): unsure at all n locations
tcacattctatacaaagtcaagtccattgcgtttgttacantattctgcaccaacagaataatgcacaagttctaagtaacagatacaagtgcatgatgtatagtgttaaacaaatagagacattgagaccgagtctaacctgcatcttctgtggtgaaacacaagggaggtgtaattctgaagacatttccatagtaaccacccttaccaataagtactcctagttctgtagtaattcagaatgaccggttagtaataatatagaagataactatagctaggatcaaaatatgtgtctagactagagggatatggatattacctttcatttggtccattacatgcaatgtttcattttttgctggagttgtaagttcacgatcagtgacaagttcaactcctagcatcaggcctctttctctgacatcacca

SEQ ID NO: 46963 - DNA, 526 bp, Glycine max
  unsure (1)..(526): unsure at all n locations
tatagtttgtgtaatatgaataaacattccttttatgtaattatganattatatattgttatttatcaaagtgagannnnnaacctcgtcgacccgagattcttatattanctgatgtntgnnanttgaactaatagttattataaggnnggtttattntttattattatatttctagttttttcttatctatttccataattnntctcaacttccgacatatgcatttgggtgctacatgctcttataaatgtggtgctatattgcatttaattaatgaggataatcaattaagtatactatgcttggatttctagctggtttaggttaacaattgtactattaatgtgtttacgggcttaaatttttaaaaaaggtgttgactgcatggaatgagtatatagaatacttatatgatcttatctgagttaaactaactttcagaacataagcatgtcttttttttaaatggtataaagcatgctttttgatgacaacgcatctatattaatctgtttgaaaactt

SEQ ID NO: 46964 - DNA, 366 bp, Glycine max
tacaagatgtctctatatataacactaataagactcaagttttacaaaccaagcgatgtgggacaaaggaattacttacagtgctttctttttgctatttgttagttaactgatattctaactactgtagttagtaggtagtctgttgtcaattgatagtctagttagttagttgacagttacgttagttggtagttatccaactatatattcatccttgtaatcagtttagagttgggttgaataatatcagttttctcaatctcaaacttctttctctttctctctcaaattctctcaagtcttttatggtatcacaacttaagtcaaaaccttttttctgttcatggcttccgcattgattct

SEQ ID NO: 46965 - DNA, 152 bp, Glycine max
aaagatttatagtattgagtattataataatgtaatttctattataagaagaatgaaggaatttattaaagatgtaaatgatatagaataaaataaattttataataatggtgtgtatagagatattattaataatgttaaatttgtgttat

SEQ ID NO: 46966 - DNA, 624 bp, Glycine max
  unsure (1)..(624): unsure at all n locations
aatactgtatctactcgatgctgtatgtgtaactcggggtgtntggtgtangtanatagatttgtagtatgtgactgaggacgccttgaacctctgaagaccccnnnnacgagccgacctcgcacgcatgcaagcttgantaatntntaccgaantggtatatatttatcagtgttaacctgagacgtacctaactagctgagctcctgacagtctaccaataatagaactaagtccatacagcaggacgcttgtgtggcgtgtggtcaactatgaaacttgattgcgatctagaaatgagctccggtaatcgattaccaaggatgtgtaatcgatttcagggctttaatatggaaacaggaagctaaaatggcctctggtaatcgattaccaatggggtgtaatcgattacatagggtgattgggcactggtaatcgaataccatgttggtgtaatcgaatacacagtgctacctgtcactggtaatctattaccatatatgtgatatcgattacacaatgcaaatggtatattttcatgtgctaaagcttgtcatatcgatgttgtgctctcggtaaatcattacagacttttggtactcagatcaccatgagaggagactn

SEQ ID NO: 46967 - DNA, 565 bp, Glycine max
  unsure (1)..(565): unsure at all n locations
tatataaatttctatatagctattattaatagaaatctgagtatgttcaatataatatacaattntccccnncccacacctgccgactctcgctagcatgggtaatattaattatacagtttaaggtatgttctaggaanaatggagcgtttgttcattcagtgtaaagaatgttcttctgaaccgctttctncatgcacacatgccactcaataaaatgtgagtttggaatgtaccattagaaaatctacctaacacgtaaatcacatgtatagtgctcttacagcgaaatttgtctcacgttgaaaaataatattctgaccctaaacacttattattatgtcatcaaaaagacgttggcacacctggtttaacatatggatcctttaattatgtctgaggattgattctctatagaatatgacatcataactgaaatgattatttcgtctccagatgagttgatatgatataatcatacataaataaatagttgggtataaataatacacaacaatatctactcttgacaaataaaaaatttgatatgttttgtcattcatag

SEQ ID NO: 46968 - DNA, 592 bp, Glycine max
  unsure (1)..(592): unsure at all n locations
gctcttacagccatcgtagtgtcntgctancttactctnnntcntntaatgctgtnnnntntnnnntnnnnnnnntntnnttgtgatgcngctcgataccccatgcatanancngacactatataatacttagactccatccaatngccatatacaagcatgtattctctcatagtttatatatatatagatacaacatgttttatcattctaatattgcagtatattcgtttaactaatctcatgtactattgtgttttatgattgagagaaaaaacgtaggccatgtccaatgggacatcacagctacccaaaatagtagagcaagacaatgacaaccgcgatcacatgttcttaaagagaaaaaagaggatattaattccatgttggatcataacctattaaaatcaagaaaaatttatataatgtaactcccgatagaaaaagtagagcactggtagccggatcttcacattggatgagcaaatcctatctaatttcattgcaacactctaggagaacctgctcatgcgtctgtggacactcgtttacagtaagattcaaagaatttcaatcatgctaactcattatg

SEQ ID NO: 46969 - DNA, 618 bp, Glycine max
  unsure (1)..(618): unsure at all n locations
cgttgttagtggtggactgacagttgatatgagatcgactatgtgaataagngangtgngtggtgactgtcgacgcgatctggcgtgatgcgttctnnnnnncttcgtcccgcacgcacgcgcgctgtcttataagtattatatgacttttgaagtgttgattaactttacttagacctccgatgaccacagagtgcaaacttaaccttccagcgctcaaagcgcgaatctnccacacgcataacagatcattctgactgtctaacgctaaggtaaacactaccattcatggttaacaggtgtacgtgagcagttgcgacatatagacatcacatgacatgatctcatagacgctataacagagtggggatgtgtaactcattcggacatggcaatagcaacaagctgtcaacagatgggtcacaaataatcatcacacagcagagacctagctagactacccatcatatctggcaatacccgatacgcactagatataagagagaaagaacttctcccaagcctgaatattcgaagacccactcgtagccacgcacttcacgactccaaagatgctctcctttcgcgattaggagcaaaaaagatggccagaggttg

SEQ ID NO: 46970 - DNA, 431 bp, Glycine max
tgaagcttcctttaccccattatcttattcaagctattctaagcacaccatgctacgggatccatgagtctagcagcccccaagcctacattgttggattgttgctctcacttgtgcgattttgttcacttcctacaagaaagtgcactatcccttgattctttggctctccatcgctgtattttaacgcactacctatccatgtttggcaaagttcgagaggcacttcatgtttgattagatgaatatggggatgcaaggatggccatgagcctatctctgattctgagatgaatgggcatgacacattatccctattccccatgttttttcatgtctaaacatgcgcccaccacgagttcactgatatgcctcaattcaagaataaagtgatcaggataatgatccagatgatgatgatgatctaagtc

SEQ ID NO: 46971 - DNA, 600 bp, Glycine max
  unsure (1)..(600): unsure at all n locations
gacataacgcgtttgaggactattatatagttatatatgatgtatgaagtgtgaggagaataatcgtgancctttgangccccnnnnacgcgacccactacagcgacctgctgcatgcaatctatagagaaattcatatggttctcaattttctcacggaggtcacactcaagtgcattatatatcgagacgctccatattgaacatcgtaagctctcagaaattacattgcgcataacttttcactttgatagccgatttaagtgcataatatattcgagacgctcgaaatgtaacaaagggagctctaaagaaattgaaataaccattacttttcactaggaggtccgattcacgcgcataattatattgagaggctgaatattgaacatcggtagctctcgatatatttatatggtcataactttttgctctggaggtcatattatngggcttattatattgagatgctctaattgatcaacggaagctcttcagaaatccatatggtcttactttatactcgggtgtcagattcgtgagcattaaattatcgaggtcctcagaattatacatcggaagctctccggaaatgttacg

SEQ ID NO: 46972 - DNA, 351 bp, Glycine max
  unsure (1)..(351): unsure at all n locations
ntgcattggaatngcgaaagccncactccatcattaggatttgtacctgacatctcaaacaaacaaatcaaacgtaacaagacaattatagttgttgtttgaatacctcacccactcaagtgtatcacacaattatggcttttctctaatgaaacactcttgccttttaccactctaattccccttgagttcttaagcaattcaagagattatggccacaacaaagaacaattcaccaatatgtgtcaggtaaggctagagagacaaggaaaaggttaaccaagaaaaaggctaacaatgtattggaataatattggatgatgtccattangaaatgtcggctggaaaata

SEQ ID NO: 46973 - DNA, 346 bp, Glycine max
tactatctttgtatgacaacactctgagcgcaccaactaccatgtatgtttatccaccctaaatggttagtattgtatgagtaattatcgcttatggattactatttaatattcggactcagtatgacctgttcagtctaataggcctgtagtatttgacacctatattgctgtatatgagaaagcttatttacacgttgtgtgaatctcaccagatgtagaaggtaccttttacttttttggtttcgtagaagggatctgttaatgctgatcatgaccacatactttcacacgcatgtgggacttatacaattgacaaaatgtctaattcattgctcagccattt

SEQ ID NO: 46974 - DNA, 446 bp, Glycine max
  unsure (1)..(446): unsure at all n locations
tgcctanaggccagtgtggcagtcaggtaatcaattcatcttttccatttccaattttctcttcaatgggttgaatagagtgcgtgaattgtcgtaaagtctctggtatcagtctctgattcttagggaaaaaaaagaaaaatctaattagttaattaatcattgattcactaattaatggttaattaatgcgtaggtgaaaatacacaagttacttctgcaatcgaaacaacggacatggaagaaggaggaagcggatttgtttttcgtcccatcttatgtgaaatgtgcgcgaatgatgggtggccttaacgacaaagaaattaacagcacctatgtcaaagtaattaattcattaattagttataaatctcattgcctctctcgaaattgagattgctatgctctgtattaatcacaactaataatagaaaatgtaacttctc

SEQ ID NO: 46975 - DNA, 363 bp, Glycine max
tccacctctaaagactggaaagcggtttctaatgactcctctactgcctacacattatgcatcacgatgggcagctcaccaagatgtgttcctcgcctgatacgatgaccagatgcccttccactacgaatttcaacttttggtggtggtaaagggaacaacttcccctgtgtggatcctcggacaccccaacagacagctgtaaggggggttaatgtccattatttggaaggtaacttggcatctgtgagggcctatctgtactgggaggtcgatcttgcccctaacctctcggcgggtgccgtcgaaagcacgaaccaccattgaactccgctttaggtgggaggcattgaatggtatttc

SEQ ID NO: 46976 - DNA, 487 bp, Glycine max
  unsure (1)..(487): unsure at all n locations
actatgaaactcaacttaagcttagtcttattgttgtcatttgctccccctatctctaacacaactaccatgaaagactcttccttacattttgttcaggatcaaatggtgggcgaggagtcgatgctccatctcaaggttgagnttacttgngagtggtggatacccaatgtgataaaaaatgttaataacttcctgcgtacctttgttatatgttgacgtttgttgacttacgcctcttgtgtagttttcacatcgaagtaggtgttagagataacttctatgagtctagaacctttttcttttgtatgtattcgatctgggtaggcctaggctctagaatttttgtttatgtgtatattcaggcatctactttgtcctcatatacagttgaaccttgaggctgtatacgctactttacttgnggaaacacttatgcatatttatatattctgnaattttatatgtttagttcatttattccact

SEQ ID NO: 46977 - DNA, 614 bp, Glycine max
  unsure (1)..(614): unsure at all n locations
ctataacacgtctntacacacagtggagtgagagtgacttngatgtgtatantaaatagcntctcattanttcgcgcacactgtttgagtggactccccnnnncccgctatctctanccncgacctgcatgcattcnagcttatgcttatngcgtgaagacatggtgccttgtgcaacggatgtgcttagagtatggacaactaaataaaacactgagtcttctttgaccatctctcacatgagacttaataccccttttggtcattactaaacaaactgcattattaatctctatcataagcacttatcctatactaaattgcagagatagaattgaaataagaaatgggatagaaaagttgggttgccttccagatagcgctctcttaacagaactatgctcgatgcatcttcatgttatcttgggtcatagtggtaaacagctttcaatctttccatagctccaccatgatattgcttcaacctttgtctattcactactcatgtcttgtcaagtagcttatatagaggatcatacatccctgctgctccatagtggtagacattcttgatggtaatgggccacaacactcccattaagcgttccaagaag

SEQ ID NO: 46978 - DNA, 402 bp, Glycine max
  unsure (1)..(402): unsure at all n locations
ctgcgaaatgggttgtttgtataatagccacccccacagactagttgggcctaatcaaggcccatcctttccttctgattagtcacattatatattagtatagttagcgagttagttagaatcattttgtacaaataagaatttagaaacttcttgcgtaagntttaagatcaaactcttttctctctttttctctcaaatgttcttcatctttcttcctctcttaaactctgttcttcctttttcttgctcaaatttcattgttcttccactggtgatgactatggaaggctaaacaactaagcaatccacggatccaatccaagcaatgaggaatttgagttctgantaagtatttcaaattctatgtgaatgttcatcttcttctccaattctattttc

SEQ ID NO: 46979 - DNA, 291 bp, Glycine max
ttggccacttcgacttttgagcagagagattgattaaattttatatacatctttacaatgttactaaaaaagaaccatgcgatgttgattataggaaaaaatgatacttatcatacatgttggaatgaagattattgtccacacacaaataagtgtgaaggaagggtgcttgttatctggctcaaaatttgttctataattggtacctattatataccaatcttaggtgtgaaatttcaattgaaaattagtgtgaaagatagtggtcaaactagaggtttcttaagtctt

SEQ ID NO: 46980 - DNA, 448 bp, Glycine max
  unsure (1)..(448): unsure at all n locations
nttacttatttgttttcatactcaattacttacatttactggttctttaattagaataaaaaatacctttgttttcaattcatgacacttaattctttntacaaaaacttgcattttgaatgactcttttccaagtaaaacaagttccctgagttcaatactcggttcattccgttttaatcatttacttgacgaccaggtgcacttgccagtatgaattcacattcacaaaaaataagtagtagtaccaggatgtgaatagctggttacttcacccctaagttatttgggggcctagacaagccgagccaaggcctagaaaaatgcctaaaatgaccttcttgcccctcttcttgggtattntccgcatccttgaccanaacattgaatgatccttcgtcttgcatggtaactggtgtcaacagcttaatttggtagcaggatcaca

SEQ ID NO: 46981 - DNA, 315 bp, Glycine max
  unsure (1)..(315): unsure at all n locations
tctgctgaccaccatacaaacctttgcccttccatgcagcaacctggagcaattgagcagcctgaagcttatgctgcaaatatgtacaatatacctcctcaacctcagtagctaaaccaaccacagcagaacaattatgaccttgtcagcaacagatacaaccctggatggaggaatcaccctaacctcagatggtccagccctcagcaacaacaatagcagcctgctccttccttccnaaatgctgctggcccaagcagaccatacattcttccaccaatccaacaacagcaacaaccccagaaacagtcaaca

SEQ ID NO: 46982 - DNA, 438 bp, Glycine max
  unsure (1)..(438): unsure at all n locations
tcttatacgacgctcatcatggtggtgaagatctttctttcatggaatattccctagcggatggcgcctactctcacctattctcctttgtcttccgctgcatctccatggtggaaaattaccattaaaggacctcattgaagctcaaagatccagcctccatagaagccccaagcaagcttccatcaagtggtaataagagcacaagagcttcaagtaggtgctccttanacctccattaatagtttttctttaccttctcttccatatgtgtttcttcattattctccatgtatctcctcacatgtctagttctaaatgtttttaacatgattctctagagtttccaccgattaaacttgctatacaagctagatttgaatntctatggttcaaatttcttgttcttgttcttgaaccatgaattgtgttaagttt

SEQ ID NO: 46983 - DNA, 337 bp, Glycine max
  unsure (1)..(337): unsure at all n locations
agtgatctgaggctgcagcttattaattcatacttttatattctctgctcaaaaacttaaatgatggttaattaacaattattctttcattntaggaaatttagaagagaataataacaatattcctttataatttaacccccaaaatatactcataattaacagttatcaaccatgatctaaatatttaagtcaaacaaatatggaaataatcattctgatataatagattctgaaacataccatgatagagagaataaaatgttggaccggtggcctcaataaggtaggagggataagcttataatgcagaagaagcagcaatcaatttaataat

SEQ ID NO: 46984 - DNA, 450 bp, Glycine max
  unsure (1)..(450): unsure at all n locations
tctncacttgtatcttgngcctaaattcaaanagtatggttatcactngnngaagagcttccttggccttctttgttctagcccttgtcatacgtcctccaagttcttctaaaggttccttgcccttagtccttaccatgtcctcatcactctctccctcttcaaaaggatttatgctcaaatcggcttctccatctgcatcaaaaagagttaattcaaacacattaaatgtagtactcacattatactcaccgggcaattcaatcttgaatgcattgtcatttaccctttcaagtacttgaaatggaccatcccctcttggttgaagcttggattactttgctccagaaacctctcctttctcatgtgaacccaaacccaatctccgggttggaaaaataaccttttgcgcccctttgttgcttgctagcatagctctcattcctcttt

SEQ ID NO: 46985 - DNA, 378 bp, Glycine max
tctgcatgctatcaaggctttcgtcttacagacagcaatatagaatgtttatacggataatactcgggtttgtccgcccgttagcagtgactcatatttcagtatgacatatcttgtgagcgcggaagatgacgtaaatctccgcgtgccaaagggcttgtcggccgtgattgactaatgacgtataagacgtcgatagtctctgtgtgctatcaggcattaccgtcttactcgacaccagaaaagaatgtttatacggttaaccacgtcggtattttcggccgtcagcgtgactcaaatgtcaatatgacagatcttgtgagcgcggataatgacgtatatctctgcgtgaaacttggcttgtcggccgcaattgac

SEQ ID NO: 46986 - DNA, 188 bp, Glycine max
cgcctgaattgtaccatggcgtgcatagttatgaccatttgaatatatcgagagctctcgttgttcaattccgagcgtctctatatatgatgcgcctggatctgacctccgggtggaacgctatgaccatttgaatttctccagagcttccattgttcaagttcgagcgtctctatatattgtgcgcc

SEQ ID NO: 46987 - DNA, 560 bp, Glycine max
  unsure (1)..(560): unsure at all n locations
tgatatcnattggnnccntatgaanancngacanattgagacctttggatctactcgcnaatctctactctccacctacttgttccgggtgatatagtaacccgcaccctattttactattataatagaagggaaatctccgatcttagaaaaggtaagacagcacatcttctattcctatagacagcaaatcagaatagaaggataattccccaatcaatgagtgcgagaaacgctattagactagatagaaaattctccatcaaagaatgggagacagttataacgtgaagaacaatatagtaagacatctcctgatcactgatcgaaggaaaacataagaaatgngcagaaaggtctttggaccggacaatatctgatcaatacagtagttgtcaccaattgataaaatagaaggattggaaacctccaccttaaatggtcttctccctttgattaccaaccataatcccgtgcgctagcgagcttttctgctcgctaattatgaaatagccaacagaaaagatcatatgcctaacacacacatataccgtaaaaag

SEQ ID NO: 46988 - DNA, 485 bp, Glycine max
  unsure (1)..(485): unsure at all n locations
gcacgcaagctcgtagctattgtgtaataatacttctctatttcggntttgtcaatttaatacgaaacgataaatgacacactgcctaataattataatggctaagtctatttattcgtggaaatcaaagcggcaaactatatattgtggcctcatcacatcggatatgtgagtgtcatcatgcatgccattatcgaaaaaagtgtatgttggaaactttgagtcttcatatatatagatgtattttagctgacaagataagctgatgaaagttagggggaaagaagagaatatataggaagagggtgagggaagaagagagaactttcatatttcttaaattgataaaccagaagagggagaattcattttcactgttagattgcaaagtagtgatagtgtgtgcttgacatacacctaagtacttcaaatccatgtccaatggaaaatattaattcgtatatctctgatcttcttacaacata

SEQ ID NO: 46989 - DNA, 405 bp, Glycine max
  unsure (1)..(405): unsure at all n locations
gtggggtgaagctatgtcctatacccaaattctattatgatatcaaagtcaatcctagatccactattgggtcacccatacttgtctatgctctatatgtctactcctaggcatgaagtgttgttactagggcacccatatttgtccacactccagatgttcagtcctaagcatgagggagggtgttgaaatctcgcatcaaccagagatatgaccaagtccttataaagctcgggaaataatcaccttataagtcgattntgtatggttgaggtcctaagcccaaaatctaagacttacatgttagttaggatagttgattgaagaaataaggcatctcgcctataaatagggaggagagagagatccattgtctaaacttgagagaatagtgacctttgggca

SEQ ID NO: 46990 - DNA, 468 bp, Glycine max
  unsure (1)..(468): unsure at all n locations
tgcaagctatgctatattaagctaaactttagtatgctacttgagctgagtctagtcttacatgaaggatctgctgacgaaactcanctnnctcagtctaaacctaagagggttgtctaaatcgggtgtagtcttacatgatggatctgcggacgaatgttggatatcttancctgatgaagggatcataggtgtttagtaaatttaagctatagcatagaacacaagagcacgattgattagagaaatatatttctatgcatcagctcgattgttaaaaagacctaacatatctacctactgttgtcattttatttaccttgcatttgataggttttagcatacaagtgtagtttaaattttggtgaatatatcacttatacatgttctctcaacaatgcttcaattctgaacttaattcaagcttacattagttccctatggtcattctcaaattatctgtttaat

SEQ ID NO: 46991 - DNA, 446 bp, Glycine max
  unsure (1)..(446): unsure at all n locations
tctcaaagaggtgaacttagctattagaggagtgtgtgtagtttagctctagcttctcaaggaagctacctaggctataaatagaagcatgtgtaacacttgttgtaactttgatgaatgagaaacttgtgagaaacacttcaaagttaaacttttctccccctttttctccttcaattttgtgctcccccctctctctcattcttttcatccattgaagcttcgtctctaagcttcttatccaaggcattctcttggtggtgaagctcctccttccatggcttattccctagtggatggcgcctnctttcacattatgtcctttatcttccgctgcatctccatggtagagaatcaccatngaaggacctcattgaagctcanagatctagcctccatagaagcttctcaagcaaacttccatcacaagctccttcttgacctct

SEQ ID NO: 46992 - DNA, 426 bp, Glycine max
  unsure (1)..(426): unsure at all n locations
tggtttgcanttnttcttatcagtgcatggcaatatattcagggataaatatcaatgattgttttgcactaactcagatcttagataagtagccttctttattatatttggccataatcatatggcagtttaaagaaattgaaaatgctaattggcctgtctgttgtggttgaaagtgataaaaggatagatccatgattgctttcctcatgcactatagatggattcttgttgaagtctataaataaagtattatatcaaagatgattgttgctttgatcacattttatggttcctaagatatacaagaaaatatgtagntacgaattatttgagacttagttaaatattttactgtgctctgtagaagtctttatacatctctcaaatcttttggactggtagaggtaattccacgaattacct

SEQ ID NO: 46993 - DNA, 458 bp, Glycine max
  unsure (1)..(458): unsure at all n locations
ngtagacaatgttagagataacttgtcagttagggaacccatatgctaanggacaagtgnttgtgctcttattgcaggattggcgtgaatggttgacacgtgtctcagagtgccatgtaggatgtcacatgtattttgtgggtcttggacagtacataagctccctaagctctgagccggcttgcaagagaaagagatggtccaatgcccaaggagattgtcccctgtcgagggagtctgtctgatgtccgaggtagtagtcttaacaagtagaggatgacgagtttgtcgagcccccaagtgtggatgaatattgtccagtgtcaagtgtggtaacctcaacaagtgtgagagaattgcaggtcaatgtagcttgccaagcccccgagcttggacaagtgttgtctgggcttgttttgtcaagttgtccgtgatgggcatgtctttggtgtgtccag

SEQ ID NO: 46994 - DNA, 467 bp, Glycine max
  unsure (1)..(467): unsure at all n locations
agctntgtagcagatgccactctactcatagtttttgaaagatatgttgtcaaagaagcacaaatacattcactatgagaatatcattgtggaatgcactgtagcgctgcgatacaaaagatccttccaccaagacacaaggaccctataagtgtgactattccttgttcaataggtgaagtcacatagagaaaggctctcattgactngngagccaatatcaacttaattccactctccatgtgtagaacggtgagagagttggaaatcatgcccaccataatgactttacagcttgctgatcgatccatcacaaggtcttacagggtaattgaagacgttctgataagagttaagcatatggtctctccagctgacttcgtggtcatggatatggaggaagaccatgacgttcccatcattgtaggatggcccttatgttaactgcaagttgagtagttgacatg

SEQ ID NO: 46995 - DNA, 461 bp, Glycine max
tgttgtaggttaactggattgttgttcgtccgaatccaaaatgggaggagtctctaaatgatctcaggttccaaggtattgatctcattaatgaaaccatttttaattttctatttaaacttacattgtagtgtcttaatacaagggaacaagatacatgtagttatgaaaagggaacacttggatggttgggcgtcctagttgaaggaagaatcacctatttgatgaacaacttaaaggtagttgtcagtacgagccaatataaagtttatgatcacacctacaagctatggtccattggtggtacccttatcatagagcaacctattcaaaatgtccccatgaatatcagaaggatatgttaattggtatgttttcatcaattgcaagcaagtcaatattatgtgttctcactctatgatgtttatgctaatgattaattgagtgccttgaacagatgt

SEQ ID NO: 46996 - DNA, 360 bp, Glycine max
  unsure (1)..(360): unsure at all n locations
taatatattttgggtttatattaatatactgccattttnntttttctttataattcgagcttttatttgtgatttgtattttggtaacaaagcaaatatnttaagtctattaccatagatccattatatgttgaaatgtcagggagagttgaaaactcattcaatataaacttacgaagacaatattcataataaataaactatctattaatacgataatactttttaatcacatatcatatcttaatttgaataaagaagatatgaaacatattaataattaccatcttagtgtaacaataacataaaaatatattaacacaaatccattttctggattactcggagaagtaagccttg

SEQ ID NO: 46997 - DNA, 616 bp, Glycine max
  unsure (1)..(616): unsure at all n locations
caagttctgagtcatactggcgtgtgaactgggangttgtganacagagttatatggtgcattgtgtaattgtgatccgtcacatatgtgctcnnnnnnnccgtctcctctcgacccctcctgaagcatgctattttattacagatagaagtttattatagattatatgctataatcattattgagtngaaataacagtagcttcatcttgtgaagcactcatgcagnnctccgcggtctgacaatatgatttcagagtctaacctaacgtgtaaaagtgagatttttatagattattagactgcagtgcgcttaggataaagtgattttgtatttgtgttaacattgaaccggtacaaactacgtagtgtcccttttgaacacccttgcttttatgaactaatatgaagtgtgttccacaaggaatcttaaagcgacaaataacatgtaatttcagtaattgatctactatntcgtttgtaattcgagagactaataatatccaataagtgtgagagactaacactctataacaacatatataattgtctgcgaataatgtgtcggacacctcttatgagtattcattctaacgagagaatgggagagtggaaag

SEQ ID NO: 46998 - DNA, 487 bp, Glycine max
ctattacggacctatgaaactcagcttccataataagggtgcatacgagggactcctagtcagattgtggttagccaaaaaaggtaaagtgttggagtgactcacaagttgcatctggaaaaattaatggagagtatcaagtcaataagcctcaacttttgatatagtatcatgatttcatgagtttgaaagattattttgtagaagtacaagtaaggcacattggtagagattactgaggaagggctgacgagtcggctagtttagcaagtgatcgaaagcttggtcagttgagaacatagatacatgaaacattactgaaaccaagtactcactcaaaccaattcatgaatgtctcatctaaaaagaaggagtggatggtcgacatattcgattaccttactaaagtaacctcccagaaaatgccttggaagccaaagtcttaagaactaaagaagcaagatatgtcataatagtggaatacctt

SEQ ID NO: 46999 - DNA, 307 bp, Glycine max
  unsure (1)..(307): unsure at all n locations
agcttaaaaatataagctnttataaatcaagtgattaagtggtgattaagtaatcatcaattccacaacataaggggagtatgaaatgatgaacgcaatatatcttgcatatacattgcttgtatcttgatttatggaattaaattgtcatcataaaaaagggggagattgtagaagcaaagactttgcctttgatattttgatgatgccatatgatcgtgatggtttaatgccttatgaaaatgtgcttctcaagtttaattcaagacaaanattcaagaatacaagatacaacatcaagaagatc

SEQ ID NO: 47000 - DNA, 465 bp, Glycine max
  unsure (1)..(465): unsure at all n locations
taatgtgacattngatgtatatgcatggaanatcttcgtgagggcttattttgaacatggacgatagagtggcaagagcatcaaccatttggttttcctctctaggaatgtgatgaaatgatatatcatcaaagagttccatcaattccttgatgtaagcctgataaggtatcaacttatggtctttggtttcccattcacctttcaattgatgaattaccaatgctcaatctccatacactttgagcaacttaaccctaaagtcgaatgctactcggattcctagggtgcatgcttcgtactctgccatattatttgtataatcgaaacataatctagccgtgaaaggcaacattgtttgtttggaaaaccaacactgccccaattccatgacccaatgcattagatgcaccaccaaaccatacaatccactcctcgtcagagaattctggatgcataaactga

SEQ ID NO: 47001 - DNA, 321 bp, Glycine max
  unsure (1)..(321): unsure at all n locations
gctttggtgctgtaaaanactatataacagcttctaagttctagtttagcggacgccctctctccctcgcgggagactctctcttctctcctctctctctttatgattcggtttagcgttagtctctcttctctttctcttttattttcgttgttttttcaattccagttcagacttttaggtttatcaatacaatttcattctctatttgattaatggaaagctaagtccgcagcgttgttttcccttgaggatcaagcacagttctctttgaggttctattattattgataaatgctggggtagttttcctcttcacta

SEQ ID NO: 47002 - DNA, 258 bp, Glycine max
  unsure (1)..(258): unsure at all n locations
agcttgcctcccatctcgacttctggatgaatcttctggaaggcccaagtgggcatggttgttattcgcacccacattattactaanccacccgccctgcctttttttggtgattctttcttcgaaagatacggaaacttacgaatttcgtaacgatacttggtttctttccggaatgttacggaaccttgtggattacatattcatccccttttggactacggaatgttacggaacctcactaattgtgcaacgatg

SEQ ID NO: 47003 - DNA, 392 bp, Glycine max
  unsure (1)..(392): unsure at all n locations
tnggtttgggcaatagcaccccaaccgacgtcctctaggtcttctgacccccgcgacatatctgcaagtaccactctgtggtcaacgaataaaagcaggaagtttcacccttctatacttcctcatctcaagcttgtaggattatggggtatccatcacatgtggtactatgtggcggtcgggcgatggtgcacaacaagttttccacatccacaaatcgcgcataaacccaccatcccctgttgcccacctccaactgagctcacgtactcccacgtagcccatatccttgtttctctcaacaccgggtccccatcaatactaccaagcttncccaacatccaagtaatacaaaattcaaacagcacaagctatcacagccaagcaaaaca

SEQ ID NO: 47004 - DNA, 229 bp, Glycine max
agacacctgcggctgcagcttgagtacctaaaacaaactaactctctactcttatgtcagacggactcctgtgatatacccagacgcttgatgatggaataccgagattctgacaaaatccatacgactttgatttgttactcgcatggctggctcaaccccgtaatatatcaaagcgctccataatgaaagttgaaacgttgagcatctttatacaacacaacttttt

SEQ ID NO: 47005 - DNA, 358 bp, Glycine max
  unsure (1)..(358): unsure at all n locations
tgtcaggtttcacattttacctancccagcccaacttagtcatgagacttgggtttggaaggcatacaccacaataaattatcaagactaggacgtcggcaaaaagaagaatagaggaaattgttagtcttaggaagcataccctccagctacccaatctcaacctgaacaggatattaatacctgcatggaagagagtgatcgccttaagatgctgcttgagtccatgagtaagacttgtggattttgaccttgacaataaaggtaagatgtcatccaaacctttgccttgttttcatgaaattgcattcttgatatggggaacagacacatgaccccttcctgcctcttgttatat

SEQ ID NO: 47006 - DNA, 233 bp, Glycine max
  unsure (1)..(233): unsure at all n locations
cacattctcactctatacacaagtgatctatgatcattctagagaatataattctaacagatattggctctttatgccttggaggaattagacaataacataacgaaatgcactgcgcaaattgcactaaaaccagnggacaactcctaacggtaatgcttctagaatcttgttgacctggctgcaaatctcatcttcattattctgtgtagtcatccaagtatcttggatac

SEQ ID NO: 47007 - DNA, 470 bp, Glycine max
  unsure (1)..(470): unsure at all n locations
agcttgcatgttagagtagtaccacaggaagttgataaaacataattctaatgacacataattgggacattgtactcaactatctttgataactnttcctatcccgaggatatgataatggagcatctcaataacaaataataatggcatatgaaagacataagtgcatgcatgctaataatctaataatttcatgtattaatttgcatatttgataatttgtgattagtaaaatcagatacagntgtaaactttcacactctgactcatgagcaccctcattcccactatttaattgatagatcccctctaacaaactgtctataactatttgtcacttcccttctatcttaaatgagatggctcatcgtctccccccccncccttcatgctctagaggatacaaatttcacataacacccaacttaatgatccatcaatttaaattgagtgggaagacaagtttacaa

SEQ ID NO: 47008 - DNA, 406 bp, Glycine max
  unsure (1)..(406): unsure at all n locations
tcatccgatgcggtgttgtgtgtgatcctgatgccgganacgaatntgcctctggttgtgcttgctgaggattatatctgttagctttgagatgtgctaatcgctccgataaggtctccatctttgcttcaactgtcgctgcaaatttcgcaaacagttcctccattttttccgatgatagagcttttgatctcgtgccttccaccatatgtctgaacttgtgctcaatgaaagcatcaatgatacctagctntcgagggctaaggaacctccacgcttctcgcgttctgtgaaagctcgaaggagctcgtagagagtaagagaaaacgcgagtttagagagaaatcgagagaagaaagaactcgagagagagaaaagaagcttctggaattttctatatcccttc

SEQ ID NO: 47009 - DNA, 413 bp, Glycine max
  unsure (1)..(413): unsure at all n locations
agctntgaccttttgaattgcctgactgttacatcttacttgttgctacccatttcttatagtcgctccccctcttattatgttgtatgttttgtgaatgtttcttggtttggttccttagaattaattctctctctctctctctcaatcttggatcacttatctactttgaactatttttcttgtatgcactgggacagcataacttatgcttgtatctcatgcttcagtctgagttcagtacaagttccatatctttttcattttataatttgcttttgggatgtgcactacagggctctcagtctcagagctaaatgtagcacaggcaaattttgataaagatgagcgtgtgtactggctgggatgattctcactctttttttttgttctcccccccagtatcctggatc

SEQ ID NO: 47010 - DNA, 408 bp, Glycine max
  unsure (1)..(408): unsure at all n locations
tgaacctgctaatcaaaagcccttcttctgagcccaaaatcatttctttaatttatctgatattttggaaacacgtcaatttctgaaatatatactttatgaaaaacgattcttaaaattaattagattgatctcaataatgcagattttaatctaatgccctttgtttgagtttatcttttaaatattaaaagatatgtttaaaaaatgttgcaataattgtgattaatataaataacttaaaagacgtctccaatgctttttccatatttgataacgcacatttaaaatagtttgtaacaaagctgcataaagaaatacttaattnttaataataaataaacaagcagatctcanatctatcagcgactggtatagacatcatacataaagagcagacatactatg

SEQ ID NO: 47011 - DNA, 373 bp, Glycine max
agcttgagtctctccacatggatttgtaggtatgttatggtttccctatttaaattaatgagattgcgctcttcatgctctaatttgggttttttttgtttgatatgtgcttgtttgtgagggtatagatggaaattgtgtgtgattgttgttttccgggatttaaattaatgagctttagctaatgtggagttttttttgttttttgttgttttaatgatttgatatgtggttgattgtgggtttaaattgaaagaaatggtttgttggaaggggaaaaagagattatttgtgtgtttatgttgctgaaagccaatgttaatgggtcatgattatagatagaaggatgtatggcgatatacttgtgtaacta

SEQ ID NO: 47012 - DNA, 364 bp, Glycine max
  unsure (1)..(364): unsure at all n locations
tcaagagatcatccnctggacaacattattggtgatatctctaaaggggtaacaactagacattctcttaaagatttatgctataatatggcttttgtatctatgattgaacctaaaaatataaaagaagccatagtagatgataactggatcattgccatgcaagaagaactgaaccaatttgaaagaaacaatgtgtggaaattagtagaaaaacctgaaaattatcctgtcatatggacaaaatgggtttttagaaataaattagatgaacatggtataattattagaaataaagccaggttagtagcaaaagggtataatcaagaagaaggaagagattatgaagaaacatatgctcctg

SEQ ID NO: 47013 - DNA, 433 bp, Glycine max
  unsure (1)..(433): unsure at all n locations
agctntaggatcaaactctnttctctctnttctctcaattgtcctttgatcttcttcctcttttcacttctattgttccattttcttgcacaaaattccatggcttttccattggtgatgatcatggaaggctaaacacttaatcaatccaaggatccacttcaagcaagattgaatttgagttttggtttagtatttctaatctttgtgaatgttcatctttttcttcaatcctatntntgattttcatgattatgattatacttaggattgaaaacggattaggttatggattgattctattaaacatgaaattgattctaatttcgnttagttctatttcttcatctttgtngttggggtttacattccttcacaatcgcctacaaactattcaatganatacccccttgctatttataagtcaatgaat

SEQ ID NO: 47014 - DNA, 192 bp, Glycine max
tcacttaaagaccccagtaacaattccttcgttccggatcgttaaccgttggatcgactcgaaaattttactggaagtctctatcacataagcctacattgtgaccgttgggatcttctagcaaacatccagaactcattctgcactactctttccacagccaatcacacacaagcagttttctgcacaaag

SEQ ID NO: 47015 - DNA, 422 bp, Glycine max
agcttgcacatcttctcgatcaggttgacaatttaaatctaattgtcccttggcagcttcagccaccgcatggttgtgactccttgaatccaattcattttgcacccgtacctcattctccaatctgtcaactggagttaaatgtcgtaaggtgctatctacttctgattcatctttggtccgccatgataactgatttctctgagcaatctctgcttcacgttcggattgccgcttcttctttcgcatcatcacggttgtaaaccgacgtttaactgtcatgcacacattgcaggtgcatgtgggtttgtgtttgcccttcccacttggtggctggatacagacaatgcaagagcacccacgtctatgccgaggatgttttgtggtgctaacaactgatgtcctgccagagtcacttgcat

SEQ ID NO: 47016 - DNA, 475 bp, Glycine max
  unsure (1)..(475): unsure at all n locations
tctaagcttaagggtaatttgctgcagaggaagcaattcctgtgataaaattgttgttggtttgtgcatcacaagtgccctcataccgtcctgatatggctgaggtaatcaacatattagagctgatccaatgtccttcagaggaattacaatgaattntaagttatcgagattgagacataacacatattttgcaatacctggtgaagaacaatccagtttgattgctttaatgctatacaatagtataaaccatgcaaagaatattcagtcaatttctttcacaacttttgttcgttgtttcagttgttgtgaagtttcactattcattttttcctttntctctttactttngatcatttcaagttgtacctactggattttcttcaccagtttggaagctaatacaatggtgtttcaatcgtactttctttttcttcctacacagcaggaattgcatttctaaacatacatg

SEQ ID NO: 47017 - DNA, 455 bp, Glycine max
ctttgagccaactcaaacgacattatccttttactctaatggctgactgagtcccgacacatatctagactctcgataatgactgtagactgctctcatgcaatcacacgacaatatcttattactcggatgtctgatgtgagtctcgtcatatatcgagacgcttgaaattgaatgtcgaagctctgagccaactcaaacgacaataactttttactccgatgtctaattgagtcccgtaacatatcgagacgctcgatattgaatgctgtagctcttagctcattcaaacgacaatatctttatacacggatgcctgattgagtcccgttatatattgacacgctcgagattgattgttgaatctttgagctcatgcaaacgacaataacactttactcgcatgtctgattgagtccctgacatatcgtacgctcgaattgaatgataagctc

SEQ ID NO: 47018 - DNA, 405 bp, Glycine max
tcaacattcaaattcgagcgtctcgttatattataggactctattatacatccgagtaaaaagctattgtcgtttgaattcgcttagagcttcaacattcaatttcgagcgtctccatatattacgggactaaattagacatccgagtaaaaagatattgtcgtcttaattggctcagagcttctacattcaatttcgagcgtctcgatatatgacgggactcaatcatgcattcgtataaaaagatattgtcgtttgaattggctgacagcttcaacattcacttttgagcgtctcgatatgttacgggactcaatcagacatccgagtaaatagatattgtcgtttgagatggctcacatcttctacattcaatttcaagcgtctcgatatatgaccggactc

SEQ ID NO: 47019 - DNA, 292 bp, Glycine max
  unsure (1)..(292): unsure at all n locations
gcagcatgcaagctncatnnatagnngacacaaattaatnttatgttggtaaagaaacaaaaagcagtcgtaccctattgatggaacaccgagcgactcaagactgcctagcaaccacaattacccctgaaaccccctttctggagctataacgatcacacaaaaaacgccactacaaaatacgcataagacctattagtgaggacacataacacatgccaataccaaatactcataatagcgaagaacagggaagcaaagacctgaactactagtacaagagaggagagag

SEQ ID NO: 47020 - DNA, 438 bp, Glycine max
  unsure (1)..(438): unsure at all n locations
taaggtaagatgggattcataatatgcattcgatcattatttttatcttangctgaatattcgnntaccggtggttgatccatcacgcttgagtcacactaccgattataaggcaacgggaattatggctcctaaccacgaatcttaataataagacctcagaatagaatccactttctagttaaattagtagaaaacgacatgaaatcttcgacactatattgctatataaagnccaactatactatgacagatcaaccctctgattctactcgctcagctagatgtntatgaatatgatcagaagtaggaacgacgtttacctacccacagacaataccaccaaatcgatagaatcacacacactgtttgctacctatcctactataagatatcgaccactgattgacttgaacatatcatatatatatatatata

SEQ ID NO: 47021 - DNA, 429 bp, Glycine max
  unsure (1)..(429): unsure at all n locations
agctagacatctgatgtgtggacatcttgtacttctgaagttatatttcattaactgcgcattatgttgatgcaaattggaagttgaatagtaaaatggttaatttttcttattttcctcctccacactaggggcgtgagatggctaaagttatatatggtttttttggaagaatgggggattgagcanaaaatattttcattaactctagatgatgcttcttccaatgataaaatgcaagactatttgaaggaaagacttttgcatactaatggtttagtaagtggtggtgaattttttcatatctgatgttgtgctcacattttanaccttaaatgtcaagaggagtgaaagtagtcggtcctgcttgtaaaaaaattagtgaaagcattaagtatgttaagggatcagagggagaatgaaagtttt

SEQ ID NO: 47022 - DNA, 409 bp, Glycine max
  unsure (1)..(409): unsure at all n locations
ntatcttcaattcaagaagaaagtgatgaagaagacttgaatgatatagaagagatgatgattctagtttcttcgtaaagaaattcaataaattcctaagaaacaaagaacattaaagaagatcaaacttcataccaaagaaaagaggagaggattcatctttttttccaaagtgttataaatgtaatcaaccagaacatctgagagttgattacccgagtttcaagaaaagaatggaaagatcagagaggaaaaccttcaatgataagaaagcaaataaagcttatgtcacttgngaagataacaatatggattcatccgaagaagaggtaacatcttctaacaataacttatctatntcctttgatgaacttcaagatgcattcactaatttacataaagaatcagt

SEQ ID NO: 47023 - DNA, 208 bp, Glycine max
ggctagaagacgtcacagcatgaccatcatgaggtccattatgtgtggtacccacactctattctaagatgtccagaaaccttgtggataggacgacaacctgcgaaatacaacttaagtgcgggagcaaaaatgcaaacgtttgcgaatgagcattctcggactcaactacggaatgacggttgcccgtctatacttaccttgtatt

SEQ ID NO: 47024 - DNA, 395 bp, Glycine max
  unsure (1)..(395): unsure at all n locations
tctccaaccctatggcctaaggcattcaatgctccatctttcttcacaacccacttgtccttgtcctcctcttccttgtcctcctcttccaccttatgtttgcttcgatctcgctcaactactgagacaaactctgtttggaccttagacaagtcttcaattcgtctttcaagatcatgccttccactcgtgactggtatctatcttctctctgaagtttaagctcactgttattgcctcacaaagctcctcagaacttgtttcggtcgtgttcttccttccaggccctcttggtttattgctccaaggccttggcagtggctgtgttgatgtctcttatttcagcattctcctttcggattctgatagctgttggtntaaacttttcattgact

SEQ ID NO: 47025 - DNA, 437 bp, Glycine max
  unsure (1)..(437): unsure at all n locations
agctntgtgtgtgcatttatttgaactttggtatatgtaaataactggtgtctattttgcattctttacactgcattctaagcacccacgggtttgagtaataaaagggccctacactcgggttcatgggaatttaaggagtggaggtgaatctatcatcatgctaagtctctgacttgcttgataatagagaaacctcgtctagagctttctctctatataatgtgtggtcactggtattccataccgccacaacattattatcttgagtgatgatacctctagaaaacagccgtgtgagttatgaatggttggggaaatagttattagagacctctagatgttgtcctataagttcccaaataggggcaaagagcaaacacgctcctgtgccattctttctcatgcatgtttaggtttatagatcttgctagtaa

SEQ ID NO: 47026 - DNA, 332 bp, Glycine max
  unsure (1)..(332): unsure at all n locations
tcctcggtgccatctcttgatggtgatgaacaaaagcgctaaacggaatcaaaacaatgcgaataaggatgaccctatggctgcaaactcgtcaatcccgtgggtatggcttttgaaaggaggaaaagaagttttctgaatgccaaaacgtgcccccctttcgtcattcttataatttggtgcaggggtggctcgcccaggcgagctaacctgcacattttttattttttttgaggggaacattaaccatgtcccctcccttacatggattagcatcttgcctaacttgaacttacttaggctagaattangtgttgattacttatttttac

SEQ ID NO: 47027 - DNA, 473 bp, Glycine max
  unsure (1)..(473): unsure at all n locations
agctngcccagagaaggaatctacggaggaaattcttaccttctcanaagactggaaagcggtttctaatgactcctctgcggcctccacataaggcatagaggatgggcagctcaccaagatgtcttcctcgcctgacacgatgaccaaatgcccctccactacgaatttcaacttttggtggagtgtaaagggcacaactccgactgagtggatccacggacgccccaacagacagctgtaggggggttaatttctccaaagtgctcttaggcatcacgtttaaactggaaccattatcgatgagcactttggctacgacatggtccatacacttgactgatacgtgcaaagccttattatgccctctcccctcggcggngatntcttcttcggcgaaggcangatagttgttggcagtgatattgttgaccagccctccgnaccttctaccgagatatcttgggccacat

SEQ ID NO: 47028 - DNA, 455 bp, Glycine max
  unsure (1)..(455): unsure at all n locations
tgtcgttggagctgacccatcaactgccctaactcttttagactggtgatccctaggctcttgaccttgacttgatagaacctctttttaagcgaagggcattgacttgatcccatgttttactaaagtgaaacaaaatcggtgcgaatcaaaacttcgacatctatcacgggtgggatggatgaatgcatgaaggaatgcatatgatacagatgcaatttatgaacacgggagcccgggaaattgtctccttcttagatacagtgtcttgnggtaacacagtgcctgacgtatgtatttaagaaggcgacacagaccttccgttggtttgccaaagagaggggattaagacggaacccacgcatgatgcgtatgcgaaaggcgcaacacgggaatgtacatagtatgacaatgttcacaaaatataagcaaaagggtacatgacacttatgcat

SEQ ID NO: 47029 - DNA, 343 bp, Glycine max
  unsure (1)..(343): unsure at all n locations
agctattctaatgaaacaagaacaaagtctcttgtgcacgttattgaagntgtgcggctagctacctgttgttatctacttatacggtacaaaggaaaatgaataaattaatgagataataagtgaataataacacatgcctaatggaaaaatttcttttctcaaatctagcacttcatggtagctttctcaataccgatggttggaaattgctgtgcatacgtcacaacataaatgaagatctttgctatctccgattgaaaggtagaagatgattgaattgcggtctatatatccttcagcggtgctgctcgtgctaaaatgtcaacatcgaccacatatt

SEQ ID NO: 47030 - DNA, 477 bp, Glycine max
  unsure (1)..(477): unsure at all n locations
gcttaagaataatggcctcagcaaacttcttattcccagaaggaaactctataaataggcctcctaattttaatggagagggttaccactactggaaaacccgaatgcaaaatttcattgaggcaatagacttaaacatttatgaagccataaaagttggaccttatgtacccaccatggtggctggtaatacaacaattgagaaacctatagaagagtggtctgaagaagaaagaagattagtgcagtacaatttaaaggctaaaaatatcattacttctgccctaagaatggatgaatattttagggtgtcaaattgtaagagtgctaacgatatgtgggacactctacaagttacacatgagggaacaactgatgttaaaagatctaggataaatactataactcatgagtatgaattatttatgatgaagacaaatgagagtatacaagatgtgcataanagaatcatacata

SEQ ID NO: 47031 - DNA, 405 bp, Glycine max
  unsure (1)..(405): unsure at all n locations
agctntaaaaggatacataaatgatgaatcggatgatgattttggttctctatatttagaatcttatttgactatatctcttcatagcattgacaagaatgctacaaaaacctacacaacatagatttttaaagaagttaaagagcacattgtttcggtttatgcttatttgttacctaaggagtggtgaatagggactaattgatcttcaagttgaccaagttctatgatcctagtatggaaatgaaatttgtgcgtgatacctgagagtctacatttttttgtggatgtagacattttaagttgctcggtaatttgtgttcgcatattttatgtgccatgaaatcggagcacatggattgcattctaaacattttaattttgacaaggtggactaagaatgct

SEQ ID NO: 47032 - DNA, 453 bp, Glycine max
  unsure (1)..(453): unsure at all n locations
taagctattggtttatatctaataagtacttntaaaaacatcttgctatgctatttctaacactactgctattcaactgtatgcttaactaaggcttgcactacaattattaatctttaagctaaaaatgacatctcaagcttgagaatacataatgttatggttgaaatcagcaagacaaacattggaagtttaccgactagtgctagataattacctgacttacttctaactctaatcattatgtataagcttatattagataaaccttgccatgatgaatntatgttactcttgcatatacaccactctacactcagtctaatacacccttacccttttacaatagaagtgattcctagttccttagttcttcaaaaatatcttaaattagcactacgaaaatttctcatatctcatcaaagttatctcttcacgtcaagatactatatg

SEQ ID NO: 47033 - DNA, 426 bp, Glycine max
  unsure (1)..(426): unsure at all n locations
agctagggtgtatgtgggaaaaagagtaggttttggaaaatggtgaagggaaaatgaattctagagaaaaaagagaatagagacgtatcataaatgtaaaaaatgatctaatatgtctctatttatagctaggatactcttagcccattatttactctatttctctttattttattattttataaaaaggaattctatttgactttctatcanatgaataaataaaaatatccttttattttctaagaacatatatttattttatttaccttaaaaccattattttaattaataaaatcatttcttcttatttatttaattacaaaaatctcattattttcctaaaactctatttatttttaaataaaatcctttttaatttattctacaacaaaatgggatgttatagccgaccaagagggtcat

SEQ ID NO: 47034 - DNA, 415 bp, Glycine max
  unsure (1)..(415): unsure at all n locations
tcattaagaggctntctccagaagcttcatcgtggcttctntgataagctagatccttatctatccacacccctctattaactaaatttacctccttaaaaataattacggatgaaaataacgcaacaaagaatcaaacatcaaacataatttctaataatatatatatatatatatatatatatatatatatatatcagggtgttacaaaatttgtttcccacacagtctcaacccaccggaaacaccaatcccaacacaaacacaaacccgaggaggaatttcccgaaaagaaagccctcggaattcaccctgataccaatgctntatgctgacctactactgttcgcttctggcaagtgcaccggatcgcgcaagtagtataaaacggtaagaaccgagtatcgaactcttg

SEQ ID NO: 47035 - DNA, 319 bp, Glycine max
gtctatacctccatttgacgcgctcaaaccatttatttaagtcattactcgcctaatctaagaataaaataaacattcaccgagcgtatgaagtgtatcattcattaattatggataaaatgaattccgatcgtcaggcgtgtccgaaccacggtggaaatcaaatagaggtaaaacaatcatatgataatgaataatataccctttagaagaataaagcgataaacctatcggacgttctctctttgggatttctcattcttaattgaattgactaataactaaagtgaaactaaggctaaaatcaactcgtcttgtc

SEQ ID NO: 47036 - DNA, 264 bp, Glycine max
atcattgtatatttaaggaaaacgttacaagaaccaaaaacaggtgtgcgatttctgaaaggaagggtttgggagttgtttacgcatagggaaggtattaacaccccgcgcgtccgtcacaacggacgatatcctttagtcgagtaatctcaacgtgacttcaaaattatttattttccttctttataatcaacagaggtgctgcccttgttcctatgtgtccccacgcgcaatgagaaaatccaacctatgtagttcttttaa

SEQ ID NO: 47037 - DNA, 466 bp, Glycine max
  unsure (1)..(466): unsure at all n locations
tgtaggattatggggtacccatcacatgtggtactaggtggtttgttggcgatggtgcacaacaagatntccacatacacaaagcgcgcataaacccaccatcccctgtcgcccacctacaactgagctcacgtactcccacgtagcccatatcctcgtttctctcaacaccgggtccccatcaatcctcccaagcttccacaacatccaagcataacaacattcaaacagcacacactaccacagccaagaaaacagagcaaaggcagaaaactctgccaaaacaccaaccaaaatcacagctattctcacttaaagaccccagtaagaattccttcgatccgaatcagtaaccagtggatcgactntaatatgttactagaagtctctagtacttaagcctacattgtgaccgttgngatctactagtcaacatgcagaactcactctgtactactcttgtcac

SEQ ID NO: 47038 - DNA, 475 bp, Glycine max
  unsure (1)..(475): unsure at all n locations
agctnntaagagcacaaaatanactaatctagactaacacgttatataagccacaaatgcagaataaaaccttgggtaattcatttccaataccttcactagccatctcacttaccacaaaaataaaaaagaacaattaattaaattccataattcggctttccaaaactaacattctctggattcctagcaccacgacacacattcctcatcaaaaaaatgatatacacatatttccagtagaagttcttttaattntttttttaattttccccttacataggtcaaaattgtatgcagcaaaagccaattaccataattaacaaccagaaacacgcaaccaattcacgcaataaacacattctgagagaacaaaaccagtcagctagagccaaaacctatacagaaattcacaacgaatcaccaaaactgagagaaacacacatacacagaanaagagtatagtagcggatcg

SEQ ID NO: 47039 - DNA, 392 bp, Glycine max
tgatcaaaacaattatctaatcattccaatccattcaaataatacaatttctcattcaaatcattctcaaatactcatttcataccaaacaatccactgcatatcattttcaatcaattaattgttcaaacacgcttttggtacaagcaaacaactcaaagtgctaaaatttaaataacttaactttaaaagagctgaaatataaaaactaaaattaaaatgactaaacataaatcataaaataactgaaaataaactaaaatgttcaagatgcacaaatttaaatgtcatgctcatcctatggctgatcttcattaaaattcagtgttggagctactgatgaatcctggataggctgctctggctctgtgaccggtgtagatggctgggtc

SEQ ID NO: 47040 - DNA, 358 bp, Glycine max
gaattctagcagctactgtgtttttgtccttatggctattaagatttggcgattttttttttttgggtctgaagcttatatgtcactttgatagccatttgacatcaatatgctaatactcacacacacatgtatgttttgactttagatatgcttatttatgttaaaacgctcctagatctatgttttataatgaatttgtgctcttatgtcctatttagttgtatatgatatgctttagtattaatcgaacagctcaatttgcaatttggagaatacgcctttcgattaatgatttgaaagtcactttaactaccatgttcatagcattttattgataatttcggaatatcttata

SEQ ID NO: 47041 - DNA, 402 bp, Glycine max
  unsure (1)..(402): unsure at all n locations
ntgagccaagtctttgcaatcctgccctcagttcctcatatgtgattgtaccactattgtcagtgtcgatatttgtgaacattgccttcaagccttggatctcttcttcagaaagattntcagcaatgacctaaaagattatttaaaatccattcagtttatttttgaattggtagaaatatgtacccctaaagttacacagactcaagcaatttagagtcataatgagcactggaaaaatatttatgtctctcaatgtttaattatgccatcaaatacaataagcataaaagagcattgtgatcacttcatgcagctagtggctggactaaccttgagggctagtctttttagattattcattgctctgaatngcttattctggaaagcactgcactgtct

SEQ ID NO: 47042 - DNA, 360 bp, Glycine max
  unsure (1)..(360): unsure at all n locations
agcntttttgtggcccaggcaagcctgatgctttcctattcgagccagaggcttgaaaaagtaacaaaatgaccatttagagttccctgttgggtattatccacaatcctttctaagatgtctaagaaccttgcggattgcacgacaacttgcgttaaacaactcaatttggctagcaaaaatccaaatgtttgcgaatgatcatccccgaacaaaattagggtatgacagttgcccatctttacttatcttttataggaaataaaagggaagttaagataaagacattaattttgttcgagcaatctcaccatccgaccggccactagtggaagcccaagcagtgaaacctgtcaaaag

SEQ ID NO: 47043 - DNA, 369 bp, Glycine max
tctccaaccctatggcctaaggcattcaatgctccatctttccacacaacccacttgtccttgtcctcctctttcttgtcctcctcttccaccttatgatagcttcgaactcgctcaactactgagacaaactctttttggaccttagacaagtcttcaattcgtctttcaggatcatgccttccactcgtgactggtatctttcttctctctgaagtttaagctcactgttattgcctcacaaagcttctcagaacttgattcggtcgtgtacttccttccacgccctcttggtctcttgctccaaagccatggcagtggctgtgttgatgctctaattcgcattctccttcggattctgatagctgt

SEQ ID NO: 47044 - DNA, 408 bp, Glycine max
  unsure (1)..(408): unsure at all n locations
tagttagagtgtgcataggtctcatatttactatagatatgtctataaataaagctgataaaggcttggactattatctcataagccaatttttgcattttagaaatataaaattggctaaatgattggagaaggataaagggagaagggaggggagagagaccatgggttcaaattctcccaactgatatttataataaaaacaagcaaactaacatttgttgataaaaaaagtaattcactaatggtgatgatggatatctgcaaagaaattatctttttcaaatcaataagatacaagaacaattttggttgaaaataaaaacattcactactagaanacgcagtttcaacatcggtcaagaatcacatattacatcggtggttgaccgatatagaataaaatgt

SEQ ID NO: 47045 - DNA, 255 bp, Glycine max
tgtctcggtaagaatgctgtccacccttcggtcaccattgcatcttctagaaactcgcgctggaggttcaaagggtaaatgaccgtgatctgccagtcgctttttttgtacgctaggtaaaatgccatttccttctgcttattacttccataaccatacacaacgggccaagcttcttctccattacccataagcacaaggagccaccacagagtgtctgcgttcttcaatgaaaccccacaccgagaggaaccc

SEQ ID NO: 47046 - DNA, 399 bp, Glycine max
  unsure (1)..(399): unsure at all n locations
tactagctcactgattactttgttattgaagaatatgctttctgtatataacacattacccaagaatcattacaaggcgaataagatattatgtcctgtgggtatggaatactagaaaatacatacatgccttaatgattgtaatttgtatagaaatcactttgccaaaatgcgtaactttcctacatgtggggtgtcacactacaaagtgaantttgacaaatgcagtgatacagtctgatcgatgccgcacctgaatcaaataaacattataatgcattaactaggaagtgatcctaggtcgtttcccaacgagcaatgataaactagatggtcataacagataataggaacatagtaacgaattgtggggggattgtttgcttttgtgaattaaac

SEQ ID NO: 47047 - DNA, 513 bp, Glycine max
tggttgaacttggttgatgccatctcgacccgggatcctctgagtcacctgcggcatgcaagcttgtcctcgaaattatactaatgatcttatgcttcgctttcagacttgcgcgctactgcatattgttttgacagctaaccggacacatgtgagggatgcatataacagttcccttttaaactatgcagatgcttatctctgaccgtggctctcctctaacgtccaggtgcacaactaattgtcgagtagcccgctgtgcaatgccctctcttacctccacacagagtcaacgtcgtgctcattacgatacaatgccatatgagggaactcttggtttaatagccagagctttcttctatccacgacatgcatttccgtggatacaaagacacgcagttttgagacacaaccgggaactcctgatttgtgcatctctcacttaactaagaggtgtgctatgaaaatggcgtagcttttggtgattgtggacacattggatgatgtatttcg

SEQ ID NO: 47048 - DNA, 466 bp, Glycine max
  unsure (1)..(466): unsure at all n locations
ctcaatgaatcttcatcatgaaccctcacgtcgtcatgttctcaacatagctgatcgacgaagactcctatgccctaactagagacagatgaacacatgtcgctacttcgacgaatgaaaatattgcgatacagactttagagagccgccaacctacctaaaataaatagacaaggtgctgccaccacctatgacgtttcacccagcgattttcatctccaccgaaacaatcagaacaagcagtcattcaaagccaagtggggcggagacaaatgccattacatagataattacgacaggagtgaccttctgtaaactgttttaactgactagccctaatcgccttggaggaacccacataaagactcgatgcgaccaaagaccaagctcataaacctcgataacacgtctcttacgtgattaagatgctctcagtcgccactaccaaaattttcagatccctacn

SEQ ID NO: 47049 - DNA, 478 bp, Glycine max
  unsure (1)..(478): unsure at all n locations
agctcgcacaacaaggtaaatctattttgtacataatgaagtaactaactgtcacaacctacccttcggcgggagggagacgcatgactcgcgggtgcgtgttccaagaaagaaatacgcgcggagtcgccaccaacgttcatttaaggaaaatgtcggaaaaaccggaaaagacgtgatctacaaactctaagtgaaaggttcgggagttgtatttacgcacggngaaggtattagcaccccacgcatccgtcacaagagacggtaacctttaatcaaatgtgcaaatatgacttcaatttatatttttttccctttttacgttcttatgtcttttttattcctttttatggttttatctttttgtggtcgacaagggcgtttccctttgctcctacgtattcctcaattgtgatgagaaaattagacctacgtagttcttttgtgaacaaagcgtttttgtatttttatccttttt

SEQ ID NO: 47050 - DNA, 494 bp, Glycine max
  unsure (1)..(494): unsure at all n locations
cgtgtcacactntcaactgccgaagctaaatatatagccgcatgaagttgttgtgctcaaagtctctagatgaagcaacaactacaagactttagagtaaaccttgatcacattcctctaaaatgggacaacacaagtgttatcaatctaaccaaaaaccctgtcatgcattttatgactaagcacatagaaattatgcatattaaatgcatcaagcatagaataacattctgtttgtacaagtatgtgattcacattgctattcatatcattttttttgtttagtttgtgtcttagttattgatttatgtgcatactcattagtttgtttgaatatcacatgtatttcttagtaatttcgtgatttctctgtgttctaatagattatgctcggttctaatcaactattgtatgatatctgtttggtaagttttcaaaaccttctattttaatcaatacaccatgatttaatcgattacgatngcttaatgtgt

SEQ ID NO: 47051 - DNA, 404 bp, Glycine max
agcttaacatatcatcagcatctcttggaatttatattgctttgctgtggctccgtccaataccacttcatctcatttccaaacacagcccagttaaaatgctttacaatgaagttaacatagtccttgtcgttaatgatcgttctgctgatgcatgctccaattgggaaatcattatgcgtttgtataacttttaccgatgtgttagcatagctgccagagtccagtccatagaatttcaggataacttcacgtttacgaatctgcaacccagcatgtcagtataaattaaaatatataaaaataatgcgaatcatctcatattccatcaatgaagaatggatcatgttatattaagacaaggcactatagtctgaaacatactcagctttatgtaccattta

SEQ ID NO: 47052 - DNA, 608 bp, Glycine max
  unsure (1)..(608): unsure at all n locations
aactgctcaactctttccacctantgtgattgangcgcggtaannnatttattannctttcnnnnaaagagaggggtgatgcatcntattacgtgacacatanatactnaagctaggatggacactaaagcatgccgtgtagttacagttcataattcttcttcaatcaccaatggtagttcaaatcgcgtatgtacgcatgtatgtaaacatatctttatgcagtgatcccagataattccctagaaacttaaccgtattaattgtgatgatgacagatggataaagagtctcataacaatggcaatagctgtagagaacgacacaaagctggaagaggaggtgataatagtagcggcgtcaggtcgttagagctgaaaagtggctcgatggaatgaggcagcaaggacgtcagatttggggctgccatgggtaacatgaagagactaaggtgcatgaaggagcacgtcatacacgactcttctttttcaaacacccggtcacaggacaaccacaacaacggtacaggtggcacggtagtggaacaaccgacaagattctccttaaccctactatatacctttaccactttaccgacttcgcctccg

SEQ ID NO: 47053 - DNA, 610 bp, Glycine max
  unsure (1)..(610): unsure at all n locations
ttctactcatcanactctacngtgttattaatctgaattgacancgtgtcgtttctcctacctccnnnccaggagagcncttgatactgtagacnatccgaactacanatacctcaactcgcaacgcatctcacaatactcctctaagtgaggcaggacgtcttatgttcttcttacgactgctcttcgagcgcctccggtgaagatccatatttctcatggctgaagcgctatcatcactccctcatggagagaagcagtcttggcctatagagagatgcaactctgcgaatatccttccatcttacccatgtggagacttgcggagcctggcccacccattgtaataacaagagtcggcacgcgagcgctgtatacgacaacatctgagaggtgacgatagctcttggctcaaggatagcatgactattgcttggcctccggcggaaagcaagatgcatccaacgctacgcgccccgcagggctccaacaaaaacagaggatacctgaaggctcttgtctttaccaacattggcaacagaacgcgcactcctatgcttcttccaacgggcgaggccaacaatctactggatctcatagcacggcagcc

SEQ ID NO: 47054 - DNA, 182 bp, Glycine max
catatctctatcttcgcatcgcactatctgatccgtactaacaatcttagtatcgcgcatgttagcatcattccagttcagccagattcttctatttgggcgttgatcacaattactcatatagcactctgaacgatagagcttgcccctaacaacctttgccttctctctctttaaccctc

SEQ ID NO: 47055 - DNA, 324 bp, Glycine max
  unsure (1)..(324): unsure at all n locations
agctntctcgctgcagaagtcacttcttggtttttgtttatgtgttgcgctaacggaggtgtccgacattggaagcgcgatagacagactttgtggtacatatatggatggtctttgcggataactgggtggtgggtaaagagaaagattgctattggctgagtaaagatattgttggggtggtggaaaattcggccgtactataatggcagtcacagcatgggtttttccctcatcctcaccctctttatntgccccacttttctcagtgcgcctagtaggacgatcaaatctgcctctttcccgatccacttccactctttt

SEQ ID NO: 47056 - DNA, 387 bp, Glycine max
atgcttatcttaacgcagataaaaacgtcatgctcatccctccggtttagaacgaactcatgtgcacgtctaaagtaacacattgatgcacatgcgtatgtgtagaatatcctactatttatatcaacatagaggccatccaacacattctaattgtcgttcatatatatgcatttgaaaagaacacatattgtcactctctaagcattgcgtccaaatttacacttaactatgtcctaaacattctctatcacaaactacctacacacactgtgaatatatataccatacaaactttcattgattcactcacacttactcataatggcaagcttattacattatgcacatacttgcattcaaaatggaattccgtgctatatacat

SEQ ID NO: 47057 - DNA, 568 bp, Glycine max
  unsure (1)..(568): unsure at all n locations
caatacctcattcttgncntctactcttttctttgcatatttccnnncannnnnnaagagtgcngtgatgtgatcgctctacaacgcacccannaaaannagctccactcaacccttcagcggctgagcgtctatctcttttttgacggggcctatgcaacttgacagcctcggaggaaagacgtatgcctatgctgtctgggattgattactccagatatacctaggccaactttattagaaaacaatcagacacctctgaagtattcaaggagtcgaggttnagacttcacagagaaaaacaatgtcgtcatgatgagatacaagtgagatcatggtatacagtttgaaaacagcatggttactgaattctgctcatctgacgcatcaccatgagattctcgatctttcacccatcacatggtctagtgatagacaacaggacttgcatagcttgcagtgctgttcatgccatgaacttcctctactctagctaagccggacacggggctttccccactaatctatagaacgggctcccccactcgttaatttgaatgggtaatcg

SEQ ID NO: 47058 - DNA, 360 bp, Glycine max
acaatccacaacgtaatgagaagaacaagagattattgaataattgcgtaccctgcgatgctcacaaaggaagaaggagagataactaatgatgatcgacagagatgacgagcgagatcggaaaggatgaggaaagagattcaagcgtgagagaaaattgatgtaggcacaccacgcacgttgtgatgaactggagagagaaattgtgacggttcagaaaatgatgaggacatactttatcattttgaaatcttttgaggacataatcgaccaagcattgtttagggaatatattcccgaaagctaaatttccaagctacagactgaacatcagaaaagatctgttatagctttactttt

SEQ ID NO: 47059 - DNA, 608 bp, Glycine max
  unsure (1)..(608): unsure at all n locations
tccatccatcaaaagtntgatcanctattattctacgtattcatctntaagntccgcnnnnccnnnnnncccccaaaggagagnnnnttggagattgatgtccattggtaanaccngacactatanaaaactcacgcttgtgaatcacttcattgaaatatagctggagacgttgttctttatatatcatacataagatgagccgtgccggcacacaaacttatagtaatacctgataaattcgcgaaacgataatcatattaaacaaatcgcggataatctcaaacaaatcaacatttgtacaataaatgagatccatatagaagttgtgacgacatattatatatggatgccatatatggttaatacacaaattaatgtgaattacacacacattaagacaagggttgaatgtttgatataggggatagaagcgcattgacatctctcgccacgcgagccatttggaacctggacaaactgtgactaggtcaatacatactacactacagatctgtgagtggatattataagctggaaacaaagtaacgaaaatagacgataccacagtagagtgctctgccgcagtgaacactatataccaatcc

SEQ ID NO: 47060 - DNA, 477 bp, Glycine max
  unsure (1)..(477): unsure at all n locations
agctnggatctggcagtttgtaaaggggttttttataagatagggtgcggattatcttgttgccgccattgttacccccaaacattgatatcctacatttaacattatatctcttggaatacatatggaaggtctatttatcagctttaccttaagtgatgtagtgagagatggggaatgtatagattaacccgggggtggggttaacttaaacatgactgtgcagcctttctgaaccacagttgtagtagttgtcatataacattcgtgaaagaaatatatcttaaatgatttgtcttctcatgctggttctgtttattgatgtgcataaaactatcttctgatccaggacttccagaaggaaattgttaaagcagcagatacatctacagctatagggtataagcatattgaaacaggtgaagaatagctttcggttccttttttctttactctgactagtcttgatagcatgtg

SEQ ID NO: 47061 - DNA, 502 bp, Glycine max
  unsure (1)..(502): unsure at all n locations
tatcaatgagataagtcatatntatgggtgaaaaggttatttcttgacaaattaataatgccattaatacaatcatcacttaaataatttaattcaatgtatattnttgatataaaatttaaatttatcttaattatttgcattgatcttaatgaattagataataatattataggaaaataaaatatcaataattaattacttattaataaattagcaaagaattcaatcttttatctttntctttataagaaaatattgaaggataagtatttaggtaaaaattagatatatggatgagttgaatctttgaaattatcatcattcacgtcttaattaaaaaatagagctaataccattctaattgaaaaagtcctaatacgtctcattnntttttattatcaccatattgatgcgaaatattgatgatcatctatagtagaaattttcttttttatcancgtttttttttatccttaagacttgaatcaagatcttactt

SEQ ID NO: 47062 - DNA, 429 bp, Glycine max
  unsure (1)..(429): unsure at all n locations
gctngaatcttctaccgcatttctgacagcctatgggtgtgtccagtttaagcggttcctaagaatacatgcctcacagtgattaagaatgagaagaatgagcttatccccacaagagtgcagaacagctggcgagtctgcattggttataggaggctgaaccacgtgaccagaaaatatcattttcccctgccattcattgatcaaatgcttgagcgcttggcaagaagtctcattactattttcttgatggtttttctggttatttacaaattcatattgctcctgaggatcaagaaaagaccatattcacctgttcctttagcactttttcctataagaggatgccctttggtctatgcaacgcccctgataccttctagtgatgtatgcttagcattttcagtgattttttagagaggtgcatat

SEQ ID NO: 47063 - DNA, 379 bp, Glycine max
  unsure (1)..(379): unsure at all n locations
tcactccacccatatctagccttgacattaaccagacttatacttcgctgacaacagtgtcaaggaattcttgcaccccatatacagaggcttctttgaatcactttgcaatccttcatacataggggcatgtgcttgctgaaaagactcttgtccaaggtcacgaatcatatcctccaagcgatctcccatttctacatcaaacggctcagattgcgacccactctgcatgtctatcaattcaccatgccatatccatatcatgtaattcttcttaatcccatcacacaatagatgctcccatatgttgtccaatactcgtcgtcttncgttcaaacaattgatgtaaggacaataatattttccatcttcatccgat

SEQ ID NO: 47064 - DNA, 403 bp, Glycine max
agcttggatcgaggtacttacccgttgaagatctattaattaagatttacggatgaagaacgtgaaataacggttgatacctttgcgaaactcctcacggaaaactgtacggtaacttttgagaagcgcctcagcttatatttattttacagtaacaattgttccaagcatattctaaggagagagaattgccttaggggctgaacccttttgtttttctcttcctcccctatttattagataataggggaggtggttgtcgtccagctcgcacaggcgagcttagctcgcccaggcaagccaggttgctctctccagaatcaacagtcttctggaggagtatatgggagggccctagtgggcctgggtgctatatgcactcctatattactatatacacccc

SEQ ID NO: 47065 - DNA, 345 bp, Glycine max
tgtctcagcgtgtatgcgagacggagaccaacatgctagctattatcgccaaggaccaagaagagttgggtctagccacggcccacgagcatagaatcacggatgagtatgcccaagtatatgcggaaatagaggctagaggaagggtgatcgactctttacaccaagaggcacccatgtggatggatcggtttgctcttaccttgaacgggaggcaagaacttccccgattgttagccaatgccaaagcaatggcatacacctactccgcccccgaagagattcatgggcttctcggctattggcagcatatgatagacttaatggcccacataattagaaatc

SEQ ID NO: 47066 - DNA, 466 bp, Glycine max
agcttcgatcaagacaccgcataactacaagatattaatttattggtctaagcgttactaaaactttagggatgaatttttaaaatttacatataaattgattcatcactaaagttaacctttttttaagcacttcaaaacaattactatttaagtgtttgccatcataaaaagtgagagaatgtgaagtatgcttgaaagatgatgaaggacttgaagatcttttgaatcttgatgattgaccacctcacactaggtgtgatggtttgatgtaattttttgcttatatgtgtgcgatgtctcttaaagttctttttttttttttgcaaaaaaaaatatatggcttttaaaacaaacaacattagagaggataccaattaggttagcactcttgttattgctgttggaaagcaacacaaccaataatatattccaatagaaagaaagacaacacacggcgggaggg

SEQ ID NO: 47067 - DNA, 439 bp, Glycine max
  unsure (1)..(439): unsure at all n locations
atgggttctatgtgcacaggtacctaatacatctcacagganaaacccaccagtaagctccctttgagaagatgtttacaaactctntatggctagatagatttggctccaaatcaagaaagtttgggctaaggaagcctagtatcaaaagctgaagatatatatttacaatatgagttttgatctatgtcatctctatactattttccttcctaacaaagaactctagttgtatttcaatctccttatataggttcaaccttcttatatagggcacttgaagattaccattgcaccttgtctcataggccaaggatatcctctgtgagttgtctccaacacacaacttgttcttcctccttccttagttgtaataagttggctcaaactttgaaatttgaaacatgttcnngtggtgcatgtgtgctaataactcatg

SEQ ID NO: 47068 - DNA, 509 bp, Glycine max
  unsure (1)..(509): unsure at all n locations
tctaagtcacctgcggcatgcaagcttccacaacatccaagcaattcaacatccttcacatcatgaactatcaaacccaaagaaaacagggcagatgcagaaaactctgcccaacacaaaccaatatcacaggttttctcacttaaataccccagtaacattctcttcgttccaattcgttaactattggatcgactcgaaaattttactggaagtctctagcacataattctacattgtgaccgttgggatctgctataaaacgtccagaacccaatctgtactactctntccacaaccagcaaatacacaacattttctgcacaaagccaaaattctgctgcacatatttgacagcaaaattctgcataaagtgtagattttcgaaatcacacttgccctcatccaatntttcccaaatagaatcctacaagtnctaaatcatgtatcaatcatgtctaaaccaaggacaagcttcagaccagagcaactcanaatctaggtatcta

SEQ ID NO: 47069 - DNA, 444 bp, Glycine max
gctcaagaaagttgaagaagctttggcatttacatgctcagcttccttgagtggcatttgtataggtcgctatcttggttgttgaatcttaatacattagatatctatattgcattgtgcatcaccatggtttgtgtgaacaaaagtttctaagttacaaaaatttctttataggaaaaaacttctttttaatcgattacaatgttgttgtcatcgattacaataagtagtatgaagcttgcagagttgagtcttgtattattttaatcgattactgatatctcatatcatcaattactgtgttgtttgagacaatgaccaatttagtcaagagtctctactgtgatcgattaccaagtggatgaatctattacttctttctcatctattgttccaagtgatcaagaacactctaattgattaccaagagcatctaatcgatta

SEQ ID NO: 47070 - DNA, 415 bp, Glycine max
taaactacgttgcttgtgatgacaatcactctgattgaagatggctcaaatcaacttatgtttagatctattttttgacaaaataatatgtggaccttgctaaagtcttatcatgtaatataaccatctatcgttaagagacattgttttgttttcatattgtggtgtatctgaacaaccttgcagtcgtatatggttgtttttttattgtgagaacatttgtcatggttttgatatacactgttaaattatgcaatgcaaaagacaaaggactgctatcaatggttattacatatattaacactcaattaatatttgacaaattgtcactaacgaacacactcttttcaaatatgttgtaaatgtcatagataacacaagaattatataaatagtccatgtaaaactttgtatt

SEQ ID NO: 47071 - DNA, 391 bp, Glycine max
tctgtagggttaaagtctcatgattgtcacatgctcatgcttcttttgttagccgtggctatacaagacatcttgccatacaaagtcaggttagccataactcgcctgtgcttattcttccatgctatatgtagcaaagtcattgatcctgtcaagtttgataagctggaaaatgaagccgcaattatgctgtgccagttggagatgtattttccccctgctttcttagacatcatgattcacttgattgcgcatctggtcagagaaatcaaatgttgtggtcctgtctatctatggtggatgtacccggttgggagatacatgaagatcttataaggctatacaaagaatctatatcatccacaagcatctattgttgagaggtacattg

SEQ ID NO: 47072 - DNA, 409 bp, Glycine max
  unsure (1)..(409): unsure at all n locations
agctngttggagtagatacatgggaccaactctttntatttcaaagaggaagtcgtatctagtcaaggtcttatagaccatacaagtttcctaacgatttctaattatgtgggccattaagtctatcatatgctgactatagccgagaagcccatgaatctcttcgggggcggagtaggtgtctgccatcgccttggccttggctaacaatcggtgaagttcttgactcccgttcaaggtaagagcaaaccgatccatccacatggttgcctcttggtgtaaagagtcgatcacccttcctctagccatcttttccgcgtatacttgggcatattcatccgcaatcctatgctcgtgggccgcggctagacctaactcttattggtactcggcgatgatagctaacatg

SEQ ID NO: 47073 - DNA, 327 bp, Glycine max
tataatatatcgtcgcgctcgaaattgaacaacgaaaggtcttgtgatattcacatggtcataactattaactcggatgtccaattcatgcgcattatatataaagacgctaacaaatgcacatcggaagctctccacataggaaaatgcgtcatcagtcttcacactgaggtccgattcacgcttataatatatcgacgcactccaaatcgaacaacggaagctcttgagaaattcaaaaggtcataacctctatctctgatgtgcgattcatgcgcataatatgtcgatatgatggaaactgtactacggaagctctcgacaaat

SEQ ID NO: 47074 - DNA, 425 bp, Glycine max
  unsure (1)..(425): unsure at all n locations
agctntacaccaatccttgatattattcaactttccttctataaattggctggttaccttttcttgcatgcatgagtgagactctaatatctagggtgtcaattaattagaaactaattgttagaatgtattattcatatatattatatatgattgcatttaaattatcatatgctctatctaatttcaatgatatccatgcaggaatgctcgccacccaattaaacttttattttgcaactgatcatttggagttaaaattggaagataaaccaccttgacatggctcaagtaattggggtgaatgtgaattcgtttatatttgataggtttgggtcgcgaccatgactcacagaatatgaagataattacgaaaaataatatttataaaagagatctaaccggaaacgtgaaaatggagagat

SEQ ID NO: 47075 - DNA, 360 bp, Glycine max
  unsure (1)..(360): unsure at all n locations
tccccatattcgtcacttncacatacgatctccgatatgtattattgggagcatcgcacagtctgggagacatgtttatgaggttccttccaataatagtggtttgctgcattccttcagaccttgctggcctcatgaacctaggtaagttgacaaacagattatgctcattgatgaagatatttgccaacttcacctccaaaccttttgcgttcgagacttccttgaaacgcacgaaaccatatcttctaccttccctattgttccttttccctatgtaaacttctctcacatcaccccatcttttataatgcttccacaacaactcttcatcacgcttgtcaggaaaatgggtgaagt

SEQ ID NO: 47076 - DNA, 427 bp, Glycine max
  unsure (1)..(427): unsure at all n locations
ttacaaatcataaaatcctacagaactaaagctatagtaaaagtctcttaccccaatgctaagacatgaataagagacatggactaaggaacttactcggacggtgtatgattagatgctttaaagactataaatgccacgatagtcaaatacgaatgtttctttttttgtagatagaatgcagaagcgaggtttcttgtaacctggacaatgtgagtgtaactgatgatactctcgcttgagttgtatctaaactttctcttatcggactgttgtgctaagcgagcatgagagacgtttggattccttattatgctcgctgagcgaacttgcgcttagctgatgttccatattcaaatcaatttttttttgtacataaactcagctatcgtgagagaaagtcccctacgaggtctgtaatcaaaan

SEQ ID NO: 47077 - DNA, 412 bp, Glycine max
gtgcgaagacatcgtgtgtataggagcggttacgttaatgttactgcatttcttaaatattgtgaaagcttctatttacgcagccaagcttacactgttatacctattttcacaactgcataattaaatttagtcaaatatactttagaattttgcataaagtactccagatttgtttagagtttaaatcgctcacataaacttcattttttatattttcaaaatttactctccatggcataataaattgtgaaatacttaaatagttcttacaatgtgggtttgatcctcttaacctcaaaagttaacttatagggtgaggctcgtccttcacttatatactcattctatcttggccttatctctagccgatatgagacttatgttttctccaatagttttaaaatgaaaa

SEQ ID NO: 47078 - DNA, 437 bp, Glycine max
  unsure (1)..(437): unsure at all n locations
gctttctattcaangcaacacgcaatactcatcatggcatctaatacctacttatactaccgatcacatatcctaagagtggaacccataaagagcgtttcagactactgaattggatctctttggggacttgcaccatagacacgtgtgcactggttggagactcttatggacatcgatgcgggacgactaggaacgataacgcctagagagatagggacacaactctatatattattgactgaagagagagaacactactcttcatgaaaaactgcagcgcgttcgctatcatgatactgatcccaagagcccttagtccattgcccctttgtgagagtaacctgaatggacctcctcttctcttttatgcgacttacgcgcagcccattaatagagcaatgtaccatgtgatttgctacgccacctcccctccg

SEQ ID NO: 47079 - DNA, 426 bp, Glycine max
  unsure (1)..(426): unsure at all n locations
agcttaaagtatgcccgagtcattcatccctatgagatgttgntgaagtattggcgatcagaattgccattccttggattatagggttgaaccaagctcatgcttttacaaaaaggttaatcaagtcaagttgaaatatggaagtaaccgtcttgcaaaattggggcaaaagatgaatcgagtcacatcactgcttcgtctactgtcaaacatatttaggattattgatgtccttgttacttccagtttcaccttgacaaagatgtcatggaccatgttgaaaatataaattgattcaaccccatatcttgcgtaaaaattcgcaatacttcaattgtacatcattcgcatgcatctatgcttttcattggttgcattgctcattgcattctttccttgaaaaataaaatacaatgaacttaatca

SEQ ID NO: 47080 - DNA, 405 bp, Glycine max
  unsure (1)..(405): unsure at all n locations
taggaacccaaacttgtagcttcaatacaaggaaacatgcttatggctaggaatccaaaatttggttttagagttagaaaaacatgaaaattaggatttgcttgtgagagttattgctcgaatttgggctgccccatgtttgatactttacatagaggcagcgtggaaaacaccttgcaatagtgtgtatacataggtaaatataatgagtatgaaattcctagcaaagtgtgaatgattgtatgatattgtggaatgctttttttgaatgcaaatatatgcaggatgtaattagctctccaatctgcatataaataaatatgagtgaaacattaaaaatttgtatggcgtacttcanatgtatgtaagtagtttgtgatagcagatgtttacgaatataaatta

SEQ ID NO: 47081 - DNA, 458 bp, Glycine max
  unsure (1)..(458): unsure at all n locations
agcttctatataagctgaaccattttatcaatatacacaagttgagttttatttagaatattagagtttttctcttttatcttagagagagtgattctcctaaattcttgagtgattcaagaacaccctggctgtatcaaaggactttcacaacctttgtgtgttgccctcgctggaaagagagagtctttccttcctttcatcttcacccttgttctttcaaaccacaattccagaaaatccacctctacccagaattatctcgtggccgtaactcccattttacgcactcaaattaagtgattcttgagcctaaattgactttcaaaacgagacctttcacctcgttttggaatcacctcanttggagccctgtagcttcagttattgccatntctatatttctgtccagccaccactntaacctacatttaccatcccattcatccattntatgc

SEQ ID NO: 47082 - DNA, 357 bp, Glycine max
tgtctcagcatttatgcgagacggagaccaacatgctatctatcatcgccaagtaccaagaagagttaggtctagccatggcccacaagcatagaatcgcggatgagtatgctcaagtatatgcggaaaaagaggctagaggaagggtgatcgactctttacaccaagaggcaaccatgtggatggaccggtttgctcttactttgaacgggagtcaagaacttccccgcttgttagccaaggccaaggcaatggcagacacctactccacccccgaagagattcatgggcttctcggctattgtcagcatatgatagacttaatggcccacataattagaaatcgttaggaaactt

SEQ ID NO: 47083 - DNA, 386 bp, Glycine max
  unsure (1)..(386): unsure at all n locations
agcttcanagaagtttatacaagaacataaaggataagggttaccgatgaaagggaaaacacaacttttgcgcaaaagattaataggcctaactctctaaaaacattccccattggattcgccaactgtcgcaacctaccctttggcgggagggtgacgcgagggctcacaggtgcgtcttccaagggaggaaggcacgcggagtcgtcaccaacatttatttgaggaaaacgttggaaaaaccggaaaggtgtactctactaactttaatttgcgaaaggtccgggagttgtttttacgcacggngaaggtattagcacctcacatgttcgtcacaggggacggcagcctttaaccaagtgtgcaatatcatgtctttgatttga

SEQ ID NO: 47084 - DNA, 414 bp, Glycine max
  unsure (1)..(414): unsure at all n locations
tctggaggctntctctctagacgataagacctacttgttctttggctatngagagccaaagatttatttctctctgacctttcgtcttgctgaagttcttgttcatgaactttgagagtaccaacaagttcttcaagggacataaaatcaagattctttagagcccttagtgttgttacccatggtctctatttnttagacaaacttctcaagattntttccatatgatcatagttatcataagttctgcttagagatattaattcattaagaatggtttgaaagcatccaaacatactctgtatgtcttcgccttcttctatagagaagagttcatatntacgagtaaggagacctagtttgttcatctttacatgtgacgttcattcacgtgttatagctaaagtgtctcac

SEQ ID NO: 47085 - DNA, 444 bp, Glycine max
agcttctcaaagaagccacgaggaagctcctggtggaagcctcttaatgaagcttccacacaaagctacatgaagctgcctcggtaaaaacgctgcccagccttcgttaaccgttggctcttctcgaaatgtggtctacaacgttacaagacacttgtccatgatctgaccgttgggatctttgagaagatatccggagtgtgctcgaagcttccgttctccaaagcatctcttatctaagcacttcagctttcgctttcgtgtagcttaagagaaacgatatttcttcttctatttctcttccaaagccatttctaaagggtcaagcactttctacattacccacagctaccattaaccaccacaaaccatctgtgttctccattgagacccgacactgagaggaacccttcttccgaagcggattctttcatcttggcttgc

SEQ ID NO: 47086 - DNA, 346 bp, Glycine max
  unsure (1)..(346): unsure at all n locations
ttaatgaangttgataaatgaaggacaattgtcaagttcaaattcattttgcaaaatcctgcacttttcaacttaaattctagatgtaattcttttacgtattgctaatattaagtttcaattattttaaatgatattagttctctaattaaaattagaattttatttcaatgtgatctgcattaaaagttggcattaattatttaggaaaaattctaattttgagtagagaacaatatgttgtttatgagttgtagagaacaatattaataatagattaagaactactcgtaaattttgtcattttcagtcaacggatctattttttccgaatattcaatcaaca

SEQ ID NO: 47087 - DNA, 415 bp, Glycine max
  unsure (1)..(415): unsure at all n locations
agcttgctgagaacctgcacttgactccnggacagattctcttgatcttccaataatgtctgatggaaaactgccccatccttcaagttctgcattacctttgagatggctatgcattcaacctcatcttcaatccttatcctaaaaaggtcctcaagctccgactcaaccactttacatttttcatccgacaaatctacggttctagcagaactctccctagaaatgttaacactacgcgaggatgtgtcaagttcagcaatcctggagtccctcaaagcaagcacaccctgtataacttccaacttgctttccaaaatatttatattgtgtgtcacgctcaatacctgaggatctgaggaacttgaagcagtttgtttaatttcttctgcaccagactgaccagaatggcttg

SEQ ID NO: 47088 - DNA, 413 bp, Glycine max
  unsure (1)..(413): unsure at all n locations
ngcacttgttctatatatatgtgctataattaggatttaggataccataaggtccactctctagaacggtgacccgtcacagttcatgatggttgcacaaataattccaaataaaaaagtactgaagtctgaaaccataacaatagggccaagttaattgaccctactttccccattttacatgcaaaggctaatttgaaaacacaacaggcatgccatcaagtccaatattcagaacagaacacactcaccatcaagagatcatcttgaaatttcccagattcaatagcaggcaatctatctcaagagacttgacacttgtcttaatagtgaattctcacaaggaacatcacctgctgttaaacatgaaggctaatgatgctatttattagagttaaatatttgaacatgta

SEQ ID NO: 47089 - DNA, 390 bp, Glycine max
agcttgtgagcgaatatagtttgacaatcaagactcttagtgagtttggtaataaaaataatgctgactgataaatgttcaataaagagaacatcataaagaattaaagaattagtcatcacaacaatgcctctaaacaaagcagatggaaacttgccattatgtaatgcaacaagaattggattaatggctctataagatgcaaaaagattcaaaaaacaagcaaaattatcagtagcacccgtatctaagatccacgaaacattatctgtatcacgctgagtagaaatgtgattagagctaacaaggttggaagagccaaccacatttgaagagctggtagcatcggcagtaggcgtagcagatggcaacaaggcaagcaaactctga

SEQ ID NO: 47090 - DNA, 433 bp, Glycine max
tgtcttgcacgagaagcaatagcaagtatatggtcgaagaggtggggaacgggaccatcggtatcatctgaagccaaataaggaagcggcagaaacactctccccataagatttgcccacggaacccgtttggaatcacctccagcatgcagcaacagtatatgcttcctggccaaaagagaaacatcaatatcacttccatgattaatgcagtgagagagggcgtggatggcattgagagtggcggcgccggatccgatcctttggccgaagaggtcggggacggcgagggtgaaggtggaagcagagatccgacccatgcgcttggcccgctccagctgccagttgtacagctgagcttgttctgggctagcggcggtaagcataatggcatcccacgttggaacccgacacgggtctcgcaccgacaacc

SEQ ID NO: 47091 - DNA, 442 bp, Glycine max
  unsure (1)..(442): unsure at all n locations
caagtaagcttncatcataagttctatgagagccacatcctgatagctctctacgggaagaactttaaggaggctaatgggaagaagaaagtttaatacaaccttctatgtgatatggctaaaatctggtcaaacatggaacccatccatagacaacatgaggtagtaattccacctcaatagacgcgatacgaatatgtccatactccatcatccaaatatgtttcttcgcccctagatgccatactagctctaaatatcccctcttggacgagaccggtgtatcccaacttagttaggatgagtcctcggtgatggcccaagggtacgaccagaaccactcgtccatcacctgtgccaactgaacataagcaatcaatcacttctagtgatccatatgactaggcaccatagctcactctgcctgctacaatctttaaca

SEQ ID NO: 47092 - DNA, 460 bp, Glycine max
  unsure (1)..(460): unsure at all n locations
ctcagcttgagatatgcttaatggaggaaaagaaagggagatgaggtgcatgatattgaagtagganaagagggagagaagttaaactttgagttgtgtcttacaagactctcattcatcaaagttacgacaagtgttacacatacttttatttatagcctaggtagcttccttgagaaacttccttgagaagcttccttgaaaagctttcttgagaaacttccttgagaagctagagcttagctacacacactcctctaataactatgctcacctccttgagaagcttccttgagaagattcctagagaagctagagcttagctacacacacctttctaatagctaagctcacctccttaagatgagaatctagagcttagctacacacacctctctaantagctaagctcacctcttgagatgagaagctagagcttagatacgcacctnctataata

SEQ ID NO: 47093 - DNA, 597 bp, Glycine max
  unsure (1)..(597): unsure at all n locations
catcctgtgagcgaagtcggcaaagaatgttatgatnatctgtgagtntnataaaaannananacagagaggttgancttgagatcgtcgacgtacagngacnctctaagtcgaccagcagcatgcatgcttatatatcattcacacgcaggagaagagattacgtcaatacacaacaatactctgcatagctaaaacactaatagaaccaccgagatctactataatgacggtgatgacctgcgttctccaagctcgagagaccacttcataagagtagctaccacaacggtaaacgcgtataaaatcctaagactttataaaattcgggaacagcctaattacacgggtgagatacttatctgaactcaaggacaggtgaaaagtatgagttatggaagaagaagtgcatgactgagcaattatcgcacactgaccggtgtaagctattaaactaatatgattaagagaccggacctaagcacaaatcgtgcagttattagagtttgactggaaggatatattatttgggggcgccggggatgggggnaggggaaagaaaatgaaagggaaaaaaggcggggcctcgcccctgcg

SEQ ID NO: 47094 - DNA, 324 bp, Glycine max
  unsure (1)..(324): unsure at all n locations
cttgatcanataccaatactatgagaaatactaaggtntatcttanattcggacgcctataaaagataagaagactcttcaaaactcttataaatactaatgctgaacgagaatcgaaaccgcttcaagttaaagaaagaattatggagcatagaacactaacctccaataaattagccgaagtgattagcgtccacaagctcaacgctaatagaaatacttaatgataaacttaatataaaacattggtcgactatttaaaatacataagtagggacctttcaagaattatactgtaaaattacaactgatgcatagagtaca

SEQ ID NO: 47095 - DNA, 571 bp, Glycine max
  unsure (1)..(571): unsure at all n locations
gaccgacggtctaattactgttgtgtnaatatgtttagtntaaaannnnnaagagagatgaactgaggcatcgagaccagaganctatctgccgacctgcagcatgcaactattgaataatgattatttccttacagttcaagacaatactctaagacgagctagacgaatgtctcgcactcataactcattaaaaaaactgcatatagagaaacagcaacataaattgtgctccatcagaatgataggcacagatccaactcttaatccactggtaatcttatgccaaacaaatcaactggtacaaaggacttcagcctaaaaatcattacaatatgtaacataatcgataaaacaaaaactttgttacggagtacaaaaaaatgacactcactgagtatgactatggtgaaaaagggcaaaagagtaagctacgaagaacgctctatccaagcgtatacatatacagtgctaaagatacatccgtatctggcataagatatacatattgactacaaaacaaattctttattacaaacaatgccttcacgagcatgtttagagaagaaag

SEQ ID NO: 47096 - DNA, 356 bp, Glycine max
  unsure (1)..(356): unsure at all n locations
taacattccttacctanatggattgtttaaatgagctcttctttatggggcttggttcaccatgacctatacctgtgaccaacgaagtttgtttagtcaacaattccatagtgctttcaattcttccaatcttgtatcaaattttaaatatggaagagtacccctgatctctttgtttcttaaggcatccaccattcatttcaagactttcagatcagtcgctgactccttgagtcttgttttgtcagccatgagttaacgagggcaccaatgcaacagtcaactcattcgcaaatatccgcacgaacactcgattaatgtaatctccattttcttagtattaaagcatgattact

SEQ ID NO: 47097 - DNA, 293 bp, Glycine max
  unsure (1)..(293): unsure at all n locations
agctntgatgatttaatcttcgcttatgaaagtatctatgagggtctgaaaagaggcaatattgttcattctgctttgacaaataataagtctgtggcaattattgaggatgagaaggaggaaggaacccatgctgtgactgtcattcctacatggccaaatttcccaccaactcatacaatgtgtttacccagcctaaatcaaaccttcttatacccaccacccaatttatcaccaagggcactctatattattaacanagcgctggtgccgcacattcaataccaagtgct

SEQ ID NO: 47098 - DNA, 59 bp, Glycine max
ctccatatatttagtgtccatttagtgccaatatgttacaatgtcactggattttgatt

SEQ ID NO: 47099 - DNA, 411 bp, Glycine max
  unsure (1)..(411): unsure at all n locations
agctttctagctnttcattggtgtattttgatttccttttggtgatctaaaatgtgggaatgtgctcaaatatgtggggcaattctggtttgttttcttgcttgattgggttgaattgggggtttgtatgggatggccctaagcctataatgcatnttgaagcaatgggacatgccacattgtccccgttttcttgctattgatgcctaaacgcgcgcccaccaagtgttcggtgaaatgcctcaatggcattagcgcgtgatttttataaggaaacaacccgtggggcattttggtttgcacatattctctattnttttgggcatgcattcattcccgaaaaggctagagtaattgccccacatatatcctangcctatgaaccatagttttatacaaaaagaaacacaa

SEQ ID NO: 47100 - DNA, 412 bp, Glycine max
  unsure (1)..(412): unsure at all n locations
tgtatactaacatggataaatgtgtgttctatttggaccatgttgttttccttggntttgttgttatctcacagggagtacaggttgatcaagaaaaggtgaaagccattcaagaatggccaacccccataactattagtgaggtaagaagctttcatggttaacaagttgctacacgagatttgttatggaatttagtactatggaagcacctcttactaagatttccaagaaaaatgtaggatttaaatggggggaaaaacaagaacatgcattcgctgcactcaaagaaaaattgatgcatgcaccaattcctacattacctaattntggcagattctttgaaatcgagtgtgatgcatctggcgttgggatatgggttgtttaatgcaagaggacatcccatacctac

SEQ ID NO: 47101 - DNA, 443 bp, Glycine max
  unsure (1)..(443): unsure at all n locations
agctggttcttgattnttcctcagttctttaacatgctntgaacaatatacttggacttcatttaactgtctttaggcttggcggccacgctcaacaaagtactttcgacacctactgtacgttgatttgaccaatgctgttatgggaatgttgcgacaatccttcaaaaccttattgatacattctgagaggttggttgtcatgtggccatatcgacgtccttctctatcataagccatcgtccatttttcctttgaaattcgatcaatcatgtggctatggctggactcagttcacgaaatttttctaaattntgatcaaaaatgtgcttgcaaggagtgtagactgcataanaatagttatgaataacaattttaagtatatatgaaacttaaataaacgtcaccatcaaatatgaaatcttacccaatcttttcaacat

SEQ ID NO: 47102 - DNA, 411 bp, Glycine max
  unsure (1)..(411): unsure at all n locations
cttggaaaattattcttaagataaaaactctcttggccaatcatttgtgcttttcaaaatcttttctaatagtctatctaaattcttatcttgagatctttgcttttgcttgacatcttgctttcttcatccttgaaattcatcttgaatgatctttgaaattccttggcatcatcaaaataattcttgaagctttgcttctacaactcattcaccatttcagaccacatatcttcaaatttaacaacttgataatcacccaacatgactttcttgaagcatttcgtgaatgtcaaaatatggacattagtgtttgcattangaatcaagtgccatgcacatagtctatggttcacattgngaaaaactatcttgattgcattctntatngctaaatccctattagttatg

SEQ ID NO: 47103 - DNA, 458 bp, Glycine max
atcttaagcacctgccgcatgcaagcttgcatgattcacattctccccctttgtcatgcaaattctttcttgatatcatcaaaacctgcatgatttacattctccccctttttgatgatgacaaccacctgtaggttatgagcaacaagaaagaaaaaatatctatttgcatatagtttactcccccttggtttttcaatgtttgcttatatgagacaattgaagatttcatatctttcatatataaaaagttgtctcataaaaaatagatattttttcttactattttatcttttatcttttctctccccctttgtcaacatcaaaaacaaatcatgaatagagaggagaaaaaaaatgttaccacttgttgtaatgtatgagaatcaagtgataccaaaaggcatcaaaccaatcattcaatattgatcaagctaaaacatgtatattatcacatt

SEQ ID NO: 47104 - DNA, 466 bp, Glycine max
  unsure (1)..(466): unsure at all n locations
tctaaactntatacaagaatgaagctctgataccacttgttagacattaagatattacaaactatntccccaattaaaattctattttaatttcaatgcangttacaagttcccttaaaaatgaactattaaataattattcaaataaaacaatctgaatataaatgcaaagcaataataaataaaagagtttaaggaaagagaaagtgcaaactcagatttatactggttcgaccacacccttgtgcctacgtccagtccccaagcaacccgcttgagagtgtcactatcttgtaaaatccgtttacaagttctgatcacacaaggacaatccgttctttgtgttcagatttctttacaacaagagaccctcagtctctctatctctttngacgaattagaaagatgagaagaataaatctctcttgaatagatagaatgacaatttgacactcattaattccta

SEQ ID NO: 47105 - DNA, 630 bp, Glycine max
  unsure (1)..(630): unsure at all n locations
aatcgccatcacctacgttccaccttttctataattcacaaantagactaccttntcttnnnnnnaaaggagagggtttgatactatggactacctgcactctanaatantatagcttctcgatggatacaagtacatgctatgcgtgtaactatataatctatttcttatacgacaccgaaatcaagacctatatacatatatatgcggagtgaaaagcccgtcctctttcttcgaaatagaattgtttgcactgcacctttttcttttcggctaacatattcttaccggagatcggcactggcagcgacatatgggactcaaccgattcttatgacttcaaacataaaatactcatgacatcctctgatcaataatgcttccattcgtaaactacattgaaaaccaaagccttcctacattgacatgtactcaacgagatattgtgatactgtacgtgcaaagtgacgacagaccccattgtcactattcgtattaacaatcctcgtgaagcatatatgggccactgctatataagtcctacttacaacggtggtcctacgaccactacactgacacactgacactgtttaccttaaacagaaaccaaataatttttggctatcgccc

SEQ ID NO: 47106 - DNA, 445 bp, Glycine max
  unsure (1)..(445): unsure at all n locations
agcttcctcgtggccatttgctgcgaaggcatttatttggatagttagttttaccagtgggacactactcttaaaacaaaaatggcatacaacctcctcccataaatacaaacatcaatgtaaatttagagcaagcttatgcgcatatttccttacgaacgttcacttgcacaagacatcctatcaactaagataaatgcacccatatacaatcaaggtagcttcattacctagattatttacatgtacttccaaggtgtatttgttatttacatcacacacgcctccttggctgaatttacatacatgcatactcaaagcatnttgaggtaccaaaaactgcacatgcgctcatcttggtatttctaatacccctacatatacaaacttcacgatgaatcttgactacctacacaataaggtgctacatttcatgctctttttt

SEQ ID NO: 47107 - DNA, 384 bp, Glycine max
  unsure (1)..(384): unsure at all n locations
ctaagctaacaaacttaganatcaagtggtcataaattccgaaatatatgtgtagtaaatgcacatttcttatctatatacaattgnttgttgcttgcttgaatcttgatttcaggtattgtattgtcatcatcaaaaagggggagattgtagatgcaattgcctttggtgttttgatgatgatcatgatgatatgatgaaattgatgcaaatgggcttttcaagattaaattcaagacaatacttcaagattacaagtcacaacatcaagatgatcactagtaaattangaagggaattcctaactgaattagcacaacggttggccaagttatctaaattaaaaagtgtttttcatagggtttactctctggtaatcgatta

SEQ ID NO: 47108 - DNA, 349 bp, Glycine max
  unsure (1)..(349): unsure at all n locations
agcttgcctcanagaagtccaggaaggacaatgttgctgattgaactatctccgccccagagtacgacagtcaccgttttaggagcgtcgtacaccagcagcgctttgataccatcaagggatggtcgtttctccgggagcggtgcgttcagctcatggacgacgagtattctgatattcaggaagaaatagggcgccggcggagggcaccactggttactcctatggccaaagttgatccagaaatggtccttgatatttatgccaatgcttggacaacagaggagggcgtgcgtgacatgagattctgngttaggtgtcagtggattccgtttgatgccgacgctat

SEQ ID NO: 47109 - DNA, 385 bp, Glycine max
tgacatgtagagaagaatcaaggatttcatgtctcaaaatgtcaagaacttttattttcaaaacaattaccaatttcttgaacatatcctataattcaaagaaaaacatgcaaattcgtacgtgcacacaaaattgacccaaaatattaaactggagatttgaagaaactaacaacattaacaaattaacacaactaacaaattaacaaaaccaacaaaactagcaaaaccaaagaacactcccccccatacttaaacaacacattctcctcaatgtagcacaattaaaagattaaaaacaattaaatcatcaaagagaatcggacaagtgtaataaaagcaaagaaggagataggaaaagaataactccctaagtcatggtgga

SEQ ID NO: 47110 - DNA, 389 bp, Glycine max
agcttcaaacctcttacaagggagcagatctggtcaagatggtacatcttcaaactttacatatgaaagaaggtgaagtcatctccgaatgaagaagaagagagtagtcacaataattactcaagacgcaagttaattcgatcaacaaagaaagtagtcacaataatagaagccaacgaaggcgaggtcgtgatggagatcgatgaagaggacaaggtcatggacaaggaaaaggatgaggttggaggccttatgacgataactacaacttccaaagaggttatgggcaaggcaactgaagatcgaggtatcacaagtcaaatgtgaaatgttacaattgtgagaagtttgattattatgcttctgaatctagagcccttagcaacaat

SEQ ID NO: 47111 - DNA, 371 bp, Glycine max
  unsure (1)..(371): unsure at all n locations
tgtaggctacatttacaaccatacattggctgtgaacaccatgaggaaattcacacaaaanactgaattggtgagacatggagttacaagatttgctaccactttcttaactttgcaaagattgcataagcaaaaggccaatcttagaaggttgtttacttcagatgaatggttgaagtctaaggtagctaaagagcccacagggaagcaagcaacagatgttattcttattccatcattttggaatgatgttgtttatgctttaaaagctatgaggcctcttgtaagtgtgttgaggctggtggataatgaaaagaaacctgcaatgggtttcatttatgaagcaatggatagggccaaaaaagcaattc

SEQ ID NO: 47112 - DNA, 388 bp, Glycine max
caaagaagctacctactctataagtacaagcatgagtaatactcgtcgctaacttagaagaaagatagtattatgagacacactctcaagatccacttctctccctctattattacttcaattttgcgctccccctattctctttcttttcctacataagagcatcctttttaagctttttatcctaggcatattcttggtgaggaagctccatcttccatgggttattacctagtggatgacgccttctctcacctcttattctttatcttccgcagcatctccatggtggaaaatcaccattgaaggacctcattgatgctcaaagatccagcctacatacaagctccacaagcaagcttaccattacgtggtaatcagagcacaa

SEQ ID NO: 47113 - DNA, 213 bp, Glycine max
ttgctagcgtgggtctgtgatagagtatttgacagagtttgttcttttggcgaaccgtataattggccttccgtcgccctttcttctcaagtgctttgtctccgatctatcaccacagatccgtcgcgaagtctaggtgttgcaacctctctccttacctcaagccaccgcccttgcccgcctccaggaggacaaaattaatgatcgtctaaa

SEQ ID NO: 47114 - DNA, 462 bp, Glycine max
  unsure (1)..(462): unsure at all n locations
agcttggaggattatggagtacctatcacatgtggtactaggtggcggncgggcgatggtgtacaacaagttttccacatccacaatgcgcgcataaacccaccatcccctgttgcccacctccaactgagctcacgtactcccacgtagcccatatcctcgtttctctcaacaccgggtccccatcaatcctcccaagcttccacaacatccaagcaaaacaacattcaaacagcacaagctatcacagccaagcaaaacagagcaaaggcagaaaactctgctcaacacatcaaccaaaatcacaggttttctcacttaaagaccacagtagagattccttcgatccaattctgtaaccgttggatcgactccaaatatttactggaagtctatagcgcataagcctacattttgaccggtgggatctactagcaaacattgagaactcattctgcacta

SEQ ID NO: 47115 - DNA, 365 bp, Glycine max
  unsure (1)..(365): unsure at all n locations
tacccctatggcttgcctccggacttcactccccgtgccactccggaagatttaagccaagcccctactttcgaggggcaactcccaccttatgacgactatcccgggcaagacgatgaggaaggagatacccatcttggccccctgctccacctcaaagatccgtccccccatgaactaccccaaccgaacatagtccgctatatcccggcttcacccacacccgtaaaagaatctgttcccttcgcggaagataagggaaagaatgacgcgctcgaagagagggtaagagcagtcgagggccttggaattacccattctcggattagcggatntatgtctcgtgcccaacatcgtcatccctt

SEQ ID NO: 47116 - DNA, 499 bp, Glycine max
  unsure (1)..(499): unsure at all n locations
aggtgagctgaacttgaggtcgatgccgtactcggaccccatactcacacgcagcatgcacctcgcagctacagacagtatgggattctagacacgtgcgtgtggtggaggctgcgtaataagcattcatctgacagcgttcatccaaccgtgattcttcgtctactacctctcctgattcgtacgatggtagggccaattcatacccttcgtagcagccccacttcgataatgatattggaactggctccgcccagaccatataaataatagccacccttcgctctatggcggagacgtgatgaataaagcaccttacccatagtcgatcttctccattcttaatgaaagcatctgcgatatcgtcgcatcaggcgttagaacaaaggttaagcctacttccataacactactatttgctaatcttatcttagactttcgtaccaaatgaggccctccagcagtatgctccctctggatcattttagaacaagttttn

SEQ ID NO: 47117 - DNA, 237 bp, Glycine max
  unsure (1)..(237): unsure at all n locations
cgcacggntactgagtatgggacattgcttgttgcgagtcttttttacttctttcaccccttgtgaagagactntattgcacccttgctgctaaacgacaaatgcgacaataactgtggtgcangtgccgatgtgaagttcgaatgctacaacttcaactacaagctggttcaaacaaacaaaaccgacaagaacggcttcttctacattggagcacctaagagcataatcgcatac

SEQ ID NO: 47118 - DNA, 432 bp, Glycine max
agcttaattcatttattctaatagactctaccttttccatctattgaaagttctaacacattcatcaagtgtcacttccccgggcatttccaacactaacgactaggctcaaattgcatgatttattcataacattacaaaaatggatttttttaaaaaaattaaattaaataaaagtgttcgtacctaaattcttaaaatcaactgaaaatcaaacttcaataaatgtgaattcaaataaacgactgagatttgcattgatcatcgagttgaattggaagataaaataaaatgcagaaacgagacaaaagaagaatctgaacctcatcgttggatgatctagcgcgaaggaattgattactggagctatcgacgaagaagacggaaccagaagcctcaccctgctataatacacagacaaccgaatcaaac

SEQ ID NO: 47119 - DNA, 363 bp, Glycine max
  unsure (1)..(363): unsure at all n locations
tattntatttatctatcttccagattcctttgcaaagacttatctaataaaatgcatgatatatgaatgctagatctttgcaagaatgcatgggcataaaattatcattctattcctagcaatgattntcttatgaaatcctttctttttgttctattagaagttaccctcttccgagggtctaacccctagaaccaatgcatccataccttctttaaatcttatttataagttaccctctcccgaacgtctaacccctaacacactataaagatgaataatgcaagataaaagcagaaaagataataggatagaaacacctttgcattgataaatagtgagtacatcatacatcgcttggct

SEQ ID NO: 47120 - DNA, 463 bp, Glycine max
  unsure (1)..(463): unsure at all n locations
agcttccatcattaagcttgcanaatcatagttgtttggtactcgaatgggcaccggagtgaaagtttggaagtaaaccctactatcattgtgaataatcgatccattaggaaaaatgaaacccaaccttgagttgacaatcgttgactgctagtttctcttataatgccatactttgtgtatcaattgggagagtatgtgaaagcaagataatgtgtgatttattagcgtttgccgtgtctcatatatatacacggttctcaccgacatattgcttcactttttttttacaaaagaacacgcgtgaacatgtttcgtttttatgtttcctactaaaccaatgtcgtgcatcagaatgtgttgtcaagtcagtcaatgtcgtgtcacgctcaaactttaatatgcatgcatattattatgtgttgcaatcatgacaatgttgtatcgtacatgcgtaattgat

SEQ ID NO: 47121 - DNA, 250 bp, Glycine max
ttttgctttaagagtaatgtcccactaaaactaactttccaaatgtttgcctttccaagaatggcaccgaggaagcttgcctcatagaggtccaggaaggacaaggcggcccaatgaactatttccgccccggagtacgacagtcaccgctttatgagccgtgtacaccagcagcgcttctaagccatcaagggatggtcgtttcttcgggagcgacgcgttcagctcagggacgaccagtatactgatt

SEQ ID NO: 47122 - DNA, 471 bp, Glycine max
  unsure (1)..(471): unsure at all n locations
agctntanatcccaataatctaacagtaatggtgactctgtttctctttgttgggaattttcaataaaccttataaaatactaaatgagcaccaaaacacattatgtcagattatcaagaggttttaaggaatacttggatccatagagtttgattaacatgcagcgaaatctgacagtggtcacgaacaattgatttaatgacctttctaaaccaaatcgccttctttcttatgggaccttcgttttctcttcagatggggagaggagaaactattttatgatttggtatattggggaccataaccatgccttattttttaaacctattagggttcccattatcccctaatgggccaaactggtttccgctcattaagcccatatcaattatctgttggcagtctaatgggctcacttaaatagatcactttatattgaacccatntaaatgtacataactaatataaat

SEQ ID NO: 47123 - DNA, 159 bp, Glycine max
aaaaccagcaatccatcaacagtgacagagagttattttacccctatgccacccctaatcttatcacctgcaataactcagatgacacatatattacattcatcacagacacaccacaacatactccttaacctgctcaggtagatcctactacaacca

SEQ ID NO: 47124 - DNA, 319 bp, Glycine max
agcttccattttcaatttggagcgtctcgatatattacggtttgtcttccggacatccgcgcataaagatattgtcttttcaatttgctcatagcttcagagctaaatattgagcgtctctaaatattacaggactcaataagacatctgagtaaagagttattgtagattgaatgtgctacgagcttccgctttcaacttggagcgtctcgatatataacgggactcaatcggacatacgcgtataaagttatatgtcgtttgaatttgctacgagcttcaagtatcaatttggagagtctcgatatatttcgggact

SEQ ID NO: 47125 - DNA, 368 bp, Glycine max
  unsure (1)..(368): unsure at all n locations
acgagcaataacttttactctggtgtcctattgtattcagtaatatatcgagacactngaaatagaaaacgaaaacttgtatcaagtgcataccacaatcacatttaacttgtcgcgaaatatgttgagatgctcgaaatttgaaaagaaatttcatagcaaattcaaacgacaataactctttacacggatgttcgattgagtcccgtaatatatcgagatgctccaaattgataacggatgctcgaatcatattcaaacgactataactctctacacggatgtctgattgagttccgcaatatatcgagacgctccaaattgaaacggaagctcctaacaattcaacgaccatacttttactcgat

SEQ ID NO: 47126 - DNA, 345 bp, Glycine max
  unsure (1)..(345): unsure at all n locations
agcttcttgatcgcgatcagtatatacattgtcttacactgtttgatgaagatatcgtacgagatacattatggagtcatttcgatgcaatgaaaataaccaacgcctataatcagggatttcgcatagatagttcctataatacatacaaatacggtatgtctttactcgactttgtgggtgtgctccaaactggtatgacatctgaagttgcattctcctaaatggagggagaacatatgaataatattgtttgggctctggaacagcttctaagtatntttctgagaagtgatgcaatccctcatagttattattaccgactaagatccagtattgaggaat

SEQ ID NO: 47127 - DNA, 336 bp, Glycine max
  unsure (1)..(336): unsure at all n locations
gcttctacaatctccctctttttgatgatgacaacttctgttatctagaaacacacacacacattctttcatagntgatcactcacataaatatccattctcccgctttgtgtttgaatttatgcttctcttaaaattaagttgattactcatgtgagttcttgatttattccctatttgtctccccctctggcatgcacataaagtcaaagtgcgtaacaaattaaaaacttacaaatatgaccaagcatccatactacatccatgggaaaatatcgaccatatcatgaaacacgaaccatgaagcaacaatcatgaatagattaattataaaat

SEQ ID NO: 47128 - DNA, 475 bp, Glycine max
  unsure (1)..(475): unsure at all n locations
agctagccgccagtagtaatggcggattgcatgttaattacatacccccaccggaatttgttttgaaacggaccctctttcgtaaattgtttttaaaaggaaccccatacagtaaatttgccaagaaattagtgttgtacccataaaataattttttaaaatgaataaaaatgttataagagataaaaaaaattgatattaattatatcattctattttttaattttatagtatcgacaatgagaaaattatataatatttttgaaaatatataaatgcgtaaagaataattataatttgtaataatataagtattttgaatttctttatcatgagattatatatcttataacaaattataataatcttcttctataaaaaaatttatatatatctgtactgaattcagcaaagcataatatttagaaaacaaataanatagtatctaatatatttatttcaagtttttcaaaag

SEQ ID NO: 47129 - DNA, 447 bp, Glycine max
  unsure (1)..(447): unsure at all n locations
tgtcaaaactcagggcanacacatcctcggtccaaggctcgacttacctaaagttcacccttggtgagccctttttgtttctaagttccatcttcaaaggaactcgaggtacacaaggtttgtccttgacgatcttctttattcctaattnttatctgtctaggaatacgagtatatataaaacccaaggtctgcccttggtacagattcctccaaaacccaaggtccacccttggtacgtactcctgtaaaacccaaggcatcccctangtccactcactcgcacaactatgacgaccacaatcaaaggtctaagttcaacaacacaaactaccaccaaactatntggcaaggcctttcaatcangtggaagtcatacttgctcctcataaccatcagagaagaagcttcgcaagtcataacgacccatcacccaaatgagtgaca

SEQ ID NO: 47130 - DNA, 445 bp, Glycine max
  unsure (1)..(445): unsure at all n locations
ggcattgtttatctacacacagccacctacaaacggagctcatcatcgtgggaagcgaccccgagatgagcccgaaagaagcaagagcgtgcaagacacaccgnagaagaggcacacgcgccggcaagagacgcgaagctagaaccagcgatcacacccccaaaagaagctaggtgcacccacatgacaacagacgtgagtagtcaagaaaggtgtccgtacgacaaagacaactcgaagtgccacgcagaacgaggcaataaaccctatacgacctaaatgaggtggagactacacctcttcgaacgagagtaacctatgcgaaatgcnaggtagataaatggactgacacttagcacatgggctcaaatataacgccaatgcgtagagagaacactaaggccatgcctggagacggggacgcaatgcacagaggagtctggcg

SEQ ID NO: 47131 - DNA, 419 bp, Glycine max
  unsure (1)..(419): unsure at all n locations
agcttcaacattcaatnttgagcgtctcgaatataacgagactcaatcagacatccgagtaaaaagttattgtcgcttgaattggctcagaggttcaacattaaatttcgagcgtctcgctatattacgggactcaatcaaacatccgagtaaaaagatattgtcgtttgaattggctcagggcttcaacattcaattttgagcgtctcgatatatgacgagactcaatcagacatccgagtaaaaagttattgtcgtttgcatttgctcagaggttcaacattcaatttcgagcgtctcgatatgttacgggactcaatcagacatccgagtaaaaagctattgtcggttgaattggctcagagattcaacattcaatttcgagcgtctcgatatattacgggactcaatcagacatc

SEQ ID NO: 47132 - DNA, 344 bp, Glycine max
  unsure (1)..(344): unsure at all n locations
ntgagccaattcaaacgacaataactntntactcggatatctgattgagtcccgtaatataacgagacgctcgaaattgaatgttgaagctcttagcaaattcaaacgacaataagtatttactcagatatcttattgtgtcccgtcatatatcgagacactcgaaattgaatgttgaagctctgagccaattcacacgacaataactttttactcggatgtctgattgagtcccgtaatatattgagacgctcgaaattgaatgttgaatctctgagcaaattcaaacgacaatagctttttactctgatgtctgattgagtcccggaacatatcgagacgct

SEQ ID NO: 47133 - DNA, 262 bp, Glycine max
  unsure (1)..(262): unsure at all n locations
tgtatatctgatcaccacaagatgaatctgcggtcgcattgtgtggaacttggctcgtgccacaggttggacctgtcttaaccgaagaaatgttgcggccctagactaggataagatgaaagggctaccacacatggaagctgattgttatgttagatcatcaatcatttttgcatggacatctangggaagagacatatcttatgaactcatagatgcgcgatcaaataaatataaacgctacacctatctactgtcaatg

SEQ ID NO: 47134 - DNA, 420 bp, Glycine max
  unsure (1)..(420): unsure at all n locations
agcttctaatatctcccacactntntgaggtgtttcattcttggatggccttgattntctcaaggtccacttggaccccatttctaccaactacaaaccctaagataactatattttctacacaaaaagtacacttctctatatttgcatagagggtgtttttcctaaggactgaaagaacttgtctgagatttcataagtgatcatctaggcttctactgtacactataatatcatcaaaataaacaactacaaatctacctatgaaatcccttaagacatgatgcataagcctcataaaggtgcttggtgcattagtgagcccaaaaggcatcactagccattcatacaaaccaaacttggtattgaaagcggttntccactcatcactccttttcatcctgatttggtgatacctac

SEQ ID NO: 47135 - DNA, 379 bp, Glycine max
taagcttggtgagattattatattattacatattttctttaataatacttaaatgtattattaattaaacacaataaattataacattattaattatttgaaagtattaaaaaatggaaagaaaaaaaaaacaggatcaaaattcgggtttgtattcttaacctgattttgacaaaaaaaaaaaaaacaagggaggggactgagattcagtgtgtctgtaacaaattctcaccctgaataacaaaaatgtctaattaggtaaataaaataaaaatctcgaagacctttcttgaatagttagagagcctaatgaaaacacaaaaattactttttaataaagtgtgaattttagaaaataaggtcaccggtattttggaac

SEQ ID NO: 47136 - DNA, 455 bp, Glycine max
  unsure (1)..(455): unsure at all n locations
catcaagctttaatagttattgaaataccaaatntttatccatcacactattcaaccctccttctggtgtgtctcaagtacttcacctccaacactaggttgaaggccttcttagcacccttaacttacatgcctactcacaaacaacaactaagcttagattccttgaggtttgaggtacaacacatctatacccaccatctcactcatggtctatctcaaggattcaagtttcaccatcaacaacaatccaaatcatatacactaaaaggatcaccaatcctcttaggaagtagttctcaatactctgacatgacattcggagttaaaatgtatgggtggtactcaagaagatatcccactatgcaagactccgggtcgctttagtgaggtggggtctggcatgaaactcaccctccaagtaaaccatttatcaataacaacaacaacatctt

SEQ ID NO: 47137 - DNA, 411 bp, Glycine max
actcagcgtgtcgatatggggacccatcacatgtggactatgtgtgtgtcgggcgatggtgcacaacaagctttccacattcacaaatcgcgcataaacccaccatcccctattgaccacctccaactgagctcacgtactcccacgtagcccatatactcgtttctatcaacaccgggtccccatcaatcctcccaagcttccccaacattcaggtaatacaacattcatacagcacaaactatcacagacaagaaaacatggcagaggcagaaaactctgcccaaaacaccaaccaaaatcacaaactttctcacttaaagaccccagtaacaattccttcgttccagatcgttaaccgttggatcgactcgcaaattttactgaatgtctgttgtacataggcctaca

SEQ ID NO: 47138 - DNA, 454 bp, Glycine max
  unsure (1)..(454): unsure at all n locations
agcttcaccttctggtcctcctcatagttgtggcatgagaaaacatgctctatnttcatctcccactccaagtaggcctccggatcattctttcctttaaatggaggaatgttgagtttaataccatcaattcggttttgtctaggaacaccatcattccctcttctcctcctttcttcttcattatgatctctattctccatttgatccaacctctcatggagcgcatcatctcgttgtttcattaacctctccatatgttgcatcaaagcttgcatttggaattgcgaaagccccactccatcattaggattagtacctgacatctcaaacatacaaatcaaacgtaacaagacaattatagtggctgtgagaacccccccactcaagtgttcacacaattatggctttcttaatgaacactcttgcctttacactctaattnccttgagtc

SEQ ID NO: 47139 - DNA, 382 bp, Glycine max
  unsure (1)..(382): unsure at all n locations
cttcaccttttgtcctcctcatagatgttgcatgagaatacatgctctattttcatctcccactccaagtaggcctccggatcattctttccttttaatggaggaatgttgagtttaataccatcaattcggttttgtctatgaacaccatcattccctcttctcctcctttcttcttcattatgatctctattctccatttgatccaacctctcatggagcgcatcatctcgttgtttcattaacctctccaaatgttgcatcaaaacttgcatttggaattgcgaaagccccactccatcattacgattagtacctgacatctcaaacanaccaatcaaactgtacaagacaattatagctgcctgttgaatacctcact

SEQ ID NO: 47140 - DNA, 420 bp, Glycine max
  unsure (1)..(420): unsure at all n locations
tgcttanatcttattattcagaatgtgatattataaaagtaatattctcgtatttataatgagttntgagaaaaaaaatcattgtgttgtttatttaaaagtagcaataccattattgattttatttctatttacatggtttataaaattaattttgacacgtaatgtgatttgaaaaattgcatattgggtctaaataaggtgacgtttgttttaaggtatggaatttcattttctgaaatcatattcctatgaatactgngcctgcaaatattattttcatatataaacatatttttttgacaatagtaattccaaaaaaaacatttaattaaaaaataaaagtaaaaaataatgaaatattgaagtagggataaataattattgtagaaaataacaaatacaacatacccatctttc

SEQ ID NO: 47141 - DNA, 241 bp, Glycine max
cgacgctgagaaattgaacttcttgagccattcctatgtccctttacaaaagagagttaaaaaaaaaagaaagacagacatgagaaagccggtatatttgtgaattgtgaaattcagagacagcataacataattgactttaacactgtaaaatctccgtccattggaagctatccctacacgttctaacagccatgaaataagcctttctcacaagttataattagcttatagtcttaca

SEQ ID NO: 47142 - DNA, 406 bp, Glycine max
  unsure (1)..(406): unsure at all n locations
taagtcacctgcngcatgcaagcttaagatgaactgttgatcggccagtgcgatgctgatttttgtatgactttactcatgcataatttcagtagaacatatgacttatctcattggtgttatctcatcattgctatcactcacaatgactcaagatcctaaataagataaactcataaattctaagattgatactgtttgatcttatattcaatcttaatatatgtgtaaagtattctctacacataaacattctttttaatatagctcactcaactttacatgcttaatcttcaaaaaattaaattagatgtttttttaatcgaagagctgagggagtgcactaaatttactacactctatatttgtccatcaatgagtagacctattgactactacataaatg

SEQ ID NO: 47143 - DNA, 189 bp, Glycine max
tctttatacgtatatgataagatatatattcgcatgtattattatatcatcagatacgtcctcctatttggaccaaaccagacatacattgaggtatatgactgagatcgattaaaatacataattattaatacttcgtctgcactatttccatcatttatagtgaattcaagcaccttttacacctga

SEQ ID NO: 47144 - DNA, 235 bp, Glycine max
taaatctgagttgatgaggaaagggcccttgcagccgacatagacagtgtggatgacactgtttgtgagaaatacgacatcttcaaggagaaatgggccttattttgtctcacccgcaaaaacccctcctggtacgtatgtactatgtaatctgattcgcttaaggttagaaattccgttcttataatatattgtagtcatcattttcaataatgttctacttttgcatgatgtg

SEQ ID NO: 47145 - DNA, 192 bp, Glycine max
  unsure (1)..(192): unsure at all n locations
cctatataatatacccttcctaagactctaganactgacttgatcatccatcttgaatatctgtaatgtctttgtcttgaataaatctttgagaaacaagtgatcatgcattggcataatcaaaacattcagcttgatcctttgtctacacataccacaagacactggatgatatacatggagaataagatg

SEQ ID NO: 47146 - DNA, 443 bp, Glycine max
  unsure (1)..(443): unsure at all n locations
agcttggaacacaagacacaataccgcccttgttacctttgatggcacaaaatagtttgttcctcattgtagtcacactcctcttccatgttcgagttattttcttcagtatcttcctctgcttcatcatcatcaatgggtatccaagctaaaccaaacattggaagaacgacaaggagaactttatcaattttatggttgctccattttttcagaatctccaaaaacaatgatggagctacaaccaatcctgctccaacgccaaaacccactcctattgatacataagtccagtcaaacttaactccaaaatctgtatgtacttcaggcactttntcttctgcattgctcatatcagagcaatttttaggcaaaggaactcccataattctgctttccagctangaagatgcatcaatgattgaagctgtgacctacgggat

SEQ ID NO: 47147 - DNA, 464 bp, Glycine max
  unsure (1)..(464): unsure at all n locations
agctttgttcttttgtaaaatgagaagttctggactctttacgttacctaaaaacctttgggtggatccaagtgcaccgatcattcatttgcatattcatgttttggtggcatactcacctttgtttatttctttaggaaattcatcataactaagaaaacaccaaggcacccctataacactcgatccagaaaaatggataatgaagagggcgtgcaggaacagatgaaggccgaactatcggccttaaaagatcaaatggcttccatctcggaggtcatgttaaaactccagaaaaccatagaggacaaagccatggcaaccgcctccagtacgggtagggaagcggagccggtgctgcaacccgctttatatccgggccgagacagaaacacgaccgtgtntggtcgaaggtatagtctgcaagcttatccttatggcttgcctccggacttcactccccg

SEQ ID NO: 47148 - DNA, 403 bp, Glycine max
  unsure (1)..(403): unsure at all n locations
cttgcagatttggtcttcgctgggtaaaggatcaaagtgggtttgaaaagaggcaaatntaatcatctgcttagacgaattataaaactgnggcaaaggaagagggtgagaatgaaggagaaacccatgctgcgactgtcgttcctaaatagaaaatcccttaccagctcaacaaacatcattactcagccaatatcgaaccttctcattccccaccacccaattatccataaaggccatccctaaatcaaccacaaagcctgtctaccacacaaccaatgctaaacaccacctttagcacgaaccaaaacaccaaccaaaaagggaatttgcagcaaaaagcctgtaggattcatcccanattctggtgtcatatgctaaacttgctcccatatctacttga

SEQ ID NO: 47149 - DNA, 291 bp, Glycine max
  unsure (1)..(291): unsure at all n locations
attccctagaggatggtgcctcctctcacctcttctcattngtcttccgctgcatctgcatggtggaaaatcaccattaaaggacctcattgaagctcatagatccagcctccatagaagccccacaagcaagcgttcatcacaacctttccatcctatgtagagatcaatgatattgaataaccaaacaaaaatattatatggcttatagagatgcagaacataacatatatttgacatatgatctttatacatgctattgatttggattctttctacctaacacatctt

SEQ ID NO: 47150 - DNA, 404 bp, Glycine max
  unsure (1)..(404): unsure at all n locations
agcttgagtcttccatagtagatgtgtaattttgtgaatatgactcataaaccactntggtggtggcgttttgtgtgagttttgtggcattttgcgagtattttgtgtcattttgtatgcattttcttgacaaaactcacgtttggacactattttagtatcacaaaagtacaatcgctcaattgagtgagagagttggaaattgataactactatatatgagttatttttatgataaaataaattgaaaatatccttgagaatatctattcagcagttattcttgtattaaatgatacgaattgatatttttcttattaaaagagaaacaaattgagataatatccaaaatatcacgaagtctcaggaagatatgattaaaagcaaaacatatccataagata

SEQ ID NO: 47151 - DNA, 361 bp, Glycine max
  unsure (1)..(361): unsure at all n locations
cacacattacccattggacatgtggcggacaaacaagagaagcctcgcctcgatagacctttccaacaatatgagcagcgctgaacggcgacagagcccagaagcggtgggttgtgctcacccatctgagcgggagataacacccgatatggtgcgcgctcagacaatcctgtctgaggccgataggtggaccatgcgctgataccctcnacacccgctgacgcgagaccttagaacgttagttttnaaatattctgatcctgttcatacttcaatatatttaaattgagaaaagaatatctcagcaaatacttagttacctttggtattaacctcacactgttattaattttactcttct

SEQ ID NO: 47152 - DNA, 438 bp, Glycine max
  unsure (1)..(438): unsure at all n locations
ggatcttaagcacctgggctgcagctgatgagccccttgagagatcttatcctagaccagagnatatccacttcttagagtgcggaagaccctctttgagagagaacatgcatatctggtgaagtctttgtactcaagcttgagtgagccagcctatactgtgtcacttttgagatcacgtccttgtaacctgactatcatgctgtatagtggaagattctccttataggagaattacaagcgtatgctcccattactacctttaattactaagagtctatcttaaactttacgaagcgggaaagactgagttttcccaacacattccaggagatactatatattattataattgaagatgatcatatacttacttatatccataatgttttgttgcgagcgaccagagcacccgccaaggataaatacactatgatt

SEQ ID NO: 47153 - DNA, 280 bp, Glycine max
  unsure (1)..(280): unsure at all n locations
ngctaacccacggnagctcctaatatctcccacactgtatgatgtgggccactcttggatgaccttgatcttctcaaggtccacgagtacctcatttctaccgactactaaccctaagataactatattatctacacatgaggaactcttctctatattgtcatagagagagcttgtcttaaagactgacataacttgcccgagatgtcctaatagagcatctaagctcctactgatcactgaagtatcatcataattatcaactgcacatctacctatg

SEQ ID NO: 47154 - DNA, 458 bp, Glycine max
  unsure (1)..(458): unsure at all n locations
agcttgttgagaacctgcacttgactnttggtctttttctcttgttcttccaataatgtctgatggaaaactgccccatccttcaagttctgcattacctttgagatggctaggcattcaacctcagcttcaatccttagcctaaaaaggtcctcaagctccgactcaaccactttacatttttcatccgacgaatctacggttctagcagactcttccctagaaatcttaacactactcgaggatgtttcaagttcagcaatcctggagtccctcagagcaagcacaccctgtaaatcttccaacttgctttccaaaatatttatattttgtgtcaggctcaatacctgaggatctgaggaacttgaagcagtttgtttaatttcttctgcaccagactgaccagattggcttgatntattaagtccaagatcaatagtagtaccagcagacgcact

SEQ ID NO: 47155 - DNA, 410 bp, Glycine max
  unsure (1)..(410): unsure at all n locations
ctcacttgttctanatatatgttgtataattaggatntatgaatccataaggtccactctctagaagggtgacccgtcacagttcatgatggttgcacaaataattccaaataaaaaagtactgaagtctgaaaccataacaatagggccaagttaattgaccctcctttccccattttacatgcaaaggctaatttgaaaacacaacaggcatgccatcaagtccaaaattcaaaacagaacacactcaccatcaagaaatcatcttgaaatttcccagattcaatagcatgcaatcttctcaggagacttgacacttgtcttaatagtgaattctcacaaggaacatcacctgcttttaaacagtaaggttaatgatcttatctattagagtttcaatatttgaacat

SEQ ID NO: 47156 - DNA, 449 bp, Glycine max
  unsure (1)..(449): unsure at all n locations
agctttggctagcatgttacctaaccgatggtggtggtgcgctaagggaaagtccacatatatagattactatgagtgtagataatataccgtgtcatgtttttgtntacaatcggatatgcaggattcgctgagctattctgacttttcatgctcacttttttcttagctaggtactagtattatttagtaaccggtgattctattctttgaagaatcatgattcatttacagcgaanaaagcatcatgcatcattcatgcttgtttcactgcaaccccagattttattctggtatcaagatacttatggtggaggcgacaagtttaactgatctgtgcctaccactaaatgaaaggctgcgtgttactgttgacatcacacaaatcaatatgttcgtcattaatntataatattcttccttaacccctgttctggaagtaaagcatg

SEQ ID NO: 47157 - DNA, 570 bp, Glycine max
  unsure (1)..(570): unsure at all n locations
accctcgtcctcgctagttattantaattgttaactgtanncntnttnnnaagtgagcttgtgtgtctccaccacnccgccattaaaaacccgctcgtaactactttatagagagacgaaaattatcgctgtcttgtgtacacattcggccacatcatcgtcacagttactggacaatctgtgcatgtatctgaccgcaacaggtagacgacaccttcctctatgtgggctctattctggtcacaatcgcatcatgcgtcacaatccttagaagaccctatttagaataacaattagaaggttggctaatgactatgaaccgagcccaaatgcgaatgacgctctgtaacacgaaacaatacgctgctcactgataatgaccaaactgtatcccgaggcggacttttagtatgtctcactacattaacattgtcaagggtgccataccatgcactattaacgatattttgctaaggactgccatatctaaacactatttgtaaccgaagaactactaacactttgacatatctgcgtgaacttggactcgggacctgttgactatattcg

SEQ ID NO: 47158 - DNA, 546 bp, Glycine max
  unsure (1)..(546): unsure at all n locations
tgagcnctaatgggttatagctatgaagangtcanaccnnttannataagctcgacagtgtgtagcccaccatcttntcatagtagagtactcgtaatgtgtctactatcattgttattatatttttctccgtcattgaggtgccacttgagctgccaggtctctccaactatgagantactactactatagaacaataactggatgcacgtntttgtctatttggagctacatcctaatcgcctcctatgatatcaagttgctcaaataacctcatgacaagaatatatgtacggtcaggacaagcgcgaacacatcagacacatattcaagtttcctcccattacatctcgaacttcacaaaatactcactcgaccgaaacatgtctctcctcaatattttatgcatatatctcctgataaactcctacttcgatataattcgctttgctcaactctgtccacactctttctcatcaaaacattcgcttactgtcaatacataacgtacaaacatctcgaaactcaactgcgtactacataatt

SEQ ID NO: 47159 - DNA, 368 bp, Glycine max
  unsure (1)..(368): unsure at all n locations
tactggtaatgtgtctactatcattggtattatatttttctccgtcattgaggtgccacttgagctgccaggtctctccacctttgggcgtattcttttgaaagattcgtgcccnccttttgcacatgttctgtagttgcatcctatctgaagacattatactgacactgcctaacgaaggcaaccactaggtccttccaagaatggactcgggaaggttccaagttagtgtaccaggtaacagctaccccagtaagactntcttggaaggaatgtataagcaattcctcatcttttgcgtatgcctccatcttctgataatacatctntagatggttcttggggcaagtagtccccttgtacttgtc

SEQ ID NO: 47160 - DNA, 298 bp, Glycine max
gagaaaagggaagggaagttggaaggtaaaagttaggaaagtgggaaaaaaattgagaaaagtttagattattgtggggaatgaatgggtgagtgggaaggagaaaatagagggaaaagtaagaaaatgtagataagtaaaggtgaaatatttggtatgagaaagataaatgatggaaggttaagaaataaatagagtgaaaaattgagtatatgagagagtgatgtaagagagatggaataataggagatttagggggaataataggagagaaaggaggataaatggggaggaaaaa

SEQ ID NO: 47161 - DNA, 357 bp, Glycine max
  unsure (1)..(357): unsure at all n locations
actagccatggtagaagtctccacagatgccattgtctcccttgcccagtattatgatcagccgttgtggtgccttcacctttgggacttccagctatcacccatggtagataatattgaagagatcctagggtgtcctctanggggaaggagaccatacctcttctcaggattctatccctcattagcaagaatntctaaaatagtccaaatctcggcgcaggaattagaccgccaaaagcaagtcgaaaatggcgtggttggaataccgagaaaatgtttggaggcaaaagcaagaatcttggcaggtaaaggcgaatgggccccgttcatagatattctcgcactattgatctt

SEQ ID NO: 47162 - DNA, 163 bp, Glycine max
  unsure (1)..(163): unsure at all n locations
tgtgtctactatcattgttattatatttntctccgtcattgaggtgccacttgagctgccaggtctctccaactatgagantactactactatagagcaagacctggatggccacattntgtccacttggagctactagtcatttacctatggtccatatatc

SEQ ID NO: 47163 - DNA, 556 bp, Glycine max
  unsure (1)..(556): unsure at all n locations
acgttgatgcctcatctgtagcgacccttgnatctaagcattgtccccgcctacccgtgaagatcaagaacgatgaaaactgtttatgaacgtcnaagaacggtcgaaaccttcgcgaaattccttaccgaaacggttcggaagcgcctcggcttagattttctttacagaaacaatgtgtccaagctaattccaacaagagcgaagtgcctaatgggctgaacccttntccttctcactttctcccctatttatagcaaaatatgggagatgcttgccggccagcgtccccaggcgagcatgggtgcttccttcagaagcaacagccttctggaggaatcatctataagggccaagtgggccttggtgctattagcactcncattatactaagtaccaccgtctctgtctttttattgggacttgttttcgtaaagtcccgcaactatctatgttgtgccgatcttttgttgtttcgaacagtccgatctggcgatgatatattcctctttagtgcggagttcttcctactatatgacattttctttgtactgtn

SEQ ID NO: 47164 - DNA, 529 bp, Glycine max
  unsure (1)..(529): unsure at all n locations
ccattagatgtngcatttcagtatcaactcctctaatggaataatgatatgcacttctcgcattgtataatagattgattgtggtgcaactatagacattgtgctccttcaacgttagcacgatgtttgttgggtacaccataaactgtgtgatctcagcaataatcttattttcatccttgagccaatccccaacgtatggatgtgcaggtatagacattgaccattaatgattgtgaatgtcgacatataacatggccagccaaccgttctctccatgcactggatttccatgatcgctggatggacaaccacgatttcgactgcgaatggcgcttataacaaataatttatatctacactttgacagaccgctcctttcacacccaattaacacaagtgaactattatgtcgtngtgcaatagtgagagagacacataactgccttgttccatgtcatgcccctctaagaacaataaggcttcatggtctttcattcgtcatcatgaaggcgctcttacaattttt

SEQ ID NO: 47165 - DNA, 590 bp, Glycine max
  unsure (1)..(590): unsure at all n locations
nacggggtgttggattcaatcccaatgtactangtcanactatatagtactacagnttcgagccntatnngtcatcatttntcgcatatttgtgatttcgtttctcgctgctgttcatcaccaacaagtaagtattccatccctaagctgtctagcttctcattggcgtattntgatcttctttttgtgctctaaagtgtgggaatgtgctcaaatatgtggggcaattctcgtttgttttcttgcttgattgcgtcggattgncggtttgtatgtatagaactcggaatcctttcactgtttaacacctgcctaagacggcctgcgttcatcatacattgttctccttctcgaggagagattcatttgggccctcaaggccgtccacgcttgcgcactccttataagttatagcccctcttcttgctattttctggcggacacatgacttgaggcttacataattgtcattatcttcacccatcaagnannaataaacatctataataatacacggaacgaaataataattnngtatctaccagtgtntggagacactattatagcacgagactaatccttttaatctn

SEQ ID NO: 47166 - DNA, 224 bp, Glycine max
gctgaaacatacagttctaagattctaatatggggcgtagctatcatatgctgcataccgaaacccagaattttcgggcgagaggtcgctcgctggctcctacaacggaatttgactttttcagtaacaaccgacctcaatgtgctttgggaaagaaaacctccctgctttttttggatctacaaccgcccaactactgggggggatacacttctgactgcata

SEQ ID NO: 47167 - DNA, 309 bp, Glycine max
  unsure (1)..(309): unsure at all n locations
ctttggcattcgcgtttttggaggaaacgtaatcaaactttcctcttttcaatccaacctcgattctttccccggcaaacaccaaatccgcaaagctggacggcatgtaacccactagcttctcatagtagaacactggcagagtgtctaccatcatgatgatcatctctctctcaaccatgggaggagctacttgtgccgccaaatccctccatcgctgcgcatattctntaaagggttcgccctctntcttgaacatattctacagttgagaacggtcangagccatatcnagaatgtactgatact

SEQ ID NO: 47168 - DNA, 306 bp, Glycine max
  unsure (1)..(306): unsure at all n locations
gagatgatctcaaataagattatttttattgttntattaatgaataatgattaatctcaaaataatntatgcaggtttaacaaaaagggttgaaattggaaattaagtttaagcacttaccaaagaagagaaagagacttgagacttcaagatactacgatcaagttcattttcttgacaaccagaatcagggtttatttttntagctcattcttatttatatactcatctctgtagggnttatantattataatnnttaattcgtacaaatatatatataataagtatgtcaactagaaaatatg

SEQ ID NO: 47169 - DNA, 341 bp, Glycine max
  unsure (1)..(341): unsure at all n locations
ctctcccaatntatggtgtatttgtagtgttataagtannttttgttaagcataggtaataaatacttagctattttcattctgtgtgtctaataatcattttctctcaatatcaggttaattaggcaagctttggaaagtgttgtattcaccttctcgctaagccaatcagctggcttagcgagcgtccactaagcgcaacactcctgngctaagcgcgaggaagaatccagaagaagatgagctgtacatgctcgctaagcgcacctgtcgcaacctaccctnttgcgggtgagcgaggcaaggctcacgggtgcgtctgtcttatgaggatattgcgc

SEQ ID NO: 47170 - DNA, 293 bp, Glycine max
  unsure (1)..(293): unsure at all n locations
atatgggccatcaaatctatcatgtgttgacagtaactgatatgcccatcgaatttctcggtggctgaacacactgtatcgatggcctttgctttggctagtaatcacaggaggtcctgacttacatntaaggtcaaggcaaacctatccatccacatggtcgcttcttgatgcaatgcatcaatcacccttcctcttgtatccttctctgcgtacgcttgtgcgaagacctctactatttcttgttcatggatcaaagactggtctaactcttctttgcactgttctattat

SEQ ID NO: 47171 - DNA, 398 bp, Glycine max
  unsure (1)..(398): unsure at all n locations
cgtctcacgaatgtcatgtgctcatgcaataattgttagccatggctatacgagacatcttgccaaacaaagtcaggttagacataactctgcctgtgcttttcttccatgctatatgtagcanagtcattgatcttgtgaagtttgatgagctgganaatgaggctgcaattatactgtgccagttggagatatattttccctctgctntctttgacatcatgattcactagattgtgcatctggtcagagaaatcaaatgttgtggacctgtttatctactgtggatgtacctgattgagcgatacatgaagatcttaatatggtatacaataaatttatatgcgttaaagcatctatcgtgaaaggtacatggagaagacgccatgaatttgtta

SEQ ID NO: 47172 - DNA, 373 bp, Glycine max
  unsure (1)..(373): unsure at all n locations
taccttgttgatcattntatccagcatatactnttcactttntatcaattagtaggccattntgattcctgtatacaatttgtattntattctttagtgttgactcttgactcattntttttattctaattgttgtttctccattatacttctgctttttaaaaattctcatagatacattaattaaaaaaaaaagccaaagcaataccttaaaaaaaaaggcaaaaaaaaaagtcaagcaaaaaataaataaaaaaagattaaaaaaaaagcaatactacgacggttattgtataaccgtcttagtatgttacacctactacgccgggttatttataaccggcataaaaattcattntcgcatgtcatatac

SEQ ID NO: 47173 - DNA, 291 bp, Glycine max
ttgggggaatttgcgcagagttttttggggttcaccccggaacaccgaagtgtagaaaaagaaagggggccctcccttgggttacccaggaaaggcttccccccaaattgctttgttaaacttgagagaacttttttgtgaaaaaaaaaaaagggggcgccaatttatgatccaaaggaagaagggacctttatggtctttttaattcttcttaattccccagggtccagcctctttttaacaggcttcttgaactttttaaaactcttgaacgtcttgaaacctcttaac

SEQ ID NO: 47174 - DNA, 418 bp, Glycine max
  unsure (1)..(418): unsure at all n locations
cacccatcacccanaaccttgcaccattctcttcatcctcattcacaagcttcccaatctctactaccatgtgatccacaggacaataacaccctccnccttgtgatccacgagccctanaatcaaacacccatttgagatcccncaaatacaaaacataccctttgctatgttcacttgccttcacaagactcctaagctcccccaccttntgctccacctccactctcgaaacattcccatnagaagaaagagacagagagataaacttatcacccctaagagtacactcatcaccaacatccnctntatcaactttntccatcactcccctaactacaccttcaagactagtaacacactctctcacaatcacaacacttctctttctctcactcncccaaatttcaataacact

SEQ ID NO: 47175 - DNA, 554 bp, Glycine max
  unsure (1)..(554): unsure at all n locations
aggaacggngttaagataccgtaggactangcgtanctatgtnanaaganccnacgcactnnnngnnganctcnntantntatattacgatgaatcangtagtttattnncnnanaccatatacatctcaaaatttcattttattaatagactctacctcaccacggttgatcaattncatttataaagacaatattaaacatactcactgtgtacaaaaaaaatataatttcatagcctgtataaataaattatctcaccttgctaacgagtggaactatatacgatttaagtttgactcatctatatcatgagtataattttaagtctagataatctattcaattatgatctattttaacaacatctattgattagtttcaatgactaggtgaattgagttcaatgatttggtggtagaatatcactaataactcatacatcttgtcttgtttaataaatgacatataccgctttgctgggtgatatcttatgcattaactctatattataaacgataacttgttttaacaatcttaactataatctaaacg

SEQ ID NO: 47176 - DNA, 563 bp, Glycine max
  unsure (1)..(563): unsure at all n locations
agaatccacgttatactgatcgatcaagcacctattatactacgntcctatngtaatcttgnantcaggacatcactgtgatttctgaggtttttgggataaaaanggncattgaccaatcccttttccatgacttaacccacttcgccaccgacggtgtacacatatgaatgtacactgactgacgagtgtagattttgatctatctgaacgtgacgtaagtaatctggcggggactatacaaatatgctaggtctcgctcacacttatgcgcagcgtctcactcatattcgctcgcacatgaagactgagacagagagattatcttacacccctaagagtacactcatacctgcattcactgtataacttcttcaataatgcacaacatccgttttacatagacacgatatctccgagacgacacacttctcttccctactacgttaatggccatttccatttgcattccaacctctagacgatcgaagcggaactattctcaccgtatagattccttggctataacattgtggaatttacactacatatctgaaactatg

SEQ ID NO: 47177 - DNA, 262 bp, Glycine max
  unsure (1)..(262): unsure at all n locations
ttgatgaaaacacaaaggagatgcaaacaaaaccctataccctttagcagcatacttcttttttaaattgctatatatatatnaaagaaaaaaatccacccacaccacaaacaagaccccaataaaatacacgacctgaacaggacagagtggaccctttcatcctctttctgccttacctgcatattaaaacaacaaacaacgccaccaattaatagcgccaaagccaaccttactatacatatttatatatagagatgga

SEQ ID NO: 47178 - DNA, 227 bp, Glycine max
  unsure (1)..(227): unsure at all n locations
gaatctcatcacanatttgggtgggcctgtgtttgtccatcctttcaatactanngggggttgtgtgtantcttgtagatataataatgccatgtgtgatccttcacctaacagcttaatatttanggagagttggtgattgacacaattattactcattattataaatattatcacaagctgtgcttgttctctgttgctcttttgttttccactacatgatggga

SEQ ID NO: 47179 - DNA, 375 bp, Glycine max
gtatgcatgatatgccaaatacggagaaacatggtgaactaagtccaaatgttggagtaagggtaaacacgccatttggtaaggactatgtgttcatatgtacctgtatcacgggttctaccaagttcccatagtcattgaccacttccgaatattgtcggattacgggactactcccggtccaacaacgtccataggaaagcctcgtttgagtgtagtatcgcgcatcaaccaattcaagactactcttgattagccaccgcactacgtcctaaaaggccaagatgggttaaaggaactaaaggtgctcaacttcataagtcgctttgaaatatcaatgccgaacacgactactgatgccaacataataatact

SEQ ID NO: 47180 - DNA, 346 bp, Glycine max
catgtgtctatttctcttcttaattcgctgctctcataatacacaagagaaaaaacagcaaattactaccaacgctcgtcttaaggaatttctgagttattgagagacaccataatggaaccaaatacttcatttactacaagtccaccacttgtctcttcttttttgtgaggtgtactataaaacacgattcgcaaggatgaataatgttcatcttgaagcataggatcttcgggaggctatacaagaagaccaaagagtttatgaactacctgcaaatcttataatgacatggctcattaatcacatacttcaactaaatgtaaactctggcgtgtttcatcca

SEQ ID NO: 47181 - DNA, 185 bp, Glycine max
tacccggccacactaaacctatgattgccatataccgaaaaagctaagaagggacactttacccagagcaccatgtggaggaccggtcctctactgaacgagcaaacttcccgtgtaccaagcaggcatgcagacacctactcaccccagaatcatggctctcgttgcactatgaaatatggccc

SEQ ID NO: 47182 - DNA, 437 bp, Glycine max
  unsure (1)..(437): unsure at all n locations
ccatggagctttatatctctcgaganacanaagcatacactcaattggaatatgtaagtctctaacttggaatatntatcttgaacaaccttntctcataatatgtgttcaaatggaatatttaagtgaattgaaaaacatgtgtctctaatccatgacaaanaaatgtaagatgacattctaacattntacaaatggngatgaatgttgatcatacacacataagaaattcattattgcagttagttattcaagtagtttaatcggcttaaccaatatattgtgaaagttgtgcacgcactntgcagcaaccaccatatntccatcgaaatacttaactactgccaaacattatntagaagatgcaaanattctgctaagaaaacaaataagacaacaaaagtgggatgatatccctccttttcctcctctgtaca

SEQ ID NO: 47183 - DNA, 241 bp, Glycine max
  unsure (1)..(241): unsure at all n locations
taatgtatcagaaaggcataatagaactntaatggatatggctacgaccatgntaatcaatttgactttacccgtatcnttgtggatgtatgccttgaaaattgtcatgtatttgttgaatatggttcctagtaagacagttccaaagacacctttngaactgtggacaaatatgacacctagtataagacacctgcatgtctggggttgtcangtanaaataatgatttataatccacaa

SEQ ID NO: 47184 - DNA, 360 bp, Glycine max
  unsure (1)..(360): unsure at all n locations
gagcaggttgcttcctcagaagcacaaccttctggaggaagaatctggaaggcccaagtgggcctgattgctatttgtgcccnnccttttactaaatgcacccnccttctatttttntggtgattctttttccgtaacgttacgaaactttacgaatttcgtaacgatacttattttctttccgtaaggttacgaatccttacggatcatgtatttactcttttttagctttcgaagaagttacggaaactcacggattggcacaacaacacctcctttggtttccgccacactacggaatttcacggatcgcataaccttgcttccttntgacttccggcgcgtctcgagacttacata

SEQ ID NO: 47185 - DNA, 421 bp, Glycine max
  unsure (1)..(421): unsure at all n locations
ctcctctntcanaaccatgctatgtgctcgcgactggtccctntcttcctttcgcaacttgagttcactattgctaccccatagagcntccgcgaaattgttccggccatactcttccttgcgagccctcttggtctcttgttcaagggctcttgcggtaattgcattctcttcccgtaacccggcacactccttccgaacgtgtgtagcggccaacttgaacttctccttggcaagttntgcctttcctaactcgctnttgagagcttggacttcttcgtcctcttccggtgcttcaaaactctctttgctgacgactnttaacttggcgagccaatctaaacctcgtatatgaactntcagccattcgtggtacccaccaatgatgccattacgaatgcctctaagctcttgatctttc

SEQ ID NO: 47186 - DNA, 156 bp, Glycine max
cattgcctcgtctaatgatgcgacaattgtgtcataattagtatatttactccaccacatgagtagacagaatgcgtaaccaaattgtaatgcactagcatgcaacatgcagcataacgaccattacttgttacatctatgagagtagcgcatgtc

SEQ ID NO: 47187 - DNA, 371 bp, Glycine max
  unsure (1)..(371): unsure at all n locations
tagagatactanggtgcctcctangagcgcttctttaatgtctttagtcggacgcgggatgatgattagctgatcctgggcctagcacttgtctatacttgcccctaagcttagacaaaggaagtggtattatgcaacaaaatgtgaaacaatactacgagatgtctgcattacctttcacttacccttatctcannatggtgtggtattaaccatcactcanaatgactcttcattcatccttcgattcgcaggatcccaaatgacaagatgcgaatccatgcatgtntatgattgaacgttaagtgcaacaattaanaagttgttatcgtattcaattttacttanatgcttatgacacctcgttgatc

SEQ ID NO: 47188 - DNA, 212 bp, Glycine max
tctgcacatgaatacaagttgtccggaagaggaaacagagatatgcccatactctacggagaagacacgcaacgcacaccatcaatttcaaccattacgaaagtattctcgtcttgacaggatctcattttattctatgaagatatgagtctgatcaccggacatgagacgatgttaaagctctctagttcgaaggaatgctctcaggatct

SEQ ID NO: 47189 - DNA, 394 bp, Glycine max
  unsure (1)..(394): unsure at all n locations
gcaagtttcaagaatcaaagagtcattcaatcaagaatcaagattcaggtaaagaatcaagagaaaactcaattaagataagtattaaaagtgtttttcanaatattgaataacaccaatttgttcaagatattntttccaagaaaaatcttttaccaagagttatactctctggtaatcgattaccagaaggcagtaatcaattaccagtagccaacattcttttcaaactgatttacaaagctgtaatcgattaccataatcatgtaatcgattaccaatgttntaaaacattagatttcanatntcaagagtcacaacgtgagataaaacagtttcaaacttgtgtagtcgattacacaatacttngtaatcgatactagtggttctaaac

SEQ ID NO: 47190 - DNA, 408 bp, Glycine max
  unsure (1)..(408): unsure at all n locations
gctccacannaattgtcacggctatgctcttccttgcgaagccctttggtttcttgttcaagggctcttgcggtagcttcatttccttctcgtaacccggcacactctttccggacgtctgtagcgaccaacttgaatttttctttggcaagtcttgctttttctagttctgttttttagagctcggacttcttcatcctcttctggagcattgaagttctcttcgttgataatctttaacttggagagccaatccaaccctcgtgtacgagctttcagccattcatgataaccaccgatgatgccattacgaatgcccctaagttctttatctttccttatcgggctntcccacgccttatggactctntgtataatcttgaaactttgtgcactgaaatctctcac

SEQ ID NO: 47191 - DNA, 317 bp, Glycine max
ataggtatacctccttgcatataaacatgtaattttcaaggtctgtgaaatattctgtacaagggttcaaaaggaaaagggttttgcatttcttccatcaaaagtgatcatggaattgagttagagaatgctgagttcatatcattttgtgaaaggaatggcatttcttgcaacttctcttaatctagaacacctcaactgaatggagtaattgatagggaaaataaaactctacatgacatgggtacgaccatgctttgggataacttacttcctaaacacttttgggtagaattagtgatcatagcttgctatga

SEQ ID NO: 47192 - DNA, 564 bp, Glycine max
  unsure (1)..(564): unsure at all n locations
agggaaggggtttgagcagtagtagtgaccgtttanttataagatttctgtgactgagagagacataaagtagcttgcgtgtcgagtgttgcattctctatatgacatccatcaacacacactatttttatgttctgtgggacaaggccgcacgcctataatattcttaacaagacaaatgagtagtaantatcttacctgtatacataagtgttatacctcttaaatactgcgagtcaactatctatgagaatcgcttaaacttagaggaatcttttgacattactaactagaaaacaagttgaaagttgtaaagccaagtaaaagctacacaattacttgatggctgaagattattaagttaactgagtaaatcgtaaatcgttcgtagaatatttggtggactagctgcaaatattgaatacactaatgtccgtagcattgggttttgagataattagctgcattgatgaatgatagttgttgtggcgtgtattgcatattaacttatataaccttcattgtgattttggaagattagcacactgatttctgcctgagtcc

SEQ ID NO: 47193 - DNA, 232 bp, Glycine max
  unsure (1)..(232): unsure at all n locations
gctaaccatttatcaataacacaagttgatttttattcagnaaatagagttatctctttatcttagtgagagtgattctcctaaattctcgagcgattcaagaacaccctggctgtatcaaaggacattcacaacctttgcgtgttgccctcgctggaaagagtgattctattcttcctttcatcttcacccttgttcttacataccacaattccagaaaatccacctctgc

SEQ ID NO: 47194 - DNA, 358 bp, Glycine max
  unsure (1)..(358): unsure at all n locations
ttacgactcanaacctgcatataagaatcatgtactatacacttagcattggtggctatcaaacaataccagtgaatacatggtcttgactttttctccctcctgtgaatgcatggtaataacatatattttgagtcattattctagcattaataacttatgtccatgtgcccgatggaccttggttcccattcttgacagtgctattctctattaaataagccatggattgatttataagcttgagaagctaaagcataagaacagagcagtaaataatgaaacactgtgttaaatgtctgctggtttaacagaacctatgccatgacaatgataatttagttatctggacctgact

SEQ ID NO: 47195 - DNA, 79 bp, Glycine max
tgtggttaaaaatggggggcgggacgctctacggaagaaggaagataggggggataagagggggagtaagggttgtgta

SEQ ID NO: 47196 - DNA, 343 bp, Glycine max
  unsure (1)..(343): unsure at all n locations
acctatacttatcattgttatactataacacaaccatgttntctcatacttcgttctgctttctttatcctacaaaataactatgtattcttaaagaagggggcatatatactccttattggattagctgttaattatggtggaaaacaaatgaataatattcattgatcatatttaacccgattttccctatatactaatagatcttaaactaaaccaaatttgcaacttaggtcaatgataccttttgagcacacatcaaaatggacatgtggctgtgttaaactcaaccaacttagctgtatttaccatcatctgatgctaacatcaattattatgatgc

SEQ ID NO: 47197 - DNA, 323 bp, Glycine max
  unsure (1)..(323): unsure at all n locations
gcgtgatctgtttggtgtcacctagatgcaataaagttatgcaatgcatgtcatctggtcgtttttatagacagtacctacaaaacaaacaggtacagactccaactacttgactntgttggagtgacaccaacggcgatgacattctctgctgggtttgcatatctggaggctgagcgtgttaataatattgtatgggctttggaacgatttcgaagcctatttttaagacacgatngcctccctcttgttattgtcactgacagagacctagcactgatgaatgcagtgaaaactgtgtnttccgagtctactaatttgtt

SEQ ID NO: 47198 - DNA, 416 bp, Glycine max
  unsure (1)..(416): unsure at all n locations
ttctatgtgcncgtagtggtccacattgtgtttctgcattttattctcgntttgtttactttntataccccttgttgacgtgcttaagccatcttacttaagtcatttctcgcttaacttaaaaataaaataaatttccaccgaaccgttgaattgtattatccattaacttcggttaaaataaattccgaccgttcggtcgtgccgtaaccacgttggaaatcaaaaagaggtaaaaaataaaggctaaaatcaattcgcctagtcaagctcgtccataaaaaatatggctttgaagtatgtcatttcatttcctcactaagtaaaatggatcatntntaaggtccaacgccttagaatgatcacctcttaaagtaaataagaatcacttgatataaaagaactacgtacgtctg

SEQ ID NO: 47199 - DNA, 367 bp, Glycine max
cggagaccaacatgctagctatctttttcaagtaccaagaagagttaggtctagccgcggcccacgagcatatgattgcggacgaatatgcccaagtatacgcggagaaagaagctagaggaagggtgatctactctgtacaccaagaggcaaccaatgtggatggatcagttcgctcttaccttgaacggaagtcaaaaacttcctccattgttagccaaggccaaagcgatggcatacacttactgcgccccgatgagatacacgggcttctcggctattgtcagcatatgatagacttcatggtccacattattagaattcgtttgaacttgttgagttctcagacttgatagatatgacttct

SEQ ID NO: 47200 - DNA, 301 bp, Glycine max
  unsure (1)..(301): unsure at all n locations
ctggtaaaatcatttcatggttcccttcgctatggtaggttatttcattattactctggtgctttcttaggaggatatgtcttatatgtgggtatctttctttctntacaactgaactagagggagttgttctggctatttctatagctcattccaaaggttagggcaagctttggctggaggtggattctcttttagacctcaaggctattactgttatccaaatggcctcttacaatataagacatgtctggatgaatactctattctattgtggcccaaatggattttcctgtctcca

SEQ ID NO: 47201 - DNA, 340 bp, Glycine max
  unsure (1)..(340): unsure at all n locations
catgtgaccaactcattgtatntcanatataggaagtcgtatctagtcaaggtctgagagaccatacaagtttcctaacgatttctaattatgtgggccattaagtctatcatatgctgacaatagccgagaagcccatgaatctcttcgggggtggagtaggtgtctgccattgccttggcgttggctaacaagcggagaagttcttgactcccgttcaatgttagagcaaaccggtccatccacatggttgcctcttggtgtacaaagtcgatcaccctttctctagcctccttttccgcgtatacttgggcgtattcgttcgcaaacctatgctcgt

SEQ ID NO: 47202 - DNA, 259 bp, Glycine max
  unsure (1)..(259): unsure at all n locations
cttcgcaccccttcttccttgcaattccaaggtagtatatatgatatttcatttgtagttcaatctatgcatactctatcaatcttctcattcgtatgtatttgcatcatcttcgttttaaattaaacttattttanagaanaaaagttatttactgtttagagaagtaaaagaacagttgctaagacacagtgggtgtgaaagggtacgaacttgtaaaatctttctcgctctttgttcgcagagggtgcatactttt

SEQ ID NO: 47203 - DNA, 163 bp, Glycine max
gagcatggctggtcaggacgtgatgaacctgttgccggtcatccactggtaccaacacgatgcgggtccgtccatgtataatgaaaccactgtgagtctctcatgatctggctgaccttgttaatcaaataattgcgaaattttaaagatccatcccatggga

SEQ ID NO: 47204 - DNA, 347 bp, Glycine max
  unsure (1)..(347): unsure at all n locations
agacatggagttacaagatttgctaccactttcttaactttgcaaagattgcataagcaaaaggccaatcttagaaggtgtttacttcagatgaatggttgaagtctaaggtagctaaagagcccaaggggaagcaagcaacagatgttattcttattccatcattttggaatgatgttgtttatgctntaaaagctatgaggcctcttgtaagtgtgttgagggtggtggataatgaaaagaaacctgcaatgggtttcatttatgaagcaatggatagggccaaaaaagcaattcatagagctttcaataacaatgaagggaagtataacgatatccttgcaatc

SEQ ID NO: 47205 - DNA, 292 bp, Glycine max
tgtcttgtgtcgtgcttgagttctctactacagactatcatctccatgttcggagggtctattctcagatcgaagtgtctagattcccttgctgaacttctcgtctcatgcatgatattgaaagctggagctgatacaggttaccagatgtacctatatctcttcccctacagtttatctttgctagcaaagatgactcctatagaaactatcttctttaccctggtgtatacatgtcaaccacattatgaaacctatggtacacatatgggaactaagtgtgatcctcata

SEQ ID NO: 47206 - DNA, 293 bp, Glycine max
  unsure (1)..(293): unsure at all n locations
atggagaagaacganaccaaggaagaagaagcttgcggngaggttgctgtgtgcacgggagaagaaggatatcacggaagataacgttctttgaaacggaagaagaacaaaatgttttttttttaaatatattaacttttattttttaaatgaagggtattttatgaagttcattcaattgctgggtgcaccatcaattntgttgggtgcacctagcaacagccaagtgaatttcgtgcctatgttgtcctcctttcccttagccaatgattggtcctccaattgagcattcc

SEQ ID NO: 47207 - DNA, 352 bp, Glycine max
  unsure (1)..(352): unsure at all n locations
gccatgcacgatgtgtctgttntagatgaaagttgtctgcctctcatcaataagaccacatatcacttgtctcactctatttgctaataacttagatatcaccttgtacatacatccaatcaatgagattggtctgtactcatcagatgactgtgggtgttcggttctgggaattacagctatgaaagaagcattactgcctctatggaagctgccctgcacatggaattcatctacaaatcttctgaagtcagttttcatcatttgccaaaattctttaatgaatttcaagtttaagccatcatgtccaagacanttgtgcccatcacaactgcacactgcttctttgatc

SEQ ID NO: 47208 - DNA, 450 bp, Glycine max
  unsure (1)..(450): unsure at all n locations
ttccagagtcctcttatcaggcaatggaatcctatattgaagaatcaccggagctcctaccagtagnaagaaaaacaataacaaagaaacaaattgatgagagaacacacaaaggacgatgtagaaacataaccactagtaccctntcagcagtcatcacttcttcttttcaaattatctatatataatatagaaagagaaaaaatcacacccacaaccacaaaacaagtaccccaattaaaatcacacgaacctgaaacaggaacagagtggagccctttcgattccacttttctgccctttacctgtcatcattagaaacaaacaaacaaacgcacacacaattaatagcgtccaaaggccaaacacttcactcatcacatatatgtatataatagagattgtgatagagacacanacaatacagagacagctaccgagagagaatat

SEQ ID NO: 47209 - DNA, 579 bp, Glycine max
  unsure (1)..(579): unsure at all n locations
natttttgttgacactcatctatgctagtgacactatagattactctagctaatcgatgcgttctatgctcccgtgccggaccacatcgtggttcgggcctatatattctcgatctgctgactatatataccctctgctgacgtgcttagaccattctactcaagacatttcatcgtgaacctgagactaatatacatatccaccgaacgcttgaatagtgatatacagtaactctcggatatatcaattccgaccgttcagtcatagccgaaccacactggatatcatatgacagggttgcttacatatattaagcacttagacatctgttagtcaagtagctcggattatcaatcagacggactctctatgtgatttgtgattcttaatcgaattgatcaaaagctgagtgatactaccgctaacatcacttctgactatctggctcgacataaaaaaggctattgaagtagacgtttatgttctcgctacataggatgatcatcnntatgtcgacagcatatgatgatcactgtatcagaattagaacacttgctgagaagactacttagactgtg

SEQ ID NO: 47210 - DNA, 357 bp, Glycine max
  unsure (1)..(357): unsure at all n locations
gatctaggagggacgccgcggctgaagggaccagtgcctttcccgagnttgatagccatcgtttcaggagcgctgagcaccancagcgtttcgaggccatcaaaggatggtcattccgccgagagagacacgtccagctcatggacgatgagtacacagattttcaggaagagatagctcgccggcgatggacgtcgctggtcactcccatggctaagttngactcagatatagtcctagagntttacgctaatgcttggcccacagaggagggcgtgcgagacatgcggtcatgggtaatgcgccagtggattccttttgatgcagacgccctcatccagttcctgggtgactcgc

SEQ ID NO: 47211 - DNA, 456 bp, Glycine max
  unsure (1)..(456): unsure at all n locations
taatagtggcataagtagctatggtcatgaatgctgtcatgactgtcannaactagcttacaagtttgcanagtttgttgtacgatagaattgttattgattntaaatntatatgatttcatacagaaaccacaaaacaaaaaactctctctgtcatcactattttacggttattgagtgcatgatatattagcatctatgggaatgactacaataacaggtagcatgtgagcgacttctgtatttaaacgcacttgcataagatattagttaaaatcaatgttgtcggaccggtcatcgaactagttaatagtcaatggttcaactggagtcgaaccgattntaaaaaaatatatnttttaatattntaatataatatcttattaatgttgaacaaaaaataacataatatccataaatttgatatactaaaaataaaatttacttaaaagtgta

SEQ ID NO: 47212 - DNA, 480 bp, Glycine max
  unsure (1)..(480): unsure at all n locations
agagatcgngctgtacaactcatgtccacctattttttgactactctataatncactcaataatgttataacaaataattctacaatattctaactcctattcaagtgaaattcatctagaggtacaatgcacttctgataagtctctatttattatttttcattctagagatttgaggaatggcttttttattgtcttttcaaaagatatggtaattatttaacaagatggaaatntctttgggttggattcacgctcgttgaatgctatgtggacaacgattcatgatttaagcacagaacatattaaatgcacgagttgcttgcaccgttntatgaagtctgcttcacttatttcaacgaaaagtgcacgcgctctagatggaaacatcaacatacattcaatnttgttgtctttacttccttcatgccattgatatagaagtatgttctgttgcgctattttcaatatattgtagt

SEQ ID NO: 47213 - DNA, 191 bp, Glycine max
  unsure (1)..(191): unsure at all n locations
cgcaacagataatcaaacatcaaacataattactaataatatatagatatatataccanggtgttacactcccagacagtctcagagatgaatctggtaaaatcgtaaggctcctagggtcaggaggctagtggatttcctcttccctgangccatctgcatcacanagagtcacaggaatcaagttagac

SEQ ID NO: 47214 - DNA, 374 bp, Glycine max
  unsure (1)..(374): unsure at all n locations
tgacattcaccacatattttgccttcttctatttctaatcgagaatgcctctaacagcaccttcgtcaatgattctcttcatgcctcttaagtgcagatgtccaaatctttgatgccatattntgacttcatcttgtttggagaatagacatgtggaggagtaactggtttcttgaggtgtccatacgtaaacagtggcctttgatctgctgcccttcattaggacttcactcttctcatttggcaccaagcattctgactttgtgaagtttacattgaatccttcatcacacaactgactgatgctaatcaagttcgcagtcagtcccttcaccagcagtactgtgttcagactaagaagtccatcatggact

SEQ ID NO: 47215 - DNA, 448 bp, Glycine max
  unsure (1)..(448): unsure at all n locations
gcctcctctcaccttgtntnctttgtcttccgctgcgtctncatggagggaaatcatcattaaaggaccccattgaagctcanagatccagcctncacagaagccncacaagcaagctttcatcaagtggtattagagcacgagagcttcaagtacgtgctccttataccttcattaattatttgctataccttctcttccattgttgtttcttcattatttctccatgtatttcctcacatgtcttgtgtagatggtttaacatgattcttaaagttccaccgatgaacttgtatagacgcagactaatttctatggacaaattcttgtcttgtctgaccatgaattggtgagttacgtccnttcagttgcttgtattgtctggtgacactaatctaaattctacaaatataagtgaaatacctacaattgaggctcgtactatgat

SEQ ID NO: 47216 - DNA, 397 bp, Glycine max
  unsure (1)..(397): unsure at all n locations
tcgctaagctctagcttctcaaggttgttttctcacataagcttctcatggaagttntctcaagaaagcttctcaaggaagctacctagtctataaatagaagcatgtgtaacacttgttgtaactttgatgaatgagagtcttgtgagacacaactcanagttcaacttctctccctttntcttccttcaatttcgggcctccccctctctctntctctccctctntcttttcctccattgaagcatcctctccaagcttcttatccaaggctcatcttggtggtgaagctttttcttccatggcttattccttaatggatggcgcctcctctcacctctnttcctttgtcttccgctgcatctccatggtggaaaatcaccattataggacccca

SEQ ID NO: 47217 - DNA, 590 bp, Glycine max
  unsure (1)..(590): unsure at all n locations
tagtgcagcactgngctgcaactctaccatggctacctgattaattcttgatgccctttttcttttgtntccntntcnctgnnttgaagctcactacaagccttaagtgaaaaaccatgatatcaccatattccttanggaatttggagctttggaatttgtntgngactaagtatggnngggtttttgtttattggacaactcnngtgtgtggctattgcttcatgatgtatttgcgccatactcgatgtacattgtatattggttaaatgctcgacatgctgaatgaaatgttgtttcttanaggctatagagttaananaanaatattattccaacaaatatattccaaaaaagaanacaaaaggtactaaggtgagtgaataagatcttaattgcacaagaatgatgaaactctcggtctactctcatggtaaatttatctcttctcattcttatttttcttaaatgcactcatcccttggctcttatcctttggattagcactattcatttatcattctgtcttgccatacaccttaaactttgactcagtgctggtgggtgatgcaattaaactgcaactaggn

SEQ ID NO: 47218 - DNA, 387 bp, Glycine max
  unsure (1)..(387): unsure at all n locations
aactgtctctgggcttggtgactcacgctcaacanagtactttctacacctactgtacanttgattgaccaaggctgttatgggaatgttgcgacaatccttcanaaccttattgatacattctgagagggtggttgtcatgtggccatatcgacgtccttctctatcataagccatcgtccatttttcctttgaaatgcgatcaatccatgttgctatggctggacttagttcacgaaatttttctaaattttgataaaaaaaatgtgcttgcaaggagtgtaggctgcataaaattagttatcaataaccaatttaagtatatagggaagttaaataaacgtgaccatcaaatatgaaatcttacccaacttcttcaacatttct

SEQ ID NO: 47219 - DNA, 210 bp, Glycine max
  unsure (1)..(210): unsure at all n locations
acgaattcaaacgttagatcatgccaaacatataataacattacattaactctacacattacattaactntaaacattacattaacttagaacattacattaacgtacacagagtcgaaagagataanatttgcatcatatacgacaattaagtcatgctaatgttgcgacaatgacatattatcttccatttcgaatacatgcttacta

SEQ ID NO: 47220 - DNA, 531 bp, Glycine max
  unsure (1)..(531): unsure at all n locations
ctaagctatactcatgagaagtcataagaactataataatatgtcgaagattatgatacaatttatacatcaataaagtcatcaccttcaattctatactcagtctaactttatgaacataatatattttatgaattggtgaacacatcaaattgtaagttcacatgattgaaatattataattcaagtttaagaaataaagagtatcatttaacatattattaaattaaaaaaggcaaatcggttgaaaaacataaaaaattaaatgttattcatgtcaccaagtttaacaataagaagtgtcctgatcaaaccaaacgagaagccctcatttcacaaccttgatatcatgcattanactaaaggccaatcaatgaacgatccttgtctccatttcctgatcattaatcagtcaananaacagtcaaatantttaagatattcaaatacacttcaattcatgaacacaaagactaagatgaattcatctttcccanactgtanattcanacatagtaagacggatatata

SEQ ID NO: 47221 - DNA, 729 bp, Glycine max
  unsure (1)..(729): unsure at all n locations
cgtcacttctcnntaattaangatntttttngttnttntntgnntctnnttttatatannatatttttnnnnnnnnnnnnnnnnnnnnnttgcttcttgagtcgacctganagcatgcagctatnntnnnaanncatcaccaccaattatanatcnntcctctatatttttgtggccctccatacaagaggctacattagcatgcatgatcataccatgcacatggtgagtacattaaacttagattgatattcgcttaaaggctaataattctaagacttaatgtctattaattaccatatatgttctttttctcgtggcataaaaattggtattctgtacatactgntgacgtctntctacacacccatataagatacgatactagtgatattgtcgatgaagatctangagaacgcatagcaatttactaactatgttntcttattttattcacataatactgtaactgaagtcgtcttcgaaaaatttcatataatatattctcaagctatgtctaaggctcatcatctgttatcgaattagagactatcccctactatgaggagagtataaggctaagcgttgagacacacctgtntgtgacatgacttantgacactcttcttgctagagaccttctcatgatattaagttggactgttcctccgcataaaaagaagctcaagtctcgttattgattaacgaattattcgctggacacacttn

SEQ ID NO: 47222 - DNA, 239 bp, Glycine max
  unsure (1)..(239): unsure at all n locations
ctgactcgagtcatcaagagatttatatacgtgaccatggcatgtatatcaacaattatcaatcatctntgaatcatctatctttcaatctttntcaacatcatctctcatccatctttcaatatctttcaattcatttctctntatctttcanaaagttnttgttcaaacactttcttttccaagaaaagttctntgttcanaaacttgtgctattcatctttttcattctcttctcc

SEQ ID NO: 47223 - DNA, 185 bp, Glycine max
  unsure (1)..(185): unsure at all n locations
aaacattngaagatgatgaggtaaacatcanaatcctcaactatcttacaaaaacttangaaccanatatcacaacaatcaaggaatctaaggacttagcatcaatgtaaatggaagctctcttcgaaaaatgctcatatatgaacatgagttaattcaataatctcatgcagaagaaaaaaaaa

SEQ ID NO: 47224 - DNA, 325 bp, Glycine max
  unsure (1)..(325): unsure at all n locations
ctgagtttctggtttctaaccttgaaacttgtgctattcatcttttcattctcttctccctttgccaaanagaattcgccaaggactaaccgccttaattctttntgtgtctcccttctcccttgtcaaagaattcaaaacgacacagtctgagaattctttcgattcttcccatccnctaatacanaagcgttcanaggtttaactgcctgagaattctnttgtatccccattcacaaagtatcanaggtgtaacagcctgagatctttgtcttaacacattggagggtacatcctntgtggcacaagtagagggtacatctac

SEQ ID NO: 47225 - DNA, 207 bp, Glycine max
  unsure (1)..(207): unsure at all n locations
gtataataaccatgactcacatgcncctcagaaggcgaatcaagacccataatcctatccacgggatgcagaatcccagtgtacacagcgacattagcagaagtacaagaataatgttgaacattaacaccccactcgttgaggtgaagatcaaaagccaacaacgcacgctggctacagagaaactcaatctcatcaatgtattga

SEQ ID NO: 47226 - DNA, 415 bp, Glycine max
  unsure (1)..(415): unsure at all n locations
aatggcgatgactagtggcacacatgtatgggcgacaacccttatcataagatgaacaaaggagaaggatagcattgtgggggacctccatacagactgagcaggttgcatcttcccaatctttcttctccaatgctttagaagagctcttcctaacattaacatctttcagattttttcttccacaagacaaaagatgtgggcttgccctgtgacctcgagccttgctccgcaacttaccaactntagccatcaacaaactgaacctgaaactgatcaaggaaagacaatcatcatagtagaatcttttaaaaagcagagaaattctagcataatanattanaatgatcattccanacacaatanatcaaatgtctagaattgacatgatatcattatacgacttcgtagtaat

SEQ ID NO: 47227 - DNA, 241 bp, Glycine max
  unsure (1)..(241): unsure at all n locations
atgatatccagtcgacacggtgtgaagtataggagaccttcaatcctataacgcaacgtggcggacaaaagtgtgcagctaacttgaatggccattattgtcaacgcggaaagtattatgcgcttcactatccatgttcacacattattgcaacttgtggttacgtgagcatgaactacttccaatatatagatgttgtttacacaaatgagcacatcttanaagcttactacgcacaatg

SEQ ID NO: 47228 - DNA, 398 bp, Glycine max
  unsure (1)..(398): unsure at all n locations
ngagcaaggttagtagaacgaggaagcaacacacgacagagaatgtattgcatgatacgacattcaaaagtaaaggaaccagcaagtaagcgactagtcatatcaacatttgcaacacaaaccattttacgagcatcatgactagaataaattggtttccaatcatcaactaagattccctcaaaaggcataccttgactgctcagtttggttaaggagtaaaacaaagagtggatcaacaacaattgtattttgttcacttcaaaaaatatcactccgtcatgaatttctaggttgttataaaacactcaaaccaattcaaggtaatagcgcaattntagagtcatganatccactaattcagaaattggaaaaacatgatagcaatcaaagttttc

SEQ ID NO: 47229 - DNA, 247 bp, Glycine max
  unsure (1)..(247): unsure at all n locations
gtcttatgttcagcacatgtgttgtgctcttgcatacttggcacttttggataagtggcctcaataacttaagagaggnggtgaattaagttcanaaatttccaactaatagatnttaatcccctctctaaatgaaatatggtagaattataatgcagaagaaacagcagcaatcaatntaattgatgttctntatacgttcaagacataatcaattgcaatataatanatgagataagagaagaga

SEQ ID NO: 47230 - DNA, 370 bp, Glycine max
  unsure (1)..(370): unsure at all n locations
cgtgtgcctcatcaataggagttgcatttttaggtgctaacggacaaaatcacanaatacccacatttgttgcggttaagccaataaggtttttgaattaaagctgtgaaaagaaggttgtacacttgaacaaactatgtatgtttaatggatngtttggtctcttgaaaaggatgtgtaccactgaaaaacatttgaagggtcagtgtagtgggtttataatgtgagctatttgagaagtgtcgttctctcccttaattttgtgcagtcacccttaatatntataacgaaattgtttaaatantaaaccattttgtaaggatatgtactttnttctgtaaaaaaaatgcttanantatgttagtatttc

SEQ ID NO: 47231 - DNA, 225 bp, Glycine max
  unsure (1)..(225): unsure at all n locations
gaatgatacccactctccttggctagctagagtttccgccttctcctncaagcacttnctcagtattcctgctacttcattcctactntgtttcactcgatctaattctcattatgagatcttgaccactcctgctattctcaccatagaaggatagtacccagaanagaggtatggcttccttcctcctatcgagcatcctaagatcccatcaaactcctctat

SEQ ID NO: 47232 - DNA, 317 bp, Glycine max
  unsure (1)..(317): unsure at all n locations
atatgatgtgtttgtttaacaagtagatatcttatggtgaggctcttggagagcttgcattaactgacaggtgtcattaagtccatgtagtctntggtctctacttcatcacctgcaaagccgangagtggaccggcgtgagggtggacagtgtcgagggagacctcaagtctctagatagttttctaatacaggatatcaatggaacttccctggtcgatgaggacatttggacacgatgaagttgaatgatgatggagacaaccacaaggtcattctggttcatgcgagtgatacccttgaagtccctatctgtg

SEQ ID NO: 47233 - DNA, 264 bp, Glycine max
  unsure (1)..(264): unsure at all n locations
atcctcagacttnttgtgtcatattcttcaatntcaactattaaaaaaataataaaattcttcagtttcaatttgatctggcactataatcaatttctttatcttgagttccaaactttccattttaaatnttactagttntatgtaaggtatgtaatgcggcagaggaaaaagaaattaanatngtactgcattattgttgtggcaaatgcatattccactctcaaccagtgtaattgagatgactaatacaattccaatatg

SEQ ID NO: 47234 - DNA, 372 bp, Glycine max
  unsure (1)..(372): unsure at all n locations
tacacctactatatgttgacttaaccaacgctgttattggtatgctgcgacaatctttcaacaccttattcacacattctgagaggttggttgtcatgtgaccatatcttcatccaaatgtatcgtaagccatgctccatttttcctttgaaatgctatcaatccatgttactatggctggactcaattgacgaaaattttctaangtttgatcaaacacatgcttgcaaggagtgtacgctgcgacaatctttcaacaccttattcacacattctgagaggttggttgtcatgtgaccatatcttcatccaaatgtatcgtaagccatgcctccattttccttngaaatgctatncaatccatgttactat

SEQ ID NO: 47235 - DNA, 205 bp, Glycine max
  unsure (1)..(205): unsure at all n locations
atgggatgagttgacgcagatgaaggcttctaatcctagtggaatgtggtgtctccttggngacttcaatagcattagaagttttcaggaaagaatcagcttatctcacagaagggcatatccttatgacattgcagccttgaatcagtggattgatgatatggagcttcaagaaattaaatgttctgggaatagctttacttgg

SEQ ID NO: 47236 - DNA, 359 bp, Glycine max
  unsure (1)..(359): unsure at all n locations
cagagatctgtatggtgatctgcagaagatcatagaccacatactcttgcaacaggcgtagatgcaaatttctgattcatggaaagctgagttactaggttgaccaatgcatcaagttttccctcaagctntntattttcagtagatgaagatgcatctgtggccacctcatggactcctctaaggacaatagcatcatntcttgcactaaattgttgggagttggagaccatcttctcaatcaaattcctttccatgttgctaagtcccttatagaaatattgaagaatgagttgctcanaaatctggtggcgaggacagctngcacacaatttcttgaatctttctcagtactcata

SEQ ID NO: 47237 - DNA, 207 bp, Glycine max
  unsure (1)..(207): unsure at all n locations
cattctccccctttgtgatgatgacaaccacctgtaggctacgagcaacaacaaagaanatatctatttgcatatagttcactccctcttggtttacaatgattgcttatatgagacaatngaagatctcatatntttcatatataaaaagttgtctcataaaacaatagataagttttcttactatattatctattatctttctct

SEQ ID NO: 47238 - DNA, 507 bp, Glycine max
  unsure (1)..(507): unsure at all n locations
tctatttaagacctctagaccccttaatatatttgatacgctgaacacaacaaactgctccgctccatttcaaatgatggagtgaaatatatgtttcattattctattcttataccattctaagttacctactttctcaaacaatggaatggcctggtatttttaatcatgtcattccaatctattccgttttattatattctcatccttttgtctccattctctaccacatcaatccaaacataacctaagagtagtggattatccggtggagtcctcgttgaagccaacaacttctctggctagtacattntttataggcaaattaatatcttattaaaagataggcaactgtagcacaaggagtgtacaagttagcaagcatgagttacatcacagatatatattgtgtaatgatgcagcattagatagatacctctcttccatatctaccaactctataattagtatccattaagactatgtaaaatagaagtctctctcgta

SEQ ID NO: 47239 - DNA, 198 bp, Glycine max
  unsure (1)..(198): unsure at all n locations
atggtttctttggngggaggcaaccatggtgtagtgaacctccattgcactacatgttgngaaaatgggatttnttaaagggttttatcaactttgttttgtannagtgtgatgttntgcatcgcatgcatgtcttattatctntttttttctntgntcgggccttagaaaagctccanatacatagtttactctatc

SEQ ID NO: 47240 - DNA, 458 bp, Glycine max
  unsure (1)..(458): unsure at all n locations
atatgcatgtgaattatgaagcatcaacaagaatcaagccaaggctattgtgcaagcaatcaatggggcaaaacacaccaaatgattatgatgatggatggctcanattctcacaaaggtaaactcatcactttcaaaactatcatgacatgtagagaagaatcaaggatttcaagtcaccaaatgtcaagaacttttattntcaaaacaattacccatttcttgaacatatcctataattcaaagaanaacatgcaaagtcgtacatgcacacaaaattaacccaaaatattaaactaacaattcaacgaaactaacaacattaacaaattaataaaaccaacanaactagcaaaaccaaagaacactcccccccatacttaaacaacacattgtcctcaatgtagcgcaattaanagaataanaacaattaaatcatcaaatagaatcggacaagt

SEQ ID NO: 47241 - DNA, 235 bp, Glycine max
  unsure (1)..(235): unsure at all n locations
ttcgagcttctcgatatgtgatntgcctgaatcggacattcgtgtgaagagttataccagttgaatttctcaagagctgtctgtgtacaggtttgagcgtctcgatatgtgattagcctgaatcggacatccgtgagaanagttatgaccatttgaatatctctagatcttccgttgctaacttcgagcctctcgacatattatgcgaccgaatctgacattcgtgtgacaagta

SEQ ID NO: 47242 - DNA, 444 bp, Glycine max
  unsure (1)..(444): unsure at all n locations
ttatcttagtgagagtgattctcctaaattcttgagtgattcaagaacactctggctgtatcaaaggactttcacaacctttgtgtgttgccctcgctggaaagagtgattctttccttcctatcatctccacccttgttctttcaaaccacaattccagaaaatccacctctgcccaaaattatctcgtgaccataactcccatttcacacactcaaattaagtgattcttgagcctaaattgaatttcaaaacgagaacctttcacctcgtttggaatcacctcatttggagctctgtagcttcccgtattgccatttctatatttctgtccagccaccacttaacctacgttntaccatcccatgcatcccatttatgccagaaaccaccttattaagacccacgagaataaccaccttaatttccatcccttcttaatca

SEQ ID NO: 47243 - DNA, 192 bp, Glycine max
  unsure (1)..(192): unsure at all n locations
gcacaacaattttccacatccacagatcgcgcataaacccaccatccnctgttgcccacctccaactgagctcacgtactcccacgtagcccatatcctcgtttctctcacaacaccgggtccncatcaatcctcccaagcttccccaacatccaggtaatacaacattcaaacagcacaaactatcacagc

SEQ ID NO: 47244 - DNA, 337 bp, Glycine max
  unsure (1)..(337): unsure at all n locations
tgtagcanatgcanaccacaatatcttgtagctctgatatccgactgagttccgtaatatatcaagatgnctcgaaatgactacagaagctcttagcanattataacgacaataactntctactcggatgtccgattgggtcacgtaatatatcgagtcgctcgaaactgaatacagaagctaagagcaaattcaaacgacaatgactnttaactcggatgttcgatngagtcccgtaatatatcaagacgctcgaaattgtatacggaagctcgtagcaaattcaaacgacaataaatttgaactcggatgttcgattgagtcccgtaatatatcg

SEQ ID NO: 47245 - DNA, 254 bp, Glycine max
  unsure (1)..(254): unsure at all n locations
tctcctcttctcctttgccttccgctgcatctccaaggtgaaaaatcaccattgaatgacctcattggagctcaaggatccagcctccatagaagccccacaagcaagtttccatcaagtggtaatcagagcacaagagcttcaagtaggtgctccttaaacctccattaattntnttttgctctaccttctcttccattggtgnttcttncattttctccatgtatctcctcacatgtcttgtgctcaaattt

SEQ ID NO: 47246 - DNA, 423 bp, Glycine max
  unsure (1)..(423): unsure at all n locations
cgctacccagctcgcctagacgatctatgttacttcctccagaagcatccgccttctggaggaatattctggaaggcccaagtgggcctggttgctcattgcacccccattgttactaaatacatcccttgctctttatttggtgaattttttccgtaacgttacgaaactatacaaatttcgtaacgatgcttgttttctttccgtaatgttacgaaaccttacggattacgtaatcatccctctntttgccttccaggacattacgaaacttaacggattgcacactaacacttctcttttatttccggcatgtcacggaacttcacggattgtgctacaatgccttcttttgacttccggcatgtcacanaacatcacgaattgcctaacgatgggtgccaagttcctcgaagtggtcaa

SEQ ID NO: 47247 - DNA, 277 bp, Glycine max
cattagacctccaatctttattggagatgggcaccactactggaaaacctttatgcacttttcatcgacgcaatagatctaaatatctgggaagccatagaaatagggccttatatactcaccacagcataaagagttcaatagatggttcttatctatgtgaaagcataaccatagaataacctacagatagatggtctgaacatgatagaaaacgagtactattcaacttgaaagccaaaaacatagtaacatctgccctaggaatggatgaata

SEQ ID NO: 47248 - DNA, 247 bp, Glycine max
  unsure (1)..(247): unsure at all n locations
acgatgtcaagattgagtcaacaagttcaagatcaagattaatttcaagattaaagacaaggcatcaagaagaatcaagattcaagagaaggtgatatcaagattctagagaagaaaccaagaagcaacaagtcaagacttcacaagggaagtattgataaagattctttacacaccaaacatatcacagttntgttttacaagaagagtttctcagattttctaagtacctgagttttactctctg

SEQ ID NO: 47249 - DNA, 363 bp, Glycine max
  unsure (1)..(363): unsure at all n locations
gaagatggtgtcatccgcanactggagaatattcactgttaccttattcttccctaccanaaagctctgaaataagtttctagacactgcttccctcatcaaacctgttaacccttcagcaaccaagacaaataataaaggggccaagggatccccttgtctcaatcctctntgaggcttaaattcctcagtcggacttccatttacaaggatggatattgaagctgatgaaaggaagcctttaacccaaccaatccacctttcatggaaccccattcttctcatcatataaaataggaattgccaggacacagagtcataagctntntcgaagtccactttanacaccgagcaagatttctt

SEQ ID NO: 47250 - DNA, 605 bp, Glycine max
  unsure (1)..(605): unsure at all n locations
agtgactgcggacctcagnagcacctgcngcatgcannctataanancnanttgcctcantcattntctaatatgcttgtttattatgtcgcatcaacaagaatcaagccacggctattgtgctagcactcaatgcggcacaacacacctactgattatgatgatggatggctcatattctcacaaaggttatcttatcactctacaagtgagctttcaaactatcatgacatgtcgagataaatcaatgatctcatgtcacaacatgtcacgatctcttatcttcanaacagttacccatctcttgaacatatcctataattcagcagaaaacatgccaagtctctacgtgccgccatatttgcgccacattgtatactataatccgacgacactaacagcttatcaactcacactactaacgactaactaaaccacaaactatctaaccaagacactctcccatactaacacacatgtctcatgttcccataaagataaaccaattatctctaagattcacactgctacatccaacgaatagtagacactcctagtatgcgagacataggtgatagaagcctcccacacgcactagatgttcg

SEQ ID NO: 47251 - DNA, 461 bp, Glycine max
  unsure (1)..(461): unsure at all n locations
caacctgcttaattgctccangttatagcattgagggcacatgtctgtttgnggtcaacagaagagcataaaccacagaccctcgcgataggtacagatttctaattcaaggccaactgggttaccangttaaccaaggcatctagtttaccttcaagcttcttagtttcagctgatgaagatgaattcgtggctacttcatgcactcctcanatgacaatagcatcattntttgcactaaattgctgggaagtggatgccatcttctcactaaaattcctgcttcaacaggngtcatgtcttcaaagcttcaactcangcagcatctatcatgctcttctccatgtactgagtcccttcataaaaacattgagaaaaaagttgctccaaaatcttgtggtaaggcaaactgcacatangtttttaatctctcctanatatatataagctctcttcacgag

SEQ ID NO: 47252 - DNA, 152 bp, Glycine max
  unsure (1)..(152): unsure at all n locations
tgaagttattatcattgngttgcaattacttcaataagctttttttttggtaaaggatacatatattgttaaataataaactattaattctttatattttactagactatagaacaatcctggctgaattaacttactattattacttgttt

SEQ ID NO: 47253 - DNA, 365 bp, Glycine max
  unsure (1)..(365): unsure at all n locations
tttatgttgtgaaaaattggtcacattttgactttgccttaaagttgtgtatttatttgaattggtgcatttntatttttgtggcatgcttgtgaaggcttgctaagatgtggaaagagctgcagattgagatgggatatatatctgaggccagacctcaagagaggtggatntactgaaatggaagaggatcaaattatacagctacattcatgtctaggtaacaggtatatatgttatatgttctgaattgctttgcacccaaaacacanaaagatggtagattnttggacattatgtgaagaaagccttgaaatcaanggtttaaattgtggtcgtgggttcatcacgatccttaacactac

SEQ ID NO: 47254 - DNA, 316 bp, Glycine max
  unsure (1)..(316): unsure at all n locations
ctgcagcttgatcccacctaactcctctctaaatctgatttanggctatatatgtggccttgtntgtgctcgtgcgcttagcgcaattatggactgcttagcgcacatntagtgaatttggcttagcacgtgcctttctcgcttaacggatgaactaaagtgatgcgctnggtgagatgaagaggtgtgcttagcgaacctgtacagctcatcttcttccagagtcttcctcgcgcttagcccatgagtggtatgcttagcggaagctcgctaagccagcagatggtcttaacgagaaggtgaanaacaacacttt

SEQ ID NO: 47255 - DNA, 330 bp, Glycine max
  unsure (1)..(330): unsure at all n locations
aagagtaatgtcccactggtaaaactaactntccaaatgtttgccttcgcaggaatggccccgaggaagcttgcctcanagaggtccaggaaggacaaggcggccgaaggaactagttccgccccggagtacgacagtcaccgctttatgagcattgtgcaccagcagcgcttcgaagccatcaagggatggtcgtttctccgggagcgacgcgtccagctcanggacgacgagtatactgatttccaggaggaaatagggcgccggcggtgggcaccactggttactcccatggccaagttngatccagaaatagtcctttgagtttat

SEQ ID NO: 47256 - DNA, 218 bp, Glycine max
  unsure (1)..(218): unsure at all n locations
acctcggcggctgccaacgaaggcttgtanttgccatgggtgttcacttgttaataaagcaaaccatgctctcangcagaaggaggtgattcaagtgtgacgcttaccaaagatgcgtcacgtgccgtgtttgtgaatttatcttgctggataagggctttggttcggggtgctgtggcagtgtgttgagtcggctgcacacgtggacagtgtggcat

SEQ ID NO: 47257 - DNA, 410 bp, Glycine max
  unsure (1)..(410): unsure at all n locations
agctctaataaatatgaggaacgatgattaanattaacggctatcaccatntttaanaataaccaaaaattacatacaacacatgggaaatatatagtagaatttattaattaatggtagtatttaaataaatccaagttgttggcgtgacatcacatagattcaataatgtaaaanaaaaaggtatagtagtaaaggtaacgtgcctcattgctctctcagtgacaacatgttccctacttacgtgtaactacgacgaaccttacctcttcttcgtttaatttctcgaccttggtcacacacatatacttactatatagtatcatcacatcactccctcactctcaccaattagtagcaaactctcttcattntatatggatcaagaaacgacaacaacaagcaccata

SEQ ID NO: 47258 - DNA, 198 bp, Glycine max
  unsure (1)..(198): unsure at all n locations
gaagtggaactttgaagtatgtctcacaagactctcattcatcanagttacaacaagtgttacacatgcttctatatatagactagggtagcttcttgagaagctttcttgagataacttccttgagaagcttctttgagaatacttccttgagaagctagagcttatctacacacacgcctctcataactaagctca

SEQ ID NO: 47259 - DNA, 444 bp, Glycine max
  unsure (1)..(444): unsure at all n locations
gcttcgtctgcagaatccccatntgagactacacgccgatttagacagccttctgatgctatgacaacttaaatngagtntcatccgcagattcctcatgtaggactagactcagctcaagtagtttacaaaagtttaacctaatttagcctaagcttcgtctgtagatccctcatgtaagactaggcctaaactaaacagcattattgtaacaacataattaagaccaaaatttaacctacagatccctcatgtaaggctaagtttcaatcctgcttcgatcaagttctaagggaacagtgcatttcccaatgctaaagtcacttaactgtgcacacaaatgggtgatcagaccanaagcatagaaacattaagcattgaaggaagcattgaacacanaanacataatcaattagatattaggtatntagagcagctgttcat

SEQ ID NO: 47260 - DNA, 583 bp, Glycine max
  unsure (1)..(583): unsure at all n locations
aggcgtggatggacccattataangcgacacatagancactcaagctngacaagtctngcanagatattgaagatagatctgttccctgatctgtaggagtttataacgaatgtgttcggcttctctaggcttttaaaaagtaactaagagtcttgttactcaaggatagctcaacagtcaaaacacaatgttttgataaggcgtatagttttcaatatatccctcgtccactcatagtcgtctattcatgtatgtacacacgtacgtacgtacgtacgtacatatgtatgtatgtatgtatgtatgggcattggacgatgtgtcctctggatgcagagtgtatctagtcagggatctagacattaatcattcctttactaaggtcattccaagatgatcccttaatagaattaacctttctttactaagggtttctgtgaaatgtaagtaagctgaccattagtgggtacaaactcgagatccaatgctcccttataaacatgagttcttatataatgatgcttatatctatatacttggctcgtgaatgcagagtaaggtnttacagatactattatagtg

SEQ ID NO: 47261 - DNA, 67 bp, Glycine max
ctcttgcgtaactgcatattcttctcgtcacccgacacacgcttttcggacgtctgtagcgaccaac

SEQ ID NO: 47262 - DNA, 293 bp, Glycine max
  unsure (1)..(293): unsure at all n locations
tcgtctctacagtctntagatgtgggagccaatccattccttgtgtctggactctcagttctttatgatagccaccgatgatcccattactgcttcccctaagctctctgtcctttattcacgccgcatcccatgccttgcaaactccttggagtaccctcgcgttgtggtcactaaaaccccgtgcgatgaaaggcgtgatgcttacgtctaatggcgctactctcaataggggaacaagctgacgtatggcgagaacgggattataattaatacaaccccttgttcctatc

SEQ ID NO: 47263 - DNA, 573 bp, Glycine max
gcagagatgagcatgaagcacctgatcctcgatacgacacttgaactcgctaatagactagcaaattttgttatttgctagaccttcatattcgttcttaaaatcatacttgacattcctttgtgtcgttaatctttggcatctaatacggctgttgacatcaacagagcgtctatgtcaataagatatgtcaatgccacacagtgccatatctgataaacaaataatatccgcgtatgtgaaaatgtcacgtcatatcggatactaaaaacaacacagtataattacatcatataagaaacactctgtcttagagagaatcattcctataattcatttcttctgtgtcgctaaacgcttgctgtctgatgaggctcacaattgccaacgtcaacaagtagtatgtctattcaaatatcatgccacctgtgccatatcaacacaataagacattattatagtcatacatatgtccaggctaaagagatataaaaacatccactatatgctcgagatcaagcacatcccaggtatatgtataggcctaaatatcactctcgtctgatggactcg

SEQ ID NO: 47264 - DNA, 160 bp, Glycine max
tcactgcaataatagatgagcgtgcttacatggagttgttccttgcaaccaaatatgaatatggtatcattggtcaagagttcaccaagatggtgtatggctctgtaagagcatctagccattgctcttctttgaaatttatcttcagatataccatatg

SEQ ID NO: 47265 - DNA, 365 bp, Glycine max
  unsure (1)..(365): unsure at all n locations
tgtagtcagcatgganacaatttcttagcccacaataatactgcatatcaagaaatcattcatttatcattcagccatttaccaagattaacatatgctacatatagacattatntaagagcaaggtgtcagtacccatatccacaagaaatatgttatttggaacgcattctgcaagtaagaaaaaaaattggttaggtacaagcattaacaactcanaattcanaactccaatatgtttttctctcactaatgctaaggttaaactaggaaatattatactattcatttaatagtaaattcatcagcatatcttanatcttanataatgtanatgaactatttttttaaataaagtcagaaat

SEQ ID NO: 47266 - DNA, 731 bp, Glycine max
  unsure (1)..(731): unsure at all n locations
cctcgtgtactaccactcnantnannctgtagttggtgtntttatnnntatnnttantaatttggnnnnntnannnnnnnnnnnnnnnnnnnttatattactctgagtcacctgcangcatgcagcttntntgnnnntgctattcttgcactccaaaactccttttctctgattctgttnccatcagntactacaagcgtatcaacctgataagaatatcgagggatatgttcaattcgatacttcaacaacttantattaacacttcgtacgccattgcccatatgctgtacactatgcgaacgtattgtggagggatgttgnacactatctcactccttcatatgctatgatgctatgtccggattcaaacccgtgaccaacttgttactcatggtgcatctcaattagtactatctacaattatctatacagtaacattgtcgatatctgtgaatacaaacacacatcgagggatagaatattgcggactcctattttcatagcaactgcacgtgctattgacangaagtctactctttcaatatcttcttcacaaacaataacaggccatgtatcattatttgtccactatagcccttctcatccatgaaatacgacaacactcgttcttgtatatattcataattaagtacgtgcagagcataaacattctctatatctattgcagttgttcgaagcatctgcttacatagcattttctccacttg

SEQ ID NO: 47267 - DNA, 453 bp, Glycine max
  unsure (1)..(453): unsure at all n locations
tgtatgctacatttanaaccttatttgtacttgaacaccatggtgtcattcactaacaagatcgaattggtgagacatggagttacaagatttgctaccaccttcttaattttgcaaagaatgtataagcaataggtcaatctaaaaaggatgtctacttcaaacaattggatgagttcaaaagatactaaagaacttatgggatagaaagcaatacatgctgttctcattccatcatattggaatgatgttgtgtacactctcaaggttatggaacctattgtacgtgtgttgagatcggtggataacgaaacaatataatgggtttatttatgagcatcgaaagggctaatggacaattaagagccttcatgacactaagatagtataagaatcttgcatcttgaaaaaaatgaattgcacttgacccatcgttgcacagtatactaaact

SEQ ID NO: 47268 - DNA, 263 bp, Glycine max
  unsure (1)..(263): unsure at all n locations
ctgcagctganngntcnccatctcacctctgatatcatctctgttttccttctanagacactgctgctcccnctgattcaccagttggagaagcatctcatccctctgattgcccagntggaggagctgctgatctttctgatctctcatccggagaagttgttgctctctttgattcctcaatctctccatctgatagatgaggaggatgctcagactctgtcgatctctttgattataactatattatagttncagtacat

SEQ ID NO: 47269 - DNA, 338 bp, Glycine max
  unsure (1)..(338): unsure at all n locations
tataccatgctacatctgccncgcccaagctgtcttgttagatatggaccaacaactnttcgtccgtagaatacgcncccatcttccggcaatacatccggagatgcccctttggacatgtcgtccctttgtacttatcanagtctggtactttgaacttgngagggatgacgatgttgggcacaagacatanatctgccaaatccgagaatgggtaattgccgaggccctcgactgccctcaacctctcttcaagcgcctcaatctttcccctatcttccgcanagggaacagattctttacgggtgtgggtgaagcggngtatgacggactatgtt

SEQ ID NO: 47270 - DNA, 183 bp, Glycine max
  unsure (1)..(183): unsure at all n locations
gcgcctaagtaacgtgggagatgctnttcaatggtgtgtagatatgtgtgtgtcataccctaatttcgtccggagacctttgcttgatgacatgcgacctttctttggtccttgtgaggtgcttggcatccatcattggggcaattgtgaaattccaggacatgccgatataccaaaaaaata

SEQ ID NO: 47271 - DNA, 434 bp, Glycine max
  unsure (1)..(434): unsure at all n locations
attatatannggttannggttatggtacctatagtatgaaaacttttgcattngcatttgcattctaatgtgggttatgtcattccatcatggacaatcttatgtttcactaacatattattcttgacctacatataagcaacaaaaaataaatgatttttaaatataagtaaattttaactatttttatcttatttaatgatattaatataaaaatatctttcaattagttcagtatttattntcaatgaattttttattcataatattaaattccaatgaagagtatattatganaaanaattctaaaataaaaagaattaaatataanatttacagttatttaaatttgtngataaatttgaacgtggagtttcggcctgcanacactatccattactcattagaatcctaatccataatgaataaatatt

SEQ ID NO: 47272 - DNA, 742 bp, Glycine max
  unsure (1)..(742): unsure at all n locations
aacctgctctcanctgnngttcntgatttgantngtttgtttgttatttanntannnttaatanagngtgtttttttnnnnnnnnnnnnnnnnnnaaatatggtgagtcacctgctgcatgcaagcttgatattgnnaancantcattcaaagatagctgttgtanatgctgttatcttgtcttattttgtgtgcaaatcctggagatatacacaatatactaacttctatatctgtanattccaccatttacataacgagtctggaagagtatagaagccacccctataaagatttaagtatcttagatgtttcacatgaccaattgatgacgacaattntcctcttctctcacaacgtatcacacgcatagaatacagttcaatacatgatgagatagctcatcatgatatgccagatgccagtcgactaatctaatcaaatgctgaatatatatgccctatagatttacttgatgcttctgcatgaatnggctcnctcgatgataaccacctatattattacagatggtgacttcntttggacagagntgctacaccatttgtcatttgatatgcaacatacctctttcgctacatattgacaagatctatacatatcatgatctggaacttgtactttgtanattctctttcttatatctngatatatgatctcatatattcattctcacatcatacaacatctcagcatctattttctatagagaatgattcatctn

SEQ ID NO: 47273 - DNA, 335 bp, Glycine max
  unsure (1)..(335): unsure at all n locations
acatccacaaatcgcgcataaacccaccatccnctgttgcccacctccaactgagctcacgtactcccacgtagcccacatcctcgtttctctcaacaccgggtccccatcaatcctcccaagcttccacaacatccaagtaattcaacattcaaacagcacaaactatcacagccaagaaaacagggcaaaggcagaaaactctgcccaaagcaccaaccaaaatcacagcttttctcacttaaagaccccagtaacaattccttcgttccagttcgttaaccattggatcgactcgaannatttactggaagtctctagtacataagcctaca

SEQ ID NO: 47274 - DNA, 182 bp, Glycine max
  unsure (1)..(182): unsure at all n locations
tgaccccgctgntctgcattgtactattgtcgtcttgtgctgttgtgtaaaatgaatacttttttaatgtgtatcctcgccaagttacaacatttcttttangcccatctgctagctntcttaatgtttctgaagccatttcatctgcaaagattgtatcgctaaaccaatcatagaaagtc

SEQ ID NO: 47275 - DNA, 429 bp, Glycine max
  unsure (1)..(429): unsure at all n locations
cttctatggaggctggatcttgagctcaatgatgtctcttaatggtgatttccttcatggagatgcagcggaagacaaaggagaagagatgagaggaggcgccatccactagggaataagccatggaagaaggagcttcaccaccaagatgagccttggataagaagcttggagaggatgcttcaatggaggaaaagaaagagggagagatagagggagagaaagagagaggggggagcacgaaattgaaggaagataaagggagagaagttgaactttgagttgtgtctcacaagactctcattcatcatagttacaacaagtgttatacatgcttctatntatagactangtagcttccttgagaagcttctttgagaaaactttcttgagaagctagagcttagctacacacactcctctcataac

SEQ ID NO: 47276 - DNA, 176 bp, Glycine max
ctctcactcatcacagatactacaagtgttacacatgcttctatttatagactaggtagcttccttgagaagctttcttgagaaaacttccttaagaagcttctctgagaacacttccttgagatgctatagcttatctacgcacacctctctcataactgagctcaccaccttga

SEQ ID NO: 47277 - DNA, 339 bp, Glycine max
  unsure (1)..(339): unsure at all n locations
aaaggaggaaaatgcgcggagtcgccaccaacgtntatttgtggatttcgtcgaanaaaaccgaaggaaaccggccaaaaagaatattccaagttcgggagttgtatttacgtttgaggaagggattatcacctctcacgtaagtcacagaggacaacagccaatttnttagaattgtgtgaaactgtgttaccttaactttatttcttttatatctttgaggtcgacaaaagcggngctctagctcctatgtactntccatctgagaggaaatcagacctacgtagttctttttaagggtgaatcaagcgattctttttacttggaaggtggtcattt

SEQ ID NO: 47278 - DNA, 633 bp, Glycine max
  unsure (1)..(633): unsure at all n locations
ttcgtccttataaattatctagtttatngtttttgtttatttttttannnnnnnnnnnttattagtactgagctgactgcataatgatgatcttacaaacaaaactttttttattgtatggaaatgaagatgacatgggatgagatgtgatatatgtgcaattgctcctatgtgacaatttataggacccaattantaatataagttaatgggtaanaaaatattaaaaattaatacataacatgcatccnanattcacagagcanttgtcaattgtatgcaacgntctaacaatcatagagtaacggtcaagtggtggcacaatggctttcttttctgcaatctttctcttttttctttcgttctttctctacttcccccattccaaaccacacctctatggcccctntntgctcttctcttctatctttctttctttctcttctatccccttcacgaaccaacctctttgtcccgacctgcgtcttcgccaagctctctctcctttgcttcctctcctatgctgccttcaatggcccatggtgtgaagccgatctgccccatgacatgcgcacgtcgagatgcatgatatctgatttgaattattatttattttgttagaatatgatgatn

SEQ ID NO: 47279 - DNA, 441 bp, Glycine max
  unsure (1)..(441): unsure at all n locations
ctggatcttgagcttaatgatgtccntttatggtgattttccttcatggagatgcagcggaagacaaaggagaagaggtgagaggaggcgccatccactatggaataagccatggaagaaggagcttcaccaccaagatgagccttggataagaagcttggagaggatgcttcaatggaggaaaagaaagagggagagaacgagagaggngggagcacaaaattgaaggaagaaaaagggagagaagttgaactttgagttgtgtctcacaagactctcattcatcanagttacaacaagtgttacatatacttctatntatagactangtagcttccttgagaagctntcttgagaaaacttccttgagaagcttctgtgagaaaacttccttgagaagctagagcttagctacacatacncctctcatatctaagctca

SEQ ID NO: 47280 - DNA, 131 bp, Glycine max
  unsure (1)..(131): unsure at all n locations
ggagatgcagcggaagacaaagganaggaggtgagaggaggcgccatccattaaggaataagccatggaagaaggagcttcaccaccaagatgagccttggataagaagcttggagaggatgcttcaatgg

SEQ ID NO: 47281 - DNA, 440 bp, Glycine max
  unsure (1)..(440): unsure at all n locations
gactcttcacaatggatgttgaattcaatgttcatatacattgtgaatcgactaccaatatcttgtaatcgattacaccattntgaaatcaattggaagttgcgaattcagttaaaagcttttgaaatcaaactnttctactggtaatcgattacaggaaactggtaatcgattaccagagagtaaaaactctggttacttagaaaaatttgagaaaaaactcttttgaaaaacgaaattgtgctatgtttgtttnttgaaaaatcttttcaatacttcccttgtgaagtcttcttgatttcttctcttgaatcttgaattcatcttctcttgaatcttgaaatcaaacttctcttgaatcttgaattcatcttctcttgaatcttgaaatcaaacttctcttgaatcttgaantcttcttgattcttctcatggaactt

SEQ ID NO: 47282 - DNA, 140 bp, Glycine max
tatttaaaatcataagatcgttgtctcttctgtgataagtacataatgctagtacataatccttgtcttatgacaacataacacactttttttgatgagaattctcagctatctgcagattcattatccttacattatac

SEQ ID NO: 47283 - DNA, 249 bp, Glycine max
  unsure (1)..(249): unsure at all n locations
cacccgangaagacactgacananacttatactactagaatggccataatacaaggcttataccctatactactagaatggacataataccaggcccagacaaaggaataacctattctaatatntacaaagataagcgggctcatacttagcccatgggctcgaaatctatcctaaggctcatgagaaccctanggccttnccttggatctctagcccaatctactnggagtcttctatccaatgccc

SEQ ID NO: 47284 - DNA, 388 bp, Glycine max
  unsure (1)..(388): unsure at all n locations
tatacggcagatgtgactatttcctctgcttctcattcatacactcaagtatctaaacctagcattntcataatacacactttggtcggatgcataagagaccagctaagaacccctgactactaaatctattactattcttattcaagaattctttatgttagaggtttagggaaaaactcctttttntaatattatttatagtaccatttgaaaaanaaaaagattctggtttttttttcaagtaaaattcaaattaaattctactattagattaaaaaataacaaaaattcttatttcctatctgatatcatgacacccacaaaaagttaaaatatgctattctactagatactctaaggttacactggcacataaaatcacact

SEQ ID NO: 47285 - DNA, 626 bp, Glycine max
  unsure (1)..(626): unsure at all n locations
acgattacttgtagtttgtggtngttttattatttttgtgttgtnatnnnnnnnnnnnnnnatgtacgctaatgagctcanctcnnnttnnnnnnnnntctttcattacacnctnntctttatttatttgggttggcaatgtagattgcatggtatgatatgtaaatcttggccattgctcctattgacctatttacgaccacatctcaacagctcatgtcaagtaatatataacattaagacatgacatgcatcctanattcacagagcaatcgttatttgttgcaacactctgatattcatagagtaacacgcaattgttggcaaatgtctttctttactgcattcgcatctctttttaattgctgctctatgcgcgtgcgcagtctccaaacacacacctcttatgcacctatnctctcttctctctattctctcttttattctcttataccccttcacgaccctcctcctagttccaacccacttttggccaagcatcttatcattgtttccttccattgcatcttcatcgacccatggtgcaagtagatatgccatgactatttgcaccgcagatgcagattcttgtttgaatattatttatttgttacaaaatgtgagcn

SEQ ID NO: 47286 - DNA, 452 bp, Glycine max
  unsure (1)..(452): unsure at all n locations
ctaagctatgcttctgctatgttctgtctatttatttcaggtgattccttgctctacactgggacttagccggactgcactataaatatatgatcgtagacaggagcaaggcttcgtaggaattttgaaataagtagaacgcaaccaaagtaccttgaattcttataccgagggatcctagtacactacctgatatgattatagctagaattgcaattggacttgtactgtactctattcattcttaaaataaaatactaagatatgttaacatgcctgtggcagagtgaatatacttttttccttggtggaatggattacttatactgctagttgcttcatacattagctagcatnttatgtcattcatagttatcggaatatggtacaagcccttggctgggaaagatatacgttcggagaaagaatggagtaggaatttgacagaatgg

SEQ ID NO: 47287 - DNA, 266 bp, Glycine max
atatattatatatatatatatatataatacttgatccatacatgttagtggtgactatattttaaacaacttgaccctaagaaggatgaacaacgaacatctcatatctgacattaattgaattttgatgacacagatgctgtgtgattacagcaccttaagaatctttcattgcgctatctatgtggtgagtatccatacttgcctcatatttggcaagctaaggcgcaaactatgacatctatgcatgtaccaaatggatgaca

SEQ ID NO: 47288 - DNA, 341 bp, Glycine max
  unsure (1)..(341): unsure at all n locations
agctgcacttacacaattatntgatcctactaaatattacttatgtcttacctaggataaacaactaatggtggtgtactgaatcgtgcaacaaaccacccaacagtcacattatcaccttggtctccaaagctgtgctatgtgcaatangcccttatccacttaactaaaccctttattgatacccaaacatatttggcagcaacttacaggactggcatatttaacaactacactctaatgaataaggggtattaatctccttgggcataacaataaacttgacttctcttaactggctgattaatattgacagctgtgagactcctgcttctgttacc

SEQ ID NO: 47289 - DNA, 403 bp, Glycine max
  unsure (1)..(403): unsure at all n locations
cttcactcggatgtccgattccggatcataacatatcgagacgctctanattgagcaacggaagctcttgagaaattcaaatggtcataactttccacatggatgtctgattaagacgcataatatatcaagatgttcgaaattgaacaacgaaagctctcgagaaattcaaatagtcataacttttcactcggaggtccgattcatgcgcataatatatcaggacggtcgaaatngaacaacgaaagttcttgagaaattcaaatgggcataactnttaacccggataaccgatttagaaacatcacatatagagaagctcgaaatgaacaacggaagctctcgagaagttcaaatgggtaaaactnttcaacggaggtcccattcgggcgcataatatatc

SEQ ID NO: 47290 - DNA, 162 bp, Glycine max
ttctgaagaaactattctaacatacaaaattatcttttcacttactcatgatgatgcatgatgcataaaagatatgatatggactaaaatgcaacataccatataacaaccaatacaaattccatttaagagagttgtgcatgtaaaagaacaagcatcttc

SEQ ID NO: 47291 - DNA, 443 bp, Glycine max
  unsure (1)..(443): unsure at all n locations
atttgatgacgctagcagnnacgcngacacatagagtactcaagctngaggatgtatagcccaccatattatcatagtagaatactggtattgcgtctactatcattttttcgacattgaggtgccacttgaactgccacgatctccacctatgcgcgtattctatgatagaatcatgcccgctttgttgcacaagtcttgaattgcatcctatccaaagcatatacctacactgctaacgagatcaacctttggtcctccaaaaagactccgtaactacctgttatggaccggtacactacctaaaaaactcttgaatgactgtaacaattcctttcttgggtagcccctttccacatacaactcaaaggctaggcagattccctgacatcaatccaatcttacccggagtggaaaattgtacacaacacctttaggacaan

SEQ ID NO: 47292 - DNA, 713 bp, Glycine max
  unsure (1)..(713): unsure at all n locations
aagtcacgccgttggacgtgtgatctttttnttctnatatttttntananttntnattgttnnngtnnnnnnnnnnnnnnnnnnnnnnnaatgattagagcacctgacgcatgcacgcttnanacncatnnnanaactntggcnntcatcaaacactcacctggatcctttgtctactatctccacctatttgatgatgacnatccntgatatcaatacaaactatgtacangatattatcacgttcacacaactcgtactctcnctatcttttggcatgtatgcctaactttacttaatgataaatctctaattgataattgatctctaactcaagttctctcaagttatcttcccctgcggcagcataaataagaactaatgcacagtatccatatccacacagagccaaacaatatacctaaattaattcgtacatctgcatagaccacccaatctatgccaagagatatatataaatgctcgactactataactatacaatacacatccacatacacggtgataaccaaagactaatatatctactactcatatactagtcatatacttaactagatgacatgtcgcgntgtgtgatcaanccagtcggatgaagaacatcttttcacttggtatctcgaccatggatcgactgatgtcantcggctcatgcatcaactgcactacaagtcgaatcataactggcttcg

SEQ ID NO: 47293 - DNA, 513 bp, Glycine max
  unsure (1)..(513): unsure at all n locations
tatgacgttgtacgtcagcgatttgaaggagagacttcttatgatcctgttgtcacattatcaacatttagttatttgaaggaagaaaaatattctacgttttgtatcactatattagtcgtattgatcaatagttgtttatatattntaataaaatgaataacttctcaccttanaaataatttaaattatttntaatatttaattgtacatattaaattaatatgaagaanaaattattanataaaataaatataaaaatttacactaatttaatattactatctatgcacaaatntatttatttttataattagntactgtaaaatatatttctggaaaaattaaattaaattcatgactctaaagttataaaataatataatataatatgaaaattanaaaaatatatcaaacatagatatatatatatatatatatatttagttatgtatatctatatctatatatatatttatatatatatatatatctatatatatatatatatat

SEQ ID NO: 47294 - DNA, 269 bp, Glycine max
  unsure (1)..(269): unsure at all n locations
ctgcagctctcttgaccttaccaagcccctactcctctntaagaccatgctatgttctcgtngatggtctctttcttnccttcgaagctagagctcactgttgctgccncacatagctccacggaatntgtctcagccatgttattccttgcgagccctcttggtttcttggtcaagggctcttgcggtagccgtatattcttcttgtaactcggcacactctntccggatgtctgttgcgactaactncgaattttctttggcaagtc

SEQ ID NO: 47295 - DNA, 450 bp, Glycine max
  unsure (1)..(450): unsure at all n locations
acctgcatgatttataactntcctttcgaaatctccaagagacgaaacctgaagtttatgaatcgtaaaggttcgntccanaacacgtttttcaattgcttgaaagtgagaacacaaggtgagtatatatagagaaaacaattataaccgcctgtaattgattagaatagcaatataattgattatctcgagaaggtaatcgattagatntcccatttaatcgattaaagtgttcttccccaaatctggaaaacattcaagaataatgtaatcaattatagtgttcttgatcacttatggaaacactcttcaagaatgatgtaatncaatactaaatcattataatcgattaaactagagacccaagaaaacaaacatggtttctaaagaactatgtaatcgattacgaatatatggtaattgactaaactggaactatgaactctctac

SEQ ID NO: 47296 - DNA, 560 bp, Glycine max
  unsure (1)..(560): unsure at all n locations
gtaagattctttatnnattttnnntnnntntgatntatgttatttnnnnnnnnnnnaaagtgggcgacgagctgcacttnctnnnancaaccactccattttctttttttaactctacgcctacttattcggcgcgatgaatattgcactgcaagttcccactatagagccgtgtataaaactagtactagacggatggaatgtgctatgagttgacacattcataaacttagtactcttccaagatactcgagcgaagaccaatcacaagtcaactgagttacaatgatgtaataacgcgtaaggtgccaccctgagctagtaagtagctttaaaaatttgctgganggctcattaggacggagaggctgtttacttaaacatctcactgaactaatacattacaatcacaccaaattccttgtggaagagatagacatcacctactgaccacgtccccgcaaagatgatgaggttgttctttatagaagtcttataggaatgacattgctgggaaaatccctatgtcttgtggatattgaacaccttatatttattan

SEQ ID NO: 47297 - DNA, 510 bp, Glycine max
  unsure (1)..(510): unsure at all n locations
ctcatattggcaaaaattttgttttttgttnntnttntttttantttattnnnnnnnnnnnnnnnttgtgtagtcactgagcatgcactacgatattatatntaatttcttttncctcttgggtttnttctaaaacaacttatttctatngatctaggatcctatgtatncgtaattaccctcacttagagattaaatatccttaaattatgataaaaatgctgaactcggcttaatatgcttttttaaaaattattgtagtctcatctatagctatggtagctatatatatacgcttgaagaaacgttngaccgatgtctggtcaactatcaagggtctacccatggaacgggggagggtgaaagctcttggcaccatttgttgcgtttgacatttagttatataagccctaccttatcaactttcgtttctaacttgctggatcgtagtgttcccttctgctatataagttctatacgtatgatcattcgtagacccatcacatacag

SEQ ID NO: 47298 - DNA, 203 bp, Glycine max
gcctcttcattttatatcacacaactcgtatttctcgctgcgacgtgcgaagagcaatgagggacagattatgggttgtctccgtgtctatttccagaagctgatcggcgttgggttgatcatgtcaattcctctgtgttctgtgaagattcaactaattggttaccatcatgtttacaaattatggttctttatattaaaaa

SEQ ID NO: 47299 - DNA, 552 bp, Glycine max
  unsure (1)..(552): unsure at all n locations
aggagtgatgaaccattcgtagcgcactgatactctgctagcgananctggactacccctggtactctccacagatgtctttgtcttcttgacactattttatcccctgagggagcatcccatcgtgacttacagatacctcccattgttaacactattatgagatcctatggtgaaccttgcgtggaaagagaccatacctatgctgaagatccgatctctacttatcaatagattctaaacaccctcaaatactacggcgatagagttacactgccatcagcactgcctaacatggggtggatggaattccataaaaatgttaggaggctcaatctgagattctatgtctgttataagagaactggcctccgtcattaataattttgcactaataatcttttgagggtctttatttctattttgtaatcggtgtgggaaacatactagcgtccaatcttctctcctctatatacctcatgaattcccggtgtcctattcttcccaccgatattcacttcacccatattatataacttacatgatcgttgt

SEQ ID NO: 47300 - DNA, 135 bp, Glycine max
  unsure (1)..(135): unsure at all n locations
ttaaaaaataatgaaacatagatatntgcgggtcccatgttgctcaaaacgttacgttttcagttctcacatcttcttgaagtacatgaacatgtcctgcaaaggcgagagctggcccatttgatacttgacagt

SEQ ID NO: 47301 - DNA, 409 bp, Glycine max
  unsure (1)..(409): unsure at all n locations
cgactaacanagcctgcgtttacactgatccaatgacactgccctatgatatacatgaattctntttcaaggtccatagccacaagatcccgtggataaatggtctcattcgcggacccaaatcatttgaaatagaacatattgtcgaatagatattattaataaattgaaaaatgtataacatcaaaagatagaaatattgacctcactttttaagctaatatctatcatattaaaatataccaatactttaaacatgataaattaacaacaaccacctaaagtgtcgacgatcttaacataacatattaacaagactcgcacattggacttaggcagacaatgtagaagttcatgaatcagctgatatagtctgctagcttaacgagctagaactcaaaactctata

SEQ ID NO: 47302 - DNA, 328 bp, Glycine max
  unsure (1)..(328): unsure at all n locations
ctgcagctttactatgtgcangggcgggcttcttcactnntctgtctctcactcgagctctgaccactgtccttccttcccgcgatgcttcttttcatgtccgcctgagtgggcttatagcctataccatacttcccacgatttccttggtgttttatcaggctagttatgctgccattgtctntgcctaaacccatcccgggttcataaccgttcctcaacataactcgngccatcattaccgccgcatcggacagacaaggttgcccanagagggagtccacggaggatatgctgaccacctcataagactggaaagcgggttcta

SEQ ID NO: 47303 - DNA, 373 bp, Glycine max
  unsure (1)..(373): unsure at all n locations
tgcgcagcccaccatctnttcatagtagagtaccgataatgtgtctactatcacgattatcgtctccctttccattattgggggtaccacctgngtcgccagatccctccaccttttgggcgtgttcttttaatgatccgtccccctttntgcacatgttctgtagttgcatcctatccggaaccatatcaaaattgtactgatactgcctaacaaaggcaaccattaggtccttccaagaatggacttgggaaggttccaataccaggtaacagctaccccagtaagactttcttggaaggaatgtatcagcaattcctcatcntttgcgtattcccccatcnttctgacatacatctttagatggttcttg

SEQ ID NO: 47304 - DNA, 544 bp, Glycine max
  unsure (1)..(544): unsure at all n locations
cctctgatanttcttatctnntttatattgataatattgtgtatannttattnnnnnnnnnnnnnnaaggtgcgtacgcactgctgctgcacttnncnnnnnnnngnntcattctctcaaatattctctcattcttataggccccaacntggcctcatctcgctcatcgaactcgcagaccgacaagcctcacattctattataaggaccacctgtgaactgcaatatgtattgcacaaaccgtcgcttactcgtaagatgtgccattaggttgcgtttgaattaagcttatgaacatctctcattacatcgctgttgagggcattcggaacatacttctccaccgtagagctctcaatcacgagatttctattttgctaagaaggcatatttctcactatcaaacttcgctgtttggccggaaaatgaacctttcaattgatcttaggagcttcgccccacatggtatatcatattttaatgaacacctctagacttttctcccctgtgggccttctacccaaggaatatattttcttggacg

SEQ ID NO: 47305 - DNA, 248 bp, Glycine max
tctctgatgttgtatatctccatttgttgaagagatacactgctcgttgtaaatttgctgctactttttgcctctctgtttaatttgtgtgctagaatctgaatctatcgtgctcatgaacaatacaatcatattaagatatatccttacccttatactagataaatagaaattagtgtcaaaattatggaatagaagttgattctacacagtctgtcttggttattgacttatatatatcactgaac

SEQ ID NO: 47306 - DNA, 220 bp, Glycine max
atttattttatgataatgctctctcaactggaaatctgaataatgaagtgatggtatggtgactgtggtaatctggagctttgtgatataactcatattatcattgtcgcttttctatataatgctatgataagatcaagagtgagtacccttcttatctctgtgagagacatacaataagattatttcattgtatcaatgactagcttgcatgacattg

SEQ ID NO: 47307 - DNA, 304 bp, Glycine max
  unsure (1)..(304): unsure at all n locations
catttatattagttcctatctaacataaaaaataacgatgtaatacgatatatatattattttaatttttggctcacacacttaattaaatcaaaggcggcaacttttctgtggggtaattttatatatattaacaaacattctcttatttattaatgatggcttatcnncatgttctgaaccccatcaactagtaatgatccttctacatangtgtacaaagagacatgtcaatatagcttgcttgcatattgtggacatgggaatcctatactttcctgtctcaaataatcctctcagaaat

SEQ ID NO: 47308 - DNA, 706 bp, Glycine max
  unsure (1)..(706): unsure at all n locations
acctctcgtccctcnngtgcttgttttatgttttttntatanngttattatntttngttttntntntnnnnnnnnnnnnnnnnnnnnaagatgaaagtcacctgcaggcatgcagcttgataatatntncnactgaaaatatgtngaccaaantattgattgttattcataattttcttcagcataatactcaatccanaatcgataatcacataattattatctaatatcaagacaaaattagacattttattgtatacagggtgggtgaacacatgaatatggagatgacagttatacacatatattcaatagtagaatcgatgagatcttatagggaatcgaagctcaagtcttataataactcatttttcgaagatctaggagcgctatacccacattggtccatatacgatcggattggatataaaaaaccttgttgatttaaactcacaatgcanatataacactccatgtatctctagcaagttcacaaacctattcgccaatgtattttgctcctctatatatatcctctacanantgcaacttatcatcttaatttatttaatcttgcgttttataataattaacacccaaattctggacctcatgatctggattacaggcatatgcaattatataacaacacgtactatctatttcttaacacttagagatatgatcctcaacgctgttacatgcg

SEQ ID NO: 47309 - DNA, 413 bp, Glycine max
  unsure (1)..(413): unsure at all n locations
gctctcctttatctcttcctagtgagctatgatagttcttttgttgcaccctagctatcgtgatgagcctatataatataacctatgctatntagtggcaaaaaggatatgagactaaactactggttattaaactntatccctaagtaacaaggattgctagggatttataaaagcataaagctcagaagtgtgccttggtgacttgttggtcatgagttcgaatccggaaacagcctctttgcatatgcaagggtaaggctgcgtacaacatccctcccccataccttcgcatagcaaagagcctccgggcaatggggtacgaagtttataaagctcagaagtaatactgtcccaaaatcttaatttgacagaaaattatccattgatgcaaatcaagatacattaactat

SEQ ID NO: 47310 - DNA, 640 bp, Glycine max
  unsure (1)..(640): unsure at all n locations
agcggtgagctagtatgtgtttgcttngttntaattaatattaaggttgtatntnnnnnnnnnnnnnncagagagagtcactgagcatgcactcnatgccactattaacctaaaatttntaaccctatgaactctttatttcattatngcaacgcacaccatacacagagactaataagtcctcagcaacgtcctatctctcgtctatacatatggatcacagtctatatgtatgtcgncagtccgcctcatcacacaggtataagcctgacctaaataaaactatgtgcaaggaactatcatttcaacaagttctccaagagtcatatatgctagcacatactgctgatagatctatcacaaggaaactagacgtttagtctacagaaacattaaaattttctaaacaacagatgcttattgcattacacagtccttgtaattcacctaatcagttcttcaatgcgcaactattgatngtcaaaacatgggggatacacctattcatgaggcacacaacctttactcatacttgttataagatagaaatgacatactgaactgccccacacatgactattgcatgacggtgactgacccacagatggtatggtagacacaaactgtgtgtgtacaactg

SEQ ID NO: 47311 - DNA, 427 bp, Glycine max
  unsure (1)..(427): unsure at all n locations
tactaaacaatatcaaagaagaaaacaaacatacctgaatatcctcctatatcaaattctngcatcccgtatacaaaggcttctttgaatcactctgcaatccttcatacataggggcatgtgcttgctanaaagactcttgtccaaggtcacgaatcatatnctccaagcgatctcctatttctacatcaaacggttcagattgggacccactntgcatgtctatcaattcaccatgccatatccacgtcgngtaattcttcttaatcccatcacacaatagatgctcccacatagccgccagnagttgtggcttccattcaacaattgatgcaggacaaaatgntttcatcttatccgatcacctctaatgaataaatacaaaactgtcacgcctcctattctacgagagaattcattatcactt

SEQ ID NO: 47312 - DNA, 321 bp, Glycine max
  unsure (1)..(321): unsure at all n locations
catagccatcaaagtctgaagagagtatgatgaactaagggacgttaatatggccaccactgaaaccttggaacgagaaaccaagaaggcctgaaaggaagaagacgaccaaagcaaagttttgaggggctttatatggcagcaatattgagctcaagctccgaagaggtgaaaggaatcatcacgggtcataggcatgatcttgaatgacgagctaaaggctngccttatgtcgaaaagaaattgtcccaacagttaagcgagactgaagggaatatgtgggccatcatcgatgagtgcaaagagaagctaaatctatcg

SEQ ID NO: 47313 - DNA, 612 bp, Glycine max
  unsure (1)..(612): unsure at all n locations
aataatgatagcatctgcngcatgcnnagctgtccgcaaannaatanntaaaagggatttaaggttcgatacctcattttttctcactcaagtaaaatgggtcatnttaaggtccaacgccttanaaggaccctcttccaagtaaataaatcgcttgatttcgcatttaataagaactacgtaggtctgattttctcatcacaattgaggaatacgtatgagcaaagggaaacgctcttatcgaccacaaatatataagaacgtaagaagggaaaagaatatanattgaagtcattattgcacatttgattaaaggctgccgtctcttacgacagacgcgtggagtgctantacccttcnccggtcgaaatacaactcccgaaccttcactaaaattcatagacacgtctttccggttttccgatgtttcctcaataaacgtggtggaactccgncatattctttcttggacancacnccgagtacgcgtgccctcccgcgaaggtagtgcacactangctataaaaggcatgtggagcattttcatcttgatattgatattactcaattatagcttttaagccaattttgctgtttctctcttattattcg

SEQ ID NO: 47314 - DNA, 404 bp, Glycine max
  unsure (1)..(404): unsure at all n locations
ctagcgccatatgcttctatttttagtcctttgataaggctaagcgtagctgttgcgctaagcccttgttatgtgttaaggaggttgagctaagcgtgccttgctgcactaagctctgttggatcaagtggcctcggaataattaagaagggggggttgaattaattattaacgaacctttactaattaaaaatctatccttcttaatgttaccaaaagtaaaagcaataataaactgcacaacaaatattaaagagtgtagggaagaagaaacaaacataagagttttatactggttcggcaacaacccgtgcctacatccagtccccaagcgacctgcggtccttgagatttctnttcaaccttgtaaagtcctttacaagcaaagatccacaagggatgta

SEQ ID NO: 47315 - DNA, 347 bp, Glycine max
  unsure (1)..(347): unsure at all n locations
aactctgtctgcatactcacccttttctctgcacttcgctccttgatgcacagatcacagaagaagaggggcaccctccactgtgcacaatatctgacgtgtntcttggctgggttaacaacgttgcaaagagtatatgtattaggaacctaagcttcaccacttgcggngcttatggaaccttggcctatgtttctatctggntcaatctccctcacaagaaaactgactctgatgagtattgcgttccggcgttccctcaaactacaaattccaccgtactcaattgcataagtttcttctagcagctgatggcactgatgactgtgcaagattcattgatccac

SEQ ID NO: 47316 - DNA, 618 bp, Glycine max
  unsure (1)..(618): unsure at all n locations
acgctattctaatattattttntttttntatgtttgtttattgttatttatannnnnnnnnnnnnnnnncagtgtcttaagtatctgcagctgcagctnntctngcttgananancngaatacatgtcatctctaaactattttttantttgagacaaacagactcgagtgttggatgatggaacctgaacgtctcctttcaacatgtagaatcttatgtcaatgatctccctcgatagtgagggatactcaactgatgttagaggttatgagatatgcttaaaacatgaaactctttcccgcgtattatacatttggaatcctctagatgccatttgataagatcatctttcaagattngtataagagatgtatgtggtacttctctgcttatgtctccttatactaaagtgccttaaggatagaattataactagaagaagctcgttcatgaaacattctagaatcagatgagctcttatacctgatatatgagattcatgtgctgtccatttattctgtgtgaaaaggactgagacagctcattcttactttataatttgaggatgccctcaatccgcaatgattattattatacttatccagctgtagatgatg

SEQ ID NO: 47317 - DNA, 405 bp, Glycine max
  unsure (1)..(405): unsure at all n locations
acaatcattacaaacaagggccaaacaacacttctcatggcccgagtgtcaacatgcactttataaaataatcatattngggtcgtgctattttatgacacatacgtatntgcacacataaaaantttgtgtgaagcatgttacgacacctatccatgtacatatttntngacaaacctgttcatgctacatcctatatatatacacacacattgtggtggaaggcttcttttgttacctactcacaaatacacatattatgaaaaacacttgtacgctacccaatcaacactttgtaaggcactcatgctatatatatcacattatgcaaggcattttattaactntctgcanggcatttattcaacatttgcaaggcattccatgctatatatattacatata

SEQ ID NO: 47318 - DNA, 422 bp, Glycine max
  unsure (1)..(422): unsure at all n locations
tatgcatgtgaattatgacgcatcaacaagagtcaagccaaggctattgtgcaagcaatcaatggngcataacacaccaaatgattatgatgatggatggctcanattctcaccaaggtaaactcatcactttcaaattgagctttcaaaactatcatgacatgtagagaagaatcaaggatttcaagtcacanaatgtcaagaacttttattttcaaaacaattacccatttcttgaacatatcctataattcaaagaanaacatgcaaagtcgtacgtgcacacaaaattgacccaaaatattaaactaanaatccgacgaaactaacaacattaacaaattaacacaactaacanattaacaaaaccaaccaaactagcanaactaaagaacactcccncccatacttaaacaacacat

SEQ ID NO: 47319 - DNA, 324 bp, Glycine max
  unsure (1)..(324): unsure at all n locations
gatgttcacatgcaggcagctgcatccgaagctgaattactctataagaatctcacggtcatgaatgagacgtgaatgtatcaaacaaacgaaaccattattgagaagtatggcaatgcactcgatgatgacaaacttccaagagaacttctgctgggccaaagtgacaagcaagatgagtctgatcgtgcangtataattattaagggccatgtaagatatgcattctaaatctttacggtgcagcatatgtatataaatcttaaatattcttcttgagagtgtattggcagtgggatntcatacatgatctagcaacatatt

SEQ ID NO: 47320 - DNA, 704 bp, Glycine max
  unsure (1)..(704): unsure at all n locations
tttgccgtcnacattantctttctatatnttgntgtttgngttcccctnnnnnactnattananntannnnnnnnnnnnnnnnnnnnaatgtgcgtctagagtcgactgcngcatgcannctnntatcnangcnnctctcttgtggtganccttctccttctttgtttttntctttnaggacggtgcctctacatacctcttttactttatattctcgtgccactccatgtgtgatatcaccgtcgcacgactttataggatctcacatatctatccttcatcaatactcgatcaagcangctagcatcatctctgtacctaatattgacacatntatatctgaaccctacgcacccatagaagcttctgaagcaagactccatggctgatatgactgattccacactatcgcgctncgttgttgacaaccttgcgcataaaataatgtcgcttaatactcagggatgtgctactaatattatattgttacgacggaccantcatncacatctacgtgatatgagaatgtggctcatcgccattgtgtgtctatgttaacacaccactgatacaaatcgaacctgaacagtgtgtctacacatattgtgtagcctaccgtattaattaacatgatgtgtaggtgcacataaatagactcggaattaaacgccttatacaaggacggttcgcaataacagatacg

SEQ ID NO: 47321 - DNA, 135 bp, Glycine max
ctcaacataattgctgtacaagtgatatattaaccaagactataactatgtcttgagacatagtatcaattgatacggaaactagaaatttcactatacaatcatctacaaattgtgacattgttggctgaaaag

SEQ ID NO: 47322 - DNA, 646 bp, Glycine max
  unsure (1)..(646): unsure at all n locations
tttgtatcctctgtcngtggctntgattgntgangttgttnattttttttnntttgtttttttttntnnnnnnnnnnnttagtttcgctacgtcatctgcagcatgcanctantctannacatananncggggnngtttctgaccactatattatgttttcttcgcctttactctgttagccggatgttaactaatctgctaggcatagcactgtgttgcgtctatgaatatacnatgaatgatgtgatggactcttcgtaattgaatantattgcttattcactgctaggtggaatcaanacttcctatgacgctcaagtgaagcatgttgtaagattgcaacgacaatagttgatcttattggtgtacctctactggtataaggctgcatatgctctaaagggggcctacgtggcattttcgcgtacaagtgggaatagaccgccaactgtctttttatgaggtactcttcttctcacaactgttatatacctctgcttaaagagatacacgcctgctggtcttaccggcatagatctaatctccacaagaatataaaactcttgcttattttgtggtaagtcccctcttacgatatcctcaaatgttgccaaaagatatatctatccgagtgtctctcgcttt

SEQ ID NO: 47323 - DNA, 251 bp, Glycine max
ctcaactatgcggcaatattacaatagacctcctcgacctcagcagcgatatctaccacagcagaacaattatgacctttccagcaacagatacaaccctggatggatgaatcaccctaacctcagatggtccagccctcagcaacaacaatagcagcctgctcctgtcttccaaaatgctgttggcccaagcagaccatacattcctccaccaatccaacaacatgaacaaccccagaaacagccaacag

SEQ ID NO: 47324 - DNA, 405 bp, Glycine max
  unsure (1)..(405): unsure at all n locations
gacgcatcaacaccagccaagccaaggctattgtgcaagcaatcaatggtgcattacacaccaaatgatgatgaagactgatggctcatattctcaccaacgtaaacatcatcacttacagattgagctatcaaaactatcatgacatgtatagaagaatcaaggatttcaaggcacaaaatgtcaagaacttttattgtcaaaacaactacccatttcttgaacatatcctataattcatagaagaacatgcatagtcgtacgtgcacacaaaattgacccataatattaaactatatatccgacgaaactaacaacattagcaaattaacacgactaacanattaactaaaccaacataactagccaaactaaagaacactcgcgcgcatacttatacaacac

SEQ ID NO: 47325 - DNA, 178 bp, Glycine max
tattcatgatcatttcaccatcttcaataagccactgaagcttgtagggcgtggatgtggtttactctccaaattcagttttgacaccaatcttgcactaaccgccttggtgcaacatcctccatcaattatccaagaatataactgatgcaatcctcacccccaagggtattagata

SEQ ID NO: 47326 - DNA, 247 bp, Glycine max
  unsure (1)..(247): unsure at all n locations
atctttccttcctaagatggagcctaacccagtcccnctcattaagaactagctnctttcttcctctattgcccttagttgaatacaccttngtttggttctctatttaggtcttaaccctctcatgcaacttctttacaaactttgacctagattccccttctttatgtataaaagaagtgtcaagtgggaggggaatgaggtcttanggtgttaagggattgaacgcatatacaacctcaaaagg

SEQ ID NO: 47327 - DNA, 267 bp, Glycine max
  unsure (1)..(267): unsure at all n locations
aacataagcccgtagacaattcanaggacaataactntntactcggatgtccgatagagtctcgtaatataatgggacctccaaattgaaaatggaagctcctatcaaattcaaacgacaataactttttgctcggatgtccgattgagtcccgtaatatatcgagatgctcgaaattgaggacacaagctctgaacaattttgaacgacgaataaattattctcggatgttctattgagtcccgtaatatatcgtgctactccaaa

SEQ ID NO: 47328 - DNA, 176 bp, Glycine max
  unsure (1)..(176): unsure at all n locations
aacttaatggctgagtgtaactganattgtggcaaccaaaagtcacccccaacagccaacaagtcagccaccatttggtctcccaaaaggctgatgcctangttgccaattgggcccttattacaacttgaactaaacctaactaaagcccttttaattgattaacccanaacata

SEQ ID NO: 47329 - DNA, 396 bp, Glycine max
  unsure (1)..(396): unsure at all n locations
cttcctgagaagcttctntgagaaacttccttgagaagctagagcttagctacactcactcatctaanaactaagctcgcctccttgagaagctagagcttagctacacacacccatctaaaaactaagctcacctccttgacaaaatacatganaatccaaaaaaaaagtccctactacaaagactactcanaatgccctgaaatacaaggctaaaaccctatactactagaatggccaaaatacaaggcccaaaagaaggaaaaacctattctaatatttacaaagaagagtggatccaaccttgacccatgggctcanaaatctaccctaaggctcatgagaaccctanggccttcccttggatctctggcccaatctacttggagtcttcta

SEQ ID NO: 47330 - DNA, 221 bp, Glycine max
  unsure (1)..(221): unsure at all n locations
ctacagcccgcagtaaactcgggccgagacagatacgcgactggntttaatcggaggtatagtcctcaagcctacccttatggtntgcctccagacttcactcnccgtaacgctccagacgattngagccaagctcgtaacttcgagggacaactntctnctcatgctgactatcctctacgagaagatggtgaaggagatgcccatgtaggcactctact

SEQ ID NO: 47331 - DNA, 430 bp, Glycine max
  unsure (1)..(430): unsure at all n locations
tcctgactcaccataatccttaccctcggaagcatatttagaatcgattgganatctctctatcaaagaataagagaaggaaaatttccaatgaaagcaaaaaaagaatagatgggaaatttccaatcaaagaaaaaaaagaaggaaaattccccaatcaaagagtgggagaaagcaaaaagaaaagaaaggaaattcccaatcaaagagtgggagaaagcataaaggaaagaaagaaaattcccaaccaaagaatgggagaaagtaaaaaagggaaggaaagaaagttcttgatcaaagaaactataagaaatatgcagagaggtctttggaccggacaatatctgaacaatacaaaattgtcaccaaatgaacaanataggaaggaaaggaaaccacaacctaaaatggtcttctccctttaattacc

SEQ ID NO: 47332 - DNA, 527 bp, Glycine max
  unsure (1)..(527): unsure at all n locations
ggcgcgttgatccttgaagcacctgatgcattgatcncnnnnntntanagngacactagtgatctagccactgtcgttttctaccccaaacgtgtatctacaattctccttaacggaacacagaccgacagtggtcctacaacgtatnttaatgctgaacatcaatcaatattacaagttagggaaatatcatcttgctctacaagcatgatngaatattgtcctgccgttatgacgtacttgagaacccattcaagcgatgaatacatttccattgctcactgatttgcttattgtctctagtgcactcaaagagttatatcaataatctatgcttcttcttgatgacataaaacctctcaccggtgtgatctgggctatttctttcctgacgcaaagaagctcctaattcttcacataacacacactcggatgatccatctgccttcagcatagttatgtcctggaatagatatcgtacccaatcctttactattgcctaagcctgcacatgctggacgattatg

SEQ ID NO: 47333 - DNA, 286 bp, Glycine max
  unsure (1)..(286): unsure at all n locations
tttatataatttatctcgcggcatcaaagcctttttgcattaacactnggcaaagtatgcacgacatacctcaatcaaaatcagaccctgtgagcacgactgagcaccccaaatggactgcanagtgaaatgtaccttgataaggtcctttcagccgaaacaaacaaagagtccttacagtgagcacgagttcgtacctatgtatttagaagaaagactcctgaaacgtacctaggtaaggtggcgagctatcacggtctcgagtgcgatgaagaagaaaaagctt

SEQ ID NO: 47334 - DNA, 271 bp, Glycine max
  unsure (1)..(271): unsure at all n locations
agctnncnttacatataacaccctatcaatgggcgtngcaaatattaatttttatgtagcagtcgacaaagtctcaaccttcttctacttatagtatatagatcaataactaattcataaacacaagaactcacatattcatcagcaatacaattaacacccattatgtgtctccagatatctaataataaactcaatgtgtattaaatgtcctattagaataacaaagtatgtattgtgtggagagtgtaaaatatgtcatgcacaacac

SEQ ID NO: 47335 - DNA, 377 bp, Glycine max
  unsure (1)..(377): unsure at all n locations
acaaaacttgtcttttcttaatacacttaagcaaactcatcagtaagcataaactcgaaagacttataatntgtgttcagaaaggttgtcanaattaanagacctanggtttntgactcaacanaactcatgttgctntaagaaacttatggatctaccaatatttaatatacttgatactctgtatgagcatggataaactagtctaagctaatatcaaccacaaatgtctagtctaaaacaaccaatacaaatgtcatatctattaaacatgtgtggcattgtaaaacctcacaatattcaaatcttcaatcaacaatcaaatctctagaaaaataaccaagcaacaaataaattataaagatcgcaatatcact

SEQ ID NO: 47336 - DNA, 767 bp, Glycine max
  unsure (1)..(767): unsure at all n locations
aataagatttcttagtttattacgtatgtaaaatatnnttntggttttgtntanntntatnttatttaatttantnnnnnnnnnnnnnnnnnnnaaatttgactgtatagtcatctgctgcatgcannncttncnnnncnncaacnncnnntgtntccttaaaaactngcttctnctctcttgtntccgagactgagaataactacactgcgtgccttctgcagtaatgctatcttatctccatcnaccatcatctctttgagtgtggcttctacatcaagtgcttccaccaggccctgctgaacaagaagagctctcatcttcaatagccatagcccgaaatcattctgcgctgttgaatgtcaaactcatactgagccgagcccatttattgatcatactacaaatcgctccatgctcacggcatcaatctgttgagcacatatcacaatttaaattcaataaagaattattgttgctggtcttgaccaatgattngtacactngctgcataaacaggatgaacatagaactgcacataaactcagcagcctactcttattcaatctgctgagaattctctaagtacacaactctcttatgacctangctatgctacaagaagagatatatcactatctcaagcctaactaaccggtcaactagaaactaataacattatcttgtctactagtaacatacaataatcacagntggcactagcaacatactatatcaatggtgtaactgattcacatacatcaccg

SEQ ID NO: 47337 - DNA, 384 bp, Glycine max
  unsure (1)..(384): unsure at all n locations
tctggtgggacatctngacttgttttccaatctgacattcaccactgattctgccttcttctantttcagattgtgaatgcctcttacagcacctttgtcaatgattttcttcatgcctcttaagtgcagatgtccaaatctttgatgccatattttgacttcatcttctttggagaatagacatgtggaggagtaactggtttcttgaggtgtccataggtaacagttgtcctctgatctgctgcccttcattaggacttcactcttctcatttgtcaccaagcattctgactntgtgaagtttacattgaatccttcatcacacaactgactgatgctgatcaagttcgcagtcagtcccttcaccagcagtacttttgtca

SEQ ID NO: 47338 - DNA, 282 bp, Glycine max
acacattactttattatcgtgtgaactcataaattacaattcaatattctttgtaatttttatctcacagctttaataattctcttcatttatttctttctttaatattacaccatctactgtaatagaaattctcctttaatattgtactacatagttcaatcatcatgtttcttataatattcgtaatgaaatatttaatctctaaacgaaaaagataagagattaatactaactaaatcgcgctaaatcaagagaagcttgcagacaaggtagtcatga

SEQ ID NO: 47339 - DNA, 567 bp, Glycine max
  unsure (1)..(567): unsure at all n locations
tacgngagatcatattacttttcttgtaagcatataatctcaatcacaaaggatggcatgtgtataggttgtcatgtcctcacataactccataactatatcatgtgtcttcaatttgatcgtcccaccaacggaggcattaagcatctgctctgaatgggattgcctaacattaaagaatatatntngctgaaccggctcgctgaacccatggagggaagtcttctacagtacacccgtggaagtagtctacaacttcactcaatgatccatcagggaatngctagaatanagacatcgtccacttctccctcagtnggccttggactctgtgaaatatctcntacaaacatctccaccatctctctcatgtacacactattnttcctagatgagacaaccatctctttcgtcaccagccangagaacgaaacatgtcangctaatacactcttcgaactcttgtatctcactgtgtagcatgtaccgttngattctattggtaactataagagatatctcaatacactcgatactatgttgcattcaacttatctcgcttccctn

SEQ ID NO: 47340 - DNA, 428 bp, Glycine max
  unsure (1)..(428): unsure at all n locations
acgacttatgtggtatatntaanagttattattntttatacaataagaagcanatatggcatacatatgatgtgatgtgatgtgcgcacacaagtgcgaacccattgactcagtgatattcaaggcatcgattacgaagggaacatgtcctgtaaatcctatcgtgcgagaactgtaacacacacatacacatagtctcgatatattgtaggcattaatcagatattcgtgtcanaagttatagccgtttaaatntgttagtgcttatgtgtcaaaatttcgtgtgtcttgatatacagacacaatcttgatatattataggcatcaatcggacatctgtgtccaaagttatatatcgttgaatttgtaacgtttccgtgtaaaatttcgtgtgttgatatattatgtggcacaatcaaacattctac

SEQ ID NO: 47341 - DNA, 260 bp, Glycine max
  unsure (1)..(260): unsure at all n locations
atacatcttctcanagatcccaacggtcagatcatgtacaagtgtcttgtgaagtngcagaacatatttcgagaagatcctacggntgaagaagggtgggcagcgtntttaccgaggcagcttcatgtagctttctctataagcttcattaagaggcttnctccagaagcttcattaagaggcttcttccagaagcttcctcgtggcttctttgagaagaattctcaagagactctcttgagaagctagatccttatcta

SEQ ID NO: 47342 - DNA, 459 bp, Glycine max
  unsure (1)..(459): unsure at all n locations
ctgtngaatccatgtttttacataggagacagtatctcagaaacttatcnncttttacatagtgttctagagcaacaatactctgtttggttataatgaaatctggaaccaattctaacactagcaagaaagctccaattctaggagctatggggaaatcttagtgctgtgcaagaaacaaggagggttcatgatgtagcataccgaatggagggattaacagaaaagttaaaactttggagaactnggtaccacatcagaaaaccaagactcgcacttgaggatgaggaagactggagagatgtatagcgcataatggcttccccaacaggggtcccaaacatctgcanggcattcagagggcaatgcgagcataatacaaatggtgaaagaaagagaaacccacaagtgataagtgttggggtcaatgaaaatcccttaaacaaagattgagcctct

SEQ ID NO: 47343 - DNA, 249 bp, Glycine max
  unsure (1)..(249): unsure at all n locations
tgagctgcccttatggataacttcagacactgttaacttgtataaattataattggcnccctctttaaagctcaagcaaatggagaatacctaacttgtctttaaacacactaattgttgtgagatgctgtaacatggaattgcaaacctattttatttttagtcaacacttgaatgacaataatatgacaatgggtactcgatagccggatggctctctatgactagcatgcctattacttattcact

SEQ ID NO: 47344 - DNA, 443 bp, Glycine max
  unsure (1)..(443): unsure at all n locations
ngggtcgaggtacttactcgctgaagatcgaagaacgatgaagatctattgaagaacatcgaagaacgggtgacaccttcgcgaaattcttcacagaaaacgttacgggaaccggttccgaagcgcctcgacttagattttcttcacggaaacaatgtttgcaagcaaattcgagagagagagaagtgcctaaagtgctctaccctatccttcttcactgccttccctatntatagcanaataggggagatgcttgccgcccagctcgcccaggcgagccatgtggcttcctgtagaagcaacagccttctggacgaatcatctggacggcccaagcggccttggtgctattcgcacctcattatactatgacaccactctgcttttgtgagatcgtattcgaaagtctgaactacgaattcgacgaactatttctttcgacg

SEQ ID NO: 47345 - DNA, 769 bp, Glycine max
  unsure (1)..(769): unsure at all n locations
accgtagttccacatctctcnttcntcgttntttangnttttttttttntnntnntgtnangtnttntantantnnnnnnnnnnnnnnnnnnnaaataaaagagtcgactgcngcatgcaagctnnanganannngancctgnatcanncatatcggaccctgngaanggtgtgtctatgttgtctctttctcttctntagcacgcccatcnntgataatatatatatcaacaccaacaacgatctagtctaagtgttattctcccaacacanacaataacataataatcatcttacatactcgaatatgggctgcttacgcgcagcanagctggggcattatgcgtgaccttataatatatctattcatagggcctaagcgcagcacactcgcgcttangcctatangacacaaatatattgtctctgcataattcngcttaagagcagctatgcttgagccttaactctaagtctacacgtctttaaaaccacagaacgggtctcgtcctttactccaaatcaccgcacttatctcacgctcaccagaatgacctcatgcttatccacacggccgcttagctaactcaatactaaaacagaagagagttagcttacgcacatgcgacttactcacctcatgaacatactatngttagtgagccagtgacttatcatatttcacgttaagactacacatatggtgctatcctgtacgtatgcttaccgtgacaaattcaaaatctaatgtaaatctatctgctatccg

SEQ ID NO: 47346 - DNA, 418 bp, Glycine max
  unsure (1)..(418): unsure at all n locations
tcctagtcataatagaacatgtgtacactttgtgtaactttgatgaatgggagtctggtgagacacaactcanagttcaacttctctccctnttttcttccttctattgtgtgctcccccctctctctttctctctctctttcttttcctccattgaagcatcctctccaagcttcttatccaagactcatcttggtggtgaagctccttcttccatggcttattgcttattggatggcgcctcctctcacctcttctcctttgtcttccgctgcatctccatggtggaaaatcaccattgaaggacctcattgaagctcaaagatccaccctccatagaagccccacaagcaagcttccatcatttctccattgtgacatataaggatgaagttaattgtgatatagttcccatgga

SEQ ID NO: 47347 - DNA, 685 bp, Glycine max
  unsure (1)..(685): unsure at all n locations
ttctactcagccggntgtggtgttgntattatatntattnttnnntntntttgtanttttannnnnnnnnnnnnnnaatgatacgagcactgaagctgcaagctataggacnanactataacattcccttatnntttttcttctttgctatatgatntnnatcgaaagncacaaggcgaagaactataacatgccataactaacgcttacatatgtttttntgtgccaatatcaacaatcgttggcatcngacattttgaatcctcacatacagcaccatacttgatatgattaatatgtacggttatcttttcctctatgcatatcatcaccatattgactgctattgttagtgaccatctctttaggtacaaatgtcttgtatacacttatcagcccccttctcttggtcgaactgtctctatgatatgtttaatcacactaatagctcgtgtcgcatactccatgccatgattactatggacaatgtcgatcactcgctgttctgatcttgtcagactgactcatctacgagagtcatagcattccattcagtgggataatgttcctaatactgcgtgaaatgatcattaangttaacgatctaaaatgctgatcatgctcactacgatacagcatatgtagaataatggcatgccttagttcttatacaaactactcaacg

SEQ ID NO: 47348 - DNA, 474 bp, Glycine max
  unsure (1)..(474): unsure at all n locations
attcacattcttctaatatcactcctaaaagactatgtcactaatatactactaacaaacttggctatttgtcaaacaaaaagctatgctgctatctaacgttcacgaaagtcatacatagtccttaatgtatgtcagtttgtttgtgcttcttttgggcgtgctgtcatgggcttctcctgcaacttcttcctatcaccctctcaattacttgaacttgattctntctagcaagagctaatacaccatatcattccttctgtctaatgtaataaactttatttcacttgttttatctgtgtgaataaaaaaaatactacaaatttacaatattcaagtatatttttcaatcaattaaattagaatattttggttgtatttcacctttgtagtttgtctatgatatnntttatnnttaaaaaatataaatcaaatattttattttcaatatatacttccattgattggactccc

SEQ ID NO: 47349 - DNA, 193 bp, Glycine max
  unsure (1)..(193): unsure at all n locations
atcgagacactcaagagtggaaaacagacgctcacgagaaattcanatgggtataactcttcactcggatgtctgattcacgcgcataatatatcgagaccctcgatattgtacagggaagctctctgccaaatcaaacgaccataacatttgactcgaatgtatcatcgacgcncacgatatttcgagacgc

SEQ ID NO: 47350 - DNA, 366 bp, Glycine max
  unsure (1)..(366): unsure at all n locations
aaacccctaaacattatcatntcttcttaatttcatgtcatcttctaggggagtttagagcagcanaacttcttctccttctcgctcttgagggctggtctagaaaccttgaagcctgttggtaagcaagttaacccttcactctagccttgttcattcttcttcatcactngaattntctctcatgttcttgagttntgttgaagcttgttttttactcaagagacttcattcttggttgtacccttctctttcacatggagactacaagaggtaaggggggtctctccaatattngaatcctaaccatgtgatgcatggaaacttagcttcaaaaatgtagttgtcgtgttcttgaagttttcg

SEQ ID NO: 47351 - DNA, 217 bp, Glycine max
  unsure (1)..(217): unsure at all n locations
ccatatacaancaaggcagcgtcgttatctaaattaattacacgtacctccaacgtgtatntgctacttacatcacacacatctccttgggtaaatncacatacatgcatactcaaagcattntggtgcaccacaaactgcacctgtgcacatctaggcatgtttaatacctatacatacgcaaactacatgatgaatcttgactatctacacaata

SEQ ID NO: 47352 - DNA, 373 bp, Glycine max
  unsure (1)..(373): unsure at all n locations
atgacttccattgcgaannatattataattgtatctaacatactatntaactccctcctttctagtgtgatntattatatntcaagaactctggggctcgcataccggataggtattcgactagggtagtaactagtagaaagaatggatataacatcggtacgtttacatcattttttagacaaccatggtaccaaaccgcgctgcatatttgaaataaagtatttggtaacatcaatttttgaaaatcgatgtaaaagctaatgtaacatcggctttccanaatcaatgtaaccactgatgtaacaatcagtttcataaacgatgtgtgtagtaaataattagtgctatagtaatgtatatctttaacaag

SEQ ID NO: 47353 - DNA, 248 bp, Glycine max
actattcacacggatgttcgattatggcgaatcacatatcgagacgctaaatattgaacagcggaagctctcgagaatatcaaatggtcattaactttaacactgagttccgattcaggattataatatatacagacgctcgacataaacattggaatgtctcgagaaattcaattggttatcactcttcacacggatgtccgattccggcgtataatatgtctacacgctctatattgaacaaccga

SEQ ID NO: 47354 - DNA, 403 bp, Glycine max
agcttgaaaggagcatctaacagtccacaagctttattctcttcagtagagaacaaaccaagtttgtttgcacgattatcaaaagagagagtggagaagctttcaattaccgacttggagtctggtaatggtaagcctccactccccgaggagagagattccaaattggagccattgttgtctaaagatcattgaagtctactttgcatcataaggtaaaaagtgtatttagccattctttcagaaaaaataaaatgaataggttaaagttaaaccgggtgtaatcaagccaacgttaaaaaatagcttgtgtaatatttgattggcccggtggtgtgaaaataaatgaatatttaagaatgggtctattatgtaacatctctgtcagctgtgtatccctaat

SEQ ID NO: 47355 - DNA, 404 bp, Glycine max
  unsure (1)..(404): unsure at all n locations
agtcttcacttatgagggatcgaggtttaatactttaggctacagcgtagaacacacgaacatgagtaattagagaaatatgctcatatgcgtcaacttgattgctataaagacccaacactgtgtacctattgctgtcgacttttacttacttgcatttactatttgtaccatagaattagtttatttctgtttttaaccatcaattatcaatgcttgttccaacaatgccttacttctgaataaaattcgtctaataagcaagatacctgaggtcaatactcggatcattccgttttaattttaaatacttgacgactctgtgcgcttgccggtattgcatttcccttgaatatatttgttaanaattggagaataaggaaccatatggggaagtgaacata

SEQ ID NO: 47356 - DNA, 487 bp, Glycine max
  unsure (1)..(487): unsure at all n locations
gcttgtaagattatggngtacccgtcacatgtggtactatgtggcgatcgggcgatggtgcaaatcaactctccacatccacaaatcacacatgaacccaccatccccagttgcccaccttcaactgagctcacgtactcccacgtagcccttatcctcgttcctctcagcaccgggtccccatcaatccctccaagcttccacaacatccaagcaattcaatatccaaacatcatgaactatccaaaaccaagaaaatagggcaaaggcagaaaactctgcccaaaacacattccaataccacagctttccttactcaaataccccagtaacattctctttgttccgattcgttcaccggtggatcgactcanaactnttactggaggtccctagtacataagtctacantttgaccgttgggatctactagaaaacgtncagaaccccatatgtactaccctntccacaaccagcaatacacaag

SEQ ID NO: 47357 - DNA, 488 bp, Glycine max
  unsure (1)..(488): unsure at all n locations
tgatgtntgtgttgaatgcattaaaggtaaacagaccaaaagcaagaaattaagtgcacatagggctacagacgtcttggaattgatacatatagacatttgtgggccatttcatacaccttcatggaatgatcaacaatattttatatcattcatagatgattactctagatatgctgatgtgatcttgactaggagcggatcgcttgatacaggctacagagaatttggatgacgtcacttccagtgaaggaagataagtcagggtagacgccacaaggattaccttgataagtctgagattggttcaacaaggaacccaaagagaagctctcaccaaattntatgaaaattccaatagtcctttcattgaaaacaaaaaccaatacttatagtgtatctgaacaaaaagataaaaatagacatgggccttcaaaacagtttgggccaaaanaattatatataaaaaaatagaacatatttattat

SEQ ID NO: 47358 - DNA, 510 bp, Glycine max
  unsure (1)..(510): unsure at all n locations
atccttaagcacctgcggcatgcaagcttgtggaagaatctggacaaccctggaatattctagagatgtgtgattccttctggaaccttatggaagagtatgggaagatatgaaagggagtagaagagtgtatagactcctagaatgtgtggagcattctagagaattaatcttcaccctatgatacaagtaatctctaccattcattgtggaggtggagtagtataaataaggatatgagccttcattcccaaccatccgagacaagagtgaatccacttcttagagtgagaaagctaganagttaaagagcctctttgagagagaagataaatagctggagaagtctttatcctcaagcttgaatgcaccatagagtgagtcatatttgtaaacacatacttataaccctactattctgtngtatagtaaaagaatcttcatattggagaattacaataatatgctctcattattacctctaattactaaatgtctatcttaacttca

SEQ ID NO: 47359 - DNA, 483 bp, Glycine max
  unsure (1)..(483): unsure at all n locations
ntgaacaatatactnggccttcatttaactgtctatgggcttggcggccacgctcaacaaattactttcgacacctactgtacgttgatttcaccaatgttgttatgggaatgttgcgacaatcctttaaaaccttattgatacattctgagaggttcgttgtcatgtggccatatcgacgtccttctctatcgtaagacatcgtccatntttcctttgagatgcgatcaatccatgttgctatggctggactcagttcacgaaatttttctaaattttgatcaaaaatgtgtttgcaaggagtgtaggctgcataaaattagttatgaataacaattttaagtataaatgaaagtaaaataaacgtgaccatcaaatatgaaatcttacccaatttcttcaacatttctttttgtttggcattattaaattatcgattgaagttgcttactatgtgtcgcacgcagtagacatgataaccgt

SEQ ID NO: 47360 - DNA, 438 bp, Glycine max
  unsure (1)..(438): unsure at all n locations
atccttgagtcacctgcggcatgcaagctnngcaagttgtctttagtatnttttntatctttatatctaagnttgattcttttttttttaaatattaataatttaaaatatgtttaattaatgatgataccctgatagtgaacgatatcttatattcaactaagtttatagcccattttcacggtcagacattaggttttacgttagtaatctagagaagttatcgaacatacgcgggtaaaaacaaaatttataaaacgtttgtttttggactggaacgttcaacatctctagaagaatgttgcatataagagaagaatcttgtatacaataaggtagcacgtatcctactttgacaccactacaaaatgcgtcactgagaaagtaagattatgataagaagcaattatgtgaataaagcttcataatcatgtaact

SEQ ID NO: 47361 - DNA, 488 bp, Glycine max
tctatgactaagttgtcatgagtttaatccttgccaccctcatgcttcataataaaaattgaatctcatcacaaatttgggtgggcctgtgtttgtccatcctttcaatattaggggggttgtgttgtagtcttgtagatataataatgccatgtgtgatccttcacctaacagcttaatatttagggagagttggtgattgacacaattattagtcattattataaatattatcagaagctgtgtttgttctctgttgctcttttgttatccagtacatgatgggattgagaggaaaaaataaccttaattattctaatcttaaaactttctgaatgatctgcttatgaataagcagtactttcacaagtaattgatcagaactatgaagttatttaggaaatatttaactatacgtagaatggtatggtaattaagtaaaaaattgtcttagctagtagcaacttacatttgattaatacctacat

SEQ ID NO: 47362 - DNA, 417 bp, Glycine max
  unsure (1)..(417): unsure at all n locations
agcttatccttatggcctgcctctggacttaaccncccgtgccactccggaagaattgagtcaagcccctacttttgaggggcaactcccaccttatgaagactatcccgggcaagacgttggggaaggagatacccatcttggccccctgctccacctcaaagatccgtccccgcatgaactaccccaatcgaacatagtccgtcataccccggcctcacccacacccataaaagaatctgttccctttgcggaagataagggaaagattgaggcgcttgaagagaggttgagagcagtcgagggcctcggcaattacccattctcggatttagcggatttatgtctcgtacccaacatcgtcatccctcccaaattcaaagtaccggactntgataagtacaaaggtacgacatg

SEQ ID NO: 47363 - DNA, 499 bp, Glycine max
  unsure (1)..(499): unsure at all n locations
ttcaagatataattcaagaaaacaaacaagtaaaaagcaggaattntaatgagcaaaattagagatactagggtgcctcctaggagcgcttctttaatgtctttagtcggacgcgggatgatgattagctgatcctgngcctagcacttgtctatacttgcccctaagcttagacaaaggaagtggtattatgcaacaaaatgtgaaacaatactacgagatgtctgcattacctttcacttacccttatctcaaattggtgtggtattaaccatcactcaaaatgactcttcattcatccttcgattcgcaggatcccaaatgacaagatgcgaatccatgcatgtttatgattgaacgttaagtgcaacaattaaaaagttgttatcgtattcaattntacttaaatgcttatgacacctcgttgatcaagcanaatggctcaggattcagtgngcaagatcgagagtgtgtgttcttaaggacaataagaagtaaa

SEQ ID NO: 47364 - DNA, 430 bp, Glycine max
  unsure (1)..(430): unsure at all n locations
agcttctcattcttggttcccaaactttcattttcattctttgaagctagagacatcaaggatttgagctcctttctatctaagccatcagtttagcttcatcaaggtaagggggcctctccaattcttgaaccctaatcttgttgtctttggaagctaagtttcattgaatgttgttttgatgttcaaaaattcgtagctactgcctttgctangattgtatgattttttgcttctcttgaaattgtaaggttaaaaatgagtactttgggtgtcaaaacttaggattagccttaaatttcacttaaatcagagttttctagtaaaggttatgaataaaacaagttcaatttaagactaaactgccatgaaataaaacttggtggtatggcttgatgaactatttttcccttaagatttacttcaaaat

SEQ ID NO: 47365 - DNA, 430 bp, Glycine max
  unsure (1)..(430): unsure at all n locations
taagtcctctattgtttcaaanattgtagatntatgctatgcctagcatgctgcactaagcctaatctgcagaanaacattntctgtgtcttcaggctaagcgcatgtctatcgcacttagcccatgagtaaatttgcataaggtgcactaagcccagcatgctgcgctaagcgcccagtccagtttttagttttatttttttgtttttgttgaataatcctatnttaactctgttgtttgatcttatttctttcatatggcatcaaagaagagaaaggcacctaccacaccttcccaggtccgatatgacagatcaaggttcacttctccagaggcctagtaaaggtacacagacatagtggtgcctagaaagatacttctagagagaaatgtggtgatataccacaccgagttcaatgatttcaaaga

SEQ ID NO: 47366 - DNA, 398 bp, Glycine max
agcttgttctctcttctccgcgaactgcttctttttctccggcaaggcaagcgcgaacctcgtcttcttcttctacgcgaacgaggttagtctccctaactcccctgtgcttgtatgatacaacattgttatagcttgtagcagtggaaccttatgatagttaccttaggatagtaaccttagggtagaagacgagaggagaggacgccggataaaatggggaaaggaggctgacgacggagacttccggaagacccgttaggggttcttccggaagttccggaagaacattttccggacagtttccggaagaagggttctttcggaagtaaccaaacgtctttcggaagaacacttctttcggaagactcccggaaaaacctctttcgggaactttc

SEQ ID NO: 47367 - DNA, 449 bp, Glycine max
actgaagacaagttacataatattgtggatcaacctcatgatcactacttgaatcttctcgcatacgataggtactcatggatattcattgatatctcttttttcttaataatgctgtaattatcgggcccaaaggtagtttgttttcatcacaatatacaaacgatatttcaaatagatttttcttataaaggcttaactattgaattaactctatggtactataaaaaaagacaaaattacatttagttcttgtgaatatggaatgccaaagtatgtaaatgcaacttcttacacatgtcatgtcatttggattaaaagattgttcaagagtacaatgaattacaatgacaattgatctgcttacgatcagagaactcagagtttcatgaaagaattaagcatactaaaggaagatatggtttcattagacaatacacattgctatg

SEQ ID NO: 47368 - DNA, 437 bp, Glycine max
  unsure (1)..(437): unsure at all n locations
agcttagccctagaggggatggaccttntcaggttntggagagggtcaataaaaatgcctataggttggacctcccagatgagtatggaatcaacaccacttttaacatttcttatttaattccttttgcaggtggagctgatattgaggaggaggaactaacagatttgaggtcaaatcctcttcaaggggaagggaatgatgcaatcctccctaggaagggaccagtcactagagccatgagcaagaggctccaacaggattgggttagaactgctgaagaaggccttangattctcatgaacctcaaggtaaatttcttagcccatgagctaaggttgggtccaattatctttgtacatattagactaggatgtcattatatntggtccttgtatttagggctccataatgtaggtagggtaccctagaagtat

SEQ ID NO: 47369 - DNA, 205 bp, Glycine max
  unsure (1)..(205): unsure at all n locations
tcttgtatcanaagcctagattcagatgttgaaccatttccaatatttagagaaggatggtccaaataaagagttctccattgtcataccctacatgtgaaagaaaaaagaaacaaggctacaatatatatctcaccataggaagttgagagaggtatggtgtatctcattcgaaccaaatgccatgatggtacttgatccacct

SEQ ID NO: 47370 - DNA, 386 bp, Glycine max
  unsure (1)..(386): unsure at all n locations
agctnntacaaaaaaccacacttatgccttagtttctctgccacccaagaggaaagttgtgggttgctagtgggttttcataatcaaagaaaatccagatggttcagtcaacaagtataaaacccatttaatggctaaaggctttcatgaagtagttgggtttgattttaatgaaacattttctcctattgtcaagcatgtaactattagaatagttcttgcttttgccatcacttatcagcaggagatttttcaattgggtgttgataatgcattcctcaatgggctacttgaagaggatatctttatgcaacaaccttctggttctgagcatcaaaataagacattagtctgcaaactcaacaaggcactttatggtcttaaac

SEQ ID NO: 47371 - DNA, 391 bp, Glycine max
  unsure (1)..(391): unsure at all n locations
ngtattaagtgaatgaaactaaatgaatgtactgatttgagtaatttcctgacaaattacaaagtacaaacctaaatgaataacgccaaattcatatgtacatgcagattacttaattcaggaagcatcttcagtttcaaaactagatcatcattttatagaactgaacataaatcatgcctctcaaataatagaagaggtagccttctcatttaatgtgaatatagtaaatcttcttttctccctcagaatgaaattattttgaataagaaactctgcctaacaatcgatcgtaaagattcaatgagccataccacttttaagatgatttagagaactattaaaaataatctgagagggttcagatacagaagatagtatcccagcagca

SEQ ID NO: 47372 - DNA, 399 bp, Glycine max
  unsure (1)..(399): unsure at all n locations
agctntgaacataagcagtgaaactcctcaaataacatgttatccttatctagaaactgctaacttaagaagtaaatttacattctaattccaggtaacatgcaagcaaacccaaatatatagaacctatttacaacttgaaagcactcaaccaacatttatttcaggatagtgactaattagtcaaatttttgctactcaacaaaccatttctagatttttttttttttttccttcagtgaattaaatcagtagctccaaaatgaactaaatggaagctgttgagtattgaaacctttgggacctaatgaaaattaactcactagggttttgagcagcttgggccatcttcaagctcaggggttttctggaaatgcgaaccaattngcgagaaaaatc

SEQ ID NO: 47373 - DNA, 472 bp, Glycine max
  unsure (1)..(472): unsure at all n locations
tatgctattgaagtntatttgcaaagtgcatgttctagaagatgataagcattaaggtgaagatttatataattatttcaccattggccaattgtggagagtggggcctggtgggttaagttgaccatgtgtataatttctgacatgtggttaacattacaagcctttacacgctgatggaagcttattgataaataaaggttgaggatatcaatgcntaatttacgtggccatccttatncaagtaaatttaataaggaaggaataaagaaggggaccgatatctatctagtgaaaacataatttatccttcaagtaggaaaattaagccacttgaaacttagaaaatcaaatgcacagcattgtaagaaagggatgtattgttgtgcacatacaanaaaatctatattggcataagtggcttattatgcataaagtatatattcgttcatcaattaaacaaacacaactg

SEQ ID NO: 47374 - DNA, 350 bp, Glycine max
  unsure (1)..(350): unsure at all n locations
agcttgcctcanagagctccaggtatgacaaggcggccgaaggaaccagttccgctcccgagtatgacagtcaccgctttaggagcgctgtacaccatcagcgcttcgaggccatcaagggatggtcatttctccgggagcgacgcgtccagctcagggatgacgagtatactgatttccaggaggagatatgtcgctggcggtgggcatcactggttacccccatggccaagttcgatccaaaagtagtccttgagttttatgccaatgcttggccaatagaggagggcgtgcgtgacatgangtcctgggtgaggggtcagtggatcccgtttgatgcagatgctatc

SEQ ID NO: 47375 - DNA, 450 bp, Glycine max
  unsure (1)..(450): unsure at all n locations
agctngccttgccccttgatatatttgagggactcatggtcactatgaatgacaaattccttgtgataaaggtagtgttgccatgttttcaaagcccgtactaaggcatacaactccttatcataagttgaatagttaagggtaggaccacttaacttttcactaaaataagcaattggatggccttcttgcatcaacacagccccaatcccaacatttgaagcatcacactcaatttcaaaagatttttgaaagtttggcaacgcaagtatggggacattagttagcttttgcttaagaacattgaaagcttcttcttgtttctctccccaattgaaaccaacatttttcttgagcacttcattgagaggtgctgccaatgtgctaaaatccttcacaaatcgtctataaaaacttgctaagccatgaaaactcctcacctcggtcaca

SEQ ID NO: 47376 - DNA, 479 bp, Glycine max
  unsure (1)..(479): unsure at all n locations
ntacagcagaatttagtaatgacccactaacctagaattaatataacttaatgccattaacctagggaattaaaacaaactaaatggctgagtgtaactganatngttggcaaccaaaagtcacccccaacagccaacaagtcagccaccatttggtctcccaaaaggctgatgcctatgttgccaattgggcccttattacaacttgaactanagcccttttagttgaataacccanaacatatttttggtcagccaactttacaaggattgggccattatttatacaaactaaacactctaaaattgaaataaagtggtgtcatttagtcctccatttgggccatgatacaaatcacaaccttggacagcacttgttgaagagcttccttggctttccttgctctagccctcgtcatangtcctccaagtccttcaagtggatccttgcccttgctcttggtcatgtcctcatcaat

SEQ ID NO: 47377 - DNA, 462 bp, Glycine max
  unsure (1)..(462): unsure at all n locations
agcttaggctgttcaattgcttcagattgttgcacagaagggcaaaggtctgtgtggtggttggcagaggagcataaaccacagagtctggcgacagatgcaaattttttatttatggccagttgggttaccaggttaaccaaggcgtctattttaccttcaagcttcttagtcttggctgatgaagatgaatgcgtggctacttcatgcactcctctaatgacaatagcatcacttctggcactaaattgcagggagtttgaagccatcttctcaattaaatttctggctttagcaggggtcatgtctccaagggctccaccactggtagcatctatcatacttctctccatgttactaagtccttcataanaatattgaagggagaagtgctcagaaatatgatggtgagggcaactagcacatagtttcttaaatctcttctagtattcatataagctc

SEQ ID NO: 47378 - DNA, 479 bp, Glycine max
  unsure (1)..(479): unsure at all n locations
ggcttctacatctntggcaaggcatgtcatcttcctgtatagagcacanagcctactgggctgtaaagacttgcaacttctctatggaccaagctagagaagaaaggaagttgcaactaagtgagctagatgagatccgtttagaagcctatgagaattccaaattctacaaggagaagacaaggaagttccatgacagattcatagctaagaaggactntgtggttggacaaaaagttttattgtataactctaggctcggactcatgagtggtaagttaaggtcaaagtggattggtccttttgtggtgactaatgtttttccttatggtacagctgagatcaaaagtgaatccacagatacaagcttcaaggtcaatggacaccaactgaaaccattcctcacaaatccctccttagtggatgtagtggtggaggagacctccttacttcaccctacttctttctcaccatgactc

SEQ ID NO: 47379 - DNA, 518 bp, Glycine max
  unsure (1)..(518): unsure at all n locations
atctctgagtcacctgccgcatgcaagcttcatgatgaatcaagattgattcaagggagtttgattatacaaagatgatgaanaaaagctcanaagtcatgatcacttcatgataacaaagatgatgacattcaagaatgagttcaagattgagtcaagaacacttcaaggatcaagagcaaatttgatttcaagaatcaagattcaagattcaaagattcaagaataatcgagatcaagataaaagactcaaagattcaagaatcaagagaagacttaatcaagataagtattaaaaagtttttcaaaacattgagtagcacaataagttttcacaaaatcattaccaaagagttttactctctggtaatcgattaccagattatagtaatcgattaccagtggtttttaaaatgttaagattntcaaaattcanaatgaagagtcacatctggtgatgtgtaatcgattacacctttatgggtaatcaataccagtgactggtttcgaaaaattca

SEQ ID NO: 47380 - DNA, 502 bp, Glycine max
  unsure (1)..(502): unsure at all n locations
ngaatcatgcagccactnntgctttcaatccactgcttaaatatccaaaatacacctgcaacttctgacttagacttgagaaagtaaatccaacacattctagtgaaatcatctataaagatgatgtaatatttactttttttaagcaaagtagtcctttgaggttcggccaaatctgtgtgaatcaattgcagcttctctgttgctctccaggttgattgtttgaagggtaatcttgcttgcttgccatattggaatgcttgacaacatggtaatttagaatctaagtgaggtaagccatgaaccaactcctttcgtttcatgttcaacacagttgcatgatgaaaatggtctaatcttttgtgccaagcttctgtactatttacagtagctggataggctgcttgctcctacttcagtgggttaaatgagaaaattttgcctctcactttgatactgaaaatttccttgtcattgacatctttaatcaaacagtgcttat

SEQ ID NO: 47381 - DNA, 461 bp, Glycine max
  unsure (1)..(461): unsure at all n locations
agctntntggagtagaaacatgggaccaactcattntatttcanaaaggaagtcatatctagtcaaggtctgagagaccatacaagtttcctaacgatttctaattatgtgggccattaagtctatcatatgctgacaatagccgagaagcccatgaatctcttcgggggcggagtaggtgtctgccatcgccttggccttggctaacaatcggggaagttcttgactcccgttcaaggtaagggcaaaccgatccatccacatggttgcctcttggtgtaaagagtcgatcacccttcctctagcctctttttccgcgtatacttgggcatactcatccgcgattctatgctcgtgggccgtggctagacctaactcttcttggtacttggcgatgatagctagcatgttggtctccgtctcgcataaacgctgagacaagcttcttttggaccttgaac

SEQ ID NO: 47382 - DNA, 345 bp, Glycine max
  unsure (1)..(345): unsure at all n locations
gctgacttccttnagtagggaatctatccttcctaagatggagccaaacccagtcaccctcattaagaattagctcttttcttcctctattgcctttagttgaatacacctttttttggttctctatatagttcttaaccctctcatgtaacttctttataaactctaaccttgattccccttctttatgtataaaagaagtgtcaagtgggaggggaatgaggtctaacagtgttaggggattaaacctatagacaacctcaaaagggtactgcttgtgtggtctatgaacccccgtgttataggcaaattctacatgaggaagatactcatcccaagacttac

SEQ ID NO: 47383 - DNA, 401 bp, Glycine max
  unsure (1)..(401): unsure at all n locations
agctntaacctcatcgtctctcacaatctttagaattgggagccaatccaatccttgtgttcggactctcagccacttatgatagccgccgatgatcccattactgcttcccctaagctctttgtcctttcttcacgccgcatcccatgccttgcgaactccttggagtacccttgcgtttgtggtcactgaaaccccatgcgatgaaaggcgtgatgctttcgtctgatggcacttctctcatggggtagccaagctgtcttatggcgaggacgggattataattaatacaaccccttgttcccatcaagagaacatttggacatccttcgcatgaagatagaatcctgattcttccttccttctagcgagggaaccaattaacaaacgcccctccatgc

SEQ ID NO: 47384 - DNA, 502 bp, Glycine max
  unsure (1)..(502): unsure at all n locations
ngngtgatgttgcgcgtactgatgggtaccatgaggtgtttgctngggtttgacccacgcgggtgttgaagagacggcatgggcatctccttccttcctttttgcccctgttgccccgattcttttggcattcgcgtttttggaggaaacgtaatcaaactttcctcttttcaatccaacctcgattctttccccggcaaacaccaaatccgcaaagctggacggcatgtaacccactagcttctcatagtagaacactggcagagtgtctaccatcatgatgatcatctctctctcaaccatgggaggagctacttgtgccgccaaatccctccatcgctgcgcatattctttataggtttcgccctctttcttgaacatattctacagttgagaacggtcaggagccatatcagaattgtactgatactgccttatgaaggcggtaatcagatccttccaagtacggatacgggaagcttcccattagtgtaccacacta

SEQ ID NO: 47385 - DNA, 471 bp, Glycine max
  unsure (1)..(471): unsure at all n locations
gtcacctgaggcatgcaagcttctataccaccctatntctctccccctttggcaacatcaaanagccatagtgcgtggtaaaaacaacacaatatcattcatataattcaatataacacggaaacacgaaaaccaaatataatccaaacattgataagtcaaaccaaatataatccaagcataaaagactaaataccaaataccgaaagataatgaaagtccagataactaaaagatatagccaaatacacggcttataataaatgatagataagaatctaagacttagaaggcggtggaagatcgaagcaccgacgaagataagtcacatcttcttcaagctgggtgatgagggtatccatgccttcaaagcgaccatccaaggaatcgaatcgttcaccaacatatgtgtggaggccccgtaactctgaaagaacttgantcataaggggctgaggaatcatctcatcg

SEQ ID NO: 47386 - DNA, 443 bp, Glycine max
  unsure (1)..(443): unsure at all n locations
gacttcacttcccatgccaccccggaagatttaagccaagcccctacttttgaggggcaactcccgccttatgacgactatcccgggcaagacgatgaggaaggagatacccatcttggccccctgctccacctcaaagatccgtccccacatgaactaccccaaccgaacatagtccgccatatcccgacttcgcccacacccgtaaaagaatctgttcccttcgtggaagataagggaaagattgaggcgcttgaagagaggttgagagcagtcaagggcctcggcaattacccattctcggatntagcggatttatgtctcgtgcccaacatcgtcatccctcccaagttcaaagtactgaactttgataagtacaaagggacgacatgtccgaaggggcatcttcggatgtattgccgaaagatggtagcgtattctgc

SEQ ID NO: 47387 - DNA, 344 bp, Glycine max
  unsure (1)..(344): unsure at all n locations
agcttctgttntcacttacgagcgtctccatatattacgggactcaatcggacatccgagttaaaagttattgtcttttgacttttcttagaacttccgttttcaattatgagcgtctcgatatattaataggctcaataggacatccgagttaaaacttattgtcgtttgattgttctctgaggatgcgttttcaattacgagcgtctcgatatgctacgggactcaattggacatccgagtgagaagttattgtcggtcgaattctctataacatctgtgttcattacgagcatctcgatatattatgggactcaatcggacattcgagttaaaagttattg

SEQ ID NO: 47388 - DNA, 447 bp, Glycine max
acggaagttctaagacaagtcagacgacaataacgactgactcggatgtacgatatagtatcgtaatatatcgagacgctcgtaattgaaaacagaagctctgagcacatttaaacgacaataacttttgactcggatgtccgattgtgtcccataggatatcgagacgctcgtaattgaaaacggaagctctgagagaaatcaaatgacaataacttttaactcggatgtccgattgagccttgtaatatatcgagacgctcgagattgtaaacggaagctctaagaaaagtcaaacgacaataacttttgactcggatgtccgatatagtctcgtaatatatcgagacgctcgtaattgaaaatagaagctctgagcaaattcaaacgacacataactttgactcggatgtccgattgtgtcccgtatgatatcgagacactcgt

SEQ ID NO: 47389 - DNA, 360 bp, Glycine max
  unsure (1)..(360): unsure at all n locations
agcttagggaattgaaattccgcctgacaaactataaattaggttntgttgtaagtaaataacaaatttagactattaaagaaaatcaacgaagaanactcaaatacctgaatatcctcccatatcaaatccttctgagcagtagggacttccttccaggtgtcatatgtcacgtcgaccttatcacgagcgacaatccccaaatatgttcttaatttcttcttgtagggaccgtcggccttgccggtagcaggatcgacgttgaccacaggtctttctgccccaggtggtctagtggccaatgatcgtagccgtgtcgccttgcgtgtccgcttcaacgtagatggagacgcatcagcg

SEQ ID NO: 47390 - DNA, 497 bp, Glycine max
  unsure (1)..(497): unsure at all n locations
tgagggaaaacttgatgcctcggtcaacctagtaactcagcttgccatgaattagaaatctacacctgttgcaagagtcttgtagaagcaaagcttcatggtgaatcaaaggtggttcaaaggtgttttgatgataacaaaagataattacaaaggtgatgacaaaaagctcaaagatcaatcaaagaacaactcaagtgatcaagatagaatcaagaacaattcaagactcaagaggaaagttaaagagtcaagaatcaagattcaaggttcaagatcccaagaatcaagatcaagattcaagactcaagaatcaagagaaggcttaatcaaaataagtatgaaaagtttttctcanaaattgagtagcacatgatttttctcanaacatgtntaccgaagagnttttactctctggtaatcgattaccaaactgttgtaatcgattaccagtagcaaaattggtttgaaaaaagtttcatattgaatatacaaca

SEQ ID NO: 47391 - DNA, 373 bp, Glycine max
  unsure (1)..(373): unsure at all n locations
agctngcttaagcacgagtgtatactaatgggaagattccattgtgtgattagtgattatcataaaaggaattaaagggcattaaaagccattacaactagaactagccattntattagtagattagcaggccttactattatttgtgtttatgctagatcatttcttcaatgccaattaatcatgtcccacgtatagtgtgctttgcagataaatcttggagaaattatttttagaattatcttaatgcaatctgcatacccgatccataacatattggtgaaaagcatccacaaaatgaaggagtttctgctccactaaccaatgatgctttctgttgtttgtagcagatcccttaccctgcaaaggatga

SEQ ID NO: 47392 - DNA, 500 bp, Glycine max
  unsure (1)..(500): unsure at all n locations
tcanaattcttctaggagcatgttntgcgtctaacgccatcaatttcaaatttactctcaactgccaacttttaataaagaataaaatctcaaatgataggattcatatgtatccaatacaaagagatactcttaatttgtaatcactacaagtgtattcaaaagtttttttttttttttatagcatttcccctgcttctctgtttttatatataacatttcccctgcttctcttagaagactccctaaaatgatttaaattcacctaagatgaacagaatatctaaagcgaatacattataataataaaccctaatttacaaagataataatgtacataagaaacaaaaaaaaaaaacaaaacgtattataaaatgaaagtgtgtcacggctgaaatagacccacccatccattatattaacttaagacgaggagaaatagtttatataagagtgaaatgaaaagggcctcaaaatgaaatgggtgaactaaaatggag

SEQ ID NO: 47393 - DNA, 402 bp, Glycine max
  unsure (1)..(402): unsure at all n locations
agctngctgctacctaccttgttctgcttcattcgactcaatatgtttcctttcttgtataaataataataatccatgtgtctttactcttcagcccaaaaagagacatgtggatttcgtataaaattttccggcagcggttcacggtcttgtttgtggtggctgttgcagcancagcaaaacagtctttntttgttggtggtgcttgtgctagtgtcacaatatatctgattttgatttcaatatagtagtgctgcctcttgtgttggcttcttgtcatgtactaaacatttttattcttaacattaatattagacaaatttgaacaatgcttacgctgttgaaatgacaatactgactgcgctgagttcctcctagacattgcacatcttatattacatc

SEQ ID NO: 47394 - DNA, 492 bp, Glycine max
  unsure (1)..(492): unsure at all n locations
tatcaagtaactgacttgatacactntgcatcagcaacaacacggtaagtttataaagccaaacattatttggcaaaaggtacgcaagttaaaaataaaaacattagtgcaacaataactaaacaaatatgtattcctgtatcaatttctaatatatagtgataaataccatagcaacatataatttgattcaattnttcatacatatagattgcaaactcgggggaaattgtctaaggaatattctaaatctgcaacttaagaacaaaagcatataatattggttatggaaaagacatagggaagtcctaacctgantttagataaggcgttccagaaataagtcatataattgtaccatattttatcaaggcatttacattcacatagtttgagttacacataaggatagttggtatcacaaagtccttatctaatagcaatttcagtaacaagatccttcgtgtggtattctaaaattcaagcacttct

SEQ ID NO: 47395 - DNA, 398 bp, Glycine max
  unsure (1)..(398): unsure at all n locations
agcttctaaggaagctacctagtctataaatataagcatgtgtaacacttgttgcaactttgatgaatgaaagtcttatgagacacacttcaaagttccacttctctccctcttttattccttcaatttcgtgctcccccctctctctttcttttcctccattgaagcatcatctccaagcttcttatccaaggctcatcttggtggtgaagctccttcttccatggcttattccttaatggatggcgcctcctctcacctcttttcctttatcttccgctgcatctccatggtggaaaatcaccattaaaggaccccattgaagctcanagatccagcctccatagaagccccacaagcaagcttccatcaagtggtaatcagagcacaagagcttc

SEQ ID NO: 47396 - DNA, 448 bp, Glycine max
  unsure (1)..(448): unsure at all n locations
tcttcgaagggcatggttatttccagtttcctgaanatatctataaatctcgccggatgatgatctttttctttcttggaaggtaccacaggatacggtacttccacaccttcatccacagctttttcactcttactcttctttcagtcatattatttttttcttctttttcaattttttcattttctattcctttttgtttttcttggtccttcaattctatattcttaaccattatttgttcctctntttcttgattagtttcacctttcacctcatttttcttgccatcagtacctttcttgtctgcagttntcttcttatgcacaacactatcctcatcctcagcctccacaaaccttntactccttgtcatcacaactttgcattcctccttggaattctgttctgtatttgccacaaaactgttggatgacttgtcagctat

SEQ ID NO: 47397 - DNA, 409 bp, Glycine max
agctgggttcgaggtacttaccctttgaagatcgaagaacgatgaagaacgaatgaagaacgtcgaagaacggttgaaacccttgcgaaattcttcacggaaaacgttacggaaacgtttcggaagcgcctcggcttagattttcttcacggaaacgatttttccaagcaaattctaaagagagagaagtgccaaaggggctgaacccttttcttcttcgcttcctcccctatttatagcaaaataggggaggtggttgccgcccagctcgcccaggcgagctcagctcgcccaggcgagccaggttgcttcctccagaagcaaccgccttctggaggaatattctggagggcccaagtgggcctgggtgctatatgcacccacatttatactaagtacacccccctct

SEQ ID NO: 47398 - DNA, 452 bp, Glycine max
  unsure (1)..(452): unsure at all n locations
tatgcattccagatgtgtttatatgctacactagctgatgaacaaccttgcagggatctggatttggatctagagagattgcaaaggaaacttcaagatcttcttcaaggaaaaaatattttcttgttttggatgaagtgtggtatgatgagccacataagtgggagatgttgaaatctatactgttttatggggcaaagggttcttccaaattggttactacttatctttcangggttgcaatcttgactcttagtcaatttttttttttgaatacgtagtattttatgcacataacagtaagcttacaaataagttttcaaccacaataaataagtggtattctctgaaccagttggttgaagcacaaacaacgtattgtcaactatggtttgggataccctacctacattatggagccctaaatacaagaccctacctacattatggag

SEQ ID NO: 47399 - DNA, 424 bp, Glycine max
  unsure (1)..(424): unsure at all n locations
agcttngatgttggttntcttcaactgtttcatatacgaagccagcatcaatattcttgtttgttctagaggaggaggtggtcttctggtggagcgcatggagctagttgctgaattatgggaggagaactttaaggttgagatatccaaacgattataatctacataattgagttttattacttgcttctattcacccatctttcatattgtcaggctngaattgttcctacacctgatcccagtcttacagagcagtatgagtatgctaatgaacatggtatcaaatgtcttgtcatcatcacagatacagatttctccttgacaggttctgttaaggtaatgtgctctgcaattccattctctgaggatggtcctatagtgatttctattgatcttatggactggttccatcaaaataatt

SEQ ID NO: 47400 - DNA, 455 bp, Glycine max
  unsure (1)..(455): unsure at all n locations
tattgcaagaagagatggatagcagaagactttatgtaggtgagtattggaaaattgcaaggagaaatgaatcccttctacctcaaaaatcaagaagtaggtggataaaggaaggtgatggtaatacaaagttttttcgtggtgtcataaattggaagagaaggaagaacaacatcaaagggatttccatcaaaggaagatgggaggaggaaccaagacttgtgaagaaagaggtgttggaattttatcaaaaaatattctatcaagaagcatggatgaaaccatgacttgatggcatgtccttcanacacttgngggttggtgacaatgattcactttgttgttgttttaatgaatgggagataaaanaggcaatgtggaattgtgaaggtgataaaagtcatggtcccgatgggctcaattataatcttataaagagatattangacactatg

SEQ ID NO: 47401 - DNA, 430 bp, Glycine max
  unsure (1)..(430): unsure at all n locations
agcttccattgttcaatttcgagtgtctcgatatattatgcgcctgaatcggacctccgaatgaaaagttatgaccatttgaatttctcgagagctacctttgttcaatttcgagcgtctcgatatattatgcgcctgaatcggacccccgagtgaaaagatatgaccattggaatttctcgagagcttccgttgttcaatntcgagagtcttgatatattatgcgcatgaatctgacctccgagttaaaagttatgaccagttgaatttctcgagagcttccgttgttcaatttcgagcgtctcgatatattatgcgcctgaatcggacctccgagtgaaaagttatgaccatttgaatttctcgagagcttccgctgttcaatttcgagcgtctcgatatattatgcgcctgaatcggacctccgagt

SEQ ID NO: 47402 - DNA, 458 bp, Glycine max
  unsure (1)..(458): unsure at all n locations
cctcatcgtctctcacagtctntagagttgggagccaatccaatccttgtgttcggactctcagccacttatgatagccgtcgatgatcccattactgcttcccctaagctctctgtcctttcttcacgccgcatcccatgccttgcgaactccttggagtaccctcgcgttgtggtcactgaaaccccgtgcgatgaaaggcgtgatgctttcgtctaatggcgctcctctcatggggtagccaagctgtcttatggcgagaacgggattataattaatacaaccccttgttcccatcaagggaacatttggacatccttcgcatgaagatagaatcttgattcttccttccttctagcgagggaaccaattaacagacgcccncccatgctagccaagagttggtcccaattcgcctttcctttntcaacgcacgagcggtgaccttgtagcggat

SEQ ID NO: 47403 - DNA, 435 bp, Glycine max
  unsure (1)..(435): unsure at all n locations
agctntcncgctctatgatcttatgtggcttcctctcaaactcgccatacgaggtcgccaggttgaaaggctcatgattgaacctttatattgtatcttttggttggcaacttcttctctaatccttgtcatttcttggactttatcaatgatttcaagttccaccctcatattttcttcatttttttgttgctgaaataatagtctctatgtcgatgataccccaccttctatggggatcatggtgtctgtgccatatgtaagttggtaatgagtttcattggtggctgtttagggtgtacaatggcacgcctagagtatgttgtagagttcttctttccataagcctttagacttgtcaagtctagtacgcagggccctgagaatgactcgattagttgcctctgcatgtccgttattctaaggatgttcaac

SEQ ID NO: 47404 - DNA, 454 bp, Glycine max
gtggttcaaaataatttttttatattttttttcaaaaatgttttacaaattaatttaaaattaatgacccaaacaagaatcaaactttcgagttttgtgttattagcacaacactctaaccaactaaactaataaatcaattatattataaaataattaatgtcactatatgtaacactaaaatttttaatatttaatgcgcatgaaaatttagataataaattttgtaacaattaattatgatctaacaattaatttgtttacacatgttcgtagaaaaacaaccactagaccacatgtcattcacttattggataattcaacactgcagaagttgagtgttgactagcaacatagtaacaatgaggtgaaacaagagcctaaaagaaatagagaacaaaaacaacaacagtggcgagtcggagctgcgggtggtggttgtcgtcttcctctt

SEQ ID NO: 47405 - DNA, 442 bp, Glycine max
  unsure (1)..(442): unsure at all n locations
agctntatgaacatttttatgccttacgaatactataaagctccgctgccatactattgaccttatcttcaattcagccgaaagtgaagttgattataagcctgacaaaacccctagacattntaccttcgttaaaccttcatcttcttcttcatctatagcccatgtttaaacttgcacccggcttttagggcaccgcgcgtgttctcttttccttgcaccaactatgattcttcttgtccgattcctcttcatcttaatttaattatcaattggctgttagtttgtgtttgatttaaaagaaattattatataatccaaattaaagcctcaatgacaagtaggactgtgcaaaaatatccaaatatataaaatcaatccataaccaattcaatctaatccactttaaatggtctggtttcatatccaaatctaatttttt

SEQ ID NO: 47406 - DNA, 442 bp, Glycine max
  unsure (1)..(442): unsure at all n locations
gtggtaatcagagcacaagagcttcaagtaggtgctccttanacctccattgttgtttcttcatttttctccatgtatttcctcacatatcttgtgttgaatgttgttaacatgattctttagaatttccactgattaaacttgctatagaagctagatttgatttcctatggttcaaatttcttgttcttgttcttgaaccatgaattgtgttgagtttaggttcctttgagttttgtcttggcatttttttttgtggctgaaacttaaaccataaaattcttacaaaaacattaaaatagaagaaaatctcaaaaatctagagtgacatgttcacctattgtagttntttcatagatgtcatgtctagtcatgaaacttgtcacataagatttcttatgttgtgtagaaatttaattttcttgtttctttgtgtaactca

SEQ ID NO: 47407 - DNA, 489 bp, Glycine max
  unsure (1)..(489): unsure at all n locations
agcttctgttttcaattacgagcgtctccatatattacggttctcaatccgacatcggagtaaatagttattgtcgttagaatttgctcacagcttctgttctgaattttgagagtctcgatatactacggaacacaatcggacatctcagtaaatagttattgtcgtttgaatttgctcagagcttctgttcttaattacgagagtctcgatatattacgggattcattcggacatccaagtaaaaagttattgccgtttgaatttgctcaaagcattcgttgtcaattacgagcgtctagatatattacgggattcattcggacatccgagtaaaaagttattgtctttttattctgctcatagcttctgtttcaatttcgagcatcttgatatattacaggactcaatcggacatccgagtcataagttattgtcgnttgaattngctatgagctatcggtttccttacgagcatctaatatgcta

SEQ ID NO: 47408 - DNA, 449 bp, Glycine max
  unsure (1)..(449): unsure at all n locations
nngcattggaattgcgaaagccccactccatcattaggattagtacctgacatctcaaacaaacaaatcaaacgtaacaagacaattatagttgctgtttgaatacctcacccactcaagtgtatcacacaattatggcttttctctaatgaaacactcttgccttttaccactctaattccccttgagttcttaggcaattcaagagattatggccacaacaaagaacaattcaccaatatgtgtaaggtaaggctagacaaggaaaaggttaaccaagataaaggctaacaatgtttttaggcacaaatgaaggaaataaaattcagaatttaggaattcaagtaacaatccttcatgcaaccaatatattaccttaaagagtttttttnttttttaagttcttcaagcatgaaccattcagcccaatttttttttttttttttaat

SEQ ID NO: 47409 - DNA, 450 bp, Glycine max
  unsure (1)..(450): unsure at all n locations
agcttgtggatggtgaccaatcccagaggacttttgtgtatattaaggatgctattgaagttgtcttattgatgattgtaggttcccatatccaatctttttatacaactttatatattttaagttctgattttctgattgtagaatttcatctttaaactattactcttgttggatggttcaactaaatgtgaacgataatttttaacaggaaaatcccgccagggccaatggacatatttttaatgtgggaaacccaaacaatgaggttatagttaggcagcttgctgaaatgatgactcangttagaggattaagtttgattgtttgatcctattagaatttcaacatggtatttgggaccattcaacatttattttcgttcaattctgcaggtntattcaaaggtaagtggagaagcacctctggaataaacctatattgatgtga

SEQ ID NO: 47410 - DNA, 499 bp, Glycine max
  unsure (1)..(499): unsure at all n locations
ntactatgcagagaatatccaagggaaataccttcatctgacttagcatcaaatnttcctaagttatcttttccattattcaatacaaaacatttacaaccaaagatatgaagatgtgagatgtttggttttctgccattgaacaattcatatggagttttctttaaaatgggtcttattaaagccctatttaaaatgtagcatgcagtgttaatggcttcagcccaaaagtattttggaaaaggagtatcatttaataaagttctagcaatctcttccaaagatctatttttcctttcaacaacaccattttgttgaggggttcttggtgcagaanagttatgctcaatcccatgcttatcacaaaataattcagatttnttattttcaaactcacccncatgatcactcataatagatataatcattagattnttcttattttgaatgagttttgcaagtnttctaaatgcttgaaatgcatcattcttatgagtga

SEQ ID NO: 47411 - DNA, 360 bp, Glycine max
ttgcaatcagcatattccacaactctgtaaaatccatgcagtgaagcgtgcattcaatacgtatctaggacgaaaactgatttctctaattcgatagataagagacatcttaaaatatatttcttctcaagcggagtgtttcatctaactatttttgaccattagtagtgttactgggagctgacattcctattagatgcctatagatgttcggaagagtttcggtgctgttatgaagtacaatgtttgttataggtagcattcgttgagggttatgatagcactcattccttatctaaagagtatgggtagatggatagcatattctttgaaagctcttacagctgttctatcaccata

SEQ ID NO: 47412 - DNA, 489 bp, Glycine max
tcaggttgcttaattgctccaggttgctgcatggaagggcaaaggtctgtatggtggtcagcagaggagcacaaaccacaaacccttgcgacaggtacagatttctgattcaaggccagctgggttaccaagttgaccaacgcatccagtttgccttcaagcttcttagtttcagatgatgcagatgggtttgtagctacctcatgcactcctctaatgactatggcatcatttctggcgctaaactgctgggagttggaggccatcttctcaattaaatttctggcttcaacaggggtcatgtctccaagggctccaccactggcagcatctatcatacttctctccatattactgagtccttcataaaaatattggagaagaagctgttctgaaatctgatggtgggggcaactggcacatagtttcttaaatctctcccagtactcatacaggctctctccactgagttgtctaatacctgagata

SEQ ID NO: 47413 - DNA, 419 bp, Glycine max
  unsure (1)..(419): unsure at all n locations
agcttctatattgcatgtcctagttggccctgacttctccgttttnttttaattgtggattacagaatttggatagggcaattgaccacaaggcattgcatgataccttttctacatttggaaatatcctttcgtgcaaggtagctacggattcatctgggcaatcaaaaggctatggctttgttcaatttgataatgaggaatctgcccaaaaagctataaagaagctgaatggtatgctgttgaatgataaacaagtgtacgtgggacccttccttcgcaagcaagagagagaaagtgctgctgacaaggcaaaattcaacaatgtttttgtgaagaatctatcagaatcaaccaccgatgatgagttgaagaacacttntggttgaattggaactattactagtgctgtagtaatg

SEQ ID NO: 47414 - DNA, 468 bp, Glycine max
  unsure (1)..(468): unsure at all n locations
ntacgccaattgtgaaataatgtccttgtcgccaactaattgcacccaacattctgactntcgatactctaaatattctatccactttcatcatggtcaataaatcttgtaaactgcttggccttttaaatatgtcttgcttgggaggcttgaagggtagacagatatgttgaggtagtgacagatgggtgtggaaaagaggttcgtggtcatattgagttttggtaggcatgtattgttgaccttgtatcaggcagttccaggggatgtgtggtggcctatggagataggcgggatttgtgtggctttaattaaaacagaaggatcagttggcctggacgtattatcgaacagttggaaggcataaatgctggtaatgaagaatgatgctagtggtatgtgattctcgctatatcctgtttacatcagatcagacaagagagttcagaattggactcggtccatgat

SEQ ID NO: 47415 - DNA, 288 bp, Glycine max
acataactcttttaatctccgatggtctatcatgataaagaattggggccctatcaaatagtgacgccattttcgcaccatagaggtgatggcatgcaactcgcgaatgtgagtcgagcctgtagcatccttgcgtaaagtaacttgctgaataacgcaatgtgccatgacttctggagcaagactgccccgatagcggtgtcgatagcatcattttccacaatgaatggcaccgcgaagttaggtgaagcacgactacgagcctgagacattaacagtttcagatgt

SEQ ID NO: 47416 - DNA, 483 bp, Glycine max
  unsure (1)..(483): unsure at all n locations
gagacttatttatgatgagagcaatagaaagaagaactaatggcttcatgctaggagagacttattaatatacttagccaactgtcaattaagcatgttacctaggcttcatttagaacaacaaagaataagaaaaaacctggcaccatcttgccttgagacttttatttcttggtgtgtttccaaacatgaaagccaccccaccttttgcaggcaattcgccttaaatcaccaaatgggtcatcgccatctgcatcagactgtgcaaatcctgaaggaaagaatccaggcctaccattctgacaaatcagttgcattcacagccagttagaaaagagaataatatatatatatatatatattcatgaccacagtagagacacttcactaatctattatgattcatgaatagtgaatgttcatccttgccaagtcttctgccttttcatgcttattatccncgatattgatgaatattattcc

SEQ ID NO: 47417 - DNA, 322 bp, Glycine max
  unsure (1)..(322): unsure at all n locations
agctngtcttcaacatataaatcaaaatctattttctgatcttctatgcccagctacagcttctttctccccatatcaactatgcagctagcagctaacatgaatggcctccccaatattaccggaatgtcattatcttcacagatatccattaccatatagtctgtcgggaaaataaaactgttcactctgaccagcacatctncaattactccatatggtctggtgatggagcggtcaacaagttgtaaagtcattctagtgggcatgatctccaactctcccaaccttttgcacatggagagtggaattagttaatact

SEQ ID NO: 47418 - DNA, 443 bp, Glycine max
ggccacccagctcgcccaggcgagcatggtgacttcctccataagcataaaccaccttctggaggaatcttctggagggcccaagtgggcctggttgctatttgcacccccatttttactaaatacacccctgcctttcttttggtgattctttttttcgtaaagttactgaaatctacgaatttcataatgatacttgttttctttccgtaatgttacggaacctcgcagattacataatcatcccttttttgacttacggaatgttacagaacctcactaattgtgcaacgatgcttccttttgacttcccgtgtgtcacggaaccttacggattgagcatcaatactttcttttgatttccggtacgtcacggatcttcacatattgcctaatgatgggtgccaagcacctcaaaatgaccaaacacaagttgcatgcca

SEQ ID NO: 47419 - DNA, 340 bp, Glycine max
  unsure (1)..(340): unsure at all n locations
tcatttttgttcaaaaataccttctaatgcttcaaaattaatattttatttggtactctaaatctctggcttgtatatatggtagaaggggtgatgagttggcagcagactatcaaaagctcttcaatactgtctctttggtggagaaagtggaagatagttattttccccatatagtgaagattatgatttcccttccatgttgttgcgtctttttaatatagatgtttagctcttagctcttttatatccctttcatgtgctagaattgatttctcgccacttattgntattgaaggaaatatatatatggatctttacatagatgagcttgttattt

SEQ ID NO: 47420 - DNA, 408 bp, Glycine max
  unsure (1)..(408): unsure at all n locations
ctaagcttcaactngcacanaggagttgagcaggtaaaaaagattcgtcttcaaactcttagaggtgactttgagcgtttgtttatggaggagtccgagtcaatttctgattatttttctcgagtattggccgtagtcaatcaacttaaaagaaatggtgaagatgttgatgaggtgaaggtcatggaaaaaatacttcgaactttaaatccaagttttgacttcattgttaccaacattgaagaaaacaaggatttaaagaccatgactattgagcaactcatgggttccttacaagcatacgaagaataacaaaaaagaanaattaaacaaaatgaggctacggagcaactactacaactcaacgtaaaggaagcaaactatgcaaattacaagagccaaagagga

SEQ ID NO: 47421 - DNA, 410 bp, Glycine max
agcttggttatagggggcctgatgaccctgctgtgggcaataggcactcccttgaactgatagagacccgtatttagagctggcaactccaagaccctgttggccttcttcgggtctactaggtgtcttgcaggcacgatccctgcaaacaatagatgacatcagaaatcagttgggggaggtgcatacttacctatgtcatgatggcctgagcttgctggggggaaaggcgccctatagggctgacagaggcccgtaaccagagctggaaaccccagggccctgttggacttcttcaggtccactgggtgtctctgtgggtgcgatccttgcaaacaatagatggtatcagaaatcagttgaaccatatgcatacttacccatgtcgggacgacacagaccaactgata

SEQ ID NO: 47422 - DNA, 463 bp, Glycine max
  unsure (1)..(463): unsure at all n locations
ntntatccaagacactctcttggtggtgaaacttcttcttcctatgcttattccctagtggatgacgtctcctctccccttttctcctttatcttccactgcaactccatggttgaaaatcaccattaaaggaccttagtgaagctcaaatatctagcctccatagaagtttttcaagcaagcttccatcaattgagcactgcattactatatcatacttttatataatgaattgatgtatatgatatatgatatatgatgatttattgatatatatgatgatgatgatgaattaatctctacttaagtgttaagaacttttcaggataagactaacaagtctccaatccaatcttaagactctccaaatgcattcgatgtcatatttatgtttggcatcatcaaagccaaaaagagggagatngttagagataggggaagcaacatgagcaacatgatgaat

SEQ ID NO: 47423 - DNA, 443 bp, Glycine max
  unsure (1)..(443): unsure at all n locations
agctnttctttctcaatcaatctatctatggactaacaattctaattgcaagttcacattcttgttctttctttgtctaacctacacatttgctcaaactcatgaaaagaaacataaactccatcaaaatcatgcacttaatttaaaataaagacatacacctatttttcacagaaagacaaaagtgtttcattgccatgtcatcaaaaacaagttgaactgttcaaaatgcttcagaataagcatactaactattcataaataaaactagcaaaaaggaattattgtactaaaaccatgaccataataacaataatctaanagggcacaacaaaagaacacanaaacatcaggcatatcaacattcttgtcaatatgagtcacagcttccttagcagtctatctagtcaaaanagtcagaaccatcgtctatgttgcaagat

SEQ ID NO: 47424 - DNA, 463 bp, Glycine max
  unsure (1)..(463): unsure at all n locations
ntacaacanatgccactntactccaagttntaaaaggatatgttaacaaggacacacaagtatattcaccaggaaaacattgttgtggaaggaaattgtagtgttgtgattcaaaagatccttccacccaagcataaagaccctgtgagtgtaaccattccttgttcaattggagaagtcactatggaaaggcacttattgatctgggagctagtattaccataatgccactctccatgtgcagaaggttgggagagttggagatcatgcccactatgatgactttacaacttgttgaccgctctattaccagaccatatggagtaactgaagatgtgctggtcagagtaaaatattntatcttcctggcagactntgtggtaatggatatctgtgaagataatgacattcatgtaatattgtgaaggccattcatgttaactgcaagctgcatagttgatat

SEQ ID NO: 47425 - DNA, 398 bp, Glycine max
  unsure (1)..(398): unsure at all n locations
canattcaaacgaacaataacttttatctcggatgtctgattgagtccagtaatatatcgagacgctcgaaattgaatgttgaaactctgagccaattcaaacgacaataactttatactcggatgtccgattgagtgacgtaatatatcgagacgctcgaaattgaatgttgaacctctgagccaattcaaacgacaataactttttactcggatgattgattgagtgccgtaatatatcgagacgctcgaaattgaatgttgaacctctgagccaattcaaacgacaataacttgttactcggatgtctgattgagttccgtcatatatcgagacgctcaaaatngaatgttgaagctctgagccaattcaaacgacaataactttntactcggat

SEQ ID NO: 47426 - DNA, 497 bp, Glycine max
  unsure (1)..(497): unsure at all n locations
aatttcgagcgtntcgttatattacgggactcaatcagacatccgagtaaaaagttattgtcgtatgaattggcttaaagcttaaacattaaactttgagcgtctcgatatattactggactcaatcagacattcgagtaaaaagttattgtcgtttgaattggctcagaggttgaacattcaatttcgagcgtctcgatatattatgggactcaatcagacatccgagtaaaaagttattgtcgtatgaattggcttatagcttaaacattcaactttgagcgtctcgatatattacgggactcaatcagacatccgagtaaaaagttattgccgtttgaattggctcagaggttcaacattcaatttcgagcgtctcgatatattacgggactcaatcagacatccgagtaaaaagttattgtcgtttgaatnggctcataggttcaacattcaatttcgagcgtctcgatatattactggactcaatcagacat

SEQ ID NO: 47427 - DNA, 446 bp, Glycine max
  unsure (1)..(446): unsure at all n locations
agcttctatataagctgaaccattntatcaataaacacatgttgagttttattcagaaaattagagtttatctcttttatcttagtgagagtgattctcctaaattcttgagtgattcaagaacacccttgctgtatcaaaggactttcacaacctttgtgtgttgccttcgctggaaagagtgattctttccttcctatcatctccacccttgttctttcaaaccacaattccagaaaatccacctctgcccaaaattatctcgtgaccataactcccattttacacactcaaattaagtgattcttgagcctaaatngaatttcaaaacgagacctttcacctcgnnttggaatcacctcatttggagccctgtagcttccgttattgccatttctatattntctgccagccaccacttaacctacgttntaccatcccattca

SEQ ID NO: 47428 - DNA, 481 bp, Glycine max
  unsure (1)..(481): unsure at all n locations
cggacacttaaaactaagcttttacatctntgggtgttttcaagcacgaggaggtgacggataaaaaagggggaaatactacgtgttttctaggtttttttgtttgatctctttaaggtaaatatttatgacccactatgttagatgagtatgttatagcactgattagtcatggactgtgagaaaaagagttagaaactaagtattagagattattgtgattttctcaaaaccctaggtttgctcaaactggggatattgtctaatcccttgttctattatttgaatgcttangttctgtggaaaatatagcggttgaccctcctaacagcggtagaagtcagtgattgcgtttttttaggtaagtagctaatatacttagcgattttcttaaagatcatttatgaagaagcaagtatactttcgaatatatgtattntttgtgagctnntgataaatatttgagatcttgataatatat

SEQ ID NO: 47429 - DNA, 458 bp, Glycine max
  unsure (1)..(458): unsure at all n locations
agtcacctgcggcatgcaagcttagaacccacttttcacaacctaccttactacaggactgcgaacgaaaatataggggcatttcggtcttctaggaagaaaacgagtgggagtttccatcattgtttatttaaggaaaacgttagaagaaccaaaaaaaggtttgcgaattttgaaaggaagggtttgggagttgtttacgcatagggaaggtattaacaccccgcgcgtccgtcacaagggacgataacctttaatcgagtatgcaaaacgtgacttcaaaattatttattttccttttttttaatcaacaagggtgttgcccttgctcctatgtatccccaggtgcaatgagaaaatcaaacctatgtagttctttaaataagaatgttcgtgttatttaaaagaacttatttaattgcanacaaagagtcattagggcattggaccttgaaaca

SEQ ID NO: 47430 - DNA, 485 bp, Glycine max
  unsure (1)..(485): unsure at all n locations
ggtaggattatggggtacccatcacatgtggtactaggtggcggtcgggcgatggtgcacaacaagttttccacatccacaaagcgcgcataaacccaccatcccctgttgcccacctccaactgagctcacgtactcccacgtagcccatatcctcgtttctctcaacaccgggtccccatcaatcctcccaagcttccacaacatccaagcaaaacaacattcaaacagcacaaactaccacagccaagaaaacagagcaaaggcagaaaactctgccaaaacaccaaccaaaatcacagcttttctcacttaaagaccccagtaagaattccttcgttccaattcgttaaccggtggatcgactntaaaattttactagaagtctctagtacttaagcctacattgtgaccgttgggatctactagcaaacatccagaactcattctgtactactctntccacagccaatcacacacaagca

SEQ ID NO: 47431 - DNA, 420 bp, Glycine max
  unsure (1)..(420): unsure at all n locations
agcttataccttcagagcttaagcaatggcttgtcttggcgagcttcccctgccccanatggctntttcctataaatagccatgaaggggaaggggcaaagggttcaaaaaagtttagagaggaagaaaaatgaagggagaggaaggaaaaagaagaagagcaaagtcgaggcactaccgaatcgcaaccaaggatcattcgctacatcgcttctcttgctagccttataccctatgcaatagccagttagttcttcttccttttatnttattgtcttaagagttgaatgtaatccatgtaccctgtcataccttaatttcgtccggngattataatttgatgatatacaaccattgattggccgcttcgagatatttggcaccctctgttgcacaatatgtgaagtcccgagacgtgcc

SEQ ID NO: 47432 - DNA, 422 bp, Glycine max
  unsure (1)..(422): unsure at all n locations
ccctgagagatntagtgaacatgtcctccagttggtcactagagttgacaaactcaatggtgatttttcctgagagcactttctctctcacaaaatgacagtcttctactgtgtttagtccattcatggaagaccggattagatacaatgtggagaacggcttgattatcgcaaataagattggtggcttgagtgtctccaaattggaactgctggagaagtttccttagccatgtaatttcacttgtagttgcaggcatggcacggtattcagcttcagcactggatctagtgactatattttgtttcttgcttccccatgggatcaaatttcctcatataagaacacaataaccaatcatggacttcgtggctgatggtgagtctgcctaatcagcatcagagtaaaacanatgatcttg

SEQ ID NO: 47433 - DNA, 441 bp, Glycine max
  unsure (1)..(441): unsure at all n locations
tcaagctgcccaggcgagctgattacttcaccatgttttaatttgttggcccaagcgagccagaggctagcttgggtgagctaggggtcagaaaaagtgtgcaaatgaccctnttgccctcttttttgagtattttccgcattcttttctgaaacatcaaaaaaccttttgaattgcatgacaactggtgtcaagcagttcaattcggctaacaagaatcaaaacgttagcaaatgaaggtccccaaacgaaattagggtatgacatatgttttaatcaattacacaatttgtttcaagtttacaaagttatgtctcgtgtcggcttaatcaattacagcatcatcataatcgatcaaatacttggtgttgagaacaatgatngattattcaagaagtctctatttaattgattaccatgtgatataattgattacttctc

SEQ ID NO: 47434 - DNA, 481 bp, Glycine max
  unsure (1)..(481): unsure at all n locations
tttaagcagggccacattgtcagttgccacagccttacagtgagtaagtgactctgctaattatttcctctagtctccattataagaaaaaaatagacatatttcacacttaagttagttaactttattaaattgtgtagttnttaattaaaaaacaaatacttttttttaaactattgtcattagaacttgatatcaaacataaaaaaattcttttacttatatgaatgaatatttagaaaaggtctcatcaaataaggtagggataaatgagattttacttatttttaaggcaagaaacctgttgctctataatcgagaccggatgaaatatacacttagaacaaagtctgacaacaacaaagatatgctaaatgaagcataaagaattaattattagtatccaagtcgtaaagggtaagagtgaatatnttactattcttcatattccacacacatgcgcactnggattctattattg

SEQ ID NO: 47435 - DNA, 485 bp, Glycine max
  unsure (1)..(485): unsure at all n locations
agctntgctcgtataagggaacaattggtattgtcttttctaatattgtaagtcaatatttaaattgtctcatttcattattgtactcatagctatatttccttggtatagcgtgcaagtaagaaggatagagcccccgactcaagctaaaatgtttattgaaacttgacaaagtaagaatggaaaggagttggacatanaaaaaaccatgcaattgtaagttntcttatatgaatttatcaatttgcatataaatatctaaatttgaattaatatttaattttaaatatactaggggaaacttcaagagttgattgaaaattctggccagtcttcttcagaagctntccaaactatgtttggcaaagaanaaccagggaaagtacattgtcacagaanaactacgacacctactctcttganaataaataaaatttcaaaaatcgaaaaaagacatgttgaaaaggtgaaagaataaatgataa

SEQ ID NO: 47436 - DNA, 495 bp, Glycine max
  unsure (1)..(495): unsure at all n locations
tactactctntcgtcttgttagggtgttcacaactcattgtgtctcattaacccagtttgtttcaaggttaattntgatgcgttcagggttaaaattagactctgtattttttaagatagatttgagttatgttttgagtcatctcaacatgcatgagttgatgtcttatttttgtttaaaaagtattgaattttaaataattgtacatcaataataaaaaaaaatattgatagataatattttgtgtacataatattatatttaattatgatgattntatttaatatataatatacattgtaaaatatattttaacttttttaaccaatatgttagttcgagtcgtgtcgagcaaactagtttgttatataacaaaatatgagaatttgagagtaggttttgaagaaataagtacaagattactctgaagtnttaccttaaaatattattttatccaagtacatgaanaggaaaagttgtactcctataagtct

SEQ ID NO: 47437 - DNA, 247 bp, Glycine max
agcttaaggatgatgggttcggtcttccaccatcaagatggaaaggatcttgcggccactatgcatatttctcaggctgcaataaataaactctctttctttgtttacatggagacactgcataattcaagaatagtttgcaataacatacaaagaactggacagggattactttatcaaccagacgaagatgaagtacactatacacaccatcaaacgcattatttcattaacattatgctgcaac

SEQ ID NO: 47438 - DNA, 460 bp, Glycine max
  unsure (1)..(460): unsure at all n locations
nacatgagagtatggtcatttggtgaatgaggagagctttatatcttctctttctgctaagaaagctggagattatgatatttcgatcgatatatgacgaacatatatatgatgaggtaaatataattgaaaattttggatatctaaagactgtcctcattgatagcagaaatccaacaatgataaatggacagtctaaagaaaataaactatcttcattctaaatagtctaatgggtcaacattattacgtaaggaaagcgtaattgattgcataaattaattactctcaaacggaaaacattaaatatattcaagtatttatatatcatacgatacgatacattatatcttacttctttgagataatactttatattatcacagaacatatatgctaatcataacatgttcaaacgacgcgatcactacaagtgaaacagcacaaagggcacatactc

SEQ ID NO: 47439 - DNA, 425 bp, Glycine max
  unsure (1)..(425): unsure at all n locations
agctngaagatgttctgtcttttacttgcccntctcccttgagtggcactngtattggttgttatattgaatgttgcatcttagtccatatcatatctctttttcatcatgcattatcatgagtaagtaagaagataaattaataagttagaaaagtttcttctgaaggcaaaactctttattttaattgattacaaccttatcataatcgattacacaagttgtctgaagcttccatagttatgtctcgtatcagtttaatcgattacaaccttatcgtaatcgattacatagttggttgtggacaatgattgatttattcacgagtctctgctntaatcgattaccatgtgctataatcgagtacttctttctccacaagtgtgtcagaagtgaacaagaacattataattgactactttgag

SEQ ID NO: 47440 - DNA, 425 bp, Glycine max
  unsure (1)..(425): unsure at all n locations
tatgttgcatatattacaatagacctcctcaactctcagcatctnaatcatccacaacagaacaattatgacctttccagcaacagatacaaccctggatggaggaatcaccctaacctcagatggtccagccctcagcaacaacagcagactgctccttccttccaaaatgctgctggcccaagcagaccatacatatcttcaccaatccaacaacagcaacaaccccagaaacaaccaacagttgaggcccctccacaacctatcctcgatgaacttgtgaggcaaatgactatgcagaacatgcagttacatcatgagaccatagcctccattcagagcttaaccaatcagatgggacaattagctacccaatngaatcaacaacagtcccataattctgacaagctgccttctcaagctgt

SEQ ID NO: 47441 - DNA, 171 bp, Glycine max
tttctagtcacactttataaagctccccttggtttgattatgcttatttaaaataactgatactatgcgaatctgattaacccattcctccccttggcataacaaaagccaatgcgtataaataattaatttaacattctatatgtcataaaaaatcaccaacatgaacag

SEQ ID NO: 47442 - DNA, 429 bp, Glycine max
  unsure (1)..(429): unsure at all n locations
agcnttgtgctagggatcgttggaacggctgaatgcatctccggctgctacaccctggacatatcttcgtgtatattcagcattgttatttgttttcatggttgatgttctctggtacaattttctctctcttttattttttctgtaacaatgttcatattattaccactgctattatctttattacaatactggatattcctctattccctactngggcatagctnttgtcctggacacggcttccaataggattcatatccttgctctgtagataaagtctgcccatatggaagctcagcttgctaattgagacactcatagttatcaatagcagcaaatagtgctgctattgtgcggtaatggagcattgtggctgctggctactataangaaactcatagcatcacattttttgtttgctcaaat

SEQ ID NO: 47443 - DNA, 290 bp, Glycine max
tctagtccttgtggatcttcttccctctaattcttgaactacacttgtaggtttagcttgaacttcacctgtaacgtcatcaggttctggttcactcaatgtttttgtgttgatatgcatcattggcttcttgcttggatcatgtttgtccttcatccatgtgttcagctcatcaaattgcacatccctactgaaaactattcgattcgttcttggatttaagaatttgtatgaccctgtgggattatagccaacaaagatcatgtgttcactcttgtcatccaatttct

SEQ ID NO: 47444 - DNA, 462 bp, Glycine max
  unsure (1)..(462): unsure at all n locations
agcnttgagggtgcgtagcccaccatctnttcatattagagtatcgataatgtgtctaccatcacgattatcgtctccctttccatcattgggggtaccacttgggccgccagatccctccaccttttaggcgtgttctttgaaagatccgtccccctttntgcaaatgttctatagttgcatcctatccggaaccatatcaaaatngtactgatactgcctaacaaaggcaaccattaggtccttccaagaatggactcgggaagattccaagttagtgtaccaggtaacagctaccccagtaagactttcttggaaggaatgtattagcaattcctcatcttttgcgtattcccccatcttctgacaatacatctttagatggttcttgggacaagtagtccccttgtacttgtcaaggtccagcaccttgaacttgggaggggtgatgatattgggttc

SEQ ID NO: 47445 - DNA, 383 bp, Glycine max
tgctcattacttttcactcagaagtccgattcatgcgcatcacatatagagacgctcgaaattgaataacggaagctctcgagatattcaaatggtcataacttttcactcggaggtccgatttatgcgcatcacatatagagacgctcgcaattgaacaacggaagctctcgagatattaaatgggcctaccctttaactcggaagtgccaatcatgcacattaaataccgagacgctcgtaattgaacaaaggaaggccttgagcaattcaaatgggcttaacttttcactcggaggtgcgaatcaagcgcattacatatagagacgcctgcaattgaaccacggaagctctcgagatattcaaatggtcataacttttaa

SEQ ID NO: 47446 - DNA, 428 bp, Glycine max
  unsure (1)..(428): unsure at all n locations
actaattaacagaattacaatccgattccggtgttatggctatgtaaagtttttcttatgaaaataatttaattcatgttggggtaaactttacatatatacacaaaaggactagttcctcactatttaattatctggagatttgaatacaaaagtcattgaatgagaaaggatttgaaaaataagataacgaaaagtaacacattatgagatattcatttcaaacgaagataactntctcaggaccgcatatgtgtcatcatacacctttgcctctcacctgctgctctctctatatttcactgactgaccccacctcttctctttcttttatctctctctactactgtctttgcctcccacatagcatcttaattttctattccacctaaatagtatatattaagatcgactgctacattatgaga

SEQ ID NO: 47447 - DNA, 467 bp, Glycine max
  unsure (1)..(467): unsure at all n locations
atatattcaatatattntatatgttntatttatgttcatgtttatattttgataaatgaataattctaggtagtataagtcaatatatttgatatcttttatttatgtacatgtttatattttgataaatgaataattttaggtagtataagataataattttgtatagggctctttgtattgttaatgttatatatgctagattatattttgataaataaatagttctaggtagtataagattatagtttgaattgttaatgttatatggtagattagatttaggtttatatgataaattangaatacttttacatactctaagttattaattttatatggtagattaggaatatttttaattatgatatggtagattaagtttagttggaaatttccttataatagattagaaataattatagattagctttagtctaaatgttgtatatggtagaatacattta

SEQ ID NO: 47448 - DNA, 454 bp, Glycine max
  unsure (1)..(454): unsure at all n locations
agcttgtaagtggaacggagggttaatggaagatgtttctttctttnggaaggaatgtggattcaggagaataagagagtctttatagtaaatatatatgctccatgtgacatctagagtaagcgtgctttatgggactccgtcaggcagctgaaaaatgttagtcctgctagactgtggtgtttactangagacttcaacagcatcaaacatccatctgaaagagtgggtgtgtctcagaggggaggggatgtcaatactatcagtgaattcaatgactggatagctgacatagaagtagaagagataccaagtgtggggagaaaattctcgtgattcagaccaaacggngctgccaagagtaaattagacaaattctttgtttcccacgaatggcttaataaatgaccaagatgcacccagttcatctttggacataaattttcagatcact

SEQ ID NO: 47449 - DNA, 497 bp, Glycine max
  unsure (1)..(497): unsure at all n locations
tcaacttacagtgagtgattcaggcttagcgccactacctgcgctaagtgcacttccaatgactttaaaatagaatgatgttggcgcttagcgcatccttccccgctaagcccagcttgaaagctcaacttacaaaatgaatctagggcttagcacaagatggcgcgcttagtgcaactataataaattttcatagagagaaagtgcgcttagctgaaccatttagcaattcaatcaggggtctttgcgctttcactcaaagattcatcgggaaattgatgaaaagaagagatggcagctttgccttctgcagtcttaaactcagggaaatatttcttcaaaaatttctccactacttcatcccatgtcttaagactattacctttgaatgaatgaagccacctcttggcttctcctgataaagaanatgaaaacaagctcagacggattgcatcttcaggcactccagccaacctaatagtatttcatatttctat

SEQ ID NO: 47450 - DNA, 454 bp, Glycine max
  unsure (1)..(454): unsure at all n locations
atccttgagtcacctgcggcatgcaagctntgcacacaacagtgaaggacaaagaccttcccttgtctgtaagcacgctatggaggaattgtctacctctttatctcttggttgacctagntgaaccatttgaaatagattggccaaataatctagcacaccatgaatttcagttgacaattaagtagtgtagcttagagatttaacaatggcaccaaaatatgatctctgtggagttcactttcaattggatgagatcatgaatacttggtagtgatatttcaagatctcaattgttattctgagcagggaatttaagctaaatttgaaaatatatctctgggcatcagtgctgaagagataaacagtgaatatctatntgaaaagatattagccgatggtcaaaagtgtagtgtgtgaaagaaactatttcaagtaagttataataaataac

SEQ ID NO: 47451 - DNA, 425 bp, Glycine max
  unsure (1)..(425): unsure at all n locations
ctgatagcgatgccattttanaaccagccaaacactcctgttggacctgatctcaaatggagatacttttggaggatcggtcctcgaccgtcaaatactcgttttcaggtctcatgctttctcttttttcttatccgtaagacatttgtcctagttcttaaacctaatgtttattataaatgtacaggaacttaatgctgagccagtaatacctgaaggtttccctgaatggaaagaaactatggattcctgnggatacaaaatgatagcagcaattgaagtcagtcattntttttcatgctatttctaatgtgtggtgatctaaatgtgcatatttgttcttaggtggttgctgaaatggcagctattgggtttggtcttccaaaggatgcattcacttctcttatgaagctggtgagcacatc

SEQ ID NO: 47452 - DNA, 342 bp, Glycine max
  unsure (1)..(342): unsure at all n locations
agcttgagatgaggaagtgttgaatgttgaaacttcctgctnttattggtgaccacagagtggtacctggagatatgtcgcgggggtcaggagaccttggggacgtcaggtggggtgctattgcccaaaaccaagcttgaccaatcccgacccaacccgggcatagtcggtcagtgagaacctgtgatgtacctaaacaggcgagctcctgtcagtcaacagataaaaggaaaacaagaccacaaagcaaggaggcttgtggtggctggccagctgtgaattttgtgtaatatgtggatggtggcctctggtaatcgattaccaagggtgggtaatcgatta

SEQ ID NO: 47453 - DNA, 490 bp, Glycine max
tctagccaaatggacttaccttgaattaattcctttgatagctcctttgagccttgtttccctttccttgttttgaagctcactacaagccttaagtgaaaaaccatgatattaccatatccttaaggaattttggagctttggaattgttttgggaataagtgtagggggtttttgtttcattggacaacttgttttgttggctatgcttcatgatgtattttgggccatacttgatgtacattgtatattggttaaatgttggacatgctgaatgaaatgttgtttctcaaaggccaaagagtaaaaaaaaaaaaaaaattcgacaaaaaaaaaattcgacaaaagaaaaagaaaagcaataaagttgagtgaataagatcttaaatggcacaagaatgatgaaactcttggttctactcttcatggtttaattttatctttacttctttatattttcttattttttttaatatgcacttattcccct

SEQ ID NO: 47454 - DNA, 486 bp, Glycine max
  unsure (1)..(486): unsure at all n locations
tcaagcttttatatttatttacgaaaattatgggatgttacagacgtataattnttatagtgtgatcttttctgggaaggaattntacaaatttgcaaatttgtctttcttgattctggtagtagctttctgaatgatgtaaaatgtctttctacaactgatcattttgatatactgtttttgttttttctagatggatgcactagaaaaaaatttccagagccaaatcctatacattcaacaagccatagctgcaaaggaagataagtttgtgaaattacagcaggcaatgcaagaaaaagtaaaagagtcctgcggagaatcttctgagaaagaggacaagtacatctaatattccctaattgtgcattattccaatttccaagcgctgttcatattatcattcttttactacatatatcttaactntctttntccatttagataatactcaactaagtgattagtgtcataccctaatttcgt

SEQ ID NO: 47455 - DNA, 526 bp, Glycine max
ttacgtgacactatgaaactaagcttcccaacatccaagcaaaacaacattcaaactgcacaagctatcacagccaagcaaaacagagcataggcagaaaactttgccaaaacaccaaccaaatcacagcttttctcacttaaagaccccagtaacaattccttcgttctggttcattaaccgttggatcgactcgaaaattttactggaagtctctaatacttaagcctacattttgaccgttgggatctactagcaagcatccagaactcattctgcattactctttccacagccaaccacacacaagcacttttctgcacaagccaaaattctgctgcacctattttgacagcaaaattctgcataagtgcagatttcgaaaatcacacttcctctcatccaatcttgcccaaatcaattcctacaagtcccaaatcatgtatcaatcatgtctaaatcaaagtcaagctttaaagcacagcaacacagaatctatgtgtccaacacccctccattcaatggg

SEQ ID NO: 47456 - DNA, 357 bp, Glycine max
  unsure (1)..(357): unsure at all n locations
agctngcctcanagaggtccaggaaggacaatgtatccgaaggaactagttccgctccggagtatgacagtcaccgctttaggagcgctgtacaccagcagcgcttcgaggccatcaagggatggtcatttctccgggagcgacgcgtctagctcagggacgacaagtatactgatttccaggaggaaatagggcgccggcggtgggcatcactggttactcccatggccaagtttgatccagaaatagtccttgagttntatgccaatgcttggccaacagaggagggcgtgcgtgacatgagatcctgngtaaggggtcagtggatcccgtttgatgccgacgctatcggtcaac

SEQ ID NO: 47457 - DNA, 477 bp, Glycine max
  unsure (1)..(477): unsure at all n locations
tgcttgtggggcttctatggaggctggatctttgagcttcaatgaggtcctttaatggtgattntccaccatggagatgcagcggaagacaaaagagaagaggtgagaggaggcgccatccactagggaataagccatggaagaaggagcttattccatgttgtcttagagtcatgtttagtaataatatttgtcacattttgttctaagtttgtgttgaattatgattttgttgattgaattctagatacatttgttcatgtattcttgtcattcttagcctatcttttgaattntgagtctaattcatgcatgttatttagttcataacatgttctaaatcaattcctagaagtagtcttgttgttgaactctntttttttgttntctaagtttcctacaagatgcctatgatgaagttgagttgtggtgctgagtatgtggctggattgtgaatcanaataagtcttaagctct

SEQ ID NO: 47458 - DNA, 447 bp, Glycine max
  unsure (1)..(447): unsure at all n locations
agctngcatacgggaaaaaggatntgagtntgatagctacatattgcatgnaattgttatagtaccaaacgatcctaattgctcatgatttagctaaaacatctaaataaaccgagtatgtttttataaataaattaaaaagttattgagtaaaattactctatcataatctcctctcacacattttctaacataaactacatcagtatatttaaaggtaattattaattataaattagcaacgcactttgacaaaaaaaaaaaagaagaaagaatttaatgtacactaacaaattctactggctttttgtaacgcatatttactgtttctatgngtggaatacataagatataggaacacantttcattacaaacttctcatcaacagttcaacacccatgtgtttttatatctctacttttattataatataagacctatcatat

SEQ ID NO: 47459 - DNA, 478 bp, Glycine max
  unsure (1)..(478): unsure at all n locations
ngtggcttaccttattcgtttactaagaattgtatacgaagatgaaaaaccctttctttcttatgtttatgaaggcatgcaaagggaaataaatgctataaatgagatgtttaagaaagaaatagatgcataaaccttatgcatatattattaaggctcaatgggataagcatttaaagctcaaacttcatgcaacaacttattggtttaatcatgcattcaggtacaatgagaagttaataataagagaagggtcatcgattcagttgttgatttacttgaaaaaagaggtttgtgtgagaacctgactcaagtcattagtgagatggagatgtatcaagatcgacaagaaagtnttgatcgaccaagtgctcttcctataagcaacacaatccggcctagtaagcactaacttgatntatatttatacttaaatagtttgatatttatgtttagacatatactatagaattacatt

SEQ ID NO: 47460 - DNA, 500 bp, Glycine max
  unsure (1)..(500): unsure at all n locations
agcttctntgagaaaacttccttgagaagctagagcttanctacacacacccctctaataactaagctcacctccttgagaagattcctaaagaagctagagcttagctacacacaccccctataatagctaagctcacccccatgccaaaatacatgaaaatataaaaaaaagtccctattacaaagactactcaaaatgccctaaaatacaaggctaanaccctatactactagaatggccaaaatacaaggcccaaaagaaggaaaaaccaattctaacatttacaaagaagaatggatccaaccttgacccatgggctcaaaaatctaccctaaggttcatgagaaccctagggccttctttagtagctctagcccaagcctcttggagtcttctatctaatacccgtgggggggaggattacatcatatgccttcaaatatagactattaaaaataatntacttttagcttataataccgttatatatcattact

SEQ ID NO: 47461 - DNA, 394 bp, Glycine max
  unsure (1)..(394): unsure at all n locations
attcagatcanatcagtgtttcaacaattgttcttttattatgtccatgcaaaacaattgttctttcattatctttatcctcaagatacacattttttcatttcttttttttccttttcaaaaaccattttgttgtgttctgatctacaaatttttcgaagagtactggtgattgttcccttttaaaagcatgttatgtttagaaaaaagttgaatcctagacaaagttgtaatccgagactacactatcaaaaaaacaaagggcgcacaaaaatagaaatgaaaccacgcgtaagttttttttttagttcttttgtttcaaacaatccttacaacaaaataacataacaaagtattgaaagagaataataatatatagacaagttcacaaatt

SEQ ID NO: 47462 - DNA, 445 bp, Glycine max
  unsure (1)..(445): unsure at all n locations
agcttatgctgcanatatttacaatagacctctctaacctcagcagcaaaatcaaccaaagcagaacaattatgacctttccagcaacagatacaaccctggatggaggaatcaccctaacctcagatggtccagccctcagcaacaacagcagcctgctccttccttccaaaatgctgctggcccaagcaaaccatacattcctccaccaatccaacaacagcaacaaccccagaaacagccaacagttgaggcccctccacaaccttccctcgaagaacttgtgaggcaaatgactatgcagaacatgcagtttcagcaagagaccagagcctccattcagagcttaaccaatcagatgggacaattagctacccaatngaatcaacaacagtcctagaattctgacaagctgccttctcaagctgtccanaaatccaaaaat

SEQ ID NO: 47463 - DNA, 482 bp, Glycine max
  unsure (1)..(482): unsure at all n locations
cgtaggattatggggtacccgacatatgtggtactaggtggcaatcgggcgatggtgcaaatcaactctcccacatccacaaatcaaacatgaacccaccatccccagttgcccaccttcaactgagctcacgtacccccacatagcccttatccttgttcctctcagcaccgggtccccatcaacccctccaagctttcacaacatccaagcaattcaatatccaaacatcatgaactatcttaaactaagataacagggcagaggcagacaactctgccaaaaacacattctaacaccacagttttccctactcaaataccccagtaacattccctccgtttcgattcgttaaccggtggatcgactcgaaaattntactggaggttcctagtacataagtctacattttgaccgttgggatctgctacaaaacgtncagaacctcatatgtactaccctttccacaaccagcaatacac

SEQ ID NO: 47464 - DNA, 449 bp, Glycine max
  unsure (1)..(449): unsure at all n locations
agctngagtntactatgtatttgtttatgaaatcagttttcanaaactcgaaagtgaatcaaacctgccctaaaaaatctttggtttctctcttcttctatattcttcccattctactcattttttctcttctttccctatcacctacacttgacatggcagtataacaccccaaactttttaaccccatgttatagaatcatcaaatatacatatccaccanagaagtacaaacatagacatcatactcaagcttacttctcattatgtaaccatggatttctttccctaaattaaagcaacccaatcaaatgactgcttgtagagcactagttattgaacatgaatccagcaggtggaaatgagatagaagtggaaaaaggtggattcaacagtcttttaaattaaatagatgacactaagatggcacatgagaagaagagttaaca

SEQ ID NO: 47465 - DNA, 432 bp, Glycine max
  unsure (1)..(432): unsure at all n locations
ttggaagtggtaagcaatgcttatgtcgagtctctcctagtgcaaccacgctcatccagtgctgcattgatggtagctcgtgtgatgttaaggcatgggtacgagcctggaaggggtttatgttggaacggtgacggtgcgacaagcttggtggagtttaaagaaaaccgtggaaggttcgagctaggatataagcccacacatgccgacataaggaataacaccctataaagaagggaccgaagcatgcgcccgcagcaagaaccgcaagtggaagggacttccttatgtcatatcatttaaagcttcatcagcgtaggctggatgtgtgaagggcggatcgccatgatcaacaatgaagtccctcaagagcaatcaaactcagtatggtcatgcnctcctgagttcgagttgggaaactggcaaattatc

SEQ ID NO: 47466 - DNA, 412 bp, Glycine max
  unsure (1)..(412): unsure at all n locations
agcttagcatgatcaacatctaccatgataagcttgagggagggtgttgatattataactagttagttgtagtcttgtttagtagtagcttgtatctgagaatataaatactttgtaacacacactttacaaatcaatcataatattttagttggcctgttctttcttttgtttgcttcctgctacaatggtttcggtctctttttttgttgttgatgatgatccaatatttgcttctgccttttgtgcttaagaattgatgacgtgagcttctggttttggtggttaagaattgaagttgacttgttttgcttctgttttgagaggttaagcctcatgtgtagctttttctcttgatatntaagcatttgtggcttctgactgacatggcgattaatgcgttgaatcattg

SEQ ID NO: 47467 - DNA, 493 bp, Glycine max
  unsure (1)..(493): unsure at all n locations
ggatgcctcctaccactgtttatgatgcaatgaagctgagttatgatgatctagatcgtaaagagcaacaactttttctagatctagcatgtttctttcttagatcacatataatagtaaacgtgagcaatgtaaaatctttattgaaagatggtgaaagtgataattcagtggttgttgggttggaaaggttgaaagataaagctcttataactatctccgaggataattgtatatctatgcatgattgtttacaagaaatggcctgngagattgttcgtcgcgaagaccctgaaagtcgtagttggttgtgggatccaaatgatgacatttatgaagcattggaaaatgacaaggttaaataccagctacatataacaatttttgaatcacgttagaatttgttttttgcaagaaaaattggctttgatgattaatattttgcttctacattgatgcagtgtactgaggccattataagcatacgaattca

SEQ ID NO: 47468 - DNA, 439 bp, Glycine max
  unsure (1)..(439): unsure at all n locations
atctctgagtcacctgcggcatgcaagcttgaaggtgtgtaacccaccatttttcataatagaactctggtaatgtgtctactatcattgttatcatttctttctccatcattgagggaaccacctgngctaccagatccctccacctttgagcgtattctttgaaagatccgtgccccctcttgcatatgctctatagttgcatcctatctagaaccatatcagaattgtactgatactgcctaacgaaggcaaccattatgtccttccaggaatggactcaggaaggttccaagttagtataccaggtgacagctgccccagcaagactttcttggaagaaatgtatcagcagtttctcatcttttgcgtatgcccncatcttccgacaatacacctttagatgggtcttggggcaagtagtccccttgtacatgtc

SEQ ID NO: 47469 - DNA, 460 bp, Glycine max
  unsure (1)..(460): unsure at all n locations
tgtcactctactcataatttctgaaagatatgttgaggaggaaaaacagatacatccaccaggagaatattgctggggaagacaactgcaatgctgtaatatagagaattcttccaccaaaacagaaggaccctggaagtgttactattcattgttcaatcggtgaagtcactgtgggaaaggctctcattgatttgggagccagtatcaacctaataccgctctccgtgtgtaaaaggttgggagagttggaaatcatgtccacgagaatgactttacaacttgctgatcgatccatcacaagacctcacagggtaattgaggatgttctgataagagtgaaacatatggtctttccagctgattatgtggtcatggatgtggaggaagtcattntgggatgtccctttatgtcaactgcaagctgcataattgatacnggaagaaagacactggagat

SEQ ID NO: 47470 - DNA, 474 bp, Glycine max
atccttaagtcacctgcggcatgcaagcttgtgtggaatcgacaagcaaggacaaaattgaatctttatgtgacgtgacgaggaatccgcggggtagctcactataggtaaggggagtttattataaaatttaccattttaacaccatagttaggattaaggaacctagctatgaggatatctgcctgtccttgtgcatgctgatttttcttcaaagaatattacgttttaactaatgggatgcgatatatatattgtgatgaatgatattgttttggctgtttgaaggctgtgcgtgaggaaatgatattgttgtgtgtggttgaattgatgtagatgttgctatagaagattataattcgactgtgatgataatgatgattttgatgatattgatttgagattacattggttaagagagaataacaccatgaattgttattattgatgaatatgtgaatatgacaatgatgt

SEQ ID NO: 47471 - DNA, 448 bp, Glycine max
atggctttctatgtatgaaaggtggaatttataatgacgtaaatatggagcagattctcacctcacacatgtctataacatgaatctaaacttgctcaaactggatttacacctagatttacaccgaatcaaaatttgactcctcaacacccaattttgccctagaaatggctcttggtacactttggtcatttgtatatctctctagctcagactaacctttctcacatgtcctaaatgacatgtcaagctagtattaactcactgtaacctccatttaccacagaattcagacttagtcttccaactctcaaggtctcactctgtttccactcataacatcacattctcactttctaaccctaggttagatctacccttcatctctaacaggttttcatcagcgagttcagcatatagacatcacaaacatcatcacaaataccct

SEQ ID NO: 47472 - DNA, 452 bp, Glycine max
  unsure (1)..(452): unsure at all n locations
agctnngcattggaattgcgaaagccccactctatcattattattagtacctgacatctcaaacaaacaaatcaaacgtaacaagacaattatagttgttgtttgaatacctcacccactcaagtgtatcacacaattatggcttttctctaatgaaacactcttgccttttaccactctaattccccttgagttcttaggcaattcaagagattatggccacaacaaagaacaattcaccaatatgtgtaaggtaaggctagagagacaaggaaaaggttaaccaagaaaaaggctaacaatgtttttaggcacaaatgaaggaaataaaattcagaatttaggaattcaagtaacaatccttcatgcaaccaatatattaccttanagagatttttttntaaagatcttcaagcatgaaccattcagcccaattttttttttttaatttt

SEQ ID NO: 47473 - DNA, 504 bp, Glycine max
  unsure (1)..(504): unsure at all n locations
tctatggaggctagatctatgagcttcaatgaggtccttcaatggtgatattcatccatggagttgcagcataaaataaaggagaagaggtgagagtaggcgccatccactatggaataagccatggaagaataagcttcaccaccaagagtgtcttggataagaagcttatagaggaagcttcaatggacgaaaagaatgagagagacagagagagagagaatgatagtggcatggaaaattgaaggaagatagggagagaagttgaactttgatgtgtgtctcacatgtttctcattcgtcaaagttactacaagtgttacacttgcttctatttatagagtaggaagcttccttgagaagcacgtgttacattcctccaatatctaagctcactccatgccatanatacatgattgaagaaagctctcttgagatgcatccttgggaagcaagcgttacacccctccaattgctagctcactccatggtacaccccctcaa

SEQ ID NO: 47474 - DNA, 441 bp, Glycine max
  unsure (1)..(441): unsure at all n locations
agctngtatgacactgcctcaactnttagatttgtctgtatgacctttagaagctattttcaatagtaattntaaattagaagcgaataaatacttgtattgtttgatgacaacttccatttagacaagatcattttataggttgttaacaatacttgctcaagaaaagaaattataaaaattagctctagttgtatcttatatggataggatgtgattaanacagtccataaaaaactaaatgtaaggaagagaaccaaaaataaaactgtgattagaaatgagtataagtgtgacggnggtacgatctacttcctgtcaaaaataacatgtcaaccttgtaaagtacattgtttgtacttcatactangattntcctttattttcatttcttttatctgagaataanaagttntatattgattgttctgttggttctat

SEQ ID NO: 47475 - DNA, 348 bp, Glycine max
cagcttatacggtggctcgcacttggtgccgaaatactagtggccggtgatggagctcgtggcggcgtgtgtgttggttctaattgagccatgcgatgcaagagttcatcaatcttgaaggacatcgaagatgaaagccgcgcaaacgcttctttccaacgatcagtgttgactttcgaatgtgtagcttccgccatggcacgtcaatgaaagcaccagtgatagcctagggtattcgaggcccctagctaacctcccagagatgaagaagagactgagaagggaagagagagatgagatagagagagctatagtttttaggaagaagaagcttttattactaacata

SEQ ID NO: 47476 - DNA, 403 bp, Glycine max
  unsure (1)..(403): unsure at all n locations
agctntntggagtagaaacatgggaccaactcattttatttcagaaagtcgtatctagtcaaagtctgagagaccatacaagtttcctagcgatttctaattatgtgggtcattaagtctatcatatgctgacaatggccgagaagcccatgaatttctttgggggcggagcaggtgtccgccattgccttggccttggctaacaatcggngaagttcttgactcccgttcaaggtaagagcaaaccgatccatccacatggttgcctcttggtgtaaagagtcgatcaccctttctctagcctctntttccacgtatactggggcatactctttcgcaaccctatgctcgtgggccgtggctagacctaactcttcttggactnggcgatgatagctagcat

SEQ ID NO: 47477 - DNA, 444 bp, Glycine max
tgtgatctgcgttccttgcactccttatattctgtgcatcaagtgcctcacttccaccacattctgcttcttctttgcagttcatacttcacaattcaagtaagcattgtatgctttgttttattttccatgaaagatgcaaactttaggatagaggacttagtagtttgtaggttgaatatccatgtagctttagtgttattactgcaggtatggttagaataaaattatggtttcgctgtaggagtaatgtagtttaatttaagggcctatactgaaaagggggtgaaaacccctgtgtatttatttggaaatcgcaatcaacggtctaaacgtggtgctgcgctaagcgagttcatcgcttctgatgaagatctatgatttacaaatgatcgcgctaatcccaaccctgtcatgcatagcgcattcatcttctctgttgat

SEQ ID NO: 47478 - DNA, 464 bp, Glycine max
  unsure (1)..(464): unsure at all n locations
agcttangaacccaaacttgtagcttcaatgcattgaaacatgcttatggctaggaatccaaaatttggttttagaattagaaaaacatganaattaggatttgcttgtgagagtttttgctcgaatttgggctgccccatgtttgatactttacatagaggtagcgtggaaaacaccttgcaatagtgtgtatacataggtaaatataaggagcatgaaattcctagcaaagtatgagtaattgttttcttaaatgaatgtatgatagtgtggaatgccctttttgaatgcaaatatgtgcaggatgtaattagctttccaatatgcatataaataaataggagtgaaacaacaaannattgtatggtgtacttcaaatgtatgtaagtagtttgtgaatagcaaattttaggaatataaatangtgtaaagcttgacacaacactctgagcataanagtgtg

SEQ ID NO: 47479 - DNA, 441 bp, Glycine max
tatgaagagttcttgacgatgctagttgtcaagcaccttgtgacttctgtcgaatatccctagaccaacaatcaggagaaggcagcaaacagagttatccttaaggccttgcgcacaagacatgacaagcccaagggtctatggaaggaggaactccccagcatactttgggcttatcattgttcgcctcagacaacaaccaatgaaaatcctttctgacttacatacgacacaaacaccatgatccccatcgaagttggggagccatcgacaaggaggatgtttttccaggaacaacaaaataaagaaaacatgagggtggaactagagataaagcaagcctagacaacagagcatacatgctacatgaactagatggttaagtaattccaagaacatggaatgctacccatctaaagttttacttcagttaatcgacta

SEQ ID NO: 47480 - DNA, 448 bp, Glycine max
  unsure (1)..(448): unsure at all n locations
agcttctagccaaatggacttaccttgaattatattctcttgatagccctttgagccttgtttccctttccttgttttgaagctcactacaagccttaagtgaaaaaccatgatatcaccatatccttaaggaattttggagctttggaattgttttgggaataagtgtgggaggtttttgtttcattggacaacttgttttgttggctatgcttcatgatgtattttgggccatacttgatgtacattgtatattggttaaatggtggacatgctgaatgaaatgttgtttctcaaaggctatagaggtaaaaaaaaaaaaaaaattcgaanaaggaaaaataaaagcaataaagttgagtgaataagatcttaaatggcacaagaatgatgaaactctnggntctactcttcatggttaaatttatctttacttcttttaatttct

SEQ ID NO: 47481 - DNA, 229 bp, Glycine max
tgcttgagaagcttctatagaggctggatctttgagcttcaatgagatccttcaatcgtgattttcaaccatggatatgtagcggaagataaaggagaaaaggtgagaggaggctccatccactatggaataagccatagaaggaggagcttcaccactaagagagtgtcatggataagaaccttagagagaaaacttcaatggaggaaaagaatgagagagagggggg

SEQ ID NO: 47482 - DNA, 382 bp, Glycine max
  unsure (1)..(382): unsure at all n locations
agcttcttatccaaggcaattcttggtggtgaagctccttctttcttggcttattccctagtggatgttgcctcccctctcctcttctcctgtgccttccgctgcatctccatggtgaaaaatcaccattgaaggacctcattgaagctcaaagatccagcctccatagaagccccacaagcaagattccatcaagtggtaatcagatcacaagagcttcaagtaggtgctccttaaacctccattaatgtttttgctttaccttctcttccattgttgtttcttcattttttctcaatgtatctcctcacatgtcttgtgataaatggttttaccatgattctttagagnttccaccgattaaacttgctatagaagctag

SEQ ID NO: 47483 - DNA, 443 bp, Glycine max
  unsure (1)..(443): unsure at all n locations
agcttctgacagtaggacaaagaagattattctgcagactgtctgcgagatgtggatgtagtttaaattagacttaaccaggaagtggacccttgctgagacccttcatgggaggtatgtactttgtcatttaagttgttttccacaaaagattgactttttataatttattgtaggaatgaatttcagtaatgtttctttttacagggtgtgcgaaaaaagggacaagccatccagaagcaaaacactgccccccacgtgttgtcttgtgggggttatgaatatttagaagaaaaacttatgagtgagaaaacaaanaagatactggaggaaactgcctagtctggaggcacgaatggcatcatcgaccctctttctcccattagacgccacatgaagtggaatatggcccgcacgaagaaaactagacagatgacatctga

SEQ ID NO: 47484 - DNA, 417 bp, Glycine max
  unsure (1)..(417): unsure at all n locations
agctntgcggatntggtcttcgttcttgaaaggatcgatgtgggtccgaaaagaggcaaatntgatcatcctactaggacgactgagaaaactggggcaaatgaagagggtgagaaagagggagaaacccatgctgtgactgccattcctatacggccaagtttcccaacaaacccaacaatgtcattactcagtcaataacaaacctcctccttacccaccacccagttatccacaaaggccatccctaaatcaaccacaaagtctgtctaccgcacttccaatgacgaacaccacctttagcataaccaaaaacaccaaccaaaaatgatatttgcagcgagaaagcctgtagaattcaccccaattccagtgtcctatngctgacttgctccatatctacttgataattcaatg

SEQ ID NO: 47485 - DNA, 481 bp, Glycine max
  unsure (1)..(481): unsure at all n locations
acacttcatgatatctaagatgatgatctcaagaatcaaagaatgagttcatgattgaatcaagaacactctcaagttcacaaggagatntgaattcaagaatcaagaatcaagtttcaagattcaagttccaagaatcaagatcaagattcaagaatcaagagaagactcaatcaagataagtattaaagagttttttcaaatacttataagcacatgaatttttcttaaaaccttctaccaaagagtttttactctctcgtaatcgattaccagattattgtaatcgattactagtagcaaaatggttttcataaagctttcaactgaatctacaacgttccaattgattacaaaatgctgtattcgattacaatgatttgctaaccaattaccagtgtgtntgaacgttgaaattcanattcaaatgtgaagagtcacatcctttctcacaaaagctatgtgtaatggattacactga

SEQ ID NO: 47486 - DNA, 370 bp, Glycine max
  unsure (1)..(370): unsure at all n locations
agcttctatactntgtacaagaatgaagctcngtttccacttgttagacaagtggcctcagatatcttaagaagggggggttgaattaagatattccaaactgtttcccctaattaaaaatctatttcactttntactcaagttatgaattcccttaatgacaatcttcttaaatattaattcaaacgaagcaacttgaatatgaatataaagcaataataaataaaagagattaagggaagagaaaatgcaaactcagttttatactggttcggccacacccttgtgcctacgtccagtccccaagcaacccgcttgagagtctcactaacttgtaaattccttttacaagttctaaacacacaaggac

SEQ ID NO: 47487 - DNA, 487 bp, Glycine max
  unsure (1)..(487): unsure at all n locations
agctngcatgatgggagcctttctccttctcctttgagttttactcagccaagtagtaatcttcctctgtgacctttntagatgaaggaccagagaacatgccaccccattggggaaagtagattaagcatattggcaggctgcatattatgatcatggctcccattagagtgattcctctttcttttgaaaacctggatcctttgaagaaaattaggtgggtgacaactgctcccacgttgcctcctcctcctgtcattccagatataactcctaatgacctgaaaatgcatattgttagaattaatcacaaaaaaattatttagataggatntggttggataaatctctctagaagtacttgtaggagaagaaaataataagaataaaaagagatgaatttctccataacgtaaaatgaactctacattaattaatttggagatgtcctctcatctcttagaagaattacgagagttttacaatc

SEQ ID NO: 47488 - DNA, 502 bp, Glycine max
  unsure (1)..(502): unsure at all n locations
tcgcgatcgcaagctctatcaacccgctcttaaggtcacacacatcatttctaccttctgttcacatttcactgtttagaagtttttactcattttaacttttatttgtttttcctattaaactgtttttttttgggttaaatatgtttctggttcgtataaataaatactgaaattgtctctttctaatgccttggtgttgtgaaaatttactgggtgtagtctctgtccttcacaaagtattgtctgatttatgaaaatggggatcaccaaggttataaaaaatggtccgtgattgtggtttcggctgttactaggtttcgcgactgcatcgccatctgcgcaattgtggccgcattggctgcatttgactgcaatttctggcaagatctangattatggatgaaaccacaagcaccaattgaaaccttgtgaattactcataacacatttccatatatataagactgganaaaagatattatattttgagggaaaagct

SEQ ID NO: 47489 - DNA, 491 bp, Glycine max
  unsure (1)..(491): unsure at all n locations
agcttgtannaaattttggcacctggtgttatttgtattatattattattagngcttccagaaatatttgtatanttaatcattnncttttcggtgggtctttcctactgtnngagcatgcncnngattttgtnncatttcttgctananngcgttgagnntattctcaatatacnnattgctagaanngtaattttcagtaagttgatacctttcggtccaaaatcgtttatactgggttgcatttctttccgtcanttattgtcttgtggttntatcatattgtgcttgcttggaagtaataatattctttgtaaaatatggtatggtatatgaaatgacgatgcggttattcttaagttcttgtgttatttttacttacaactgatgccctagattaattatccaacanatntcactgtagctggttcattgatatcagaaatatgatgtgcttcatggttttcgagatcctctggaatccgagtact

SEQ ID NO: 47490 - DNA, 502 bp, Glycine max
  unsure (1)..(502): unsure at all n locations
gatcttagagcaccgcggctgcagcttgcttctacaatagctattgagcctgaatgttcacttccaattttctcatcctacggngggtattttgtttcaatatttttctgggtgtaggattgacagatgttttaaactattattatatgatgacaaatttttccttatcatattgttgttaatatatatattgctaaatgggtccacagccatcgttgtcacagtccgctgattacgatccgggaaactcaacttgtttaactccaaccaaaaggattaattgtcagcaaaccagttctgattcggattctgatgagtatacacagtatcagctatcaactaacaaacatatcaaagctgagtaattagtggttacacaatcctgtggtatcagcctgtatgttntgttttacatcaatntgattggtttgaatgtgctaacttagtacatatgacaatatattttgtgaagttcaccatcatttaataccaatgatgtata

SEQ ID NO: 47491 - DNA, 503 bp, Glycine max
  unsure (1)..(503): unsure at all n locations
ngaagcatgttgatgttggtgtatgtgaacactgtatctttgtaaagcaaaanaatgttagcttctcaagggcagggaagacaactaaagttgaaaagctagaattggtgcacacagatgtttgggggccaaccccagtgaaatttgttggaaactcacgctattatgtcacctttatcgacgactctaccagaaaggtatgggtttatttntcttaaaaataaattgatgtattttttgtgtttaaaaggtgaaaaacagaagttgaaaatcatatagatctaaaggttaaaagtttgaaatctgacagtggcggngaatatgatagtcaggagtttaaagacttttgttcagaacatgagatcagaatgatcaagacaataccaggaacacctgagcaaaacggtgttgcagaatggatgaatagaaccttgaacgagagcgaggtgtatacggatccaatctggcttgcctaaagcattctgtgcagaagcaatatacac

SEQ ID NO: 47492 - DNA, 425 bp, Glycine max
  unsure (1)..(425): unsure at all n locations
agctntaccanaatacctagagttctaaaatctttagtgtgttcatttagtaactttcttacagaaacaaggaccttccatgaatttcagatttgtcaagatagaagaattttttgatgaaacagagaataaacataaaaaatggatcaggaactctcctaacagcaacaataacaaaaatatgtatgcatatccagtccctctgaatgtgcaacaaataaacctattacagatgacacaaaagtgcacacatcaaattatgacaaagagcacataagaattaaagaacctcccctcaatgattacaaagaaggaagtcgtaaatgcagtctnttgattgatgatttggttgtatttatgataagatcgtattatagatatgacattgcaaagcaagtcgaataggtagtgtcaaatagcaagac

SEQ ID NO: 47493 - DNA, 504 bp, Glycine max
  unsure (1)..(504): unsure at all n locations
tcactcatgatgaagctgttngcatattgatggtgtttaaggtgaggggaatggnggtttatgcactgtggtttatatgtttatttagctttccaggtttagaaaagcttcttgctggtgtattattaatttcttagttggttatagagaccttttaattgctttgtttggatgcacaaaaacgctctttcttagatgcttctatatttattgaggatagagaatcatgtaattattggctttttctttcttgaaatttttatattttgtttgtattgatttgtttgttttgttcctatgtttaccattgtgatctagaacccacgtttacttctactgtggatagcatgctacattgtatctatcttttaggaatcttacctcatatctcctttntaggataacaagttatttatgactcgtctcaatatgaagtctctgtaactttttggtatccattagcaaaacaacactcctgtttgnacacaattatatcaacatctt

SEQ ID NO: 47494 - DNA, 372 bp, Glycine max
agcttcaacctagaggagacgaaccattccaagttttggataatatcaacgacaatgcctacaagaatgacttgcctagtgagtataatgtaagtgccactttcaatgtgtctgatctatctctttttgatgcagatggaggagccttggatttgaggacaaattcttttcaaggagggagtgatgaggacataaccaatggcaaggaccatgaagcacttgaaggtcccatgaccagaggcagacttaaacaagcccaacacatcatagagacaaggctggtcatttgtatagctgtcattgatgatgattgaaggcccaagtggagaaagatgaaggcccagaggcagaggcactaccaagactactaat

SEQ ID NO: 47495 - DNA, 482 bp, Glycine max
  unsure (1)..(482): unsure at all n locations
ttctttaagatagctnggccggagccgcggtatgttggtacactaatttggaagcttctcgtatccgtacttggaaggatctgattactgccttcctaaggcaatatcagtacaattccgatatggctcccgatcgcactcagctgcagaatatgttcaagaaagagggcgaaacctttaaagaatacgcacagtggtggagggacctggcggcacaagtggctcctcccatggttaagagagagatgatcaccatgatggtagacactctgccagtgttctactatgagaagctagtaggttacatgtcgtccagctttgcggacctagtattcaccggggaaagaatcgaggtaggattgaaaagaggaaagtttgattacgtttcctccacgagtgcgaatgccaaaagaatctgtgcaacaggtgcaaaaaggaaggaaggagatgcccatgctgtctcttcaatgcccgcgtgggtc

SEQ ID NO: 47496 - DNA, 412 bp, Glycine max
  unsure (1)..(412): unsure at all n locations
agctatgttgcnatattacaatttatccttctctcctcagcagcaaaatcaaccacagcagagcaattatgacctttccagcaacagatacaaccctggatggaggaatcaccctaacctcagatggtccagccctcagcaacaacaacagcagcctgctccttccttccaaaatgctgctggcccaagcagaccatacattcctccaccaatccaacaacagcaacaaccccagaaacagccaacagttgaggcccctccacaacctttcctcgaagaacttgtgaggcaaatgactatgcagaacatgcagtttcagcaagagaccagagcctccattcagagcttaaccaatcagatgggacaattagctacccaatngaatcaacaacagtcccagaattctgacaag

SEQ ID NO: 47497 - DNA, 484 bp, Glycine max
  unsure (1)..(484): unsure at all n locations
tcgtgctcagatccctcttgttggactgggctcaatttagactgccctcctaggtttagactaacttaaactaagcttcatcctcagatccctcttgtaggactagacttagaccaagcagcattattgtaacagcatacttaaaaccaaaacttaatccgtagatccctcttgtaagactaagtttcaattctgcttcattcaagttctaaggcaataatacatttcccaatgttaaaatcacctaactaggcacacaaatggttgatcggaccaagagcatgcaaaatttaagcactgaaagaagcattgaacacaagatacaaaatcaattaaatatgaaattaattacatcagttgtacattagaaatccccaacaagggtgtttagccagccattacagacgaaaccctaacaataataagcttacaaaacctaggtatctctgcaaaagctgctcctcttgtacctncagagctcttt

SEQ ID NO: 47498 - DNA, 431 bp, Glycine max
  unsure (1)..(431): unsure at all n locations
agctnntacagcaaatttagtaatgatccattattctagaattaaaataacttaatgccattaacctagggaattaaaaaaaacttaatggctgagtgtaactgaaattgtggcaaccaaaggtcacccccaacagccaacaagtcagccaccatttggtctcccaaaaggctgatgcctaagttgccaattgggcccttattacaacttgaactaaacctactaaagcccttttagttgattaacccaaaacatatttttggtcagccaactttataaggattggaccattatttagacaaactaaacactctaaanatgagacaaagtgctgccatttagtcctcctccatttgggccatgatacaactcacaaccttggactnttctccttgaaacttgngcttgtattcaaatagtatggacaacac

SEQ ID NO: 47499 - DNA, 474 bp, Glycine max
  unsure (1)..(474): unsure at all n locations
cttgcataatgagaatctgtccttccaacaggctntgcaatatggcatctgaagtctgggagctctgggcagatgggtctgctaaagctagaagtggggctgaagtagaagatgcaaggatgccagctattggtgcaaaggaaaagggaacatcagctgctctgagcttgctcttccttgcctctggaaaattaactgtttggtcattcgcattccaacagttctttatgatataggctaagtcaatgaccggtcttaggttcttgtaggaggtaagagcatcagatccaactcccctcaatctacacaaggctgtgattaaagctgggaagcctaagcgagaagagttagactgagccatcatggtcatttgtccagagatcaaaccgccaatgttcatgtccatccttgtgattaagccatagaccaacctagctctggttgtgtcaattctggagtgtgggaggaggagct

SEQ ID NO: 47500 - DNA, 396 bp, Glycine max
  unsure (1)..(396): unsure at all n locations
agcttagtactgggaacctggatgctccatcgttcaacttgtcgatgctnggcaaagggtatgcatccttgggacacgcccggttgagatcggtgtagtcagtgcacatccaccattttccattggccttttttaccatgatgacgttggcgagctaggtagagtgcctgacttctctgatgaaattgtctttgaggagctcatctacttcctatcttatggccttacatcattcttctcccatcttactcttcttttgtgatactggtttggcctanggacaaatggcgagcttgtggcatataatgctagggtagattcttggcatgttagatggctgccacgcanacaggtctacattatggtgtaagacatcaactatgcatctgtgttcat

SEQ ID NO: 47501 - DNA, 493 bp, Glycine max
  unsure (1)..(493): unsure at all n locations
tgaccgaatgtagcatacatcttctgcaacctgtgtcattcttgactccatttcattgagacacatatacacttgcaattctaaagtatcaaacctctcactaacaaaggttggaagactatcaaacctttccataatcttcgaaagaagggatgaatcttctccttcatgtccttcttcacccaagagccatcatgctcctttatataaccaaaggatgctatgactgaagcgcctataaggaatgatctcttgattggaacataaggtttagaatcaagagggatgttgaaatgttgaaggaaaagggtaataatatgaggataaggcaaaggggcattcaatcacaattccttatgcatgcgatatctaacaaggtgtgcccaatcaattggtatacctttatgaaaggcccacatgacaatgagatcttcttcagaaacctgagcaaggttngaagatctanggagtaagatgcgaacaatatggtaat

SEQ ID NO: 47502 - DNA, 430 bp, Glycine max
  unsure (1)..(430): unsure at all n locations
ctgcaagcttntgcacaaggataattgacacttaactttattagtccaaattaatcaagtaactaanaaatataagaaatacatcaaatatttattttcaattattgaaatttcagggtgtttcagagatgattataacttggttgtcattacatcattaatcaacaagactcatagcaaaaaatacacttaatcatgaaagacataaagctgaacacataagacataccaacataagacacaaaacacaacttanaataggaacataaggcttagggtggctaagggatttaatccttctcatctttaatgtgatgtttcctcaaccaagcctcaatgttctcttgcctttggctgataaggccagaanaaggaatanagcaggggaactcatgcagctntaatccactgagcggatattaattaactc

SEQ ID NO: 47503 - DNA, 466 bp, Glycine max
  unsure (1)..(466): unsure at all n locations
tgatgtgagaaagcgtggaagagtcaatcttcctacttttgtttgttgaccacagagtggtacctggagatatgtcgcggnggtcaggagaccttggggacgtcaggtggggtgctattgcccaaaaccaagcttgactaatctcgacccaacccgggcatagtcagtcagtgagaacctgtgacgtacctaagcaggcgagctcctggcagtcaaccaataaaagaacaaagcccacgaagcaaggaggcttgtgtggcggctggccagctatgtatcttgggtggtatctggaaattagcctatggtaatcgattaccattcgtgggtaatcaattacagggcttaaaaatggagacagaatgttaaatggcctctggtaatcgattgccaatggtgtgtaattgattacacagggtgatagggcactggtaatcgattaccagttgtgtgtaatcgattacac

SEQ ID NO: 47504 - DNA, 468 bp, Glycine max
  unsure (1)..(468): unsure at all n locations
agcttgcagccggagctgacccatcaactgccctatctcttttaggctggtggtccctaggctcttgaccttgacttgatagaacctccttttaagtgaaggcatttgacttgatcccatgttttactaaagtgaacaaaaatcggtgcgaatcaaaactccgacatctatcatgggtggaatggatgaatgcatgaagaaatgcatataacatagatgcaatttatgaatacgggagcccgagaaattgtctcatccttaggtacaacgtcttgnggtagcaaagtgcccgacgtatgtatttaagaaggtggcacggaccctccgttggtttgccaaagaggggatcacaacagaatccgtgtgtgatgcacatgcganaggcgcaacacgggaatgtacatagtatgacaatattcacagaatatanagcaaagggtacatgacacttatgcatggcagtgtgac

SEQ ID NO: 47505 - DNA, 444 bp, Glycine max
  unsure (1)..(444): unsure at all n locations
ttatgatgacaacttctgaaatcaagagacacgcacacactttntcctagtcgatcacttttataaatgctccccctttgtttttgaatttatgcttatcttaaaaataagttgattactcatgtgaattcttgatttaatcccatttctctccccctttggcatcaacaaaaagccaaagtgcgtatcanataaatctaatttaaacatccatataatgttcataaaaaatatcaaccaaatcatgaagcaagaagcaaaaaccatgaaggaacaatcataaacagattaacttataaaatccacatagtcaaataacatacttgttcaatcaaaccatgcanataaggaaataataaattgttcaaataccatagtaatataaccaaaatacaaggcttgaaatcaagtagaataatattaaatataattctaagatgatgg

SEQ ID NO: 47506 - DNA, 467 bp, Glycine max
  unsure (1)..(467): unsure at all n locations
agcttgtaggattatggtgtacctatcacatgtggtactaggtggcggtcgggcgatggtgcacaacaagtttttccacatccacaatgcgcgcataaacccaccatcccctgttgcccacctccagctgagctcacgtactcccacgtagcccatatcctcgtttctctcaacaccgggtccccatcaatcctcccaagctgtcacaacatccaagcaaaacaacattcacacagcacaagctatcacagccaagcaaaacagagcagaggcagaaaactctgccaaaacaccaaccaaaaatcacagctnttcccactcaaagaccccagtaacaatgtccttcgatccaattcgttaaccgttggatcgactccaaaantttactggaagtctatagtgcataagcctacattgtgaccgntgggatctactagcanacatccagaactcattctacattactc

SEQ ID NO: 47507 - DNA, 443 bp, Glycine max
  unsure (1)..(443): unsure at all n locations
gtacagcagatantagtaatgacccactaacctagaattaaaataacttaatgccattaacctagggaattaaataaaaaaacttaatggctgtgtgtaactgaaattgtggcaaccaaaagtcaccctcaacagccaacaagtcagccaccatttggtctcccaaaaggctgatgcctaggttgccaattgggcccttattacaacttaactaaacctaactaaagcccttttagttgattaacccaaaacatatttttggtcagccaactttacaaggattgggccattatttagacaaactaaacactctaaaattgagacaaagtggtgtcatttagtcctcctccatttgggccatgatataactcacaaccttggacttttctacttgaaacttgngctcgtattcaaatagtatggacagcacttgttgaagagct

SEQ ID NO: 47508 - DNA, 392 bp, Glycine max
  unsure (1)..(392): unsure at all n locations
agctnttggtacanagaagaagatgatgttcattgagattcaaggcttgtaaaggattgtaagagattgattggaaaagtattcaagattgttgaaatgcaaaacaaagccttgcctttatagactcttcatgtttggtcaagacaaccattataagagttatgacttttagaaaaacttataaaccaatttgaaaaagtcaaaaactatttgaagagttacatattttttattttatttagaaacaatcactggtaatcgattaccaaatcagtgtaatcaattacacaaagcttttatgtgaaaggatgtgactcttcacatttgaatttgaatttcaacgttcanaggcactggtaatcgattaccaaaacattgtaatcgattacagc

SEQ ID NO: 47509 - DNA, 482 bp, Glycine max
  unsure (1)..(482): unsure at all n locations
tgctggtggggcttctatggaggctgngatcttgagcttcaatgagggccttcaatggtgattattcaccatggagatgcaacggaaggcaaaggagaagaggagaggggaggcaccatccactatggaataagccaaggaagaaggagcttcaccaccaataattgccttggataagaagcttgaagaggatgctntaatggaggaaaagaaagagagaaggggggagcacgaaattgaaggaataaaagagggaaagaagtggaactttgaagtgtatctcataagactttcattcatcanagttacaacaagtgttacacatgcttctatttatagactangtagcttccttgagaagctntcttaagagaacttccttgagaagcttcttgagaaaacttccttgagaagcttctntgagaanacttccttgagaagctatgagttagctacacacacccatctataaactaagctca

SEQ ID NO: 47510 - DNA, 466 bp, Glycine max
atccttaagcacctgcggctgcagcttaaaccacttttacaacctaccttactacaggacggcgaacgaaaatataggggcatttcggtcttctaagaagaaaacgagtgggagtttccatcattgtttatttaaggaaaacgttagaagaaccaaaaaaaggtttgcgaattttgaaaggaagggtttgggagttgtttacgcatagggaaggtattaacaccccgcgcgtccgtcacaagggacgataacctttaatcgagtatgcaaaacgtgacttcaaaattatttattttccttttttttaatcaacaagggtgttgcccttgctcctatgtatccccaggtgcaatgagaaaatcaaacctatgtagttctttaaataagaatgttcgtgttatctaaaagacttattttaattgcatacaaagagtcattatggcatttggacctgaaacaacgttta

SEQ ID NO: 47511 - DNA, 485 bp, Glycine max
  unsure (1)..(485): unsure at all n locations
tgtaggattatggggtacccatcacatgtggtactaggtggcggtcgggcgatggtgcacaacaagttttccacatccacaaagcgcgcataaacccaccatcccctgttgcccacctccaactgagctcacgtactcccacgtagcccatatcctcgtttctctcaacaccgggtccccatcaatcctcccaagcttccacaacatccaagcaaaacaacattcaaacagcacaaactaccacagccaagataacagagcaaaggcagaaaactctgccaaaacaccaaccaaaatcacagcttttctcacttaaagaccccagtaagaattccttcgttccaattcgttaaccgttggatcgactntaaaattttactagaagtctctagtacttaagcctacattgtgaccgttgggatctactagcaaacatccagaactcattctgtactactctntccacagccaatcacacacaagca

SEQ ID NO: 47512 - DNA, 451 bp, Glycine max
  unsure (1)..(451): unsure at all n locations
atctctgagtcacctgcggcatgcaagcttctgttntcaattacgagcgtctccatatattacggtctctaatccgacatcggagtaaaaagttattgtcgttagaatntgctcagagcttctgttctgaattttgagagtctcgatatactacggaacacaatcggacatctcagtaaaaagttattgtcgtttgaatttgctcagagcttctgttcttaattacgagagtctcgatatattacgggattcattcggacatccaagtaaaaagttattgccgtttgaatttgctcaaagcattcgttgtcaattacgagcgtctagatatattacgggattcattcggacatccgagtaaaaagttattgtctttntattttgctcagagcttctggttttcaattcgagcatcttgatatattacaggactcaatcggacatccgagtc

SEQ ID NO: 47513 - DNA, 496 bp, Glycine max
  unsure (1)..(496): unsure at all n locations
ggcannttggaatgcgaaagccncactccatcattaggattagtacctgacatctcaaacaaacaaatcaaacgtaacaagacaattatagttgctgtttgaatacctcacccactcaagtgtatcacacaattatggcttttctctaatgaaacactcttgccttttaccactctaattccccttgagttcttaggcaattcaagagattatggccacaacaaagaacaattcaccaatatgtgtaaggtaaggctagacaaggaaaaggttaaccaagaaaaaggctaacaatgtttttaggcacaaatgaaggaaataaaattcagaatttaggaattcaagtaacaatccttcatgcaaccaatatattaccttaaagagttntttttttntttaagttcttcaagcatgaaccattcagcccaattnttttttttttttttaattttgcttatacgaaattctgcttcttttttttttttttttataacaa

SEQ ID NO: 47514 - DNA, 418 bp, Glycine max
  unsure (1)..(418): unsure at all n locations
agcttatgttctcaatttcaagcgtcttgatatattacaggactcaacctgacattcgacttaaaagttaatgtcgtttgaatttgctacgagcttccgttttcaattacgagcgtctagatatattactggactcaatcagacatccgngtaaaaagttattgtcgttagaatttgctcagagctttcgtcttcaattacgagcgtcttgatatattacgggtttcatttggacatccgacttataagttatcgtggtttgcatttggtcagagcttctgttctatatttcgagcgtgtcgatatactacgggtcacaatcggacatccgaacaaaaagttattgtcctttgaatatgctcagagctnttgctatcaattctgagtgtctggatatattactgcacataatcgaaca

SEQ ID NO: 47515 - DNA, 493 bp, Glycine max
  unsure (1)..(493): unsure at all n locations
ctgagcntattcaagcgacaataaatgtttactcggatctccgattgtgtcccataatatatcgagacgctcgaaattganaacagaagctctgagcaaattcaaacgacattaacttttttctcggatgtacgattgtgtcccttagtatatctaggcgctcgcaattgaaaacggaagctcgtagcaaattcaaatgacaataacttttaactcggatgtctgattgagtcctgtaatatatcgagacactcgaaattgaaaacagaagctctgaggaaattcaaacgacaataactttttactcggatgttcgattgtgtcccgtagtatatcgggacgctcgcaaatgaaaacgtaaggtctgagtaaagtcaaacgacgaataacttttactcggatgtccgattgagtcccgtaatgtatcgagatgctccaaattganaatagtaggtcctagcaaattcaaaccataantaacttttactcggat

SEQ ID NO: 47516 - DNA, 429 bp, Glycine max
  unsure (1)..(429): unsure at all n locations
agatctctgagtcacctgaggctgcagcttaaggatgaggactacccttggttcaatatcatggcttactntaaggccacgggacaaccaccagaaggtatgaaatttcacaagagaatnaggttcttccaagaagccaccaagtatgtttgggatgatgttattctttttcgcattgcctatatattttcgtattggttctaacaatttgttaattgatgtgtaacaaagggagaagtcaccatatagaggccacttcaacaaagagagaacaactacaaagatccttcgagcttgattntattggcctacattcttcaaagatgctcataaccatgcatgatcatgcgatagctgtcaaagaatcaacgacatatctagacgacatgaaatgtcatcacataacatgcaagaggcataagtctttga

SEQ ID NO: 47517 - DNA, 504 bp, Glycine max
  unsure (1)..(504): unsure at all n locations
tcggaagaaagtgatgaggtacaagccctaaaggcaaagcttgaaagagcccgggtagtcaaagagaagttcaagtccatagccatcaaagtctgaagagagtatgatgaactaagggacgtcaatatggccaccgatgaagccttggaatgagaaaccaagaaggcccgataggaagaacacgaccaaaacaagttttgaagggctttatagggcagcaatagtgagctcaggctccgaagaggtgaaaggaatcatcacgggtcaaaggcatgatcttgaagaacgagctaaaggcttgccttangtcgaaaagaaatttgtcccaacagttaagcaagactgaagggaatatgtgggccatcatcgatgagtgcaaagagaagctaaatctagcggcgactcacgagcaaaggctagaggatgagtacgccangatatcagcagaaagggaagcangggaaagggtaattgattcattggaccaagaggcaacaatgtgga

SEQ ID NO: 47518 - DNA, 390 bp, Glycine max
  unsure (1)..(390): unsure at all n locations
agcttgtagaatggctagacatgatacatgtcatggtttggtttggttcaaggataaaagggatgccccacattatttccatgacacatatgcaaaaatgatgatttggaaattttatgcaaaactggtcatgcatgcacctatgtggacgctcaagtgtcaaatttttatggtcatctgatgctagggctcaagattcatttcctctatttaaatcaacccaatgtttccaaaatatgttcttttatcaaattgtgcattcatccgagtccatttcgggcgttcgggaaaattttcacagcattcacccttcaggtgtacacacacattttncaaaaattagtgaattttttcacagaagagttggaaatcatctcttttcaaaagcgt

SEQ ID NO: 47519 - DNA, 497 bp, Glycine max
  unsure (1)..(497): unsure at all n locations
tccatcaagtggtaatcagagcacaagagaactacacgccctctccttcaaaggactacacgtcctcgccatcagagggctacatgccatcacctttagaggactgcatgtcctcggcatcagaggactacatgtcctcactgtcaaagagttgcacgccctcaccttcagagggctacatgtcctaacctccagagggctacacaccctcaccttcgcaggactacacgtcttcgccatctgcgggctgcacctcctcgccatcagaggacaggacgtcctcgccatcgaagctgcacgtcgtcgccatcagaggctgcacaccctttccatcagaggctacacgtcctcgccatcagaaggctacacgccctcgcctttagaggactacacgtcctcgcctttagaggactacacgtnctcgcctttagaggactacacgtcgtcgccatcagaagcatgatcacagattcacctncactccttatgttcccatg

SEQ ID NO: 47520 - DNA, 417 bp, Glycine max
  unsure (1)..(417): unsure at all n locations
agcttgcttcttcagaaattcgtaggccgctttttntgttatccttgaataaacgatcatggtgatttcgcgcgttttccttccttggaaaatgcaccgtgagcctcgcgccgccctcctgttgaagggtaggttgcgacaaggtgtacacacattaacagaaagaataactagaagcagataatgtcaaatcacaacagatataacataatatgccaaaagcaataatgtcaaatcataatggaaataacaaaataagccaaaagcaataaagtcgaaagaagacaaatcaaaagtttagtgatccggccgtatagccctatctcctcacaggaggaagtctatcaggtcagccatgtccctgcgggcccttcctgcgcctcataaacgggccaatcctcaggccatgctactaca

SEQ ID NO: 47521 - DNA, 499 bp, Glycine max
  unsure (1)..(499): unsure at all n locations
tcctcggggccatttcctgcgagaacaaacatttagaagttatttntacaagataatgcttatcttaacgcagaaaatgtcatgctaatctctctgattttagaacgaactgacccctcacccagaaacagctgaaacacgtatgtgtggaatatcctactatttatatcaacatagaggtcatccaacacattttaattgtcatacatatatgcattngataagaacatacattctcacacccaaggcattgcgtcaaaactcacacttaatttatatcctaaacatttgctatttacaaactacctacatatgtttaaaatatatatcatacaaatttttatggtttcactcacatttattcatattggcaagctatntacattatgcacacatttgcattcaaaagggaatttcgtgctatcatacattcanttangaagacaatcattcacactttgctaggaatntcatgctccttatatttacctatgtatac

SEQ ID NO: 47522 - DNA, 363 bp, Glycine max
agctagcttctacattttgtaagggtatatctgtaactgcttgcccttcagtggcatatctgaggtgaggcttgaaattggctagattgcgatgggatatttcatgtgtctccctcatgggttgagagacatatgcatgatcagtttgaggttgttggctctcaatgagtataggagtggagttattgacattctcattgggtggagtatagttcgaatgcaaaccatatggcgagaaaacatgtttgttctgtgacttgcacaaaatgagggccgcccgtatctgaggttggacgatttattaggttgaggccatattgacctccattatcttcttcatgctaatcatggcctccatcattg

SEQ ID NO: 47523 - DNA, 497 bp, Glycine max
  unsure (1)..(497): unsure at all n locations
tggcagacctgcaattcttacaccagtcgaggttatcactctcaacactagacaacatgtgtccatgcttgtgggctcaaaacactcatcaccctcctacttatcattatcatgaccgatgacatcaaacaatctccttcgacactaaacaacctctttcgtgtgcaagctggctcagagcttagagggcttatgtactctccagagtccataaagtacatgtgccatgctacgtggcactccattaaacacatcaactctccatgtcagccttgacatatgagcatggacaccgaacccttagcagctagactccccaaccaacaagttatctttaacctcttattgtttaaatatattgttatccctttatctcttggcaggtattcaattatctataaagttcacattatctgtaaggtacaatatctactacgctntatctctaacctatatattatctctaatggtacctactagtcagccagtattatcta

SEQ ID NO: 47524 - DNA, 318 bp, Glycine max
aaatactaggtgtttctcatcgacaaacatggtacaatgtctttatagccacccaacatcggcttcataccataccacacaacacattttcattcctatgttcttaaaaaaccactaggtggtctgatctacaaaaatcgaaaaactcggattgtaccctataaacatgaagtacacaaaagttgagcctaacaagttgtaaacagactccactcaaaaaacaaggcccaaaaaaaaaagaaccaccgaagtactgtaatgctccgatcacagcttcacacaaacctaccgattgaaagaaaaaaatagaccttccaa

SEQ ID NO: 47525 - DNA, 429 bp, Glycine max
  unsure (1)..(429): unsure at all n locations
agctagttgngatcttaccttcctgcgtgccattctcgtccaaaacgcgggtgattnggttttctgtttattttccgctctattattaggggaatattccttcaaaaggttagtcccaatccaatgagaccatattccaaaaatgggagactaataaaaccaaattggtaacaagcaaaccaagatacgccgtccacgttataaattacagttatctatttacggtaaataaattacatagcacgtttttttcaattttcagagaactacaagagaaatctatatataatgtgtaatatacaaacttgattntttttccttaaacaatggaggagagagcagtgctgccattagttgctgcatttgcaaaccatacttctggattggtctctaactctatgacttctgtatcacaattcttatacaaca

SEQ ID NO: 47526 - DNA, 478 bp, Glycine max
  unsure (1)..(478): unsure at all n locations
tcctattgcaagaacgggacgganaatccggagttacctctcatatgccagagaaatgagcaggaacggtgaatggatgttcagatttatcgtcagcaaaactaggatgtgtaggatcaatgccagtgtcaacaaacccaatggtgattccttctccagcagtttcaaacccacctgcttgcgaccaagctccctgtggcagacccaaaaattgtggagtgtgtgtggttgcagtcctcacagaaaaatccaaaaccacattggacacttctcttctccttgacagttattctgccttcaatatttcgaaaatcaagaacttgttggttgaagaagtttatcaaaacagacacaaacaccaaactacgcacaaatggaaacaactcaaacaatgaagcacgtgtttcttcacagaataaggacataatcaagatctcgaatatngaanagtaaaaccatactatacctgttgttgggt

SEQ ID NO: 47527 - DNA, 688 bp, Glycine max
  unsure (1)..(688): unsure at all n locations
agttttgatgataacaaagtgtctttcttgcccttttgcgggcgagcgaggcgaggctcacgggtgcgttttccaaaggaggaaaattggtggagtcgccaccaacgtttatttgtggaaaacgtctgaaaaaccaaaggaaaccggtcaaaacgaaaattctaagttcgggagttgtatttacgtttgaggaaggtattagcacctctcacgtttgtctcaaaggacaacaacctattttttagaattgtgaaattgtgttatcttaccttttatttctattttttttatttttgaggtcgacaaaagcggggctcttgctcctacgtaccctccattgaagaggaaatcagacctacgtagttcttttttaagggtgaatcaagcgattctttttactttgaaagtgatcattttaacgcgttggaccttaaaaacgatccatttacttggtaagaaaaactgagatattgaactttcaaatcctttttaatgaactttttttgtggacgaacctgactntgcgaggttgatttagccttaatttcactttagttatttagcacttcaattaagaacgagaaatccccaagagaaacgtccgattgattcttccgctttatttactaaaaggaatatttggataatatattataattcaccctttttgatttcaacggggttacgg

SEQ ID NO: 47528 - DNA, 538 bp, Glycine max
agcttgagaaagtccttctgattctgtttatacatttttgacttgataacatgagatgaaatacagagattggacctcctgttagttgttatcaatgaatagcttaaacacttgtgcttgagtgaaacagtagccatgagactgtggtttgagctactttccttgaatctgtcttatgattaacctcatctaattgtattgttcacattttgttctcctttttgtctagttgcatattctgtgaaaacaagggataggtacacattgcttcatctttctcatcatgcaatcaatgaattttgatgcatacacccctatacataatcactgcatgtgttaccacttgaggacaagtgagttgttatcttttgctcgaggacaagcaaaactgtaaatttgggggagttgttagtcgatgaataccactaacttttgtgtataaaacatgtggttgttttgtaatactaaaagtactttttgttaaatattggaaatagataatgtatacttttattttggggcattaataatcaaattc

SEQ ID NO: 47529 - DNA, 475 bp, Glycine max
acttaaactccttcatctgcacaaggcttataatatttgaagagtatccatgtggtaccttcacctgacgaaaacactgacaaaaacatatcttcttcttcttggacagagtatggctagctgagggcaagtaaattatctttccatcagaccttgggagcaactgtgctcttatacccatatcaactatatattgacgggtttttaagccatccttcgtgatgccttgaatgttaaagagcgtaccagacacactgacacaaacatttttgtccacatgcataacatcaatacaatgtctaacgtcatgatctcacctatacggaagatcaaagaaaatggacctcttctacatatgcaactctgactttgatccttcttgtgggcgttccaacaacaatgttcatgagttgaagccgctgatatacctgttcacaatcaacgggatccgcgcaataaatgcttttgacttcat

SEQ ID NO: 47530 - DNA, 424 bp, Glycine max
gccttttaagggagttttctcaagaaagcttcttatggaagctacctagcctataaatagaagcatctgtacacttgttgtaactttgatgaatgagagttttgtgagacatacttcaaaattccacttctctccctcttttattccttcaatttcgagctcccccctctctctttctctccctctttcttttcctccattgaagcatccttccaagcttcttatccaaggcttatcttggtggcgaagctccttcttccatggcttattccctagtggatggcgcctcttctcacctcttctcctttgtcttccgctgcatctccatggtggaaaatcaccattaaaggacctcattgaagctcaaagatccaacccttcatagaagccccacaagcaaccttccatcacaaaagagcaccac

SEQ ID NO: 47531 - DNA, 397 bp, Glycine max
tgattgtcatatggtgcagtcacagtcatgttcataatcatcaccttgaggagaagcaccgaggcgaataaatggtacaatcccactgagtaattatgccttgaagcataatgaaccataggagtccaaattgaagtactgagaagacattttctggttctccttcatcacactaacatcaggaaattcaattctagaatactcgactgggtctgacatatcttgtgaaacttttggatcaagcagaacaacttctgaagatatggatgaatgactaactgattgcgatatgggattcacagtggaactgattgagaatgatgtgtgcgatgaaagtgttaatttgacagttacagcaggacaatggagaagatcactggaggataggctataatct

SEQ ID NO: 47532 - DNA, 478 bp, Glycine max
cctgcaagcttataagaacaaaattgcctaaatcattttcaaatatgcatgtgaattaagaagcatcaacaagaatcaagccaaggctattgtgcaagcaatcaatggggcaaaacaccccaaaagattatgatgattgatggctcaaattctcacaaaggtaaacttatcacttccacattgagctttcaaaactatcatgacatgtagaggaaaaacaaggatttcaaatcacaaaatgttgagagacttttattttcaaaacaattacccattacttgaacatattctataattcaaagaaaaacatgcaaagttgtacatgcaaataaaattgacctaaaatattatactagaaacccaacaaaactaacaaaattaacaaatttaacacaactaacaaaattaacaaaactaacataactagcaaaccaaaaccaaagaacacttcccccccacccatacttaaacattacat

SEQ ID NO: 47533 - DNA, 579 bp, Glycine max
  unsure (1)..(579): unsure at all n locations
tatattaaactcaagctccgagaattgcccaaactccattccaaaatctgatttcaggcttatataggtagctttgtttgtgctagcatgcttaacgcgactatggaccgcttagtgcgcattagtggatttcggattaccgcgtgcttttctcgctcagcggatggactgaagcagtgcgcttagcgggatgacccttcactcagcgcaaatgcacagctcatccttcttccagattcttcctcgcactcagccgaggagtgttgcgctcagcggatggctcgctaagctaaaagattggcttagcgagcggatgaaaatcagcacttcacaaacttgcctaattaacttgaaattgagaggaaatggttattaaacgcacaaaatgggagtactaagtatttattacctatctttaacaaaaagtaattagaacactacaaaataaccatanattggaggagtttgatacaatttacacaggttttatacacaaaagttagtcgtattcatcgactaacattagtagtcgggttctttctgagtgaaagtatctcgtataagacgaaccatgatatg

SEQ ID NO: 47534 - DNA, 951 bp, Glycine max
  unsure (1)..(951): unsure at all n locations
cgaactaattcctcattttttcccttccacntttcttactctnttccacctcacnncaccctccctccccncagcagannnttgtgacgtcttcaccgccgacccctaaaacgacctgccgcatgccagcttgaagtgaaggaanggggaaagggtgatatgttcctatctttatttcggtgacccccagagaggcaccgtggagaaatgtcgcgggggacacgaaaccttggcgacggcaggaggggggctattgcccagaaccaagccggaccaatccctgatccaacccgggccatagtcaggcagtgagaacctgtgatgtacccaaacaggcgagctcctcggcagtcgacctgatgaaaagaacaacagaccacacaagcaatggacggtttggcgtgtgtggcatggccagctaatggatccttgagaaatatttcggaactatggcctctagggaatccaattaccagcgggtgggtaacccgaatacaagcgctcaaaaaatgaaagacagggaaattaaagaaagcgctcttgggaaaccgactaaccaaatgatggtgcaaatccgattaacccatgtcctagaatacgggaatccaggagcaggggggaagggctttttggttgtcaaccacccccgcatatttattatcgaataataccattcaagcacccatggcgtggcggcttgacctatgtggacgcggtattctctatcccggagatatttctaaccgagggtattttacctaaccacagggggggggaaaaaaaaaagacccaccttcttaaagaacacctctgaaaaagctttctcaaaaaacacccaggaaactggtgggaaaactccctctattgaaacctttgggagagaaccctctattcgaacctttaaaaaaaacgcacctaattgcgcgcgttaaaaactctgccacccctccg

SEQ ID NO: 47535 - DNA, 597 bp, Glycine max
  unsure (1)..(597): unsure at all n locations
tctccctctttttcctataaatagggggatgagggaagaacaaattcgttcaaccctcctggtatctgaggatcacttgaaattagtgagaaaaatcgtttccgtgaaaaagatccaaaccgaggcggttccataactcgtctgagacgtttctgtgggtgatttcgtgatgattttccgccatccttcgttcgttcttcggtcttcatccgataagttcccgaaatcgaacttttcaattcattttatgtacccttggtggtccccatttgtttcgcgtacttttaatttcatttcatttactttccgtacccccttttgacgtgctttagtaatttatttatgtcattttctcgccaaatcaaaaaataaaataaatttccaccgatcatttgaattggtaaatttgttaatttttgttaaaatgaaatctgaccgttcggtcatgccgtaaccacgttggaaaccaaaaagaggtganataaataatataattatcaaacaatatctcttatgtaaatgaaacaaaaaatcaatcggacgttttctctttgggattttttctttcttaattgaattgactaataactaaagtga

SEQ ID NO: 47536 - DNA, 359 bp, Glycine max
agcttctcaaggaagctacctagtctatatttagaagcctgtgtaacacttgttgtaactttgatgaatgagagtcttgtgagacatacttcaaagttccacttctctccctcttttattccttcaattgcgggctcccccctctctctttctctccctctttcttttcctccattgaagcatcctttcaagcttcttatccaaagctcattttggtggtgaagcttctttcttccatggcttattccctaaaggaaggcgccctcctttcacctcttttcctttgtcttccgctgcatctccatggtggaaaaccactattaaaggacctctttgaagcctcaaagatccaacctcca

SEQ ID NO: 47537 - DNA, 487 bp, Glycine max
ttggacagggcgaaagcctagtcttaagaacttagtagttactttattggatactctgaacactctaggggctataatttttatgatcccacacttaagactatatttaagatgggaaccacacaattttttgaagatgttgagtttggggggaataaggttagaaacattatttttaggaagaattggtttgaattcctaaaccaattcatattactgcttctgacaatgcatagattattgtcataccctaatttcattcgggaactattgcttgatggcatgcaacctttgattgaccgcttcaaggtacttggcaccctttgttacgcaatctgtgaaattctgtaacgtgacgaaaatcaaaaggaagtattgttacgcaatccgtgagttttcataactcttcgaaagctaaaaaaggagtaattatatgatccgtaaggttatgtaacctttcaaatagtaattttcaaatctgggccta

SEQ ID NO: 47538 - DNA, 494 bp, Glycine max
agctttatgtacaaggggaagttgtcattaaacaccccaaacacggtagcatcccacataacctggaatgacttaagaaaaaactgtgggatggtcaatgccatcagatataggggatcatcggcatcatgatccggcttatctacaggtttcgctggtcccacataacctggaatggcttaagaaaaaactgtgggatggtcaatgtcatcagatataggggatcatcgacatcatgatccagcctatctacaagtttcgctgcttatccaacacaggtaattaacataatttaattatagtgaacaatttaattgaaaaaaaatcatttaatgatagtgaaatacttgttctgataaacgcttctcaagatatgtcggccaaacaacaaaggtgttaagtgtctgcccttctaactgaacctctttaatgtgtacaagaataggaacatatgcatctctaacttcctcaacaccaaccttgacttgatcatg

SEQ ID NO: 47539 - DNA, 564 bp, Glycine max
agcttaacaaattgactagaaaaagttattgatttaatgacaccccaaagtgaatgctagctttcctgactttttcctataatataaaggtcaaatgtttaacactgtatctcgaccgtatataaatgcggcacgaaatgatatgtaaatacacttggatgaaaaacaacttcataaaataacatcctcctaatgatgtcactgtattaccgtaatattttattcaaaacataaaatagatatgctgaatgattcttaattttgtaagtcaattaaatattaacttaactacaaatccgataaactcgtccaaaattaaaaagaataagataaacgtgattaaagaagatcacaataatcttttaatatttaatttatcggaaaaaaaaaagttttttaacagagaagtttattttatttactttgcaattaaagaaataattatggagtaattaagtgcacttttacagtttagtcattcaatagaaaatgaataaaaagatttttaattgtaataaaaaagggaattgaatacccataatgttcggagcttgatatgcacta

SEQ ID NO: 47540 - DNA, 373 bp, Glycine max
  unsure (1)..(373): unsure at all n locations
ntgcttctacatattctacatgatcagagaaggattacaaacattccatgtaaagtatacaaaatttatacttcttatttgaattatagcttctatttagaactcacaaattaaatttattatttttgttcatagatttagagctggcaattgaagaatttagattgcagagatcatacaatccaacaaaaaaatcattaagggatattcttgcatgctttttccagacatgtataatcttcaaagatcaaagttgaaaaaagcccacacaaggcctttattattagcctaatggcacacaaaattggagggaaattggaatttcacttgattttgaaatggaatttgaggaatcaaattttggagccaaaat

SEQ ID NO: 47541 - DNA, 1220 bp, Glycine max
  unsure (1)..(1220): unsure at all n locations
atcgagaatcatagttcacagntaccntacctccncacncgcaanactaccctccgtgacngtaactcagcatcntnacaccaatcactcacnnaccccactccccagtcagagccncntttgtagaactgctcttccaatcgccacgagcacnccantaanagtnacatactgggacgcgctggccagctctatagtgccgtctagcgnagaccgtacacttatttatctctgtaagcaccccccctctacacgcacacagcaagagcgtactctataatatgtgctccgaaggccttcgtgtcgacagcgacttcgatatatagaagcagttaatcccggcgcccctctacaggcctcgaagaggccgcacggtgcaacacttactttgcacagaaggcgcgagcatcaaacaattgcgctctcgtgacaaaaagaaataacacatgatatcattcgcggtatacctcggtgactagtagtgataatctctcggtcgtcaccttctgatctatagatatctggatcgcgacgacagtccttactgtgtgattaacaacacaacatatactcctaatcataatcctcgtcggcgctaatgccactangtacgttgtcacaaatantacattctcgcgcgtctaacacggtcgngtatctcgacgcgattccactaataccgcccactctgagagagtgtattatacaatactattaagcaactcgaactcgacagtgtgcttacgaacagtattagtaccgcgtactgttatcacacatgtgagtgataccagaccacacgcgaacccacttccagaaatcattacaaccgctcgaatggctcttttcaacggcctcaagttggggagacaagcgtaccacagaaaccctactctagatcccaacgcttgtaattatataaggggcctgcggccttcctaatacaacgacagcaaatcgagttcctcctctcgcctcgcattggctgatttcgaacaaacattaaacccggcccgtcttaagtgggaaagacctaaaaggcacaaaacacaccgtgacctcggtgttctatgccacaaacaacaatgacgtagacgtgtgccccgcctatctcctacaatagaatgaggcgccgccttctaaagtcccgtcgacgtaaaatcacctattaaacagtgcggggtctaactctcgcgttgcgcaccagtcactcatatccg

SEQ ID NO: 47542 - DNA, 512 bp, Glycine max
  unsure (1)..(512): unsure at all n locations
tggatattntaaaaaatatatatgaattgttatccataatattatccattggttaattaataactatgtttattcaaattatttatttagagaatattaataattagtttaatattggaaggcttaaagtaaagactttgattccttgagttggccccatgagttgggctagttaaaagctaataataaagctatgttagaatcctaataataagtaaataatgtacaaaacttaaaatattgatatgaaccaacaagaatttaagtattaaacttaaaatagatcaggtatgttaaattcacggtaaatagcaggagcatgcgatagaggtgctattgtgattgataacaatgactacaataggaaccacaaatatacctcatgacaaccaggatcaatgcctatcaagaccaaccattgccagtactattttatatgctccatttcacttgtaaattatgtttaacagttccaccacgtgcgaaagctagataacccaaaagccttatgc

SEQ ID NO: 47543 - DNA, 562 bp, Glycine max
  unsure (1)..(562): unsure at all n locations
agctttggtagcaggtttacttggtttatgtcaaatggatctgtaaagagtagacttgacaggtgtttggtttcataacagtggctatctaattggcctgattcttcacaacatgtaatccaaagggatttttcagaccagtgcccaattattttgaaaacaaatatggtggactggggtgctaagccctttagggtgataagaacaacatatttgactgtcatttgcagacttttccaagagtatcaaacacaaacagtatgaaagaaagatgggaacaacaaatatgcacagcaattcctagcatctggttataatgtacgcaattgacatatttgactgttttttgcagacttttcaaccaaacttcaaaatagttttatctactgcctaaaattgatcaaaacctaaacaatttataactagacaaatatttggcaggtctaaaagcattcttcccacgaaccanattgaaaagaacaaaattatgttacacaacagtttgctccataccaagaagcaattataaaataggaaagctaacaacataccttcacatttt

SEQ ID NO: 47544 - DNA, 252 bp, Glycine max
gtaggtccgatcgcgaggaaatcatttcaactcaaaccagatctctgaagcaaaataaacagacttctatctctttgccatttttaattacttcatctataatatctgcatatatcatttgctttacttagtctatgcaaatatgcatgcattggccacaaaagaagaagaatcacaatgagaagtttagaagattacaatgagtgccaataaatcacaatccacgtaaaagctgtgtacgataatacaact

SEQ ID NO: 47545 - DNA, 820 bp, Glycine max
  unsure (1)..(820): unsure at all n locations
cgcagtgacnnatgttgactgcgtagcatctcgcgaacctcgagatacgacccacgctgaccggcaggctatgctttctcagactggtgcaaagagagattttatattctctcgcatgataaccttcgcctcgaacaagaaatgtgaagatcaacgtgctgattatgctgatcacatggtgattcgccctctataaatgcagcattcaaacgaatacgcgacggcttaacctgcgaatcatgcgtcaccttctaattgtaaccgtgaaaacctacaacggcgaaaaggtctacgtccagacagattatattttatccatactgtgccgcatcctttttaactgttaccgtgaagaggtaatgctctaatgccacagctacagccaacggtgacagaaaaatgccagtaacaatcattaaccgccttttacctgctgattttatatgtgcccgggaggtgatatgccccatatgttgctgacatgaaccctgtcccacctggaaccacccatcttaatatttgctacgggaaaacggacatacactggtttacttcaatggttgccattcttgaataaaaaagaaacaaaaggcgatttttctcttgcttacacacagacatttgatgaggagcactaccctccagggctgtttaaaaaccacacgggataccctacacacaaaatagttggccgcgcgccctccgggacaaacaatattttttgttgcttaccatgatcaagggaacatggtttcatacgccttatacagcccagcaaacccagtggcccgattatgggactcatccttctcttgtctcg

SEQ ID NO: 47546 - DNA, 302 bp, Glycine max
ctatattatactcaagcttgagggttaatctattaccatctacagaggtttcttattttattcatcctttttactatactttcacatataaacttcgtattgtatccaaattagacccattgtcatatattaaaaatttaattgctatttaaaaagtataactttatgcttacacgttcgatgctacaatgttgtttccagacctaaagcctttaaaccctaaaaattagcattttcactacatgatgactgttggaggtgccacactcaaactattattgtataatacgatctagaataag

SEQ ID NO: 47547 - DNA, 283 bp, Glycine max
tagcgttattaagagggttgttattatctctcttgtacactacccccaaaatagggcacaggatcgttcatggcaaaacgttatgcgaagatgcctactaagaaactagaagatcctcctgcttatgaacgctgatcagggcttttaccgtagcaccttcctgtagcttttctctagatgcttcattaagaggtgttctctacaaactccctcatggcttatttgataagctttcccaagaagcttttttgagaaaccaaatccttatttatccacccctcta

SEQ ID NO: 47548 - DNA, 525 bp, Glycine max
actaagcttgcactcttttgcatggaatataaacctgccaccacctcccgtgagccgagttactcgcgaaaacatggtgatcctgtatgtcccagttacaatcatagtccctataacacatccacggcttcaaacccaagtagtgtatggtgtacacgtcatcaaggagctcgtgcttattcccataaccaatactacgaaaagtcgtgagctgattcaccttggccggcaaacggtgccaccacgtgaagatctcgttcagaaaaccctggtcgccgccgttgtaagaacgcaccttggaagtcatgttcatcattctctggaacatgcattgcgacggctcgattaccatcgaccccgagttgaataacgctttctcgttaggtgctgcggataattgacggagcatgaataaatggtcgatgcttctgagaagtaagaggttggagtcaataatgaagatgatcgattctgtcgtacgttgtgagctgccacattcgtagcatgctggttgtatgcaccctt

SEQ ID NO: 47549 - DNA, 553 bp, Glycine max
agctttaattcacaaacgtaacaaaagaatcactgaagcctgcattataacttgcattaacaacgtcaaagacaagtgcttttatgatgatcacaagttattcgcctctatattgcaacaaaagaatgaatacacgatggtttaatctgtgaatcatgcttcagctacaaattgtatccatgaaaacctacaatgccaaaaagctataccttcattctgtatatatttcatccatactgtccagtttcctcttaaactgatacagtgaagaggtaaagctttagtaccacagctagagccagctgcaacagaaaaatgccagcaacaatcaagaaccacctttcacctgctgatttgatatgtgcccggaggttcagtgccacaaatgttgctgacatgaaccctgccacacctgcaaccacccatctaaatatattcagtggcacaacggacatacactgcatcactcaaagggttcaaattttgagaatacaataaaaagcaaatgtcaaatttcataccttgcttaaatagaagatagaaagatgaagag

SEQ ID NO: 47550 - DNA, 511 bp, Glycine max
tgagatgaggaagtgttgaagggtgaaacttcctgcttttattgttgaccacatagtggtacctggagatatgtcgcgggggtcaagagaccttggggacatcaagtggggtgctattgcccaaaaccaagcttgaccaatcccgacccaccccgggcatagtcggtcagtgagaacctgtgatgtacctaaacaggcgagctcctggcagtcaacagataaaaggaacaaagaccacaaagcaaagaggcttgtggtggctggccagctgtgaactttgattgatatgtgggttgtggcctctggtaatcgattaccaagggtgggtaatcgattacaaggcttaaaattgaagacagaaggctaagatggtctctggtaatcgattaccacggggtgtaatcgattaccaggcttgaaaacgaggtcaggaagctaatgaagcctctggtaatcgattaccaaggggtgtaatcgattaccaggcgtaaaaagggaactgggagatggt

SEQ ID NO: 47551 - DNA, 410 bp, Glycine max
agctttttatttttagtagatgaagatgaatctgtggccacctcatggactcctctaaggataatagcatcatttcttgcactgaattgttgggagttggaagccatcttctcaatcaaattcctagcttcagcaggggtcatatcaccaagagctccaccattggcagcatcaatcatattcctatccatgttgttaagtccctcatagaaatattgaagaaggagttgctcagaaatctggtggttaggatagcttgcacacaatttcttgaatctttcctagtactcatacaagctttctccactaagttgcctgatgcctgaaatgtcttttctgatggcagtggtcctagatgcagggaagattttctccaagaacaccctcttaaggtcatcccagctgaaaac

SEQ ID NO: 47552 - DNA, 153 bp, Glycine max
ttgaaaattttgggagttgtgagtgtaactgacgttacactctcttaagcagtttttatgcttctcgctaagcgagcaagtacgctaagccgacattttgaaattcaaactcagggttatatatatatatatatattattttgaaacaaaaaa

SEQ ID NO: 47553 - DNA, 491 bp, Glycine max
  unsure (1)..(491): unsure at all n locations
tccctcttgtaagactatgcctagactaaacaacattattgtaacaacataattaaaaccaaaacttaatccgcagatccctcttataagactaagtttcaatcctgcttcaatcaagttgtaaggcaatagtacatttcccaatgctaaagtcacctaactatgcacacaaatggatgatcagaccaaaagcatacaaacattaagcattgaaggaagcattgaacacaaacaacataatcaattagatattaggtaattacatcaactgttcattagaaatccccaactagggtgtttagccagccattacaagagaaaccctaacaataataagcttacaaaacctaggtatctctgcaaaagctgctcatcttgatgcctccagagctctnntccccaaataggcactatggtgtctgtggaattttgtgccctgtgcattgtaccctaattctgcacaaaacaggctttacatatgctctgaattc

SEQ ID NO: 47554 - DNA, 561 bp, Glycine max
  unsure (1)..(561): unsure at all n locations
tcttggttggaaagaataaggaacctatcaacattttacagtatgctgatgatactgttttttgtggagaggctgtgtgggacaacattcatgttattaaagccttattaaaaagatatgaattagtttctggtttaaagattaattttgctaaaagtcagtttgggattattggtggtggtgtcaattgggctttggaagcagctaataccctgcactgccgacagctggagtatcctttcctctatttaggcatacctattggggctaatccctcaagccagctggtgtgggagcctatcatcactaaattcaagtcaaaattagccaaatgggctcagaaaaatatatccatggctgggaagaatactctgataaattctgtcctcaatgccctccccaattatctcctctccttctttaaaatacctcaaaaggttgtcaaaaaactgatatcccttcaaaggaanttttctgtgggtggagacaatgatcataaaaaaatcctttggtgaaatgggctgatatttgtttgcctaagactgatgggggactggggat

SEQ ID NO: 47555 - DNA, 515 bp, Glycine max
agctccatttctgtgtatccatagctagcataaagtattttcaatgtgatacaatagtgcgttcactgtatatctatattgagaccaaatagaagaataacaatcacgaagattctaataggaaccagctaaatgaaaagtatatagacaaaaaggcattctccttcaagctaatcggcatcagatctttagctacaaatctaagaattatcatctaaacgggatgctcttttaaaatgttgagaagttatgaattttgacaactttcgaaacactgtaatgtgcacatcattaattcaccagaaacattattttattttaatatacttttcaataaacattactattattgtgtgaatttacctttgctcacatcattaattaataaaaagttgcataaaaaattatcagccacaacaacaataataatttatcagcagctaaaccaaacttaattattccacaatttggctcaacaacaattttagttgaaagtcaagacaatgaaacctaaa

SEQ ID NO: 47556 - DNA, 516 bp, Glycine max
tctacattcaatttcgagcttttcgatatattacgggactcaatctgacattcgagtaaaaagttattgtagtttgaatttgctcagggcttcggtattccatttcgagcgtctcgatatattacgggactcaatcggacatccgagtaaaaagttattgttgtttgaatttgctcagagcttcggtattccatttcgagcatctcgatatattacgggactcaatcagacatccgagtaaaaagttattgtagtttgaatttgctcagggcttcggtattccatttcgagcgtctcgatgtattacgggactcaatcagacatccgagtaaaaagttattgtcgtttgaatttgctcagagcttctacattcaatttcgagcttctcgatatattacgggactcaatcagacatccgagtaaaaagttattgtcgtttgaatttgctcagagcttcagaaatccatttagagcgtctcgatatattacaggactcaatcagacatccgagttaaa

SEQ ID NO: 47557 - DNA, 188 bp, Glycine max
caaaaactttttactcggatgtctgattgaactccgtaatatatccaaaagctccaatgtggaatgttgaaactctgagcatatttcaacgacaataactttgtactcggatgtctgattgagtcccgcaatatatccagatgctcgaaatggaataccgaagctcggagcaaaatcaaacaacaata

SEQ ID NO: 47558 - DNA, 483 bp, Glycine max
  unsure (1)..(483): unsure at all n locations
tgcanaaagtgaaaatgaagcctcagctgatggaaccttgttcatacaaattgttggtagnctaaaattcatctgccacaacaaaccagagatcacattcaatgttggactggtgagcagatttatgggtgaccctaagcaatcacacttgctggatgctaaaagagtcatgaggtatctaaaggggacattgggatatggaatcattttccctcatcaaaccaaagaggatgataatctacatcttgtagcctattcagactctgattggtgtggagatttggttgataggaaaagcactgtgggacaagtattcctactgtctggctctcccatatcctggaactcaaagaagcaactagtggtggcactatcaacttgtgaggaagaatatattgcagcttgttcagctccttgccaagcactgtggctttcatccttgattaatgaattgaaagtatcttcgaatgaagttgttgaact

SEQ ID NO: 47559 - DNA, 367 bp, Glycine max
tgctttatgggaagagaggggtctatttttattcccagctgcaggaacacggtggagagatattcgaaagagatgggatattatacgactgtgccttctctgcttgtgaccaagggctaggactgaatgagctatagtatgaagaccaacttcatttttagtcaataatgacatttataaaacaactatactaattggcggtgttaatttggggcagctattgcgtcatgcaactgatcggtgtcccatataaccctttgcatctgtactgtaaaaaagggagagctggcgatgatccacatgcagaggagcaatgagaagagtgtgacaatgcggatggtgctctgaaagaattgcgaggctcttt

SEQ ID NO: 47560 - DNA, 522 bp, Glycine max
  unsure (1)..(522): unsure at all n locations
ttgatctcggttttatggcttggtgccattctggaaaaaggacagcttgatgataaaattgtggctcataagtagtggaaacttgagcaatgaagtccttataaacagggttgagatggactagagagcaatggtcctggataggatgagatctttgtctaggttgcggtctaatatagtcagaaagataaggtggatggtttgatgttctaaatgatcttcttaagggaggagaagacaatgtagatgatgcaccaatggtagtatcaactgtagaatcagataactgaataggcagatcacttgtgttaaggggaatagggtgatcagtttcagaagtattgggttcaatggctctaggttgaatgtttgaagttataggttcacgaatgggtaaggaaatagctaattcactaaaggaatcangttcttaagatgagttgggtaagtttgaaaagggaaaatgctttcatgaaagactaaatcccttgaaacatanaacttctagtatgcgagttatac

SEQ ID NO: 47561 - DNA, 583 bp, Glycine max
agcttgcttaagttcgaatattgatttctttaatttgcacaccatgtgttccttcccttcaactgagaatcctattggctggtccatgtaaacattatcctctaaatctccattaagaaagataattttcacatatatttgatgtagttctaagtcataatgagctatcagtgtcatgataatcctgaaggagtcatttcgtgaaactggtgaaaatgtctgttaatcaacaccatttctttgagtaaaacccttagcaacaagtttgaccttgtaatgtttaacgtttccatgagggtcatgtttagtcttaaagaacaacttacaaccaactctcttacaatcttctaacaattctacaaggaccaaaacaccattctgttccatggatcttaactcttctttcatggcttccaaccacttattagaattatcacaacttatagcttgtgaaaaacaaactagatcatcattaataatgcttaattaatttctaatcatgtggatggaccacatactcatttgaaataattggccttcattctcgttgagacctcctaaatgtacttcttttgattcttct

SEQ ID NO: 47562 - DNA, 315 bp, Glycine max
cgtatgagtactgggaaagattcaagaaattgtgtgcttgctgccttcaccaccagatttctgagcaactccttcttcaatatttctatgagggacttagcaacatcgagaggagtatgattgatgctgccaatggtggagctcttggtgatatgacccctactgaagctaggaatttgattgagaagatggcttccaactcccaacaattcagtgcaagaaatgatgttattgttctgagaggagtccatgaggtggccacgaattcatcttcatctactaaaaataaaaagctttgaaggaaaacttgatgcc

SEQ ID NO: 47563 - DNA, 483 bp, Glycine max
  unsure (1)..(483): unsure at all n locations
agcttgttcatcttgagataataggtgtttgtcctcatttgaagntgatggtgcaacatatttctttggcctaacaggaactccaatatttttacagcttctaatgttatgattggtttggccacacctttcacatgtaaagtcagccaattttctctttagcctatgtcctgtgacattgtcctcatctaccgatctccttctatttttctttggccttcctctttgtacccttttatgtggaggaataaggtgtgtatattgtgtctgggcccaatattgcggtccttggactggctcaataaaatgctggtatgtcttataataagcttctattgacagtcactcatgacacatgtcctcaggcttcccttctttgtgagatattggtgcaatggcatgttggcttgtcatccctacattaaagttggaaaataatcacacatgtaggttacgaatgaaaaaaaaaactgtaaagaacac

SEQ ID NO: 47564 - DNA, 448 bp, Glycine max
tctgttttcaatttggagcgtctcgatatattacgggactcaattttacatccgaatataaagttttcttcggttgaatttgctcagagcttctgttctcaattccgtgcgtctcgatatattacgggactcaatcggacatccgagtaaaaagttattgtcgtttgaatttgttcagagcttctgttttcaatttggagcgtcttcatatattacgggactcaatcgcacatccgaatataaagttattttggtttgattatggtcagagcttctgttctcaatttcgtgctcctcaatatattacgggactcaatcagacatccgagtaaaaagttatagtcgtttgaatttgctcagaacttcttttttcaatttcgagcgtctcgatctattatggaactcaatcatacatccgagttaaaagatattgcgggttgcatttgct

SEQ ID NO: 47565 - DNA, 267 bp, Glycine max
gtttccaatttaaaagaccatttttttttactcggatgggcgattgagtcccggcttatatcgaaactctccaaattacaaacggaagctagtagcatattcaaaacacaataactttttacctatatttctgattgagtcccataatatatcgagacactcgaaaatgaaaacggatgcttgtagcaaaaacaaaccacaataactttaaattggatgtccgattgaaagccgtaaaatattaagatgctccaaactgataacgga

SEQ ID NO: 47566 - DNA, 496 bp, Glycine max
tgtaggattatggggtacccatcacatgtggtactaggtggcggtcgggcgatggtgcacaacaagttttccacatccacaaattgtgcataaacccaccatcccctattgcccacctccaactgagctcacgtactcccacgtagcccatatcctcgtttctctcaacaccgggtccccatcaatcctctcaagcttccccaacatccaagtaaaacaacattcaaacaacacaaactatcacagccaagaaaacagagcaaaggcagaaaactctgccaaaacaccaaccaaaatcacagcttttctcacttaaagaccccagtaacaattcctttgttccaattcgttaaccgttggatcgactccaaaattttactggaagtctctagtacataagcctacattttgaccggtgggatctactagcaaacatccagaactcattctgcactgctctttccacaaccagcaaatgcatagcatttttctgcac

SEQ ID NO: 47567 - DNA, 458 bp, Glycine max
agctttacagcagattttagtaatgacccattaacctagaattaaaataacttaatgccattaacctagggaattaaaacaaactaaatgactgagtgtaactgaaattgttggcaaccaaaagtcacccccaacagccaacaagtcagccaccatttggtctcccaaaaggctgatgcctaggttgccaattgggcccttattacaacttgaactaaagcccttttagttgattaacccaaaacatatttttggtcagccaactttacaaagattgggccattatttatacaaactaaacactctaaaattgaaataaagtggtgtcatttagtcctccatttgggccatgatacaactcacaaccttggacttttctccttgaaacttgggcttgtattcaaatagtatggacagcacttgttgaagagctttcttggctttccttgctctagccc

SEQ ID NO: 47568 - DNA, 491 bp, Glycine max
  unsure (1)..(491): unsure at all n locations
tatggggatatctcggatttcaccagggtgccaaagaccctaattacggtggttatacataaaaaaaattacattcgcaattgcattgtccctcaccttacaagccagttttgttgtgttgagttagactcataagtcataacccaccttctaagacattgcagttacggttagagatacaattaattagttagttaaataggagtttgtttcttgttacatgtggtatagaagtggagttggtggcttcatcttttgcagttttcaattaattccattttactgattctctttgcttcggttctaccatgttttgttatatttactaaatggacgaagattagatacagttctgtaggtgatataacagctatatatagcagctattgtccgattagaattggagttttacctcgataatctaggttgacatttaatggttacgcacgtgaaactccaatnttgatttgagaacaacaccgcacacacct

SEQ ID NO: 47569 - DNA, 474 bp, Glycine max
agcttaagcttgttgatgctgccctacaactcccctcaaaacttgtttcagccccattcttcctttcgggccctctttgtttcccgatccaatgcttcaacggtggccatattgacgactatcagttcgtcgcactctttccggaccttgatggccatcgtcttgaacttttccttgactgcttgtgccctttcaagctccacctttaaggcttgcacctactcgctctccccaggggtttcagcctcttcctcactcgaggcctttagcttcaggagccaatctagttcttgtgtccaagccttcagccacttgtgatagccgccaatgatcccattgctgctccacctaaactccttatcttttctttgcaccacgctccatgccttacacactttttgaaatatccttgcattggggtcactaaaaccccgggcgatgaaaggcatgatactttcttctgacggtgctcct

SEQ ID NO: 47570 - DNA, 726 bp, Glycine max
  unsure (1)..(726): unsure at all n locations
ttatcttatctctgaagaagnctacatcaatagatgaagaatagagatccccatacactcatacacagcctctacgctttggctgtataataaatgacatggtgcataatgtcccgactagtgatatcggtgccattattacaagcctactatcaaggcggtccaggactcagtcctaaattaatttaagcatttaacccgcaaaacagaacacgagctggaaggatggcaccatttaacatgcggccgtttaagctatgtattttctactaaattaacggactatttacattgtttggctactgactccctcatgcccaatcaacgtaattcacatcaagctcaagtggaacatatcctcacgccatgccacggaccccaaataattgtaacagaaacctcacggtctccagggtcagaatgtcacaccactccctcttgctagcgtgggacaactcaaataaaacctatattactttgacaaaaccacagtgatccttacgtatcttatgctaaaactgcgaggctcccaattccactctcaacttactgctccttcctaacacatacaattctccaactcttaatcaaacaaatccactaatctcccggtttcatcgaaccctccaacatttaatcttaaacaagcgtgtcccaaagggtgtctctttcttcccctataacgcaaagcctcactatgctccccccaacttacaccatatctcg

SEQ ID NO: 47571 - DNA, 576 bp, Glycine max
aactcaagctttgcacatattattcatggaaacattaaagatcatctacctgggtctcaaatgaaaaactttgagttgcatttgaaccactttgagaatctatagaagtgcctgatgtttgattcacattgtcaaggcttttctcatcactagatggcaaattgcctgaaaccaccatatcaacaccatcttcactagagattgagtagctgctatcattactaaggtatgtatacttccttagaagagaaccattctggtaaataaacaacaaaggtgtaagcttctaataagcaagtaagaggagagggggggcaaataaattttggattcccaacaagaatttgcagtgcagtactcgtagtgttcttaaggtatacattttacaaaatatattggtattggtattaataacattgaggaagctttggattcctaaaggtgtattcaaaaaaaatttatagctctcacatataaataggaaattagatcaatacctacatactgacaggaaaggtattacctcaattttacattaacaaatcgcaatttttgccatgttcaatgacaataatt

SEQ ID NO: 47572 - DNA, 576 bp, Glycine max
agcttggattcctcaaatgtacaactaagcatggtgtttatataaagggcagcaatactactaacttgactgtagtgtgcctgtatgtagatgacttgcttgtgacaggaaataatgagattgaaattgccaactttaaaggagagatgatgagagaattcgaaatgactgatttggaccttatttcttattttcttggaattgaattcaagagaactgatgagggagtgatcatgcatcaagggaggtatgcaagagatgtactgaagaagttcagaatggttgactgcaattctgcagacacacccactgccactggtgtgaacttggtgaaagatcctaatgaagaagaagtagatgtaattttgtatagacaaatggtgggctcactgaggtatcttttgttactagacctgacttattgtatgttgttggcttaattagtagatatatggagaatcctaaactttctcacttctgtgctgccaagagaataatgaggtatgtgaaaggtactctcgattattgtatttctgtttcccagtgctgccaaaaaaagtaatggtctggggatat

SEQ ID NO: 47573 - DNA, 547 bp, Glycine max
  unsure (1)..(547): unsure at all n locations
tgatgtgagaaagcgtggaagagtcagtcttcctacttttgtttgctgaccacatagtggtacctagagatatgtcgaggggtcaggagaccttggggacgtcaagtggggtgctattgcccaaaaccaagcttggctaatcccaacccaacctgggcatagtcagtcagtgagaacctgtgacgtacctaaacaggcaagctcttggcagtcaaccaataaaagaacaaagtccatgaagcaaggaggcttgtgtggcggctggccagctatgtatcttgggtggtatctgcaaattagcctctggtaatcgattaccattcgtgggtaatcaattacagggcttaaaaatggagacaagatgctaaatggcctctggtaatcgattaccaagggtgtgtaatcgattacacagggtgatagggcactggtaatcgattaccatgtangtgtaatcgattacacagtgtaaattttagtttccaatgtgcanaggctgtgtaattcgtttttgggcactggtaatcgattacatactttggtaatc

SEQ ID NO: 47574 - DNA, 522 bp, Glycine max
  unsure (1)..(522): unsure at all n locations
agctntgcggatatggtcttcaccgacgaatggatcaaagtgggtctaaaaagaggaaaatctgatcatcatgctttgataaatgcaaaaaaaatggggcaaatgaagagggtgataatgagggagaagtccatgctgtgactgccattcctatacaaccaagtttcccaccaacccaacaatgtcattactcagccaataacaaaccttctccttacccaccacccagttatccacaaaggccatccctaaatcaaccacaaagcctgtctaccgcactttcgatgacgaacaccacctttagcacaaaccaaaacaccaaccaagaaatgaattttgcagcgaaaaagcctgtagaattcaccccaattccggtgtcctatattgacttgttcccatatctacttgataatgcaatggtagccataacccctgccaaggttcctcaaccttcatttttcctaaaataccactcgaacgcaatgtgtgcttgtcatggaaaaaccccggggcgttccattg

SEQ ID NO: 47575 - DNA, 582 bp, Glycine max
tgtgtagagttgtcacagacaaagggatctaaaaattataaactaaaaaattaataatcaaatagtatggataaaaaaagtgcataaatcaagtgcaaacccttcaaaacaaagtaagatcaaatagtaattttagctgaaaagagaaaaagaagcaaaaagaaaaaaaggataagcaactaaagttggaagctaaatgtaagaacaaaaccaaaacccttgaaatttaaggcactattagaaattacactttcaacatcggttatttagagcattctacatcggctctaaaaccgatgttgaaagtgacgatgttgaatgtatcatcgttaacatcgattttcaaaaactgatgttaacataaatatgataacatcggttttctaaataaccgatcttaaacacaaagaactacaacaaaaaaagtgtatgcatgatgaaagttgaccatcggtttgtagtaaaactgatgttaatggtatatattgacatcggtttcagtagaaaaccgatgtcaatgttgatgatgcatatacttatttgttgtacatctttgtatataacatcgactattcatagaaa

SEQ ID NO: 47576 - DNA, 417 bp, Glycine max
tttttgatggagaagatgaagaagatttattgaacgacgccatgatccgcatagaatcaataagccgaaggaggattcgccacaaagatataacttcgatgataagaatcaatttggtttttagaagaaaaaaacccccaaagaagaggctaaagctctctctaagcacaagcttaatttcaattaccaaaagttgttacaaatgaagagttgttgagtatttataaagccagcaattgaaggtaattaggctaactcataacctcataaacgcacaatataagccaatttacatcatgcattaaccccctacaacataaaaagcaatttttaaaaaattccacagaatgttctgctaagcgggacattcgcgggaaccacaaattctccttgggttggaattgcactaagtgagat

SEQ ID NO: 47577 - DNA, 634 bp, Glycine max
tcatgaaataagtcatcaaaatgttgaaatattttattttattatgataggaaatgatcttgttttactaccagagaaatatcaatgtgctttttcatttttgttttaccagattttttttcattaatttattgctatattttagttactattaattacagttccaaaaatttatgtcacagacataaaaatatttaatggcaataaattccacaaagatacatgataaattgtgaatataatcaatttttatattgatttttaattacttgtcataaatttttttatttgaatatattttaatagtctattttttgtgaaaagtattaattattaaatatttaatttaataaattatacaataatgaatactagtatactaaaaaagatattaatttttgtgtatgatgtatacaaagttttgaatttaatttgtattaaaagcaataaaaaattcaataaatttattacatatgtgaattcctaattcgtttagaatgaaaaaattatattaaaaaataatttaaaataattattataaaaatcaataatttatcatccacatttatttataaaaataatattataaacattatatttaatgactataaagagttattatatatgctgacta

SEQ ID NO: 47578 - DNA, 472 bp, Glycine max
gcaagcttgaacgaatgaaaaaattatcaatgatttctcacagcttcaagtgagattatccaaacttctcaactctctgtcagcttgaagcttctaggactttaacacctgcttggaagttgtatttggctgtagtgtttcaatacatgttttacacatatacatgtatatataaaaagtagtaacaatgtgctttacctggagttgatataatgaaacagcttccacaacaaggccaatggacaaaccaagttcaactacaacaaactaattcagctttacctagagttgatataatgagtaatgacattagaagaactcaaagccaaaccaagttcaactgcaacaaactaattcagcttatgctcaaccaaagtatgtgaaactgcttgttggctattaaaagtgttacttatttatgtgataggccaagagagctgaaagaggataatttcttgttttattcatgatt

SEQ ID NO: 47579 - DNA, 564 bp, Glycine max
tgctatcacagggcggatcgcccggtggcaagttttgctatccgagttcgatatagtctacgtcacccaaaaggcgataaaaggaagcgccttggcagattatttggctcagcagcctctcaacaactatcaacccatgtatcccgaattcctggatgaggacatcatggccttgtttgaggaaaagctagacgaggaccgagataagtggattgtgtggtttgatggagcgtcaaacgttctatgccatggcgttggagcagtattggtctctccagacaatcaatgtatacctttcacaaccaggctggggtttgactacaccaccaatgtggctgagtatgaagcatgtgccctggccgttcaggcggcaattgactccaatgtcaagctactcaaggtgtacggggacttagcactggtgatccaccaactgagaggggaatgggaaactagagaccccaaggtgataccctaccaagcctatatcaaggagttggctggttcctttgatgagatctccttccatcatggttccccgagaggaaaatcagatggcggatg

SEQ ID NO: 47580 - DNA, 491 bp, Glycine max
agcttgggctgcaattgctcattttggtaattctacagtttgcctctcactcaccttttgttagatcttggatattggactctgatgcttctgatcacataactagtaatccttcacttgtcttcaatttgtaagaaaccaaatccttttcaccacataaccctaaccgatggatctaaaacccctattattgctataggacaggccacccccaccctcttcttatccttaaacattgttctttttgcgcctaagtctccctttaaccgtgtttgtgttagccaactcacctgaactcttaattgctctattacttttctttctgattctatttggaggaccggagtatgggacatatgattggcacatgatatgagtcacttggtctctactacttccactcaccaacaggtgttgcgcgcaccactactgagtatcccaatcttctctgttggcatataagtcatcctaaactgaataaattgaaggcg

SEQ ID NO: 47581 - DNA, 427 bp, Glycine max
agcttcttatccaacgctcatcttggtttttaatctccttcttccatggcttattccctagtggatggcgcctcctctcacctattctactttggtttccgctgcatctccatggtggaaaaacaccattaaaggatcttattgaagctcaaagatccagcctccatagaagccccacaagctagcttccatcacttcttttagtaattctgactttccgcagccttatatacctctgccattcccacctagagcaattccacacaaaaaaatggaagaagcaaaaaaagagatcttgtagaccttcatgaaagtagaggtgaacattcctttgctagatgcatgggcagaaatgtatcacccttgataggtgaatttgtttctcacattcctgaaaaaagtatggaccccagtgctttttgtatac

SEQ ID NO: 47582 - DNA, 319 bp, Glycine max
tactcaagctccgcgaatgaaatcattacatgaatcatactaaacttgctgaatttttatttttctattcacacagatttgcaactgaagaggggtccaaaaatatttctaatcctgtcagtctaacatgctagttataatcttattaagagttggtagtgtaattatgtgcatgactttattttttgcttatagcagtgatgccaccttaagtaatttttcaatatagctagtattgttgaattcactgacgcaggtttatttgcacggccctataatttctgatgtccatagaaaatttgaaccaagtcattggcaa

SEQ ID NO: 47583 - DNA, 297 bp, Glycine max
agcttgcaccgaaaagttagtcattttttgtttatattaagagtgcctcgccggatgaaaagtctactttttaggcgaattacttataaaaaagtattattaatatgacgattttggcaagcatacaagctagttcttatgttaaagccacctgaattcactggaattggtctcatatgaccatgcatgtcatcattaaagtcatttcacatggcccctatagtttccaacactgataggcaagatgaatttataaatatatactgaatgctcttttaacggcgaagtaccaggact

SEQ ID NO: 47584 - DNA, 407 bp, Glycine max
cagcttatattcattaatttctagagttttttgtggatgcaataactcttttattttttcatgtgctcttgaaagcgagatttatttttggctgtaaacctaacaggctacaataagccaccagtagtcagaatatgatgaaagccctgtattttcagtttactgtaggagctctgccattatatctgcgaacctttgcaggatactgggcttatggatcttcaacagccaacctatttgatgagtgatgtgaatggtccagtttgggctaaagccattgcccattattgcagacttttttccatcagtcattgcattgcattgagtaacttttaaacttcaattttgtgctactaaatattctatctacaatggggtcctggcctaataatctatcttttgctttt

SEQ ID NO: 47585 - DNA, 251 bp, Glycine max
tggcttaactcatattacggagtcctaccttaccactactgggctctaaacaaacccccacactgagagtaggttcttcctactcttagtccatcatcgcacacacctttgtttggctctctacattaggtaatccctctcatggatctccttgacgaactgagacgtagattccactctcttatgtacaaaagacgtgtcaagagggaggggaattttgtctattggtgctagaggattgatcctatata

SEQ ID NO: 47586 - DNA, 246 bp, Glycine max
agcttgtcagaatagggagctcacgtattataggggagtgcgtagctaatctccaactggtcaaggagattctctcacataaccttttcaacgaagattcctcatgaaagcttgtccaggcatctaccgagtctattaatggaaccatgcccttatcctggtgcatctcagcagaaggagagcattgagacacatactcttaagcaacactcatatacctatacaatccctcaacatgaacgctcc

SEQ ID NO: 47587 - DNA, 579 bp, Glycine max
tttaaactcagctccgggcttacggatagctaataagactttttcgaagtctcggctgtaagacgctggcatctccggggatggtgcagatgacgttcgtagtccctgcatgctatcaagctttgagtcttacgggtagcaaatgagaccttttcgcagtctcggctggaaaacgctaacatcttctgggaaggtgcagatgatgacgtttggcattgcatgctattgggctttcagtcttacggatagcaaatgagacttttttgctgtcttagtcggaagaggctaacttctccagggaatgtggagatgaagacgttagtcactgcttgccattgggctttgagtctaacggatagcaattgagacttcttcgcagtctcggccggaagacgctgacatctctgggaaggtgaagattatgacgttagacaccgcatgctatggtgctttgagtcttacggatagataatgagactttttcgcaatctctggcagaagaagctgacatctttggggaaggtgatggtgataacgttagacactgcatgctattggactttgagtctacggatagca

SEQ ID NO: 47588 - DNA, 926 bp, Glycine max
  unsure (1)..(926): unsure at all n locations
tgcncatgagaaannnatttgttggnactgctagtagcgatcccagacggancncttntagantactganactagcacggcgctgcanacgcttaacctaccaccggacacgtcatggagaccgctgttatgttccagctctacctctgcanaatgcacgaacgcctacgagcctctatgcctacgccaacgccgctctatcaattagtcgtaaagccttatcctcatnactggcnaaaacaacaacaaggatagatgacaaacaaaaaaagtgcctacatccaaagactacgtcataaatgcccccgatatataaggctaaaacccttaactactatgaatggggcaaaatgcaagtgcccacagcgaaggaagaaaccttattctaataatttaacaaagatatagcgaggcttcatactgtaacctcatgggcgtcgaaaatatactcctagaggcgtcattgagaaaccacttaggcgcctctccgtctctggagtcctcttatgccacgaaatcttaccctgagaagatcttctaatcccaatagacccttgcgtgggtaggataagcaccatatccctccccccgtggagaaggattatggaactccacatgaccagagggttctcataactggggggatgactctcctcgacgcctggtaaaaagaaccaaaaactatgtggtgcggtggtcgcatgtgaagataggaaagtttaaaaccatttttgggcacatccacgaggacatggttctccaaccatgagggggtcgcatattaaaaaaatggggccacccttttgggggaatttgtttacctggtagcccctaactttttttaagttcgcggagcgggcccattgagcaagaccactttttttgtttgggtacagcgcgacccttgtcactctatgcaaaataaa

SEQ ID NO: 47589 - DNA, 991 bp, Glycine max
  unsure (1)..(991): unsure at all n locations
tacaacgtatttattcacttccacgtctctttctcacccacctgtcggtgatcttanaccatcaccaccctcagcaggannnttgttactgtgtacctccnccgacccctgaatctatcagtcgccagccagcatgctaactagaaaggtgcggaatgttattttatatggcacaaaccaactcaataataggggactagagtcttaattatatataaaaagccaccgcattggaaatgtagccacgagtcagaatgaaaaagaatatcaagtcaatttaagaaactccacacacaactataagggatagggcctgagatggtgctagctgttcctcgaaatgaggggaaaaagagcaaactcggaggtggcaatttcaccgaaatacctcgcaatatctcactgggcctacgcagacgatgtcgttatatagacatgtacagaacgcccacattgtttgggtgggattagtgaaagttcaatatggcagcaggacgaaactctctaagacccaggccaaatagttcttctggctaaagaggaaggaccctgtaaagcgttataggaaaagaatttggtggtgggtattaaacacaaaaaaggggagcgaagaacacttcggatctagagacgccttgaaaccaattggaccaggggtgccttaaagcaatacaagaatcggacaacgttgcaggagagatgggccctgaggaaatcagttttgaagactgtatgatcactcacataggtcgaaaaagaactcgaaactcctgggatggcggcgaatcactatcactttactcggacaaaaatgagccaggggtgagaggggtgcggcattatcttagcgaggattctcactcaagaaacagtttgatttcggcttacacggttacgaaccgatcgcgtgaacataccctatgtgacaccggcgcacacgtctgttgagagaacacacaacacatctttggaaataccacagcacggagcg

SEQ ID NO: 47590 - DNA, 492 bp, Glycine max
tcaatcgtttatttaagccgttttctcacctaataaatgctaaaatgaatttcaaccgatcatttgtgttgtaatgccatttaatcaatattaaaacaaaatctaaccgatcgttcatactgtaacctcagttaaaccaaaaaaagtaaaataataataaaataatcaaaatatcttgaaaaaaaaataataataaaataataaaaaaaatcaatcggacgtttttctttgaaagtttccttgaattaattgactaataacccaagtgaaaccaaggctaaagtcaactcacaaaccaagctttgtccgcaaaaaatcactcaagacaattttaaggtccaatgccttaaaacggtcctctttgcttttattggttaaaatggaccattcaaagcataaaatcaacacataactttgtcacttttgcaagaactacataggtctgatttcctcatcgcaattgaggatacgtaggagcagaaactccacttt

SEQ ID NO: 47591 - DNA, 493 bp, Glycine max
agcttaactacacatacctctctaatagctaagttcacctccttgagatgagaagctagagcttagctacacaccccctataatagctaagctcacccatatgccaaaaaaacatgaaaatacaaaaaaaagtccctactacaaagactactcaaaatgccccgaaatacaaggctaaaaccctatactactagaatggccaaaatacaaggcccaaacgaaggaaaaacctattctaatatttacaaagataagcgggctcatacttaacccatgggctcgaaatctaccctaaggctcatgagaaccctagggccttcccttggatctctagcccaatctacttggagtcttctatccaatgcccttgcggggtaggattgcatcattccctccaccttggaaaggatttgacctcaaatcccaaggttcttcatactctgggctccttccctcgacacctgtaaaaagaacaaaaacatatgtattagtg

SEQ ID NO: 47592 - DNA, 475 bp, Glycine max
  unsure (1)..(475): unsure at all n locations
actaagcttctaaggaagttttctcaagaaagcttctcaaggaagctacctagtctataaatagaagcatgtgtaacacttgttgtaactttgaagaatgagagtcttgtgagacatactccaaagttccacttctctccctcttttattccttcaatttcgtgctcccccctttctctttctctccatctttcttttcctccattgaagcatcctctccaagcttcttatccaaggctcatcttggtggtgaagctccttcttccatggcttattccttagtggatggcgcctcctctcacctcttctcctttgtcttccgctgcatctccatggtggaaaaccaccattaaaagacctcattgaagctcanagatccagcctccatagaagccccacaagcaagcttccatcaataaccccctttgaagtaggtgggttgttcctctgaaagagatctaaaccatggtacata

SEQ ID NO: 47593 - DNA, 545 bp, Glycine max
agcttttgaatgctctattcaatggagttgacaagaatatcttcagactgatcaacacttgcacagtggccaaagatgcatgggagatcctgaaaatcactcatgaaggaacctccaaagtgaagatgtccagattgcaactgttggccacaaaattcgaaaatctgaagatgaaggaggaagaatgcattcatgacttccacatgaacattcttgaaattgccaatgcttgcactgccttgggagagaagatgacagatgaaaagctggtgagaaagatcctcagatccttgcctaagagatttgacatgaaagtcactgcaatagaggaggcccaagacatttgcaacatgagagtagatgaactcattggttcccttcaaacctttgagctaggactctcggatagggctgaaaagaagagtaaaaatctggctttcatgtccaatgatgaaggagaagaaggtgaatatgacctggatactgatgaaggtctgactaatgcagttgtgctctttggaaaacagttcaacaaagtaatgaac

SEQ ID NO: 47594 - DNA, 517 bp, Glycine max
tcggattgtcaattgcaccatgttccaagaagagtagagggtgccacctttgttgagtggttttattagcattttgttagttgaaataaaggcccaaacttgtgttaaagtggatgtcaattctcttttgattttcaccacctatgggcttgttttaatttaaagaaattaaggtttaataagatggaaactctaggcttgtggctgcctctttgatgcaagctccattggagcttgtaagcctaggatcttcttcatcaatggattcctttgcttcttggaagatgaatggcagcggaatgaagaaaggaagagagagaggacacgccacttcaaagagaagatgagtctagaagaagctcaccaccatatgaggccatggataagagcttggaggaagaaggagatgaatgaagggagaggaagagaagagcacgaaattttgtgctctatatgagctttgaaaatctgaatttaatattcacatgatcaaagttgaaaaaaatgcacacacatg

SEQ ID NO: 47595 - DNA, 470 bp, Glycine max
cacataagttggataatttggggaccattgtctatgataagataaaggaacctcaatgacattctgcacgttaacattttaaacatattatttatttgagattaacataaatagataaatgtttaggtgtgaaaatcgtgaccttctcaagacggaatgacgcctcaaatcggtgcacaattgttgatacctgcaaatttgacaggccctacatgacaatcatttatgtaatgagtaagtgaacaaacttgtacccattgaaaggagaagataaatatgtgcaatatcaaacatgtactatgaacgaaaagagcacgcatagaaggacaaaagttatcgacaatgtatatcgaatatatacatgtatgaagcaaaaaagttggtcatgaaattatgatgaaggatgcatgatcataaaggttggaaaagttaaaacttaacacatcagacgcgttcgatgatgtattcat

SEQ ID NO: 47596 - DNA, 573 bp, Glycine max
  unsure (1)..(573): unsure at all n locations
gctcagttgctacgtgaagccacatgaatggctttattccatctttacaaacactctcacataaatgacatttgggctgtgagcataaatatgcgcacacccaaccctttattattatatgctgaaattcatttttttaagtagaataacaagagaaaggattaaaatcttgatcacataatcaaggaggtcagctctgataccatgtcacgaaccaactatttcaaagtctaaagttgttaggtaaagacaaccgaaaggttttaagtctaaagaaatgaaaataatggtttaaaagtttgagtatttcgaagttgcaaagtatgataaagaaatcagtttaactaatttgctatatgaagacacacaagccacttaaacagaacaagaatgcaggaagaagaggtgacttaatggttccccagccttatgctggtgtatatngtgataagtatttagatagacataaaactatacattntattagcattcaaatcgcagacaggactttaatgattcattaatcgtcctacttacagntacagcagaaagtttggtcctatggtgatatgc

SEQ ID NO: 47597 - DNA, 520 bp, Glycine max
aagttatgagtacagaagattgtaaagggtagacattgtgtaccttgagtttccatggagatgggacttagtaaaagaaagggctcaccaaaggtgaaccttgggtttgttgagccttggaccaggggcgtgtttgccttgggttttatcaagcctatggagttgcgtcaaggcttaccaaggacgagccttgggttttgtggacatgtaaggatcagcaagcacagagcttgagtttgacgagtcttgtgtgcaatgtaagtgttgtgctcttgcatacatgacactcgccgtatgtgtcatgtattggagacgaactagcatgctcttgcatacgtgcctcttacaaagaggcatgaatcaattggactcaccaagggtggaccttggattttgcaagccctttggatgattgaccagggaagtgccaacctgtgttttgggcaccgtgctcttgcatacatgccactcgatgtaggtggcccgtgctggagacatggtgatatgcttttacatatat

SEQ ID NO: 47598 - DNA, 667 bp, Glycine max
tgtgatatttttctttgccttaaatataattttagtttccctattttttaaaattcataaattattttttatttaaaaatagagacatttagttctcattttttaaaaaattataattttaatccctctattttaattagagacatttagttttcacttttgtaaaatttgtgatgttagtctttcaaaaatattaattggtaaaagattaatctaatgagacccaaatttaatgatgtgacacaagattatttgtttaatctatatcataatcaacttaatctcttaatagtcaacacttttagtttaactaaataaccaaaatcgtagatgtaataaaattacgggttaaatgtctctattttaaaataagataatcaaaattatagattttaaaaaatataaacatttaagcatttttttttctattgtataaactattttttgtccccactagtaaatttttttggatctgtcactggctgagggtactcttaaatcctaagagggtgaaaaaaatagttgcataaaaatatgaaagagtaatgtgaccctactataaatataaatacttgtacctgcgttagtatagataactttctatgtttcgtcaatgagtaatgtatctttcttttattgtaagaatactcttacctaacggaatgat

SEQ ID NO: 47599 - DNA, 352 bp, Glycine max
aaagccccagtgattggattcagattgtttcaagacttcaagatcaagcatcaagaatccaatccaagattcaagattcaagagaataaatcaagaagcaacaagtcaagacttcatataggataagtattaaaagatttttttcaaaaaccaaatagcacagttttgttttacaaaagaattttctcaagttaccagagtgattactctctggtaatcgattaccagttggcagtagtcgattaccagtgaccaaattgattttcaaaatgtttcaaatgatttgtaacgttccaaaatgattttcaaatagtgtaatcgattaccactatattagtaatcaattacaagt

SEQ ID NO: 47600 - DNA, 460 bp, Glycine max
gccagcttcttctatatatagtctagaactttatgtatctgttggctctcaacggttgaattcttcgctctgttctctgtttgagatcttgagtctattgaaacattgaatttttacattaaatgcacgtcccttcttcatgcaaagcccatgctgataggataacgtgccttgtacttcaatagggaagtcacataaggtttgcaaatacaatgtgccccttttgatgaggatcaacgtcttctagactgtgggttttttttattcttcataagactttgacaaatccttagggaatgctttctgcatgaaagaatctcatacataaagtattaaataaaggtcttacatacactacctaaatgtatatgaaaccgtcttatgaatgcacttggatctttacttaggacgtaccgagaccaaccattatctattaccatattagacgtagcttttatca

SEQ ID NO: 47601 - DNA, 397 bp, Glycine max
  unsure (1)..(397): unsure at all n locations
ctgtctggcccaagttgaaggtagagcgagaaactgttccctctacaagaggggctgctaatgaatatctaaggatgtgatcgcgccgagctatttgcgcgttttaatgcttttaatttgtttcctctctctctccactttggtgctgtgctgtgtctcgattattgggcatgtttccttattgcaagaataatttcatttactgaactggacaagattctgggaagagattgtgaacatttatatgtatgctnttctgctttctatttattgaagcctgaaatgtaactatgtatcctctcttaataataatggattgttggattctaacttctactcctccaactcgactcgtataaaggaataaataaaagggctagagctaattctctacatg

SEQ ID NO: 47602 - DNA, 560 bp, Glycine max
agctttgctttaaatccattggaggaggatcaaattgtttttttttaataaaagagaatatcacttatttgtctcacaaaagacaaaaagttgaagaaaaacaaataaattctaaaattgcaacccctaagtcccaaagtagtttaattaaagaaaaatttatagctattgcacaagagcatacacacaagaagatacacttgagggagaaagatgaaagaataaagcagaatgagaagtgtttaaagttcctcctacgaacttgaaagctgaaaatgctaaggcttcattacatgtgaaggaagcaatagttttttttagcattgtaaaccaacatgttgaattgttgaagaagattggactttccagcctccaagacaaggaaaagtgttgttgaacgtgccttagatgctgacaagacagttttgatttttaatttgaattaattattgtgctgatagagaataagtcagcgccaaattttaaattaggttttgattttgttttaaattatcagtatgcaatagatgttgtaaaataatggagcatgatctttttat

SEQ ID NO: 47603 - DNA, 481 bp, Glycine max
tcgagggtttaattatttatgctatatcataaaacaccagaacacgattgattagagaaatatatttctatgcatcaacttgtttgttagaaaaaccaaacatatctacctactgttgtcattttatttaccatgcatttgatagtttttagcatataaagtttgtcgcaacatgcccttttgcgggcgagcgaggcgaggctcacgggtgcgctttccatatgaagaaagatgcgcggagttcgcaccaacgtttatttgtgggaaacgtcggaaaaaccgaaggaaaccggtcaaaatgaaaattctaagttcgggagttgtatttacgtttgaggaaggtattagcacctcttacgcttgtctcaaaggacaacagcctatttattagaattgtgaaattgtgtcatcctacctttatttctttttattttttgaggtcgacaaaagcggtgcttttgcttctgcgtaccctccatcg

SEQ ID NO: 47604 - DNA, 502 bp, Glycine max
ccacaaaaaatagggttttgtttttttatcatttcagtttcttaccaagtaaaatggatcatttttaaggtccaacgacttaaaatgatcacctttcaagtaaaaagaatcacttgattcacgcataagaaagaactacataggtctgatttcctctttgatggagggtacgtaggagcaaaagccccgcttttgtcgacctcaaaaaataaaaagaaataaagttaaggtaacacaatttccacaattctaaaaaataggctgttgtccttcaagacaaacgtaagaggtgctaataccttcctcaaccgtaaatacaactcccgaacttagaattttcatttttgatcgcgttccttcggggttcccgacattttccacaaataaaagttggtggcgactccgggcatctttcctctttggaaagcgcacccgtgagtctcgcctcgctcggccgcaaaaaggcacgttgcgacaggtggcgactccactggggaccttt

SEQ ID NO: 47605 - DNA, 402 bp, Glycine max
tggatttcctcttattagggaatctatccttcctacgatggagccaaatccagtcccccacattaagaactagctcctttcttcctctattgtctttagttgcatacacctttgtttggttctctatttggttaaccctctcatccagctcctttacaaactttgacctagattccccttctttatgtataaaagaagtgtcaagtgggaggggaattaggtctaaggatgttagaggattgaacctatagacaacctcaaaaggggattgcttggtagttctatgaacccccttgttgtaggcaaattctacatgaggaagatactcatctcaagacatatggttgcctttcagaagagcccttaaaatggtggataaagacctattcactacctttgttt

SEQ ID NO: 47606 - DNA, 1243 bp, Glycine max
  unsure (1)..(1243): unsure at all n locations
actggcgtgctgtatgtgctactctctccctatcttatctatctctcactnactctncacctatactnacatcgactantccctcccccccacaggagagaanatttgattctttttacgatccaccggacctntaataattagttgtcggcccgccacccatgattctcagcggtgagataagatttgttattacttcaagaacgccgcacggtattaccacggtccactcttaccagtttgctctggccaaacgggaccataaatataaattactacgggcccaccaatcagagtcatacactctgggctcatgttncgaaacccattctctacacttggccgtgtgctctccctctggtgtcttcataacagtgcctattgacatactccgcaaccaaggtctcatcacacggaaccatacctccgtggtttctgttgcaccagtgctcacaggctcatcataaactaccataagcctagtacccttgaccgatctgctcgtacacgccaccggttagttgcctagtaccttatatgcatcaacatatgacatcgtccggcactcatcgttgaccctagtagttaggaagaacacaacctactcgacatccttctgtgcatcactatgtccagctttataatacgttggccttcgtagatctactctgcaacgacatccgtcatgggtgggaacctcattggatgttcatgtaccgccactatatggacataancctcatacactgtgnggcgtgctccaacaccttctagtgttattgagcgtccgtgtgcantctctcgtattctactatctccatctatcgtgagtgatggtgagccaccggttcccgtaataaccgccgacagattcactccctcctctacctcaatcatcatcatcatctacatctcgatgcacgtgcgtcacgatcacctataccatngtataccgtgagacacatgacacgcttcgcaccgcacaattataatcttcacacacgtggtgtagcacatctcgtctctagcctagctccgctacaatctacgcgtgtctactttcgaactacatatcctacactcgactactcacactacactcacgtgttgacgacntcatctgcggcnggtatcgtaagatcacgtagctatgacggcattacatatttcacncncatctcncatccgtcgtcantggngcatcatcacaactctcgtcacanctntcacactgacgtcgcgn

SEQ ID NO: 47607 - DNA, 519 bp, Glycine max
agcttggagaggatgcttcaatggaggaatataaagagggagagaaagagggagggggagcacgaaattgaaggaagaaaaagggagagaagttgaactttgagttgtgtctcacaagactctcattcatcaaagttacaacaagtgttacacatgcttctatttatagactaggtagcttccttgagaagctttcttgagaaaacttccttgagaagcttctttgagaaaacttccttgagaagctagagcttagctacacacacccctctcataactaagctcacctccttgagaagcttccttaagaagattcctaaagaagctagagcttagctacacatacctctctaatagctaagctcacctccttgagatgagaagctagagcttatctacacaccccctataatagctaagctcacccccatgacaaagaacatgagtataataaaaaaagtccttattacaaagacaactcaaaatgccccgaaatacaaggctaaaaccctatactac

SEQ ID NO: 47608 - DNA, 500 bp, Glycine max
ctgaatgctctattcaatggagttgacaagaatatcttcagactgatcaacacatgcacagtggccaaggatgcatgggagatcctgaaaaccactcatgaaggaacctccaaagtgaagatgtccagattgcaactattggccacaaaattcgaaaatctgaagatgaaggaggaagaatgtattcatgacttccacatgaacattcttgaaattgccaatgcttgcactgccttgggagagaggatgacagatgaaaagctggtgagaaagatcctcagatccttgcctaagagatttgacatgaaagtcactgcaatagaggaggcccaagacatttgcaacatgagagtagatgaactcattggttcccttcaaacctttgagctaggactctcggatagggctgaaaagaagagcaagaatctggctttcatgtccaatgatgaaggagaagaagatgagtatgacctggatactgatgagggtctgactaacgt

SEQ ID NO: 47609 - DNA, 464 bp, Glycine max
agcttatgaagaaaagaaaaggaagaaggaagggatcatggagcaactactcaagacacaagttaactcaatggtgagcatcaaggagcttgatgaatcagtgagctgcaacgtggcctttggagattaatccaaggtagaaatgaaaggaaaaggtaacattcttattcgtttgaagaatggtgagcatcaattcatctcaaatgtttattacgttctaaatatgaaaagtaatatcttgagcctggggcaactcctagagaaaggttatgagattcgcttaaaagacaataacctttctacaagagacaatgaaaataacttgattgctaaggtgttgatgtcaagaaatggaatgtttgtgctcaacattcaaaatgatgttgcaaaatgtctcaagatgtgctacaaagatgcatcttggctttggcatcttcaatttgggcatcttaattttggagcat

SEQ ID NO: 47610 - DNA, 939 bp, Glycine max
  unsure (1)..(939): unsure at all n locations
tggatgcgcnannattgatgncctgatggcantcgnaagnaccnncnatnatctggctngagagctactcgcagcccggatgcgggacagctgaaatatgacggacttataattttgggatagataagagagcgcgtgcggacggacgcacgatgattatgagaaaatcaatggtagatcatgtcagtactaaatgactttgcagttccatctaaagacatttcatcgtagtggttgagttatcgatccaggtgggttcattcaccgcctgttattgtatcagacttcgcggagcgttagccttgggaaaacctntccttgatacgtaactgacactggagatgcttactgtgaagataactcgtttcggatacgctagtgggtgatgcttcttcctgccccttttattaggtacactcgacctccttgtgaagtcttcctcaatggatattgcctacagaaacctagaagctttgattaatcgtgcgctttatgaatatgataaggcgcttccttccttggggaatgaggagagtcgaactaaacgctccacacggtctgtataaagaatattctcactcccacgcgactcagtatctcggaactatgtcagaacgaatgtgcctatattaaatgacgccctatcgaagcgcccgacacccactgggtctctccctgttctcactaggtggcgcgtgcttgctatcggctcagtcgtagagaacacttctcgccttatatcatctacgagatcgtgggccttgatatatgatacgtggtcattacgactattcctcagggtgtatgtgatacccctgggcgctgtttgttttggatatgctatctaaatactattggggggtatctaactatatggtgcgcgcggcgcgagtgatgcttccgcacctgatctgtgatggcgcgaagcatcggctagcg

SEQ ID NO: 47611 - DNA, 491 bp, Glycine max
  unsure (1)..(491): unsure at all n locations
cttcgtcttacagaatgcaaaatgtttatacggataaccactcgggtattttcgcctcgtagcgtgactcaaaagtcagtatgacagatcttttgagcacggtagatgacgtaaatcaccgcgtgtaaacgggcttgttggccgcgattgacgaatggcgcagaagacgacgttagtcttctacgtgctatcaggcttttcatcttacagacaggaaaaagtttatacggataaccactcgggtattttcggccgtcagcgtgactcaaaagtcagtatgacagatcttgtgagcgcggaagataacgtaaatctccacgtgtcaacgggcttgtcggccgcgattgacgaatggcgcagaagacgacgttagtctctgcgtgctatcaagcttttcggcttacagacagcaanaagtttatactgataaccactcaggtatttccgcccgtcagcgtgactcaaaagtcagtatgacagatcttgtgagc

SEQ ID NO: 47612 - DNA, 476 bp, Glycine max
agcttgataacacgcagagactaacgtcgtcttttgtgaccttcgtcaattgcggccgacaagcctgttgacacgtggagatttacgtcatcttccgcgcttacaagatctgtcatattgagttttgagtcacgctgacgggcggaaatactcgagtagttatccttataaactttttgttgtttgtaagacgaaaagcctgatagcacgcagagactaacgtcgtcttctgcgaccttcgtcaatcgcggccgacaagcccatttaaaagcggagatttacgtcatcttccgcgctcaaaagatctgtcatactgacttttgagtcacgctgacgggcgcaaatacccgagtggttatcctaataaaatttttgctgtctgtaagacgaaaagcatgatatcacgcagagactaacgtcgtcttttgtgcccttcgtcaatcgcggccgaaagccccgttgcatgcggtgattta

SEQ ID NO: 47613 - DNA, 585 bp, Glycine max
  unsure (1)..(585): unsure at all n locations
tttcctctgattgctttgctaggcttttcaagcgttacaaagaaggggaagggattagagcttccattttattgtctctatgcgagggacatttctctctccataaatattatttcacaaatcttgatgttggggatgtgtgaaaatgagttatgaacctggtgttcaaatttcaccacaatccagtagttaacaagtccaaaatcgtagttttactgggacatgtgtgggtgtatgtgggaaaaagaaaagattttgggagagggagaaaggaaaacgaatttgagaggaagagagagcgtagagacttatcgtacttgtaaaaactgacccaatatgtttctacttatagttaaggtactcttagcttattatttactctattnttctttatttcattattttataaaaatgaactctattntactccatatcanatgaataanaaaaacatccttttattntctaagaacatataaataaaacatccatatcaaatatcagtatgcacaatttcatgaagtcgagtgcttcttgtagctcctttcttgtatgtattgcttgtttcccttatacaactcacac

SEQ ID NO: 47614 - DNA, 474 bp, Glycine max
atagagctgtgccccggataaatgagtgatggtaacttttggaagatatactttgtactcatgcaccctagacttagcaaaactgatgctgctattttatccactccacaagtgagttaaattttaattggcattgattttctttcatatatgcacttgtgttttgtttttgtctaatttattttggtttgtttgtttgtttgtttgttttaactttaatcatgtgaaactaatgattgaagcagagacacttaaggtttttcattgttcacggattaaacttggcatcagaatcttgtaaagtgatcttaattgaatcatgtgtaactctgtttatatgatcaaatcttataatgaaagttcattgaagacacgatcacttggtgttaatatctgttttgaatcttatgtgcacctgggtgttgatatagcttatgtgcacctggttgttgatatagttggaaatcttttttg

SEQ ID NO: 47615 - DNA, 541 bp, Glycine max
  unsure (1)..(541): unsure at all n locations
actcaacttttggatataacatgggaccaacctcatttatttcaaaacaattaaaaaaaaaataacaanacaaagtcgtatccagtcaaggtctgagagaccatacaagtttcctaacgatttctaattatgtgggccattaagtctatcatatgctgacaatagccgagaagcccatgaatctcttcgggggtggagtaagtgtctgccatcgccttggcctttgctaacaatcggggaagttcttgactcccattcaaggtaagagcaaaccgatccatccacatggttgcctcttggtggaaagagtcaatcacccttcctctagcctctttttccgcatatacttgagcatactcatccgcgattctatgctcgtgggccgtggctagacctaactcttcttccgacttggcgaagatagctaacatgttggtctctgtctcgcataaacgctgagacaagccttttttggaccttgaacaaagccataatttctttttcaaaaccaagctatgtgctcgcgaaatgggtccttttt

SEQ ID NO: 47616 - DNA, 432 bp, Glycine max
gagcaccaaattgaaggaagaaaaagggagaaaagttgaactttgagttgtgtctcacaagactctcattcatcaaagctacaacaagtgttacacatgcttctatttatagactaggtagcttccttgagaagctttcttgagaaaacttccttgagaagcttctttgagaaaactttcttgagaagctagagcttagctacacacacccctctcataactaagctcacctccttgagaagcttccttaagaagattcctaaagaagctagagcttagctacacatacctctctaatagctaagctcaccttcttgagatgaaaagctagagcttagctacacaccccctataatagctaagctcacccccatggacaaaaacatggaaataataaaaaaaggtcctattaccaagacaacttaaaatgcc

SEQ ID NO: 47617 - DNA, 534 bp, Glycine max
tctccttccttttcctataaataagggaaggatgaaagaagaaaaatgttctaccctccaggtctttgagaatcacttaaaattagtgagaaaaattgtttccgtgaagaaaatctaagccgaggcgcttccgtaacgcttttgtgacgtttccgtgggtgatttcgggaagattttcaccgttcttcgccgttctttgttcgctcttcggtcttgaaccggtaagttcccgaaatcgaacttttcaattcattctatgtacccttagtggtcctcatttgtttcgcgtgcttttattttcatttcatttacttttcgtacccccttttggacgtgctttagtcatttatttaagtcattttctcgcctaatcaaaaataaaataaatttccacagatcattcgtattgaacatcatttaatttctgttaaaatgagttccgacccgtcgtcatgccgtaccacgtttaaaacccaaaagaggcaaataattatatgataatcaaacattcttttagtaaaataaattaaataa

SEQ ID NO: 47618 - DNA, 401 bp, Glycine max
aatacgcctgtagtcatttaaggattgaggatgatttgatttggtgataaaggccatgaaggaagcattgctgcctctaagaaaacttccatggcagtggaactcatccacaaatctcctgaattcaggtctcagaatcttccaaaaagccttaataaagttgaaattaaaaccatcgggacccgggcatttatcaccaacacaactccaaacagcatatttaatctcttgatcagaaaaaggggcaatgagtccctctctttgattctgatcaatggagtggaaaaaaaccccatcaagggtgggtctgaaactctcattttcagaaaatctatgaaagaaaaaattacaagcttcattcttaatttcggtcaggctgttgaacccaattcccatcaatg

SEQ ID NO: 47619 - DNA, 276 bp, Glycine max
ggatttttttaaaaaggctgtaggtgaggacccaatgaaaatgattacggtgcgaaaccccaaagtcggaccttttgaaaaagcaggccagactccatacggggggagggcctttaagaaagcctgttctgttacttttcttaacaaaaacgtgtcggtactttgaagaagtgtgtaaattggggcggttgccatggtgccaagttataaagtccgtgacttttctaaaattaataatagcgctgtaatgcaagtggtggttaatgatgggccttg

SEQ ID NO: 47620 - DNA, 174 bp, Glycine max
agccatcacctaaaatctgaaacctctcatgaaaaaattatttttaagatggggtgcatgaaacttagaacaagaacacccctgattaaaaaaacaagggtacctttgaattctaagaagtggcgtggggatgttcctataatggacgccgattctgttttggtgaccatttga

SEQ ID NO: 47621 - DNA, 890 bp, Glycine max
  unsure (1)..(890): unsure at all n locations
cgtactagactatacaaacgtaactgtcagtcactcgtatcccataaagtaaacaggactcccctaccgatcactnttcncacccnncccaggaagagcanncnttgagacatcgtatgtaccccccgaggatcctntacagaccagccgccagcatgccagcttgaaaagtatagaagatagatttttttatgcaaaacacagccttgcttttatagactcttcatgtccggtcaagacacccatttacaagagtatgacctttagactaactttacaccccattgtgaaaaagtcaaaaaccattcgaagagttacctcttttgctttattcagataaaatcactagtaatcagattaccacaatctgtgtaatcgatcacacacagctttatgcgaaagggaggactctcccattgaatcgaatttcgcgtcacaggcactagaatccaaacaaaacatagtatcgatacagcttttgaaaaaattggacgtcaaaatccattgaaaaattttacacatccatttggtactggcaattcattacacaaaatctgggtatccgacatactataagactaaaaacctctttggtgaacatgttctcgagaaaaacgcatgtgctactaggttatcgaaaaacctttgctaacttacctggatatgccttttctcggtcttggatctcgagccttgaactatgagcccgactccttgaagctcggaccaaaaaaatcgattctggaatctggaaacaaaattcccccaggaacctaacagaggtcttggacccaaactggccctcactgaaatcctggaacttatcttctgaaaccaagatatgaccgttgatccttttcgcaacacctcgggtaatccaacaactttcc

SEQ ID NO: 47622 - DNA, 488 bp, Glycine max
tttatgttggcacaaactctttgactacgtcaccaatgttgaagttaccgaccttacggtgcaacttggtatcacacactcatgatcttggcggcaactatcacgttttcacgtcaaagttcttacacagctataggtgcaacgacacaaaaaacatgtgcatttccatagcttagaagtccatgctgcaagagataatataaacaacaaaactaagattaagatgaacgacgtaaaaataaagaacgttaactgtgagatccataacttacctgtcatgttagaattaatattttattaacccttgaactggaaagtatgctatgaagtctatctctggccaattggagcactcgaaagttctggtcaaataacgtttaattgaataatccccctcgccctgctcttcggcgtgcaattgcgcacttcaagaacgcagcatttatgattttatcggccattgaaaaaaaaacgcagcatttttgtgt

SEQ ID NO: 47623 - DNA, 530 bp, Glycine max
agcttgtagatgctggaaatccttctggaatattagtggagagcactgatgggtggaacacagcttctgttgtgggaacattctcagggcctaagcatcgcttggccacagcagcaactgtgaaggacgggaaggtgtatctgaaccatatggttggaattggatacccaaaaaagaagcatgcaattgttgaggcacgtttttaacgcatactttctagaaatctaaacattggggaactgggaatgtggggatcatacatttacaggacgtttagttgaaatttggtgtacctttgcttatttatgtttggttttgttgcattacttggcctcagacctcaatgcttttcccttgaatctcaacctaacataagatgctcgatcgagtcagctaaattagccttctgtcttggaaaaattattaggtaattccgaattatgaaagatctagaggttccagattaatctctattagatatacatttaagtttttcaatttaagaaagatagttaataacactctttaca

SEQ ID NO: 47624 - DNA, 571 bp, Glycine max
gctttgcacctattattcatgggaacatttaagatcctttacctgggtttcaaaggaaaaaccttgagttgcaattgaaccactttgagaatctatagaagtgcctgatgtttgattcacattgtcaaggcttttctcattactagatggcaaattgcctgaaaccaccatatcaacaccatctttactagagattgagtagctgctatcattactaaggtatgtatacttccttagaagagaaccattctggtaaataaacaacaaagggtgaagcttctaataagcaagtaagaggagagggggggcaaataaattttggattcccaacaagaatttgcagtgcagtactcggagtgttcttaaggtatacattttacaaaatatattgggattggtattaataacattgaggaagctttggattcctaaaggtgtattcagaaaaaacttatagctttcaaatataaataggaaattagaacaataacctacatactgacaggaagtgattaactcaatttttacatttacaaatcgcaatttattgccttgtccaatgacaataatt

SEQ ID NO: 47625 - DNA, 453 bp, Glycine max
agcttggattcctcaaatgtacaactaatcatggtgtttatataaagggcagcaatactactaacttgactgtagtgtgcctgtatgtagatgacttgcttgtgacaggaaataatgagattgaaattgccaactttaaaggagagatgatgagagaattcgaaatgactgatttggaccttatttcttattttcttggaattgaattcaagagaactgatgagggagtgatcatgcatcaagggaggtatgcaagagatgtactgaagaagttcagaatggttgactgcaattctgcagacacacccactgccactggtgtgaacttggtgaaagatcctaatgaagaagaagtagatgtaattttgtatagacaaatggtgggctcactgaggtatctttgttgtactagacctgacttattgtatgttgctggcttattaataaatatat

SEQ ID NO: 47626 - DNA, 292 bp, Glycine max
ataatctccgctgccacccatggaactctaaatctcccaccttttggggtgggccattcttggatggccctgattttctcaaggtccacttggaccccatttctaccaactacaaaccctaagaaaactatattatctacacacaaagtacacttctttatatttgcatatagggtgtttttcctaaggactggaaaaacctgcctgagaggtcctaagtgatcatctaggctcctactgtacactaaaatattcatacaataaacaactaccaatctacctatgaaatcct

SEQ ID NO: 47627 - DNA, 655 bp, Glycine max
agcttgtccataatagtcaatgatattttttatgatgttgctttcattgtcatctgccctgcaaaatataaaacaatcataaaaaattaaaaggtgcatgagggtagaaacccatatacataccttgattccatgagtgtcagatctcctctcatgatattttattaatgaagaaagtccttatgtacagatgatgagtatgtaggacgacagcgagttactctgcctaagtcctcaccctataacttattgtagacaaaagtcaccacaaattataaatctcttattctccttttgactcattgtgaaaatatattgaaattcaaagatcgaaaaagcaactttaaatttaaatggctaaaaaaataatccatattttaaaaaagaactaagaaagaaaaaaaaactatctttatattcctctttgaagcatatatacacttcttaaactaaaagtaaaaagtgcataagatcatttttcttcaataatcatttgattgccaattcttctcctcacttgtcttttttttctgttaaaataatttgtttaaatgaaggaaatttttgaaaataattgaaataaaatatttaattatctatctatttgaaatgtaaactcctcccatttaaaaaaaattcttctaaatatttccaa

SEQ ID NO: 47628 - DNA, 426 bp, Glycine max
tggagtaaaaacatgggaccaactcattttatttcttaaaattatattcacaacacagacaccacagtcgtctccatacaaggtctgacagaccatacaagtttcctaacgatttctaattatgtgggccattaaatctatcatatgctgacaataaccgacaagcccatgaatctcttcgggggtggagtaagcgtctgccatcaacttggcctttgttaacaatcggggaaattcttgactcccattcaaggtaagagcaaacccgatccatccacatggttgcctcttggcgtaaaaagaccaacacccttcctctagactttttttccgcatatacttgagcatactcatccccgattctatgctcgtgggccgcggctagacctaactcttcttcgtacttggccaagatagctaaaaatg

SEQ ID NO: 47629 - DNA, 468 bp, Glycine max
agcttggagaggatgcttcaatggaggattttattgagggagagaaagagggagggggagcactaaattgtatgaagacaaagggagagaagttgaactttgagttgtgtctcacaagactcttattcatcacagtacaacaagtgttacacatgcttctatttatagactaggtagcttccttgagaagctttcttgagaaaactctcttgagaagcttctttgagaaaacttgcttgagaagctagagcttagctacacacacccctctcataactaagctcacctccttgagaagcttgcttaagaagattcctaaagaagctagagcttagctacacatacctctcttatagctaagctcacctccttgagatgagaagctagagcttagctacacacccccctataattagctaagctcacccccatgacaaaaaacatgaaaataataaacaaagtgcttat

SEQ ID NO: 47630 - DNA, 328 bp, Glycine max
tccgtgtttaattacgagcgtctcgatattctatctgacacaatttgacatccgagtccaaagctattgtcgtttgacttttcttaaagcttccgtttttgatttcaagcgtctcgatatattatagggctcaatcggacatccgagttaaaagttattgtcgtctgactattcttagagattccgctatcaacctcgagagactcgatatattacagggctcaatcgaacatcccgagttaaagctattgtcgctagatttttcctaaagcttccgttttcaattacaagcgtttcgatatcctacgcgaaacaatcggacattcga

SEQ ID NO: 47631 - DNA, 240 bp, Glycine max
agctttgagcaaattcaaacgataattacttttgactcggatgttggatgttgtcccgtatgatatctcgacactcgtgaggggtaaccgtagcttttagaaaagtctaacgacaataactctctttcggatgttcaattgattcccgtaagatatcgagacgacttgtaacagaaattagaagctcttagctgattcacactacgatttttatctacccgcctgtactatggagccctg

SEQ ID NO: 47632 - DNA, 903 bp, Glycine max
  unsure (1)..(903): unsure at all n locations
cgcagtcgcgatatcgctgttctactcctatcctcgtantagttcacacatcaaancttctgtcgactcatattcccctctccccccaggagagantatgtgaccctgtaagccccgcgatctctaaaangacacgcagccagccagcttatgacaccagagaggagaacaaatttttcccacatcaaaacacaaccgaatgggtcaaaacaacaaacaagtcaaaacccaaccaaacaaaaggatagggacaagggccttgcatacaaaaaggcctaattctactccaaaggtggagaaaaaaccctcggctagggggtcagagaaaacatctccaacgccggacttcagaacaacgaactgtaaacacataaccacgcttccctcaaaacacatgcttattgactacccacacttaccaagatgacaatttaaaaacaacgaagggtctctcaatccaaagaatttcattcggaaaaccaccaaataacttttgaaaagcaacaaaaaaaatatttcgagaaaccaagcgaggacacagacatgctcaacaagcatgactgccgggatgagagaactcaacccaaggactatccaacatcccgagatgggcaagaaactttacaaactctaaaaggtgataggacccgaatcgtccaggcagcattattgttctcttaaacccacaggttccaaacttctaaccaacgcaatgcacggaaaaacatgatttaaaacaaaaaaagacacgtccgaattggaaaactctcaccagaaaacaacgctacataactgtggggggtcttaacaacttgagacggaacggccacacaaaaagggacaatgtgagattaaaacgtgacgcacaatcgtgtcaaggaaataacacacccatcatacccg

SEQ ID NO: 47633 - DNA, 626 bp, Glycine max
  unsure (1)..(626): unsure at all n locations
ttgacagacaaagcaagaaaaccaaccagtcttcatggagtttggaaacgaactacgtcggagaaggtttgggaacacaacggggagagagaacaagtgagaggaatgcgaaaaagcaaatgcgaaaaagggaaaaaaaataaaagtgtaacattaaaaaacgtaaaaaaagaggagagagaaaagcattttttattcatggtaacactgtagcatgatgtgacgtttttaggcgggaaacggggccacgaacatttgacacgtggccacttaggaccttatttgtataatgatagatgatttgttttcgaaatttgttatgcatataaattaattttaaaactgttcatgttatgaataatcaatttagtctctgaatttgtatggggatattattttagtttctaaaattaaaaaaaattcaaataaatctctaaacaattataagaaaattaaatttgacgagtgacaacaacaaaaacactgaaataataacaagactattaaaagttaattaagtatatcatttttattaaaaaattattagaacacattcannataatagtttaaaaataattcttaatataatattgttaaaatatatacgtaagtcagtctattataa

SEQ ID NO: 47634 - DNA, 538 bp, Glycine max
  unsure (1)..(538): unsure at all n locations
agcttgaaccaaacaacttcatgaagatgaaaactcattttgtcataaagcatgttgatttttttaaatgagttttcaaaatacaagaggggtaaacttaaactttcaacaagtttaaaaacataaaccaccttttgatatttcaaatcacttaaaaaaagataaatcaagactttcaacatcatttaaaacatcataactgtttcacactaggattttaaactacacacctaaaagttgtttaacaaatatctcaaaatgtttctccaaaaatataggaaaggtaggtcattcctatgggatataaccttcgtccagggttcataactctactcaccctaattatcattgtgtttctcacactataggatcctactcaaaaacatgattctcccttcttatctcaattcctactaaggcatccatcctcacaccaaactgacataccaacttttactaaggtacaagatcttagcttaagaaactatngngctctacccatcacttaaaactatgaccctttttaccaatagctact

SEQ ID NO: 47635 - DNA, 545 bp, Glycine max
ttgcataatgagaatctgtccttccaacaggctttgcaatttggcatctgaagtctgggagctctgggcagatgggtctgctaaagctagaagtggggctgaagtagaagatgcaaggatgccagctattggtgcaaaggaaaagggaacatcagctgctctgagcttgctcttccttgcctctggaaaattaactgtttggtcattcgcattccaacagttctttatgatataggctaagtcaatgaccggtcttaggttcttgtaggaggtaagagcatcagatccaactcccctcaatctacacaaggctgtgattaaagctgggaagcctaagcgagaagagttagactgagccatcatggtcatttgtccagagatcaaaccgccaatgttcatgtccatccttgtgattaagccatagaccaacctagctctgtttgtgttcaattctggagtgtgggaggtaggagctaggtttgagtaagagaagatgctccatgtctgagccagggtagtaagatcctttctgaggaagcttcatg

SEQ ID NO: 47636 - DNA, 479 bp, Glycine max
agcttgcatttggaattgcgaaagccccacttcatcattaggattagtacctgacatctcaaacaaacaaatcaaacgtaacaaaacaattatagttgctgtttgaatacctcacccactcaagtgtatcacacaattatggcttttctctaatgaaacactcttgccttttaccactctaattccccttgagttcttaggcaattcaagagattatggtcacaacaaagaacaattcaccaatatgtgtaaggtaaggctagagagacaaggaaaaggttaaccaagaaaaaggctaacaatgtttttaggcacaaatgaaggaaataaaattcagaatttaggaattcaagtaacaatccttcatgcaaccaatatattaccttaaagagatatatttttttttaaagttcttcaagcatgaaccattcagcccaattttttttttaattttgctatacgaaattcaactttttttt

SEQ ID NO: 47637 - DNA, 637 bp, Glycine max
  unsure (1)..(637): unsure at all n locations
tttatctaagtactcattcattacaatgtattgaacaactaagtcttgaaataagattacatagagagcatcaaacatcaaaatgatgaaaaacatgactctgaagactgaactttaaaatgaccacctcataatggttttcaagggacaacatcaagtcttccatatgatgccataaatactacgggcacatcaaaaggctgaggttgacaacacttcacttagtccatgagaagatgcaaacttgttgaaagctgaatttgtccatgaaaagctctgatgagaagcattagaatggaagactaaagatattacatagtctaaccttggacaaaacactaacacaccaacaactgaaccttcacttagtgtttatgaaacaatttacttcagaatgcttggagctgtgaaaagtgtaaagtttgatgaagctgtgctactttagaaatgtatatcaatttgaaatcataaacaaaatctatcaagaatgatttctttctcaacaaacatcagaatgactattttgatgataccttagaatgctcatcaaagaggttcctcggaatgggaaccttagattgactaccttanaatggttctgcaaggtgtcaactcatgacaactatcaagtctacct

SEQ ID NO: 47638 - DNA, 452 bp, Glycine max
cacattataatagaagcatatgttcataaataacaaataagtcataagtcatcaaaacataaatcatttgtctaagtcacttgcatctaaaagtcctaattctcttctaatggtgtagaaagaatctttggttagtggttttgtgaagatgtctgcaagttggtttttagtatctacgaattttaaaaatatagtcacctttttcctaaaaataagtgctaattgactaccaacacttaccaagatgaatttttattaacatagaaggttctatcatatcaaaataattttatttggaatacaatataataattttgaaaagcaaaaaaaaaaatattttgatcaatcaatcaagtaattcaaacatatcaaacaagaattatgccaggattgaaagatatagatcacaggcattatcaaacattcagatttgttaaagataatttaaaaac

SEQ ID NO: 47639 - DNA, 624 bp, Glycine max
tactaagcttcagggtgtctatcaaactcaccctttatatatttcggttgtagggaattgttaaatttggagtctggatagtttcaaaatgggtttctatttttggttttatttttcacaaataattgcataagtatcacatagtttccactttttttattaaaaaattgtaaagaaaacagtgaaagcaaggtagtatttttgtaataatttataaaaatagaaaataaaatagaaaatattttctgaaaccaaataggccttttatattttgaaggcatgccattcatcaaacagaagtgtgttcccgattctccatcttgaaattatagtatttaataaacgaattttacgcttaattgcacatttgttccttccacaatggttaatgtgcaattttggttctctaataattatttgtttggacttaattccccaattttttaattatttaatcaaacacttttgtaagtttccgtccaaaacctttgtttctggtcaaataatcagggggttatgacaaacttgagacatgaaattatgtgactggtttagaatctggaaattgggtgaaaattgattaaaattcttgatgaattttgttagtgagattaggaatttgag

SEQ ID NO: 47640 - DNA, 504 bp, Glycine max
agctttcaaaccacagcatcacaaaatctatgtatccaaaacccctcaatttaatggatattcaaggtttaaaaagtgaaattgagaatgggataaatttgaagcaaactctcacctcacacaagtctataacatcaatttaagcttgttcaaactggatttacacctaaaatttcagcgaatcaaaatttgactcctcaacacccaaatttaccctagaaatggctttttgttcactttggtcatttgtttttctctctagcacagcccaaactttctcattagtcctaaatggcatttcaagctaggattgactcactctaacctccaaataccactaaatccagatttggccttccaactctcaaagtctcactcttttttttcactcacaacaccatactctcaccttctaaccataggttaaccctaccctttatctcttacaggtttcatagcaattttacacataaacttcacagcatattataaaaaccctaaaca

SEQ ID NO: 47641 - DNA, 491 bp, Glycine max
gcttgatccttgaatcttgaatcttgaattctctctcctcttgaatctggaagtgttcttcaacttttcctcttgagtcttgaattggtcttgattccatcttaaacattttgaacttattctttgattgacctttgagatttttttcatcacctttgtcatcatctttgttatcatcattgttatcatcaaaacatctttgaatcattcttgattcaccatgaagctttgcttctacatttccaagttagttagttagtaagagtcatttttgtacaaaatacatttttagaaacttctagtgcaaggtttaaatcaaactcttttctctctctttctcttactgggtcttcatatatcttcatctcttcaactttgttcttttcttttctttttaaattttcactggtctttcattggtgatgactatggaagactaaaccactaatccatccaaggatccagttcaagcaatgatgaatttgagttct

SEQ ID NO: 47642 - DNA, 531 bp, Glycine max
  unsure (1)..(531): unsure at all n locations
gtgacactatgaaactcagctttatccaagggacttaccttgaattaattcctttgatagcccttttgagccttggttccctttccttgttttgaagctcactacaagccttaaatgaaaaaccatgatatcaccatatccttaaggaattttggagctttggaattgttttgggaataagtgtggggggtttttgtttcattggataactcgttttgttggctatgcttcatgatgtattttgggccatacttgatgtacattgtatattggctaaatgttggacatgctgaatgaaatgttgtttctcaaaggctatagaaaaaaaatcgaaaaanaagaaaaagataagcaataaagttgagtgaataagatcttaaatggcacaagaatgatgaaactcttggttctactctttatgtttaatttttatctttaacttctttctatatttcttattttttttattaatatgcacttattccccattgctcctctattcctttgggatttagccacttaattcatatt

SEQ ID NO: 47643 - DNA, 309 bp, Glycine max
acccataaaagattggcgcttagggcttcctggcccgcttagcccaccttaaaaactcaagttacagaatggatctggggcttatcataagatagcgcgcttagcgctactacaataaaaattttccagagaagaagtggcgcttagaacatcatccatgctaagcccactggttaaagttaaatactgagaaatgtggggcttatcgcaccgatgtgcgcttagcataaggtctgcgcttagtggatagacaattgccagaatttctaagtctttttttgcttatcttttcacacaagcttaaaaccc

SEQ ID NO: 47644 - DNA, 295 bp, Glycine max
tgcatgtgggggctttatggaggctgtatctttgagcttcaatgtggtcctttaatggtgattatacaccatggagatgcagcgaaagacaaaagacaagaggtgagaggaggcgccatccactatggaataagtcatggaagagggagcttcaccaccaagatgatccttggatattaaggttggagaggatgctttcatggagaaaaagaaaaatggagagaaagagagatgggggagctcaaaattggaggaagaaaaagggagaggaagtgaactttgagttgtgtctcac

SEQ ID NO: 47645 - DNA, 512 bp, Glycine max
  unsure (1)..(512): unsure at all n locations
agctngtgatacacttcctcctccttgggcattctgttaatgtgatccctttggtcctcagtgacctgcatgagacgtactaactcgaatctccaagtcaggacattacttcttgtatcaaacctcactgggttactttgaattcttaagcattgtgaggcacttccatactcagataaaaaccatgtcttcaaacaactccagctgtcagcgagacataaatccccaaggaatgtagcagtaccgatggtgatcgatagtgataggcatgacatctggtctatctactggcactgtgtgcaccagagtgtgacacgtgtaaattgacatgtgtgtctcctgatatggccacactctttctatttgcctactacaccaaccttatanggggcgtaactccctagacatcttctgaccctgaaagttattggttgtaagggtaagtcctctgctcatcaacactacataagacacaccaagcattcacttacataaccatgacgtatgttttt

SEQ ID NO: 47646 - DNA, 679 bp, Glycine max
  unsure (1)..(679): unsure at all n locations
ttgaacaatatacttggccttcatttaactgtctttgggcttggtggccacgctcaacaaagtactttcgacacctactgtacgttgatttcaccaattctgctatgggaatgttgcgacaatcctttaaaaccttattgatacattctgagaggttcgttgtcatgtggccatatcgacgtccttctctatcgtaagccatcgtccattntttctttgagatgcgatcaatccatgttgctatggctggactcagttcacgaaattcttctaaattttgatcaaaaatgtgcttgcaaggagtgtaggctgcctaaaaatagttatgaataacaattctaagtataaatgaaagtaatataaacgtgaccatcacatatgaaatcttacccaatttcttcaacatttcttttttgttcgcattattgaattttcgattgaagttgcttgctatgtgtcgcacgccacaaacatgataaccgtggggaggttgccagccaagtgcttcgtttgcgacaaccggacttatactcgcgtgtcgattagatattagacaaataccattttatctgtgacatgttcccccagtgtgccaaaaccatgacccgctgtaacgtctcactttaaccaccggaagctttatgaagacccaccctttccatctgtgatgtggcattaa

SEQ ID NO: 47647 - DNA, 366 bp, Glycine max
agcttgaggaatcataggaaagatgcctctatcaccgtcacaatacacatgtgagcccgcttaaaggtaagggatgagttatcacaatcacggttagaatgaacatgtgtacggtgccagcaatcttgggtcatatatatatatatatatcacataattgaatgagtcagggtcattatataattagccaaaatattaaagcggcctaatcaatataaaagtatggctaacggcatatatgtcatgaaaggataattgtgtacataccactgatattataatttgatgagaagtcaaattataattatcaaatatggggtaactgatgacatgaccccttaccaatataaggggttatggtcccca

SEQ ID NO: 47648 - DNA, 263 bp, Glycine max
tggcacggatcccctcggtggatcttttcatctcccactatctttattatccggggattcgcagatcatgagcgcattaccggcgctgagaaggacatggacggaccagattagccctggtcccaatggacgaccaagaactgaatatttccttcgcgggcgttgatgcttcaagcaatggaatcgcggacttcgaactgagtctacgaagatctcgcaagagcggttgtcaatatacaggcaaccgaggaccgagagtgatt

SEQ ID NO: 47649 - DNA, 708 bp, Glycine max
ggattgtgtctgtcggggcaattacagacccaaatatacacagagctcttacagtaacatgagactttttttttttgcttcagaaaaattgggagatgttatattcacacaaaacatgaaccagcaggctactaagaatatctaaggaggtggacaggaaccacacgtatcccagatgtggagacaagctgggacaaatctattataccacattattgttacgcaacctctatcgccgcctaatgacaaaatgcatccctcaagccaaaacactcatggtgaaagggtagattaaaattctcctaaacaggtctgaaccatcccgatactaaaagtgacgtatcctccagatgtttatttgcgatgaaaggtagattttggaataccacccttgttctatgttgccaaaatatccctgttaaggccggtcaccgcgtgctgcccgtttaaatttgatccgtaggctatgcggttccatactgtggaaatgcttccctggggtggggggacttgtgtcttcaaattaatccaaaacatgaattcaaccatcatggtaggctttgcccactggaagacccaagcccacccccgctttgattattgtgaccaagggcctacctgtccttgaacctaaccttgctccttcaagggagatacaggtggctaattggcccgcaccaccccaatgcaatatctgtgctcggggct

SEQ ID NO: 47650 - DNA, 185 bp, Glycine max
  unsure (1)..(185): unsure at all n locations
ttctctatttcaatatacacacttcntatcnnntnnaagggtatctgtgcaagcgaagcgacaaatattaaaattctcgtaatcacatggtggcccaaatactagacgctatatatatggctcttcctacgacgcacctcaatgaaaactgctttgcgccactctaacactctagagcttatcct

SEQ ID NO: 47651 - DNA, 899 bp, Glycine max
  unsure (1)..(899): unsure at all n locations
cacgtgtaaaaatataaccacccacccaaacngactaatcatttaatccttccctccnnccncccaggaagcnttgtgatccctcctccccgcccccntataacaaacgcagcgaacgaattggataaatatagcaggaatttttttttgagggatcaccccatactgggagtgacaacaagccacccacctacggcaatgcttagagacattcgattttggaggggggcaatcaaatctttaccttagagaaagaagacggtcgtcgacgtcccaaaacaggaccaagaacccactgtcggggatgggactgacaagcaattaactataggatcgctggggcatgcaaaacacatcctcttcaaccatggtgccttcaggcaaataaaaaacctcttggggccgtattcgcacaaccctgacacatgggacagaaatggccacaaaaatcccatcaggctggtagtaagaacaaatcctaaaaattcaactcctagggaccaaaacaatcgtgcgtaagatagaaacgcaatcacctaccacaacagatatactccatgtgggcaatgacaaccaaaggggaaccggtttcaggaactatacccaaacctgcacccaactggattgaaaaagcggcccacattaatcgccctatctgtatgaagaacaccatggaggaccgagatccttgaaaccacagaaatggtcacaaacttttgcaaggcgcttaaataaaggaaacaaccttcattcctcaaaagaagggaggctccatcaccggaaccaatactagttctccacaaaataataaagatattggggagacataaccttgataatgtacactctccatcatcccatcccgagaggcatgacatgtcgtacataagaagatttcc

SEQ ID NO: 47652 - DNA, 513 bp, Glycine max
tagcgacactatacacaactcaagctttgaggattttcaaacgacaataaccttttacttggatgtctgattgagtccccgcatatatcgagacgctcccaattggatgttgaagctctgaccaaattcaacgacgataactttttactcggatgtctgattgaatcccgtaatacatccagacccttcaaattgattgttgaagctcttaacaaattctaacgacaataacattttactcggatgtctgattgagtcccggaatacatctagacgctctcaaattgaatgttgaagctcttaacaaattctaacgacaataacttttttactcagatgtttgattgagcgccgcaatatatccagacgctctaaattgattgtggaagccctggccaaattaaaccgaacattaacttttactcggatggtttattgagccccggaatacatccagaccctccaaattgaatgttgaagctctgaactaattaaaaccacaaaactttttac

SEQ ID NO: 47653 - DNA, 310 bp, Glycine max
agcttcaacattcaattttgagggtctcgatagattacgggactcaatcagacatccgagaaaaaagttattgtcggttgaatttgctcagagcatcaacatttaatttcgagcgtgtcgatatattacgggactcagtcagacatccgagttaaaagttattgtcgcttgaatttgctccgaccatcaacattcaatttcgagcgttctgatataatacgggactcaatcagacatccaagtaaaaagtcgttgtcgtttgaatttgctcatagcttcaccattcaattttgagcgtctcgatatatta

SEQ ID NO: 47654 - DNA, 559 bp, Glycine max
  unsure (1)..(559): unsure at all n locations
cttggttacccatctggccttgaatcaaaaatttgtacccgtcgcaagagtctgtggtttatgctcctctgctgaccaccatacaaacctctgcccttccatgcaacaacctggagcaattgagcagcctgaagcttatgctgcaaacatttacaatagacctccttaacctcagcagcaaaatcaaccacagcacaacaattatgacctctctagcaacagatacaaccctggatggaggaatcaccctaatctcagatggtctagccctcaacaacaacaacagctactggcccaagcagaccgtacattcctccaccaattcaacaatagcaacaaccccagaaacagcanatagttgacgctcctctgcaaccttcccttcgagaacttgtgaggcaaatgactatgcaaaacatgtagtttcaacaagagactagagccctccattcagagcttactaatcagatgggacaattagctacataattaaatcaacaacaggtccagaattctgacaagctaccttctcaagctgtccaaaatcccaaaaatgtca

SEQ ID NO: 47655 - DNA, 596 bp, Glycine max
  unsure (1)..(596): unsure at all n locations
tcatgtgagaaagcgtggaagagtcagtcttcctacttttgtttgctgaccacatagtggtacctagagatatgtcgaggggtcaggagaccttggggacgtcaggtggggtgctattgcccaaaaccaagcttggctaatcccaacccaacctgggcatagtcagtcagtgagaacctgtgacgtacctaaacaggcaagctcttggcagtcaaccaataaaagaacaaagtccatgaagcaaggaggcttgtgtggcggctggccagctatgtatcttgggtggtatctgcaaattagcctctggtaatcgattaccattcgtgggtaatcaattacagggcttaaaaatggagacaagatgctaaatggcctctggtaatcgattaccaagggtgtgtaatcgattacacagggtgatagggcactggtaatcgattaccatgtaggtgtaatcgattacacagtgtaatttttagtttccaatgtgcaaaggctgtgtaattcgtttttgggcactggtaatcgattacatacttttgtnatcaattaccagagaggaaattcctttgagaagacattttgactatgcgtaa

SEQ ID NO: 47656 - DNA, 496 bp, Glycine max
agcttgcggatatggtcttcaccgacgaaaggatcaaagtgggtctaaaaagaggaaaatctgatcatcatgctttgataaatgcaaaaaaaatggggcaaatgaagagggtgataatgagggagaagtccatgctgtgactgccattcctatacaaccaagtttcccaccaacccaacaatgtcattactcagccaataacaaaccttctccttacccaccacccagttatccacaaaggccatccctaaatcaaccacaaagcctgtctaccgcactttcgatgacgaacaccacctttagcacaaaccaaaacaccaaccaagaaatgaattttgcagcgaaaaagcctgtaaaattcaccccaattccggtgtcctatattgacttgttcccatatctacttgataatgcaatggtagccataaccccctgccagggttctcaaccctcatttttcctagaatacgactcgaacgcattgtgtgtttgtcat

SEQ ID NO: 47657 - DNA, 485 bp, Glycine max
  unsure (1)..(485): unsure at all n locations
ccttaatgcttgatctaactgtgagggaattgtgtattttctgnataacaaaaccacaactaattgtatctattctacaactaacaccctcgcaaagcatttgaaggttatgattatgtgaacgaaagtctttcaatttcactactgttacaagttcgacacttgaaccaattccattattttttatagaaggaaaagtgtgcgactaaatccccttatacccaaagtaaatgattcatttcttttttgggtgaccaaaatagaaagtataaattagtactatactatcagtactagtgacatgccagctatgtgctcccaaaattggaattacataaaaagcaattacgccaggtaactgcaactggcatgaatttcttgcctgataatgtggggctaccaatgacttgcatgccaagaataatttctataatccgtcttgcacttacaataattagacatgatgttaaacccatagccaatcc

SEQ ID NO: 47658 - DNA, 482 bp, Glycine max
ttattcatttttgtttgacataccaaaggataaatgctacaagactacaattattcagcgggtggattaactaatttggaatttttttaatgagagatatacagtcaaatcttagatataattacgttaaatatttaatgaatataaatgtcactgtccctttcattttgcttgccaatggtgattatacttatcttcacagtttcatatgtgtaagtgtaatcttcccaacatgtctatgtttaatcgcattgttgagaatttttaaaataaaaggtctttattttaaaaccacttcccctcaaaataaactaatgtaaagcatttgtatttcccccgacatattaaaatgggttcaaacattgaaaatggtttaaatatcataaataaaaggctgctttttatatttttataaagtggcttataattcacccaaatattatttttaagaataaaaacttttttattctcccaaattttta

SEQ ID NO: 47659 - DNA, 507 bp, Glycine max
tgtgctggagattggacagacaagtattcggcatcaaaatgccaagccatatactgatgacctgattctttccatggcattagctgaggtaagacctgtggacagatatgttggaaaaatactccctgaattagcagccttgttatttaccctttccttaccattggggctttcttgaagtgtgcagttgcaaagattggctttgagaagaaaaaagtatctcaaggttttgaagctcttgctcgtgcccagtgccttctaagaagtaaaccgtctctagcaaaaatgacactgctatctcaggtaagaaacttttttgaagtgtgttgtcactaaagatctcaagttaatagctgatttgctaaatacatattctatgattgagatattgggttataaacttgagccctccattcaacagaaaagaaaaaagaccattatgtcaacaaatgagatattgttgcactctaaatatttcgttctggaaatgagttcatctgagaatta

SEQ ID NO: 47660 - DNA, 385 bp, Glycine max
tgcaagctacacagcgggagaggaaataacacctgctcttttgaaagccaataacgattccagaattggcatcactgggctctctgaagactttgcttcttcctcattttgcttagatgaactcacattcattgttcactgcgcccagaataatgggatgatgattataccaatgctttataacgtgtattcttctgatgtcacacacccagaggggtcttatggagaagcattggctaagcataagataagatctcccgaacagctccacaattgggagatggctctcgcgcaagttgctgacttgcctgggcttcatttcaaatacaggtaccccatgatacccacctttttatgttttaaattttcattggattaattaagt

SEQ ID NO: 47661 - DNA, 472 bp, Glycine max
tttcgagtgcctgtatattgatgcgcctgaaatcgacatccgagtgaaaaggtatgaccatttgaatttctcgagagcttcctatgtttaattttgagcgtctcgatatattatacgcctgaatcggacctcagtgtgaaaaggtatgaccatttgaatttctttagagcatccgttgatcattttcgagcgtctctatatgtgatgcaccttaatcggacctccgtgtgaaaagttatgaccatttgaatttctcgagagcttccgttgttcaatttcgagcgtctcgacatattatgcgcccgaatcggacatccgtgggaaaagctatgaccatttgaatttctcgagagcttccgttgttcaatttcgagcgtctcgacatattatgcgcccgaatcggacatccatgggaaaagctatgaccatttgaatttctcgagagcttccgttgttcaatttcgagcgcctc

SEQ ID NO: 47662 - DNA, 207 bp, Glycine max
cctacatttttcctctaacatgcattttctttctttacccactcctcacgtttggttttttaaggaaaaacaccataacttaacgcgccccaagggatccctatcgcaccaaatcccaatctataacgatgggtgatcaagaggagacgcatgaacagatgaaagcccacatgtcggctctgaaagaacaaatgggctccatgatgg

SEQ ID NO: 47663 - DNA, 602 bp, Glycine max
  unsure (1)..(602): unsure at all n locations
taaacaattacatatcctccttctttgatacaactgattcaaaattatctgtttcgtggtctacccaatgaagacccttatgctcacttagccacctatatagagatatgcaacactatcaggttggcgggtgatgcaatcctaccccccaagggcattggatagaagactccaagaagattgggctagagatgcaagaaaaggccctaaggttctcatgagccttagggtagattttgggcccatgggctaagtatgagcccacttatctttgtacatattatattaggatttcattatttttaggccttgtattttgggctccataatgtaagtagggtaccctagaaatggaggatttttcagtccttgtatcttatggcacctagactagttnttgtatcaggggtagttttgtaatttcacatgcactaagtgaatatttgatgtgtgttgagacataaatttaattgaattgggagaagcccaattcaaatattatttggagggggaggtgagcatttgcttgctacccccattgccacatcatacagtcacactttgtgcatgtccttcatgctttacatgcctcatgacaccct

SEQ ID NO: 47664 - DNA, 443 bp, Glycine max
tgcagcttttgctaaaagattattgcatttgataacgctcatgcatacgcatacacatgcatatttgttatcttgtgacagggacaggatcgttttaagcaatagtcaaatactgagccaaatccaagacagagacgaatcgaggtaagcggtaacgcggccacgatttgctgcgcaatgtcatttcctgctttcaagtacttgggagcgggcacgagtggaggctatgcccgtgatcaacagatcgccatcccacgttcagctctggacaagggagaagcgctactgggaggcagcctagtatcctttaaattcctacttattattgttggtggttcttttaggggatggttggatgcctaatttaccctaggggctttaagtaaagcaacgctgacccatagagagtgcgtacctttgtttttttttttaaaaaatgcagg

SEQ ID NO: 47665 - DNA, 555 bp, Glycine max
gcgttttatagaaaaccccagcttgtaggattatggggtacccatcacatgtggtactatgtgtcggtctggcgatggcgcacaacaagttttccacatccacaatgcgcgcataaacccaccatcccctgttgcccacctccaactgagctcacgtactcccacgtagcccatatcctcgtttctctcaacaccgggtccccatcaatcctcccaagcttccacaacatccaagcaaaacaacattcaaacagcacaagctatcacagccaagcaaaacagagcaaaggcagaaaactctgccaaaacaccaaccaaatcacagcttttctcacttaaagaccccagtaacaattccttcgatccaattcgttaaccgttggatcgactccaaaattttactggaagtctatagtacataagcctacattgtgaccgttgggatctactagcaaacatccagaactcattctgcactagacttttcacagcccaccacacacaaggcattttctgcacaaagccaaatcttgctgacctatttgacagcaaaat

SEQ ID NO: 47666 - DNA, 386 bp, Glycine max
agctttgagccaaaatcctgactcaccattaaccttgacccagggtgagaatgccaatccttaccctcggaagcaaaaaaaaaggagaagagaaggaaaatttccaatcaaagaggaagcataaaaaggaaagaaaggaaattcccaatcaaagagtgggagaaagcaaaaaggaaagaaagaaaattcccaatcaaagaatgggagaaagaaaaaaagagaaaagaaggaaagaaagctcctggtcaaggatcgaaagaaaacagaagaaatatgcagagaggtctttggaccggacaatatctgaacaatacagaattgtcaccaaatgaacaaaaaagaaggaaaggaaaccacgacctaaaatggtcttctccctttaatta

SEQ ID NO: 47667 - DNA, 403 bp, Glycine max
tgtggaatagggttgcttagcctgctgctgaagttggttgaaatttgtatttgacagagcagtaccacacactggatttcctataagactgaaaagcatgagggacacatcagaaaatcaggcattataaatgaaacagcatacagagaatcagattgaagtctaaattttttctcacatcaatatatttttgtattgtgaacggagtgtcactgaggaaatctcattgtcttgcaaatctacaagctgcaattggggacaaatgttgtcacccatgtccaatgtattgttcaatgcattgtttcgtagtttcctgtgaaaatatgaaaattatgatgactatcattctattgtttggataactacttatgatcaacataaaagttaaggacttacacttgct

SEQ ID NO: 47668 - DNA, 444 bp, Glycine max
agcttcaatgtcattcattttgttaatattgttctactgtgttcggtgatgtcaaagaggatgatgcccttgcaggcaccaaggacgttaatgtgctactaggaatggcacgctgatgacttcatgatgattggcatcgttaagtatttggtttggatccaagatggttgttattcccgcgatttcattcagaatcataatattctcaattgcaggagaaaaacgttcatgatccttgggaaatttcggataggaaatgatatcattccactctttgcaaacacatttggtaaccactaacttctttacaggaatccttgccaaaacgccccacgtgagttcatgtggaagaaacattccactgcagcgaggcccttgaactaaaaaaagccattgatgaaaataaagttttatctagatcgacaaacataacaacatgagtag

SEQ ID NO: 47669 - DNA, 624 bp, Glycine max
  unsure (1)..(624): unsure at all n locations
ggacccaaacatgaggtactaagtggcggtctggcgatggaacacaacatgttttacacatacacaatgcgcgcataatcccaccataccatgttgtccacgtacaactgagctaacgtactaacacgtagacaacatccgcggttctctcaataccgggtccccatcaattctaccaagcttccacaacatccaagcaaaacaacattcaaacagcacaagctatcacagccaagcaaaacagagcaaaggcagaaaactctgtcaaaacaccaaccaaatcacagcttttctcacttaaagaccccagtaacaattctttcgttccggttcattaaccgatggatcgactcgaatattntactggaagtctttagttcataagcccacattatgaccgttgggatttactatcaaacatccagaactcactctacattactcttttcacaaccagcaaatacatagcatttttctgcacttgtgcaaaatccttgctggcaaatttcacagcaaaaatctgcacaaagtgcagatttctgaaatcacactttctctcattcaatcttgcccaaatcaatttctacaaagttccaatcatgtatcaatcatgccctacccaaa

SEQ ID NO: 47670 - DNA, 517 bp, Glycine max
agcttatgcccctttctctttcttgctcatacgagcttactttagcatatacttgctttgcttttctcacacatattcatacttgagcatcatagtcatttgttctgcaagtccccctcatgtcaaaaaaggtacctctccatgccgacgtgtgaagttcgggactccactcagccacgtccaccctcacgtgttagggttctggattttggtaagaacatttggcgcccaccgtgggctacggtaaaacataccttgtagcttgtcatcaatcctctcacattcatccattgttagcactcggtctggcctcagacgtgagaccccccttatagactctcatccttgtctggcagctatgatagacacaaacattctacaacaactccaaaaccacattccaaagatggaacgacttcatgaggaagggttgacaaagaaaaaagctgaccatgactagctacggtctcgcgtcagacgtcccacgacaacgagtagtccactcacacctttcctg

SEQ ID NO: 47671 - DNA, 440 bp, Glycine max
cgacctatgaatgttatggatgctcgctggcttgacattccatcgaaaacttttgatcttttgaatggctcgagagctatctatttccttattttaagcgacttcgaaggtcaaacgcctggcttttacctgggcgtgatgatttatgagcaaccgctatttgatagagcacccgagaactaatatttagcatcaccctacgtaatgatcacatataacgaatctttgagttcagaaggagaccatctagccattgctagagcactttcatctacaaaggcagcgtagatatcatatgatgactgaacaacttctaccatttgaagagttacatcttcattccaaaagaaaaagcaatcatgagctgtcgatggaactgctcctactttatgtatccattctcttcccaaaacatgatagagttggcttgcatggaaagt

SEQ ID NO: 47672 - DNA, 509 bp, Glycine max
gcttggaggggttaatggggacccggtgttgagaggaacgaagatacgggctacgtgggagtgcgtgacctcaatttgaaggtgggcaactggggatggtacgttaatgtttgatttgtgtaagtgggagagttgatttgcaccatcacctgatcgccacctagtaccacatatgacaggtgccccataatccactaagcttgatgtgagaaagcgtggaagagtcagtcttcctacttttgtttgttgaccacagagtggtacctggagatatgtcgcgggggttaggagaccttggggatgtcaggtggggtgccattgcccaaaaccaagcttgaccaatcctgacccaacccgggcatagtcagtcagtgagaacctgtgacgtacctaaacaggcgagctcctggaagtcaaccaataaaagaaccaaaaccacgaaccacggatgcttgtgtggcggctggcccactatgaatcttgagtggtatactggaaattggcctctg

SEQ ID NO: 47673 - DNA, 460 bp, Glycine max
tggagaggagggtttgcgaggatacagtaaagttcacactttggtttatggattccttgaagtagcccgtcgatttctggaggaagatccattgttgatgctcgaccaaagtcaaaggtacgggttcggaatcggcggtggttgcgatacagggagaaagcgacggcggaatataccctaatcggtgggaacggtggattgtgaaaacgaaacggacgttgcgatcggagaaaaagggtttaattgaaatatatcgatacgccgctgggagattcaaattggaactttgatagccgtggggactgtggagttaacaccagacgttaacgtttccttttgctggctccaccactataacaatttgtgatggaggaatatatgtatatatgagtgtgatttacctcctatccactactacaaaggatgaattgtctttactctccataaacaaatattatta

SEQ ID NO: 47674 - DNA, 361 bp, Glycine max
agcttgtgcgaatctttcccttttgttctattgatctccatggttaagatagaattcattactcaaggcaaggttgtttggttttgtctttatcgggtacccgaattgtcgtccagcgaggagtgggttgtatctaattccgccacgcatacccaaaagaggtacgttgggatattcaccacaactcacaataatctctccaacatcactagctgcttggtaccaaacaatgtcagatgggtcaagagtcatgattcggcgaggccaagatagctatgcatcattggtcttgaaggcacgggattgaggtaagtggaaagtaaaccactgatagagtaaaggtgcacaacaagaaatggtt

SEQ ID NO: 47675 - DNA, 533 bp, Glycine max
  unsure (1)..(533): unsure at all n locations
ttgtcatacactactacaaaaatcaccttcaaagaaactaattctaagacgtttgttgtcaccataaacatgatgatatttttttaaataattaaaattatttaacgacagtcctataaaaatcatctttaaaagcaactgttcaaagaccatttttaaaaaaccgtctttcaaatcaagtgctgccttcccatttttgctatcattgcctttggctcatcctctctcagtctctcatgcatctctctctttctcacactgacccaactccaccacaagttagagaagccgcaaatctagccaaagaagtttgtagatctaccattcanaagtgcagatttgtcgtcccctcccacctccatggtcatcgtcattggagttcagcgctaacttttggaacatcgcgccagagtacgtcgtcgtcgattcaattcacagtgcaaagagctgtcacacaagtagaagttccccatcaattcntcctcactaatcagccttacaatcgacaactcttcttttatttcttttctttc

SEQ ID NO: 47676 - DNA, 266 bp, Glycine max
agctgggacgatatttaattacacttttttaaatgctttaggtgattattactaaacaagtttgattgtaatcaacatgcatttgagaaaaaaaaatcgaaagatacatcaaggaatataaaatgaatgtttaacagattgaatgtgcaaagattcttttatgtttgatcctaacagccacgaaaatgttacatcctttttctttttctgtctgaaaaactgatccagatattttgtaagtttccgtgaagacacgaagaggggat

SEQ ID NO: 47677 - DNA, 267 bp, Glycine max
tacttttctataacctcctccatttaaggaagagaatacctctctgatatcaatgtggtgggacacacatgtgaggtgaaatctcacactcgatagaagaggaaagattgagtaccatccataaacctaagccttaacgctttaagttaaaatatggtgccaagattccttgcgtccttatattggaagaatcccagagagcaattttgtaaacacaaacgaactttcaatttcaagagatattttataaaaaaatataatgcccat

SEQ ID NO: 47678 - DNA, 379 bp, Glycine max
ggacctataaaactcagctttcatatatgcttattatcattatacttttgatgctcttcatggcttggctgataaacttttatcacttccccactaagtgttggattcttccgatacatcctctttagattatctccatactctcgatataaagatgccacaagaactgctttacagtagtctggtttttccagcataagtttgcaaatccacttgtggcagtatcttatgcttcaatgtgcagcttaaactagaaccatgactgcttgctgtggagtagaaacaggactaaaactttaatctgaagcctatctgttaatcggctgggcaagtgggctcaaataatcgctgataggttcatgcctcgttgaaggtgaaa

SEQ ID NO: 47679 - DNA, 520 bp, Glycine max
agcttttgggaggggctgaagctcctgctatctccctaaaacccatcattgtgcatgtgttgttcattttattttattttacatttttaaagaaaagttagttgtgtctgaatgtcatctttataaaaactaaaaactagttgtgtgtaagtgtgtattattcttttttttagtgtatatgttaggagtttcacattaacaagaataaattacttaagagtgtgtttggatagagaattttaatttaagaaggtaatttatcagagaatttgaatttttgtaatttagaattcattgtttggatgctttttatgaagaatttaaaattttgaaattttaaaacagaattttaagcaactaaaaatctggaatttcaatctccttctaataattgagaaattgaaattattctttttttaccgctttttcagaaacacgtatacctaacacacccatcatatcttctcttttttttatcctcataatttaatttctttatccaatacaaattttgaaataa

SEQ ID NO: 47680 - DNA, 416 bp, Glycine max
agcttgactgggtcatttgagtacttcatatatatatttgaaaaaaaagagtaggccacttaatggacctttgcaaataacaaataaactatcaagttatgaataattataatgtaaaatcaggaaaattttcttacgaaaatatgtttctatttctaaaaatacaaaatcccgttgatattgacatataacagtcctaatagaaatttataaattactttggttaaggttaaacacgagtgtatatcgaatacctgcacatttaatccttttgattaaataaattaaataaactgctattgacttttttcctaaacatgaatactcaactgaatgcatgaaacatattagtctataatatggaaaaaaaatgaccaatccttattacaatacaatatgtaactttattcaaacag

SEQ ID NO: 47681 - DNA, 599 bp, Glycine max
  unsure (1)..(599): unsure at all n locations
tttaggagaagcctgaaacccatgaaaatgatgccaaagcgtaagaagagtaagtttgtgactttgttgcctctattgtggattccgttaaggtagtgataaggtgtggaagatgccccataatactatggaatgagataaatctaaaggccattattttttgtgcaccatacacaaggaaatttacttcctcagtgtagcttgcgccataacaacaacaacaacaacaaagccttctcccctcacccaccccccttttttaaaaccaaacagagacccctccccccttttcaagtgcaacatcattttttttcttaaatagagccttcatctacatcaacataaacccttccttcttacacctcatcatcaccatcttttcccccctaatcttcccactctttttctttattgttctaaaatccatcaagctctttacaccccaatggcccttaagcatgaggaagtgnatggagtcattgaggaacaatgtttatctcaacattctctatttgaactctttgaggtaaatccataacccattaaagtagatgagtatttntatgacatanattanatgtggattgtgtgagatgggt

SEQ ID NO: 47682 - DNA, 413 bp, Glycine max
gctttgagaggatttgataaaagataacttgggcatttagcttgaaaagctagtataaaacaactagctagggtcaagccaaatgtggcttgtaaaataatacttgtactttatatatgtgatagtgaaaatttgtggattttccaagaattgacgtagtttcaaagataaagatgaaacaatataaaatttggtatatctcttgctctatctatttgtctaaccttgaattgtgatttctatcaacattgcttttagtaaaggtttttatttatttatttataaaattgagtttttggaactgttgtttgtacaacttaatatcaatcacacgtataaacttattctaatagacatataggtttttttttacaggtttaatttgcaaaaaagtttaaagaaacatgaatcaa

SEQ ID NO: 47683 - DNA, 649 bp, Glycine max
  unsure (1)..(649): unsure at all n locations
tgctgaacaggctctgtttgaagcaacaattgtattctttcaagatgacagaatcaagattgataacagagtaacatgatgatttaacaagattcttgatgacttggaaaatattgaaaaaaaaacttgatgatgaggacaagcccctcctccttctcaatgctttgccaaagtcttttgagcatttcaaggatgtttttctatataagagggatcaaaccattacttaggaagagattaaaaaatcaattcggattaaggagcttcaaaagctctaagagttaaaggcagatgatagtggaggaaggttgaatatctcaagaggaaggagcaagatgagtggaccaaaaaggaagaagttcatatcaaaatgaaggagtaagtcaaagctagagtagttcaactgtcataaaattggtcatttcaagacagactgagtactcctataaaggaattctttgagaccttagacctaaaagaaggaagagtagtactcctttggaacaacaaatcatgcaaagtgcaaggcataagtactatcanactaaagatngtttatgatcacgagatgttgttgcagatgtgaatatgttcctgaacttaaaggaaatctttgtgctaatcatgtttgaattttgggatactaatc

SEQ ID NO: 47684 - DNA, 506 bp, Glycine max
agcttgaccaatgaaaacaatatgatcagcgttttttgagaatattaataggctctttttggtttccaaccaagtagctacggcacagattttttacaatggcctgtctcatcattccaatgagaccttcccccactaagttaaacaacaaaggggctagaagatccccttgtctcacacctcgagtaggagcgaattctttagtcggactaccattaactaaaatggaaatagatgctgattgaaggcaggcagcaatccattgtctccatttagtacagaatcctagtcttgacagcatgtagtccaagaaagaccaagatactgtatcataggccttttcaaaatccactttaaagaccataactggctgctttgtcttcataagcttcctccaccacctcattaaggatcagaattccatgaaggaggctgattgcctttcatcaacaatacccgaaaaacgggcctcaacctgtttggcaaagcttggatatgactttgta

SEQ ID NO: 47685 - DNA, 612 bp, Glycine max
gcgacactctttaatactcaagcttgccgatgtaaaaagccacttatggggaccaatgtggacttctaaaaggcttacaattcagtctcatgggcctttcttgactatatgctgcaaagaatgggattttgtccaaagtggagacaatggatttcaacatgtttcacaacagcaaccatattagttttagttaatggcagtccctcaaaagagtgtgtcccttctatgggcttgaggccaggggaccctttatccccattgttatttaacataattggagaaagcatcacaagtttgatgagggaagcactgccaaaaaatatatatataagctacttggttgggaagaataaagagcccacttatattttgtcatatgctgacgacacagcttttgtgggaaaagctctttgggagaatgttctaattttgaatgcctttgctggaaggttttaaattggcttctggattaaagatcaactatgcccaaagtcagtttgggattattggaaggatggtccacctgggcaaatgagagcagcccaacttttgtaactgataccaataataacccctttctttattttggtatcccaccgggaaaatggaaat

SEQ ID NO: 47686 - DNA, 308 bp, Glycine max
agcttgataagatcttgtattttgtctttcaaggcgttgtattccctttgtgagtgaccatgattgtgctgatatccataacgctttgagtagttggattttggtggggggttaactcttttcagcataatcaaaatgtctatggccaaggcctgatccatgatatgagatttattggcggcaaggggaatgtactcaccataaccttatatttgaggtggcatccctcattcctcctcctgagcttttgttggagctaagcttatcattatcctttttggccgacatggcattcacctgcacctggg

SEQ ID NO: 47687 - DNA, 527 bp, Glycine max
  unsure (1)..(527): unsure at all n locations
aaaagatgtgatggccgagggattatcatcatttagacgggccctccatccaatgaatatcaattattcatgcagtagcgccgcgttcgtttggaggcgacctttacttgtcgtctcttaaattacctccccgggcctggcacggaataatgttctctcgttgatgaatgaggtaaaacagttcgtgccgaccaactacacccctgcaacatacctttattgatgaaatctatgacccccaagcagcttttacaacgctgtgactcctctgcgccggaatatctccgccactggagtacaactcgttgacaaaataaacttggcttatattcgccacttnctaacattagagaacggtgagtcacccctcaataaatgtcctgaaacaaagaatcgtttgcaaaatactcctttaagggaaaattgccccagaatttaactctaaacccgcgccgtttgccaatattatagggcaaggtcctccggaatcctcccgggggttcactcggtggggttatactccaacc

SEQ ID NO: 47688 - DNA, 499 bp, Glycine max
ctaagcttatgagagcgtttttaatttgaaaactgttagacacttttgtgacaagtatgttgaaatttggtaagtttacaggaaccagtagagaagtggcagcttctaacaatggttgaggtgcacaagtttatttgaattaaggaaaaaacttatatgcagtagctatccaattataattgaagattcgtcttgataatttgtgtaaaggtttataaatattaccaatataagctactgacgagaagtttaattctgataggaaaacaacaactaagtaactatataaaagttttgtcttgtaattaatgagaaaaagttaattcatttctcttctcactcgacaaaaagtttattgaaatggactcttggcaacatgtttgatttgctcaaaatggcaattgcatgaccgtggtctctttctttttctttttttttttcagctgtctctggtgaaggctttctggcacgtgatataacttttgagaacaaagcaggc

SEQ ID NO: 47689 - DNA, 455 bp, Glycine max
agcttgctgaagatatggaacatgtggtctatgctatttcaaaagctgttgtacatagcaaggtgcaacaactatatactgaagaaagcaaggtgcaacaactatatactgaagaaagcaaggtgcaacaactatatactgaaatccaaggtcgtaatgttgagggggctatagaaaaggtaggtactcttgaaggggagcatgtcattaatgaaatttcttcctccattcagcaaacagactgcctgagaaaagtggttcctgttggtgttcttgctgggtccatcttagcttccttgaggaaatattttaatgtaactacacttcaagatgatcacagaagatctctgatccatgatgatgaggaaaaacctaccacgaataaatatggcaatcgaacgtggcacaaaaatagatcaagtacctgacgagaaaactagtttggaacatcctat

SEQ ID NO: 47690 - DNA, 666 bp, Glycine max
  unsure (1)..(666): unsure at all n locations
tataccatcatctaaccatcctaaccttttcttttctttcctttttgcttcacacattttccaagggaatacttcagcatggacacaaaaaagggcgtataaagatgctaacaaactttccacatacaatttattgatatgagttgcgtataatatttaagtggattaaaatttctattcttatttctaacacatttgcaatttcaacagtgattgttggagagattgccaattttgcagcttatgcatttgccccagctatattggtcacccctcttggtgctcttagcattattatcaggcatgataaaaaaatttagctttaaattgatgcttgactcttggtaaattttgatttttgacgtttgcttgcagtgctgctcttgctcatattattttacgggagaggctacatatttttggaattctcggntgtgttttgtgtgttgtgggatctacgacaattgttttgcatgcacctcaagacgggaaattgaatctgtttcagaagtgtgggatcttgctatggaaccaggtagtcatggtcctacttgatatatcagtggctggtatcaataggtatttgtattgaacaactaaccaacaaacataatcttttttctgccgcatttctcttttatgcagctatggttataacagctactt

SEQ ID NO: 47691 - DNA, 447 bp, Glycine max
gcttaacataacaagagaaatagtcttttttttaaatgcataattataaaatcagacttccacttcaccttggtggaagattaaataaggtaaaaccaacattataaattaaacaaaaaaaaaaggagaacatgggtgaagagaagaaatgtatgtaaatatatgaatacatgattttgatgatgttaaagaagaatcaaacaagattgtttcaaaggataaacattacttcaagattaatacaaggttgtttcaacaaacaaagtcttgcttcaagattaactcaagatcaagttttgcctcaaaacaaagtgtttccaagacattcaaggctctgataatcgattaccagacagtgtaatcgattactagaagacaattttaaaaaataactgctaaaaatgattttgaatttgaattctgaacctgtaatcgattaccagatgt

SEQ ID NO: 47692 - DNA, 502 bp, Glycine max
tgaggttccacgcttcgatggcacggatcccctcggatggatattcaaaatatcccaacctttttattatcaggggatccccgatcacgagcgcctcaccggtgcggcgttctacatggacggtccggctttgtcctggtaccagtggatgtccaggaacggattcttcccttcgtggccggtgatgcttcatgcattggagtcgcggttcgcgccctcattctacgaggatccccaaggagcgttgttcaagctccagcaaaccggtaccgtgagtgattatctcaccgatttcgagcgcttagccaaccggacgataggcctccctccctcgggcctactcaactgctttatatcaggattgagcccggagcttctccgtgaagttcaggccctccgtcctttttctctgccgcaagcgaccgagcatgcgatgctccagaaagataagttgctcgaccgccgccgcggtactcgagcccctccacaccccaaccttaat

SEQ ID NO: 47693 - DNA, 970 bp, Glycine max
  unsure (1)..(970): unsure at all n locations
tgacatattttnttgttgactgcgattgcaagnaacccggcgantctttataagtcgaccctgcaccgcatgcaaagctctgccatttgcgtcaaagaatgaccnatcttatcttattattaggtattgggtctctgttgggtgccattaacaagcaacaatcataacacctaaactctttacaataaacaagacaaatattttatttatttctgcgtcaagaaacacattagcggagtaattgatatataatgatacaaattagctactcacgtgtgtgacatataaaattgacanagagggagttattagaagtgaaactcacgccgtactctcatatatatgtggactgaagccttggcacgaatctatatatatgtaccataacgttctagccacactatcgtatctcccgcctaaattgacagaactgcactctccttcaagcccaggaagaaccatctgtgttgaaaaatgtaaaattaaaaaatccctttctcccataacgcttttgaaaccaccgactcatatgtaaagaagtaacngcactccctcctagcacccttattttccaatggaagggttgcatttctgaaagaccaccctttgtctctatgttgccaaataggccatgttaaagcaatccaccaacatttccaccttttagatttgagtacatcagcttatgtcaattccatattgtaagaaagtgtagtctacggggttttgtgcatttgttggctttaaacttgaccccaggacatttgacttcccccccatagaagggaatntggtttgtacaagttaaaaaaacagatgcgccacgccccctcttttataatntattggcaaacggcaagaactttgtcttgaacccataaacttgtctcccttataaggtaaaatatgggttggtaaaatggtccttgacaaatctccctggagatacaatgagccttggttggatttg

SEQ ID NO: 47694 - DNA, 608 bp, Glycine max
ttaacctaatcgtctctcacagtctttagatttgggagccaatccaatccttgtgtccggactctcagccacttatgatagccaccgatgatcccattactgcttcccctaagctctctgtcctttcttcacgccgcatcccatgccttgcaaactccttggagtaccctcgcgttgtggtcactaaaaccccgtgcgatgaaaggcgtgatgctttcgtctaatggcgctcctctcatggggtagccaagctgtcttatggcgagaacgggattataattaatacaaccccttgttcccatcaagggaacatttggacatccttcgcatgaagatagaatcttgattcttccttccttcttagcgagggaaccaattaacagacgcccccccatgctagccaagagttggtcccaattcgcctttcctttttgacgcatgagcggtaaccttgtagcggatagacgggcctaccttcttggagaaaaaggtgtgaaaccagccccacatagagagctggagtacagcaaacaatccctgcattgctttcttcacatcctccgtcgaaggtatcatataggtcggctagcatagtgacaaccggactt

SEQ ID NO: 47695 - DNA, 492 bp, Glycine max
agcttgtgcaaatcaaatcactcctacattttatctctagcatgcattgtatgttggtctcgtcctttgtcacaggaagccggaaggtccatatcaccttcttaattgtacacatggggcactgcgcccccaaatgcgcgagtaagaagagataattttccgggctctcgtgtccgtaaaatgcattcatatcatgcatcgcataagcatctcttcataacatcataatggacatatcctgcatttgtccgttatcatattccagcctcacattttgcatgagtcatggcatcatcatgcatatgcgttcaacaaactttttgatctgcaaaattgcataccatttgttttcatgtttgctcatccttgcgttttcctctacaaaacaaaaacaaagaagggggaagcgtgaaacttcacactacattcttagtttcatgtgttaggagccaaccatgttgggatcataaaccccgtttacttaaaaacaaa

SEQ ID NO: 47696 - DNA, 481 bp, Glycine max
  unsure (1)..(481): unsure at all n locations
tgcacagtaggtaactaattctgttttttacaaaatgaaataactaactaactaatttccattgatatatagagtgactactcagaaggaagggataggccttgattatgtccatctaatcaatggagagcttgtaggccttggaacttcttcatcaatggagtccattgcttcttgtaggccttgattatgaatgaaaaatgatagaacctaaaatcaacacaaaaacaagattcaagagtagatctacaaattttgaaccatagaaatgcaagaacaagtgtagatctaagatttaatcggtttaattntttttgaatctactctaaacagcaccaaaccacaagacaatggaggatatacatggagaataagatgaataacaaggaattaaagagaattcaccgaacaaaaagatagaggaagcanaagaacatcacctagatgaagatgctcttgataccacatgatgcaaagctca

SEQ ID NO: 47697 - DNA, 426 bp, Glycine max
agctttggggatgagcaagtaatcagtttcggaaatttaaacaagcacgaaccacacctgctgccaagctaacaagtaataacgtatctcttgtggctaaagtatccatcagtatctaatatctttcaggttctttaccttgtaaattttcgaataggtttttctttttttattttccggtaaaatatgctggaattgatattgttttattaccctttgtttttttcttcatcttttccccccaatactaggctgtaggtttccacttgtaattttgtatcaggcaaagaaaaagaaaaagaaaaagaaaagcagtgagctttcatccaaaattacgttttgctattatcatatttatcaacagcttttgaatttgatagcagaagtttcccagcatggctgaggttatatattatacaaactggc

SEQ ID NO: 47698 - DNA, 646 bp, Glycine max
ctttttgcgacactatatccaactcaagcttgttcctctttacctgtgacgacccttcagatgttatggcaagggtgtcccacagatgcttcatacttctaaagttacatagaaaaacattttatgcttttgagttaagcaaaaatcattgtttttgttcatccttccactggcttttaggaatctcatttaactcttcatcaataggaatttgatctccatttcccacaacatcccacatgttgatgttcatagattcaaaatgtgcaatcatcctttccttcaagtaaccatatttgattcctttgaacaaatgaggcttattggtggattaatcttcttccatttcttgctttgatagtatctttttccttgtatcagttagatactcaacccaagaggctaaactttgataccaattgaaatagtagaaatcactctaagagtggagggggttgaataatgtgattgatataatacatattttcttgcaagatataagattttttaaaacactcgtccacttgtcaaagactcacatagacagacaatctttcactacttgataaatacaggttttatgaaagatcatagacttgtgtgaaaagtgccaacaataattgctctatgaatattgtagtaaagc

SEQ ID NO: 47699 - DNA, 516 bp, Glycine max
agcttctagccaaaaggacttaccttttattaattcctttgatagcccttttgagccttgtttccctttccttgttttgaagctcactacaagccttaagtgaaaaaccatgatattaccatatccttaaggaattttggagctttggaattgttttgggaataagtgtagggggtttttgtttcattggacaacttgttttgttggctatgcttcatgatgtattttgggccatacttgatgtacattgtatattggttaaatgttggacatgctgaatgaaatgttgtttctcaaaggccaaagagtaaaaaaaaaaaaaaaattccacaaaaaaaaaattcgacaaaagaaaaagaaaagcaataaagttgagtgaataagatcttaaatggcacaagaatgaagaaactcttggttctactcttcatggctaaattttatcattacctccttatatttccctatttatttaagatgcccttattccctttgctcctctattcctttgggatt

SEQ ID NO: 47700 - DNA, 413 bp, Glycine max
cttacaggggaactggagagattacaatgagaacattctgattttatgagacagaatctgacactgaatccattgttgggaatcagcatgtcacgcaccgcacaagcaagtctgagcttgaagcctgcatggcaagagaatctaaagttagaggtgcatccgaggaaatgatcttgacacttatccagctgacatctgaaactgaaatgcaacgcgagaagcataagatatgaatacaggcagcatatttgagaggaactgaattaccatgcttgattgaagaagagataaaagcttaagtggcctgaagaacacatcagcaaagcagctggaaaatgctctgacatttactgtttactgaaggactactgtgcgtcatcaaaatgcactgcgcgtatatcaactattgagag

SEQ ID NO: 47701 - DNA, 51 bp, Glycine max
tactgtgaactaacctgacatactctccctaaatgttccattgggcataaa

SEQ ID NO: 47702 - DNA, 423 bp, Glycine max
  unsure (1)..(423): unsure at all n locations
aatctatcttcggatcatatgaatgcaagtcatttggtttggacctagtcatacatagttcagctcattggtgatagaaacgacacagataacaaacaactacccttacaaaatattatttacaatatttgttgaaatgatacaaaaaatggaaaactgcctttaatcaatttttaaaaaaattcanaaacaccaccctanatgtctaanaatcatttttgattcttggctatttttttgtgacactactacaaaaggcacatacaacgatgattgtataagacattcaaagacggtttaaatcgttattgtagccaacgtcgttgaaagtcaagactttcgacgacggttccaacaaaaaccgtcttataaaagagtacctttctaagacgtattttaactaagaacctgtttagaatatta

SEQ ID NO: 47703 - DNA, 146 bp, Glycine max
ttgctccttaccttagccttcttccatatgcattcctggtatggtttcttggtgcacgcctcacattaattttgaaatggaactttatcgaactgcggttggggggaaattaccaaagcttagctagtgatttaatccaggctgcc

SEQ ID NO: 47704 - DNA, 430 bp, Glycine max
  unsure (1)..(430): unsure at all n locations
acttcttatttccagaaggaaattcattcaatagacctcttatctttaatggagagggttaccactaccggataacccgaatgcaaatntttattgaggcaatagacttaaatatttgggaagccatagaaatagggccttatatacccaccacagtagaaagaattacaatagatggaagcacatcaagtgaaagcataacaatagaaaaacctaaagataaatggtctaaagaggatagaagacgagtacaatacaatttanaagccaaaaacataataacatctaccctggaatggatgaatatttcagtgtttcaaattgtaagagtgctaaggaaatgtgggacactctactaataanacatgaaggaactacagatgttaaaagatctatgataaacacattaactcatngaatatgaactatt

SEQ ID NO: 47705 - DNA, 438 bp, Glycine max
  unsure (1)..(438): unsure at all n locations
caccttctccttaagccaatccgatggcttattgagcatccgctaagcgcaacactcattggctaagcgcaagtaagaatctggaagaagatgagctgtgcaggttcactaagcacatcgcttcatctcactaagcgcactgcttcagtccatccgctaagcgagaaaggcacgcgctaagctgaaattcattaatgtgcggctagcggtccaaaattgcgctagcgcatgagcaagacaaggccacctatttaagcttgaaatcagatattgtgaagagagattgggctaggattcagagctttgcatgtctagagattctagagagagaaaggtccaagttccaaagagttttgggagattttgctgtgtgaagatttgcanagactagagcttgagtaggagccgttctgagatctngagatgagtntgtgagag

SEQ ID NO: 47706 - DNA, 527 bp, Glycine max
  unsure (1)..(527): unsure at all n locations
aacgattttgaacctttgattcgagccatctgaacggacccttaagcaccgcagctgcagcttacagagatttagtatgaccactacctataataanataacttaatgccattaacctagggaattaacacanactatatgactgagtggtactgaaactgttggcaaccaataatcacccccaacaacccacaagtcgccaccatttggctccaaaaggctgatgcctacgttgcaattggcccttattcaacttgaactaaatgcctttcatgttattaacccagaacatatgtttggtcagtctactttacaagattgggcattatttaaacgaactaaacactctaaactgagatagagtggtgtcattaatcctccatttgggccatgtacaactcacaccttggacttttctcctagaacttgagctgtcttcaaaattatggacacacattgtgaacagcttcttggcttacttgctatactcttgtcatacgactccaagtcttcagccgatctatgcg

SEQ ID NO: 47707 - DNA, 356 bp, Glycine max
  unsure (1)..(356): unsure at all n locations
ctgtatgaatatggngtacccatcacatgtggtactatgtggcggtctttcgatggtgcacaacaagtntncacatccacaaatagtgcataaacccacctatccctattgcccacctccaactgagctcacgtacttccacgtaacccatattctcgtttctctcaacaccgggatcacatcaattctctcaagctttcacaacatacaagtgtaacaacattctaacaatataagctatcacagccagagatcagagcaaggctgaaaactctgcaaaaaaccaacataatactgattttttatttaagacccacaacatttctttcgtccaattcataaccgttggaatgact

SEQ ID NO: 47708 - DNA, 332 bp, Glycine max
tttacctttactaagcaatccgagtttttgatctccgctagccacactcattgctatcgcagtagaactggaaaaatgactgtgcagtcactaaccatcgttatctactagcgcactgttagtcatcgctagcgagaagccgcctagctgattattatggcgctacggccaaatgcctagcgctacaaaacatgccctattagctgaataatttggaaaagttggctagtcaacttgctgctaagatctaaagaaagtcagtccaaagtttgaattgtgggaattcaaacaactgagttggcgttaaattaaggttggaaatggaactagga

SEQ ID NO: 47709 - DNA, 544 bp, Glycine max
  unsure (1)..(544): unsure at all n locations
agatgagctttgaacattggaatcagatcttaagtgactcgttgataaccctgangttggagaataccactgcacgtgctatgcacantgttaccgnggtatattttacatcttgcccaacaaagtcaggttcacgataactcgcttgtgcttctccttcatggctatatgaacaaagtgatcgatccaatatgttggatgaagttganaatgaagccgcaattatactctgncagttggagatggtattttcctctgctttctttgacatcatgattcacttgantgtgcatctggacagaagaaatcaaatgctggggtccttgttatctacngtggattgtacccggtgagcatacatgaagatcttataagggtatacaagaatctatatcgtccgaaagcattcattgttgagaggtacattgcagaagaaaccatttgaatttgntcaaaatacttatagaaagctaaagctgttgtgcttctgagagtcggatgatgacagagtgtgtggatatggtcaagaagactgcatgtgatn

SEQ ID NO: 47710 - DNA, 468 bp, Glycine max
  unsure (1)..(468): unsure at all n locations
ctgtgaatcttcgtctaatgttntagacaataacaagctagagtcatgatctgatacaacattaaaagatgacatntaagacttcatttaatactttgtgtttgatattattattttgcagagacattctcctaggatccatcgaatcctatatagagtaaatgaagccgaaattctgaaattcgtcaatcgccatcaatagaagtgctctgctatgcagacctgctctgacacaaaaggaagtagtttctggctagagtattcgacacaatagccaanaaaagtggttatctagtatgaagaagtacatgcatttaatgcaaatattaaatgctccaatggccacatttttcagatgcaagctaaagagaagaaaattattcatttagagacaacatacatttgttaaagaaggcctataaacaccaaaagctttgaagacatgaagaactaactaaagtgctctta

SEQ ID NO: 47711 - DNA, 280 bp, Glycine max
  unsure (1)..(280): unsure at all n locations
aaaactcttttcttagtatanacgttgtttctacttcaataccctgtgaactacttcacatagacgttattggtgcctctagaactatgaggttgggtggtaattactatggcttagttatagtagatgattactcaagattcacatggactttgttattgaaaaccaaagatgaaacttttgatggtatttgcatacttgccaaggtcattccaaatgataaaaggtcttaacattgtttcacttaaagttatcatggaggtgaatttcaaaatgagtc

SEQ ID NO: 47712 - DNA, 545 bp, Glycine max
  unsure (1)..(545): unsure at all n locations
agggagacgattgatccattcgactccccgcctntaagtacgctccctgcatgagctncttgaanttgtnagagctcctccttcttctgtgttctataagctntctgaagtnnnnnggnattcttaacctnganaacntgtgctatgcatcttttcattctcttctgcctatgccaaagagaattagtagaggactaaccgnctgaattctttgtgactcccttctctcttgtcaaagaattcaaaacgacacagtctgagaattcttttgagtcttcccatgtcctattacaatagtgttcaaaggactaaccggctgagaattctttggtatacccattcacaaagtattaaaggttaacnagcctgagacttcgtcttacacaattggaggatacattctatgtggtacatgagaggtgtcatctaattgtagtagattgaaaaatgagagggtctattgtagggattgtaattttaaggtaacttaaaatagacgatgtgtaggttggataagcgcggtgaggtaactatcattgcgttcg

SEQ ID NO: 47713 - DNA, 459 bp, Glycine max
  unsure (1)..(459): unsure at all n locations
cgtacattaggatattcatccttcanaagggaaaggataataggatataaattatggatgttatcatgttgatgctatttgtgttctcatttcaaaacttatcatggacttgtgtaattgtcttattgaatttggacttgtgttatcaactttaatacttcaattattantttggattctggagtatgaataaacttctcttaatcaaataaaggtagttatatgtgaatatatatatatacatatatattctgaatgttttaatatatactggatcaaaccgagccaataactggccattgattgtaccactaacccattgatcactacctttaccggtcaatgacgtaccggtttaacacattgcccaatggcacgtgatgggataacattcattctgctcaatatgcatgatacctacctcaatatttttggctgtacagcctctccatggttata

SEQ ID NO: 47714 - DNA, 401 bp, Glycine max
  unsure (1)..(401): unsure at all n locations
tcactatgaatgacaaattccttgggataaaggtagtgttgccatgntttcacagcctgtactaaggcatacaactccttatcataagttgaatagttaagggtatgaccacttaacttttcactaaaataagcaattggatggccttcttgcatcaacacagccctcatcccaacattttgaagcatcacactcaatttcaatagatttttgaaagttggcaacgcaagtatggcggcattagttagctatcgcttaagaacattgaagcttcttcttgtttctctcctcatttgataccaacatatttcttgagcacttctatgagaggtgcttgccatgtgctaaaatnctacacaaatactctataaaaacttgcatagccatgaaaacttctcacc

SEQ ID NO: 47715 - DNA, 363 bp, Glycine max
  unsure (1)..(363): unsure at all n locations
cgctaacccatggaagctcctaatatctcccacactnttttgggtggtccattcttggatggccatgattttctcatggtccatttggaccccaattctaccatctacaaacccaaagataactatattatctacacattaagtacactattctatattngcatagagggtgtttttcctaatgactgacagaactcgcgtgagatgtcctaagtgatcatctaagctcntactatacactataatatcattaaaatagtcaactacaaatctacctatgaaatcccttataacatgaagcataagcctcataaaggtgcttggtgcattagtgagcccaaaaagcatcactagcctttcata

SEQ ID NO: 47716 - DNA, 82 bp, Glycine max
agcttctattcctgcacaaatgataatagtgaatattgaatatgtcaatggtagaacctgcgtaccatgagttctcgtaggg

SEQ ID NO: 47717 - DNA, 326 bp, Glycine max
  unsure (1)..(326): unsure at all n locations
tttagtatgaccactaacctaaattanatattttttgccttaacctaggaattaaaaaacttaaggctgatgtactgaatctggcaccaaagtcaccccaacagcctacatgtagccaccattggtctccaaatgctgtgcctaagtgccaatgggcccttattaatcttgaactttcctaataaagccttttattgataacccaaacatattttggtcgtcaacttcaaggatgtgcatattttacatactaactctttaaattgatacaagtgtgtctttaatactctccattgggcatgattttcatcaacctggactatttc

SEQ ID NO: 47718 - DNA, 167 bp, Glycine max
tcaagcttttgtagaatgatctgtagaatctctacttcatctggcatatgattgattgctgtaacctgtactggtgaatattatgctcgtgtttaatgagctgccttagatgatctactgaagggggaattcatatgatgggagagctatcacctttttctttggct

SEQ ID NO: 47719 - DNA, 554 bp, Glycine max
  unsure (1)..(554): unsure at all n locations
gacaagtattgaaccactcgaccccgacncttgagtcccctgctgcatgcaagctgtcgcgcacctaccctcgcggagggcgactcgtgnactcgctgatgcgtgtccacaaaagatacgcgcgagtcgcacccacgttatttgaggaaacgtcnngaaaacccggaaaagacgcgatctacgaaccttttaaagtgaanagggtcnnggagtngtatttacgcacggggaaggtttagcaccccacacgtccgcctaagggacngcagcctntaatcgaatgtgcaaacatgactntgattttntatggtccccttttatgtctctatatccctnntataccctntnntatatnnttctcttttngtggggtcgacaagggtgtttcccttttgctcctacgtatcctcaatttggatgagaaatcnacctacgtgttctttttatcaagtgattctttttactttaagaggtgatctattttaggcgtttgaccnntanaatgatccattttacttagtgagaaaatganatgacannacttcanatccttn

SEQ ID NO: 47720 - DNA, 501 bp, Glycine max
  unsure (1)..(501): unsure at all n locations
tgagctctataatctctgcatgatgatgatctggcctctgtgcaggctctgtaacatagcagataaagtctcanagctgaatgaggaaggtcctgtagaaactagagtatgaactggcaaaggagtgaatgctgaagctagaactggtaaagatgaagctggaatagatggagctgcagtagaaggagctactgatgggggaatctcanaagatgggagagtctntgaccttttccccttggcctcgcgaggccctctaaaagtgattgaggggtcatcgacgttccaccaatttttcttcatgtaagccaaattaatggttggactgagactctcaaaagataatgaatcagaagtgactccctaggctttgcataaagcagcgatgagggcggtgaaacctagcctcgaggagtcattgctgtgcatcatagaaatctgacttgagataatataccccacgttcatgtccattttctagataatgccatatatcaacct

SEQ ID NO: 47721 - DNA, 354 bp, Glycine max
  unsure (1)..(354): unsure at all n locations
ttcgtttaattacgagcgtctcanaatcctactggacacaattggacatccgagtcatatgttattgtcgtttgaatntgtttagagcttatgttttcaattacgagagttntgatatcccacgggacacaatcggaaatccgagttaaaagttattgtcggttgatttttctcagagcttccgttntcaattacgagcgtctcgatatccaacgggacacaatcggacatccgagagaatnattattttcctttaaatttgctcagagcttcatgtttcaattaggagcgtctcgatgtattatgggtctaatcggacatccgagttaaatattattgtcgttgacttttata

SEQ ID NO: 47722 - DNA, 368 bp, Glycine max
  unsure (1)..(368): unsure at all n locations
cacttcaaactaagcttgaggaaattcaacgacaataactnttgagtcagatgtccgattgtgttccgtaatatctcgagacgctcgtaattcataacaaaagcttttataataatcatacgacgatatacttttacacggatgttcgattgagtgccataatatatcgagacgctcgttatttaaaactgaagctctgagaaagatcaaacgacaataacttttgactcggatgttcgattgtatcccgtagtatcttagacgctagatactcaatacagaagctatttgataaagtctacgacgataacttttacacggatgttccattgagtcccataatatttcgagacgctcgatattgaaaa

SEQ ID NO: 47723 - DNA, 360 bp, Glycine max
  unsure (1)..(360): unsure at all n locations
cctctcttcccttanacttcttttatttattgctatttatcttttgctntaaagaagtnntatttgaatngtctttngagtaattcatgttaagggtgcattgttaatccgaaaagagagagtgaaagtttaattgtggaatagtctttatatcttaattcaacccccctttttcttaaggtaactgaggctatttgtccaacatcctattcttgataactcacttctctcttaaaagacagactttccggaatgaggtcacatgaacgtcttgaaacacagtcaatcaaatgctctgtttttntatttattttattgtcttaaccccttcttttattttggaacttatttgttttggac

SEQ ID NO: 47724 - DNA, 434 bp, Glycine max
  unsure (1)..(434): unsure at all n locations
tgtagaatggctagacatgatacatgtcagggtnntggttggttcattagataaatgggatgccccacattatttccatgacacaaatgcaaagatgatgaattggaaacttcatgcaaaactggtcatgcatgcacctatgtggacactcaagtgtcaaacttttatggtcatgtgatgctagggctcaggaattaaatcaacccaatgtttccaaaatatgttcttttattcatntgtgcattcatccgagtccatttctggcgttcggggaaatatcacaaagttcacccttcatgtgtatacacattctttttcatatactagttatgatcaatgaatttttttcaaagaaaagttggaatcatctttctcaaaagctattttgtttctacgaaacaacctattttaatattcttcttgtactatatata

SEQ ID NO: 47725 - DNA, 385 bp, Glycine max
  unsure (1)..(385): unsure at all n locations
cgggaagggagggnggatatcgacattcccatccacacccgcccccacacttgcaatgtggtgtttcaagtaatggacataaatcccgcctatagctgtctcttggggagaccttggattcatgcgctaggagtggtcccttcgacacttcaccaaaaattgaagttcgcgtgggcggacttttagtaatagtgtcgggtgaagaggatatgctggtgagctgcccctcctccgcaccatacgtagaacgtgggaagaatcatttgaaacggctttcaatccttcgaggtggtgagctgcgcctctgtggaaccaagtcctgttgtaccttctttcccaacgcaaccataatggtggcacgtgttatgctcaggaacggatttga

SEQ ID NO: 47726 - DNA, 429 bp, Glycine max
ctcgccgttggagctcacccattaactgccctaactcctttagactggtggtccctatgctcttgaccttgacttgatataacctctttttaagtgaaggcatttgacttgatcccatgttttactaaagtgaacaaaaattggtgagaatcataactccgacatctatcatgagtggaatggatgaatgcatgaagaaatgcatatgacacagatgcaatttatgaatacgggagcccgggtaattgtctccgtatttaagaaggtggcacggaccctccgttggattgccaaagagaggggatcaaaacagaatccgtgcgtgatgcatatgcgaaaggcgcaacacgggaatgtacagtatgacaatattcaaaatatataagcaaaagggtacatgacacttatgcatggctgtgtgataaaatg

SEQ ID NO: 47727 - DNA, 242 bp, Glycine max
tactcggggccatatcctgcgaaggcaaacagttggaatgttagttctaccaagagatgctactcttacaacatgaatggcgtacaactctactccaataaacacaaacatcaatgtaaatatagagcatacttatgcacatacttctgtacgatacgttcacttgcacaagacattcttatgactaagaaaaatgcacccatgtacaatcaaggcaccttcgatacctagaccatttatat

SEQ ID NO: 47728 - DNA, 427 bp, Glycine max
  unsure (1)..(427): unsure at all n locations
tacgcaataatgaaaaagtgtagatcatcataaaaacatataatgatngaactcaaataagaattagtacgagtagaagacttgattagatgcatcaaaccttgttgacanaaacttgtcaagctctnttacattgaaaaccacaaatctattaaattcctttttttttntatctaatattggttacaaatagagaaaaaatttatgcacttgaaaatataaaataaatttatattattaccttagtatcttctctagtctcatatataataaaaaaaattgtttgatatgatagacttaaatacaaacaaatctaactaattnntgtttaattaatgctatcatttctaanattctttatttaattacaattntagtttcagttactctcttttattcatgatattaagtttcataaaatgacatt

SEQ ID NO: 47729 - DNA, 493 bp, Glycine max
  unsure (1)..(493): unsure at all n locations
agaaaggatggttgganancgagtgnggnattcaggantnatactgaaaantcanagancgtnagnnaagnnantcanannncaagaaggngaaganatgaggaggangnnnanagagaataaganttgngnaggagngaaagaggggggnattaaaagnganaggcaaacacccgcagcaaaggggaggggaaggaaaggaagggagaggaaagagagggaaggggggggaaggaagagagaggagaaagggaagggaagggagaggagagggaaagagagggagggaaagggagcgaagggaaggcagagggaagggagaggaggggagggagggaaggaagggaaagagaggagggaaggaaggaaggaagggagaggggaggaaggaggagagagaagggaagggaggaaggagaagaagggaaggacggaagggaggaaaggaaagaaggaaggaaaggaaggaagagggggaagggaagagaaagag

SEQ ID NO: 47730 - DNA, 195 bp, Glycine max
  unsure (1)..(195): unsure at all n locations
agatcaactggatgttctatgctacttgaaggtggctttccatgaggaatctccttggataagacatcttttaattgaagcgatttgggttgaacactatgagaaacatnaatagacaactgatggggattatcactccctctcttttgtgattactggtatgcgtggtgcttacactaatcttaatatctcttt

SEQ ID NO: 47731 - DNA, 211 bp, Glycine max
  unsure (1)..(211): unsure at all n locations
ctacaaaacctatgtatctctacanagctgctcctctngctgcctctatagctctattcccgaaatatgcacttgtggtgtgctgtggaatactgtgctctatgcctttcttcaagttgtacactaattctgcacaagacacggcttatatatgccttgaattcgttgacatagtgcttagtgacaccctcgctgcttccgcgcgtaagtg

SEQ ID NO: 47732 - DNA, 528 bp, Glycine max
  unsure (1)..(528): unsure at all n locations
aacgccatgatccgctgacttcgacnttaagtgactgcagctgcacgctgacataggaagtgtaaagggtganacttctgcttttatncgttgatcacagagtggtacctggagatatgtcgcggnggtcangacgaccttgagacgcctngtgggtgctattggccaaaaccaagcttgaccaatcccactcaaccccggcatattcagtcagtgagaacctgtgatgcacctaaacaggcgagctcctggccgtcaacctatataaggaacatatacctcaaagcaatgacgcttgtgtgcgggcaggccatcagacaatctagtgaatattttgtttatggatttngttanacctctcacggtcggtcatctatccctgtccacatctttcaacttgctcttaattgattcttttcttattaatcgtccatttctcttgatctcctctctctcctctatactatatttcctactctcttcatcttccttcattacctttttctctaccctatccgtattacagcg

SEQ ID NO: 47733 - DNA, 320 bp, Glycine max
  unsure (1)..(320): unsure at all n locations
tgatacccctcggtagctaaacttgtccctntctctaccataacagccacgcagtcccatggaggtacacacctncggacgaaaggaaagaagaagccaccgacatcagcttggtgtcggccaaggtaaccaatatcacgagactgagcggtgtgacccgcaatggtcgcgtgtntgtgcncaccgacctaccaatccaacccactgacgttaatgggaatgcaaatgtattggaagaacaagatgataaaatgcctctcactccgaatgacgataatccgcgtaaaggtctttcggataaaagggatggttatggtaag

SEQ ID NO: 47734 - DNA, 239 bp, Glycine max
  unsure (1)..(239): unsure at all n locations
gcattggaagtgcggnagacagactttgctggtgatntacggatggcctttgtggataactgggcggtgggtaaagagaaggtttgttattggctgattaaagacattgttgggttggtgggaaactcggtcatacaagaatggcagtcacaacatgggtttttccctcattctcaccctctctattagccccaatcttctcactcttccaagcaggatgataaaatatgcctattttt

SEQ ID NO: 47735 - DNA, 434 bp, Glycine max
  unsure (1)..(434): unsure at all n locations
tgatcgcggtgcgtntgttgcccactgccggccatccctangctgctgtggtatttcgccctgtgcctgcctgnggacgcagtacttcttgatgaaagctcgattagtagggggcctgatgcccttgctggaggtgacaggcactccgtagaactgacagagacccgtaattagagcttgacaactccaagaccctgctggacttcttcgggtccacttggtgtcttgcangcgcaattcctgcaaacaatagatgacatcagaaatcaattgtgccatgtgcatacttacctatgtcatgatggcacagaccaactgatacatctgcagggggagattggcattgtggtcgctaggcagaatgttgctaaatagcaacgtcatctatatccatgtaagagtggtcatgttggtgcgcatgatccgcactcgtc

SEQ ID NO: 47736 - DNA, 466 bp, Glycine max
  unsure (1)..(466): unsure at all n locations
ctaatggacttgcctcgaataacaccctagttctccattatgagccatgttgacccttcactgtcttgaagctcactacactcgccacttgaacaaccatgatattgccatcatcttaaagaattccggaaccctggaattgataccggaataaatgtagggggtatgatattactggcaaaattgtgatatgcaggcgcacacaacgagagtgcttagaacatacgtggtgaacattgagcattgcatcaagaatattatcgcggtcagggcagttggtgatccctacatccacactgtagccgattctatcttcattacttgatcacaactgcacagcatacaactacataactactatggaagtntacaaatccctatcctaacatgatctcagagtattgtattgtacacacgaattaatgataattcaccataatacctatctgtacttatatccccattc

SEQ ID NO: 47737 - DNA, 324 bp, Glycine max
  unsure (1)..(324): unsure at all n locations
atccaaggaaacttccaaagaaaaacgtncgattgattttttttattactttattcanagaatatttaattattntattattattcttcaagatattttgattattntattattattttgctttttttttgtttaaccgaggttacagcgtgaacgattggttagaatttgttttaacagtgattaaacgagaatacaacacanatgatcggttgaaattcattttatcatttattatgcgagacaacgcttanacgatcggttaaagcttgttaaaacggaagaaaagaaaaccgaaatgaanatatgaagatgaagctaaaa

SEQ ID NO: 47738 - DNA, 463 bp, Glycine max
  unsure (1)..(463): unsure at all n locations
gcttaacatcagaccacttncaggtgctggaactacttttcatggacttgatggngcctatgcaagttgaaagccttggaggaaagaggtatgcctatgttgttgtggatgatttctccagatttacctgngtcaactttatcagagagaaatcagacacctttgaagtattcaaagagttgagtctaagacttcaaagagaanaagactgtgtcatcaagagaattatgagtgaccatggcagagagnttgaaaacggcaagtttactgaattctgcacatctgaaggcatcactcatgagttctctgcagccatcacaccacaacaaaatggcatagttgaaaggaaaaacaggactttgcaagaagctgccagggtcatgcttcatgccaaagaacttcccttatatctctgggctgaagccatgaacacagcatgctatattcacaacagagtcacact

SEQ ID NO: 47739 - DNA, 417 bp, Glycine max
  unsure (1)..(417): unsure at all n locations
gctttgccaacccttatatacaaaaaacttattctactctacaatctaaataagctaaaaccttctatatgcaatgatgaacaaaaataatgatgagaaaataagaaaaacaaggttgcctcccagtaagcgcttctttaacgtcactagcttgacgtatggtacctctaagggtctaatgcaatcttagctctggccatttgagttatctcattctcattctcctccaccttggaatangcactacggtcaattgagtgctttgctgcatcacacaaatcanatgtaccttctggtcatccacactcatttcaagattatctttccccatatcaaccacacaattggctgttaacatgaagggacgacctataatcagcgggatttcagcgtcctcttcaatgtccattatcatga

SEQ ID NO: 47740 - DNA, 497 bp, Glycine max
  unsure (1)..(497): unsure at all n locations
actctcanatgttaccatatatcacatattatgttatatattataccatatgatttatatgatacagggggcaatgtaattactgaaataatcatgattatctaatctttntacttaatgacaatgttttacttttccagatcatgatattgttgcaagcttttatgtgcagaagccagtttctttgctagaagacaacatcttgcagctttctaatgacatttttgaagagataggagctccctctaccaaagtacctccctcaatagtttccttttatgaactttatncaatattgatattgatatcattcttatattttaaatcaggtgatcatcttgtctctagatcccttaccacggtcaaacacgacaaaagtggtgtttgcagttgatcctgatggtaaatattcagaaatgtctgcagctgccattagttngataagagcatcatttaaatacctggttatacgccaatcatatctncagctcactaca

SEQ ID NO: 47741 - DNA, 199 bp, Glycine max
gaagagaatgtatatatttgaaatataaaatgttgattttgggtaaattgtgtttaagaaaatgtgaaaataatgaatagaataatgtgattgaatttatatgtagatgaataaatgaaattgaggtaaaggagtttgattagatatgttttaaattattttaatgatatgtggtgagtgattttttgttttattattt

SEQ ID NO: 47742 - DNA, 347 bp, Glycine max
  unsure (1)..(347): unsure at all n locations
caataactnttgacatggatgtccgattgattcccgtatagtatatcgagacgctcgtaattgaatacggaagctctgagtaaattcaaacgaataataactttcactcggatgtacgatggagtcccgtaggatatcgagacgctcgtaattgataacggatgttctgagacaaatgatacgacaattagttntaactcggatgttctattgagccctgttatatatcaagacgctcgaaattcaaaatggaagctctaagaanagtcaaacgacaatatactttaactcggatgttcgatagagtcccgtattatatcgatacgctcgtaattgataactgaagc

SEQ ID NO: 47743 - DNA, 184 bp, Glycine max
  unsure (1)..(184): unsure at all n locations
agcttgtccttggttagacatgattgatacatgatttgngacttgtangattgaatntgcgcaaaattggatgagggaaagagtgantttcgatatctgcactttatgcagagatttgctggtgaaatgtgcaacagaattgtgtataagtgcacaaaaatgcttgtgtatggatggttgtgaa

SEQ ID NO: 47744 - DNA, 309 bp, Glycine max
  unsure (1)..(309): unsure at all n locations
ctggttcccagatgacaacagggagtgaagatggctgaataccctagccttgcaacaagtcctanggaagtagacacggagatggacaagacaatccgcagtattgtgagtnagcatttgaaagacgcctctgttcctgatgctgaaanagatgttccaacatcctccacctcagatgttgctgtccctgaagctgatgaagatgtcccaacttcttccacccctaatgtttctgtgcctgatgctgagaaagatgttccatcatcttccggcccaaatgcttaagtactttcttctcctgcatagata

SEQ ID NO: 47745 - DNA, 616 bp, Glycine max
  unsure (1)..(616): unsure at all n locations
ccacatcgttcttnctctacgcgttanacgctaaagacttgtgttnnttctcgctaattttatcnncnnncnnnaagaagatgttttgaanccttgcganctcgagacncttanagtcganctgcatgcatgcaagcttatcacataatgtcattatgatatntcttcttctatagagtgcaataggagtaatcttatccaaacatgtgcatagtgactttggatgttctggattcatgactatactttcatattctggtgcatagttattataatgataaataaggtatgaacatggaaatcttcacatatcgatatatctgtagcggaatccttcaccactctgtgttattgttgtgttacagatccataatcgttatggagtcgacccagtatgaatcatccacatactgtgtatggttataataagatataatataagcaattatattgttttataatagctctataaattgcgaagacatcgtaatataatgtctatctagaatggttcacaatgaattagataacgtgacgtaacacaactaacgattgtgaatgatagtataagatctacatttattaattgttcctcacctctgttctaccatcctct

SEQ ID NO: 47746 - DNA, 472 bp, Glycine max
  unsure (1)..(472): unsure at all n locations
acctgcngcatgcaagcttaacatcagaccacttccagggtgctggaactacttcacatggacttgatggngcctatgcaagttgaaagccttggaggaaagaggtatgcctatngttgtgtggatgatntctccagatttacctgggtcaactttatcagagagaaatcagacacctttgaagtattcaaagagttgagtctaagacttcanagagaaaaagactgtgtcatcaagagaattaggagtgaccatggcagagagtttgaaaacaacaagtttactgaattctgcacatctgaaggcatcactcatgagttctctgcagccacacaccacaacaaaatggcatagttgataggaataacaggactttgcaagaagctgctatggtcatgcttcatgccaaagaacttccctataatctctgggctgaagccatgaacacagcatgctatatccacaacagagt

SEQ ID NO: 47747 - DNA, 322 bp, Glycine max
  unsure (1)..(322): unsure at all n locations
atcctctgagtcacctgctgcatgcaagcttctgtgagacacatgttttagtatccggaggatgttaaatggntatttgtgaanatacattacccactgtctggattctttaattatacttggatggactgaagttactccttataattgttcaatgtcaccctaatgagattcgtaatgtgggtggtgatttcagcctgttgagctttataccaaacgtggtcttcgtgggcgattcatagaacctgttggtacacattggaatgttggttatgttagaaacctttaccatcaatttcacaaattaacattctgacagcta

SEQ ID NO: 47748 - DNA, 409 bp, Glycine max
  unsure (1)..(409): unsure at all n locations
tgcttatgctgtcgaatcataaatatttcagcatcttgcgtcgtttctgatgtcaatattgcagaaggaaatgtaaaaactacgtaggcatatagcaattgagattaataagttctgcacagctacaacaattaaatgaatcacagaccctgcttagccaggttccaaacgccaactttcgcgatcagattcaccctttttgataacaatactagtaaaatccgagataatacaaagggaatataatatatattctctctctcacacactctctatctttctctgggaaagaattaatgtgacctcgagctggggtcatttatggataaaatcatacatactcatcatcccattggagcatagcatataataaataaacgagagcactcaactataanattagaactac

SEQ ID NO: 47749 - DNA, 58 bp, Glycine max
tcactgtcctcatactggttcctgcagatatgtctgggcgggcaggagaccatgcata

SEQ ID NO: 47750 - DNA, 463 bp, Glycine max
  unsure (1)..(463): unsure at all n locations
gcttaatctgagaaaaatatgttgtgtcttcatgctaagtgccagtctgttgcgcttagcgcctgagtaaaatttcataaggcgcgctaagctcagcctgctgtgctaaacgcncagtcaaaatttcaagttttttttatgnttttgtgaaaataatctgngttaatctcttgtgttntgtcttatatttngcagatgacatctaagaaaaggaaggcaccttctacacctacccaggccagatatgacagatcccaggtcacatctcaagaagcttgggagagatatacagatattatggtgcatangaaactacaccagagaggaatgtatgtagtttgtacactgagttngacgagttcaaggaggaactctaaaaagacaatgggatgagaattgactgatttgctgacagagcataatatcgccatatgaaagaatnntacgctacctctatgacgtc

SEQ ID NO: 47751 - DNA, 469 bp, Glycine max
  unsure (1)..(469): unsure at all n locations
cccttggcattataaaacattcagcttgatctcttgtcttcaccactccccaanattggggtaaatntgccttgaaccatacgctctcctacaatctaagcaaggtatcatgagataattatttaagttcaaggttcaaatatttcacaatatcattcagctcaaanagggtgccaaggatataattatcattcaggtacattttttggtcaaaaggcttatgtatgtacaaacatggccttcatcatgtntctcgttatacattntattctaaaattaagagattcatgcaaagattattactcacagctagtctgtcactcacacgcttagttcacactctcaccggttttggttcaagcttttctttctcatcaatctgtctactgactaacaattctaattgcaagttacattattgttcattctttgactatcatacacacttgctcatactcatgaaaagaaa

SEQ ID NO: 47752 - DNA, 300 bp, Glycine max
  unsure (1)..(300): unsure at all n locations
gcttctacttatgtggcagggcgggcttccttcactttcttgtctccaactctagctctgaccactgtttttccttcccgcgatgcttcttttcatgttcgcctgagtgggcttatagcctaaaccatacttcccacgatttccttgggttttnatcatgctagttatgccgccattgtctttgcctaaacccatcccgtgtcataaccgttccccaacataactcgggccatcattaccgccgtatcggacaggcaatggtgcccaaagagggagtccacagaggaaatgctgaccacc

SEQ ID NO: 47753 - DNA, 221 bp, Glycine max
gatgccacacgtgtttgcaacctattaaatgcggaagctcttcatcggatattgttgactaaagccaggacaacaaaagttgatcctgttgttcccaagcaacaaactccgcgagacattgccgagatcacaatctgctaagggtttgaacctcagcggaatcattggatgcacgaggaagtgatgaagatgatgatgacctataagcactggttctactt

SEQ ID NO: 47754 - DNA, 423 bp, Glycine max
  unsure (1)..(423): unsure at all n locations
actgtaattgtaggagaagttgcctaagccatgtaactttgaatgcagcaacttccatggcatggcatttagcttcgatgctgggtctagcaactatatattgcttcttacttctgcatgagaacaaatatccttccaagagtcagaggtagacctcctatctgatggtgatcctacccaatcagcatcagagtaagatacaatcctcgcattgccttngtcttcatgaagagtctacaacctggtgcatacttgatatatctaaggatngatatatctaaggatgcgcatgacagcattccaatggctatcacaaggggcattgatgaattgacttaccacacttactgcataggtgatgtctattctagtgatattgacgtaattgagtcaccagtatgtctgagattcttccctggtcat

SEQ ID NO: 47755 - DNA, 241 bp, Glycine max
  unsure (1)..(241): unsure at all n locations
tcgatgcactacctgatcgcaaccaagatcatactctacatcgcttcttttgctagccttataccctatgcattaccaggtagttcttctttcttgtattttattttcttaagaagtgaatgtantccatgtaccctgtatacctctaattcgtctcgggattatatattgatgatatacaaccattgattggccgcttcaagatatttggcaccctttgttgcacaatatgtgaagtccc

SEQ ID NO: 47756 - DNA, 225 bp, Glycine max
agcttcttatccaaggctcatcttggtggtgaagctctttcttccatggcttattcactagtggatggcgcctcttctcaccacttctactttgacttccgctgcatctccatggtgtaaaatcaccattaaaggacctcattgaagctcaaagatccagcctccatagaagccctcacagctactttcatcagtgtataaagcctcacacatgcaagcgtttca

SEQ ID NO: 47757 - DNA, 461 bp, Glycine max
  unsure (1)..(461): unsure at all n locations
gctccttcaactgcacaaggctcttaatatttgaagagtatccttgtggaaccttcacccgacgaagacactgacaaaaacttatattcttcttcttggacaaagtatggcaggctggnggcaagtaatatttcttcccatcaaaccttggatgcaactgtgatcatatacccatatcagctagatcttgacagatattcaagccatccttcngtcttgccttgatgttaaagagcgttccaatcacactgtcacaaacatttttctccacatgcataacatcaatacaatgtctaacctcaagatcacaccgtaaggaagatcaaagaaaatgaacctcttcttccatatgcaactctgactttatccttcttttgggtcttcccaaatacaatattcaggtgttgaacccgttgatatacctgctcactagtcaacagtatcggcgcaatatcatgctc

SEQ ID NO: 47758 - DNA, 410 bp, Glycine max
  unsure (1)..(410): unsure at all n locations
caaccttcgttaaccgttggatcttctccaaatttggtctgcagtttcacaagacaactgtccatgatctgtaaaacttggatttaattatacttatgaacaaatttaattttcgnttatgtgtatgacgtgtactgagttactatttctatataattatgtatattcgtttaagtaatggcgtgttgttggatgaatgcatgttgtaacanaattactttggttntcataagcaaaattaagggagttcttttgttaataattgaaattagcgtatattaaagtgtggatatcgtatcgaccacgcgggtcgttacatttatgtgtatcagagcaggttgaacctttcngccagtgagtagtgagtatgctatgtttatatgggcattctctggtggtatgatgaatgc

SEQ ID NO: 47759 - DNA, 524 bp, Glycine max
agatggaggattgaatccagctcgaactcgagatcattagagtcccgctgccgcatgcaagcttacaactgaatctatatagagaagaggttggttctttgtaaggttctttacttggatggagttggactaatgaacctatccgtatttcacaggctgattcattcccataatgtgtattactggagcaagataatcgctactagctgatataagagactacttgagggactggttaacgaatatagtataccttctatggttaaaaccgagattctggacatctatggtcacccatgtgacactaatttatgtgatggacgtgacggtaagttattgtggactctatatactatagatattattcatgtcgtaagctagagcattatgaaggatatttagcttaactaatctaatcgttataaattcgtactttctcgaaagattagtaagtgtagcgtaatgtaatgttggttaccaaatttacacgtttcgtttgataacttatatatgtttaggcaagc

SEQ ID NO: 47760 - DNA, 115 bp, Glycine max
  unsure (1)..(115): unsure at all n locations
taacccaccatttntcataatagttcactggaaatgtgtctactatcattgttatcatttctctgtctgtcattgagggaaccacttgggctacctgatctctccacctttgggc

SEQ ID NO: 47761 - DNA, 199 bp, Glycine max
cagctgtgcattcatatctcgatgaagatgttccatatgttctcaagactggactaatacatttgctgcccaagtatcatggtcttgcaagtgaagatcctcataagactcctacagagtatcattttttctgttacacctcgaagctcccttgatgtctgataaatcctattattctatatgcttcatctcattctct

SEQ ID NO: 47762 - DNA, 164 bp, Glycine max
  unsure (1)..(164): unsure at all n locations
agaaaagaagaagaggangcttatattgaagcatatcccgaccgcattcttcaagntagnagaattnattattagttgatgaaaggagaagagaatgatgaagtttgtagtattggagaatatacattgatggaaagtgagggtatagtgaatgataagataaa

SEQ ID NO: 47763 - DNA, 376 bp, Glycine max
  unsure (1)..(376): unsure at all n locations
ctgattcccatgtatgcttcctccaccaacttgggacctctcaaaggatcacgccactctgtgccaacataccatcacttttgcccttcatgaagtggcccaacccactgatttggggaagaggggaatcttgattcttccatangtcttgaccagngggtanagcagatgcatttggaattagctgtcatggaattcttaagttgtgatacatgaaaaaccggatgaaccttcatgatnttggaagcttgagcttatatgccacttctctgacttgtgataaaattagaaatggctcanaataatgagttgagaagttgggattatatagcgggccactgtgagctgtctatggagacacatcttaacaaacacc

SEQ ID NO: 47764 - DNA, 456 bp, Glycine max
  unsure (1)..(456): unsure at all n locations
tatttggtttagtttgaatatgaagtagaagattatgaatgttagcctttttcccctttgaaagacttgtanaaaaaaatgttttaaaaataattttaactaatatttgaattntntttccttattagtatattatgtgaggggtagagggtgtcacacgttgagttctnaaagtttaaaggtatatcttaattataggactagcaataaaacatacccttagaaatacagtataggcatttctatcattaggtaccttacaattaatattagatattctgtttggatatggaaatattcatcatttacatattaattatcatattctggtgaaacatggaaattatcatcatttaaacattgngctatttctatattatgttggtcttaacaatcgatntttanatatcatcgtattgatttntgcattttaatttaaacctacttctcttttat

SEQ ID NO: 47765 - DNA, 317 bp, Glycine max
  unsure (1)..(317): unsure at all n locations
agctcgctctanattacattgatgtttgtatntatgggaggaggttatatgccattnntgctntaagagtaatgtcccactaaaactaactttccaaatgtntgccttcgcaggaatggccccgaggaagcttgcctcaaagaggtccatgaaggacaaggcggccgaaggaactaattccgccccggagtacgacagtcaccgctatatgagcgttgtacaccagcagcgcttcgaagccatcaagggatggtcgtttcttcgggagcgacgcgtccatctcaaggacgacgattttactgattccaggacgaaat

SEQ ID NO: 47766 - DNA, 442 bp, Glycine max
  unsure (1)..(442): unsure at all n locations
agtggtttataagtataaatctattggtcaaacctggatacatcaaaagttaactagtgttaaatgaatgaatgtttcagctcattaatggccaccttgtaaataaagactctttaagcgaaaaatagaagatttggattaattaatgaaggtttaaggtattaatgtgtccaaatatacaattagttgaattaataagggggtgagggagaattaatattttactcattntaattaagttagttaggcttaattaaaaataagtattaagtgtattaaatactctatgatcaacatgaangttcaaacctaattattgagctaaatatacagttaagaaccctactggtagttaggacaaaactctaacatgtcacctaatagttgggtccctattgcgctatgtggcccattataaaacggaaaataacatcactctcct

SEQ ID NO: 47767 - DNA, 398 bp, Glycine max
  unsure (1)..(398): unsure at all n locations
gatgtctgatngagncccgtaacatatcgagacgctcgacattgaatgttgaacctctgagccaattcatacgacaataactcttttctcggatgtctgattgagtccctgtacatattgagacgctcgaaattgaatgtggaacctctgagcaaatttatacgactataactctttactccgatgtctgactgagtcncgttacatatcgagacgctcgtaaatgaatgttgaggctctgagccaatacttacgactataacttatactccgatgtttgattgagtcccggtacatatctagacgcttgaaattgatagttgtagctttgagccaaatcaaacgaccattatcttttactcggatgtcttgatgagtcctgtactatatcgatacgc

SEQ ID NO: 47768 - DNA, 62 bp, Glycine max
  unsure (1)..(62): unsure at all n locations
agcattgttgagttgagtcttgttctcggtgtaatatgattacanactatcctcataaatcg

SEQ ID NO: 47769 - DNA, 339 bp, Glycine max
acactatgaatactaagcttgctagctagaggatgcctaaccaatcacgcttagcctaggatatcgtggcttatcgcgcgaccatcagcgagacacaagttgattcaggtacttgggcttagcgattcagtctcatcttagcacatgtgactcaggaagaggatcaacgttcatcctgtatagatggacaaacatctcgctgacatcgtgactaactacttgaagagtgaagcgttcatgtagtgagagaggttagaatgtagttagtaacgagctggtttgaatcaagggaggtgtaacagtgatcgtacccgttataagatcattttaaaaagtaat

SEQ ID NO: 47770 - DNA, 355 bp, Glycine max
  unsure (1)..(355): unsure at all n locations
tgcaagcttgtgactcttgtcaatttcttaaaactagtttctgaaaaagctgngactnttgcaagaatcttcacaaacaagctactcgaagaattgtgacttttggaaatgtatttttcgaaatcagtcactggtaatcgattaccattaaggtgtaatcgattacacattaacagatgtgacttctcactttaaattttgaaaatcataacatttagaagctctggtaatcgatcacaagttttgtgtaatcgatacacaagttcaaatgatttaaaatattaacacaagtgtaatcttgaaatcgaaatctactgtttaaacacnggcatcgatactacctctggtatcgata

SEQ ID NO: 47771 - DNA, 432 bp, Glycine max
  unsure (1)..(432): unsure at all n locations
tgttgatgcanaacatgctgtataatggctcatacaatcacaaacaagcaaactctgactagatgctatganagagaattataaaaggttgggttgcctcccagtaagtgctcatgtaatgtcattggctagacacatagttcttcatgggtcacggtcaaacatggttccaacctccataacctcttcctcagactccttcacctgcatacaaacattctggtccagcaattgctattcttcatcacatatatcagagctaatcttctgatcagcaattcccatctcaagctttctcttctcatgtctaccatgcaactggtggtcagcatgaacggacctcccaagattaaatgaatctcagagtcctctttcatgtccataacagtnaaattagctgggaaggtgaaatgtgtactcggacaatacatc

SEQ ID NO: 47772 - DNA, 487 bp, Glycine max
  unsure (1)..(487): unsure at all n locations
ctatcctctctacttgaagaatngaaggtgtntactggtgaggcagtggatttgttggtagacaataaatcagcaattgatttggctaagaaccctgtgtcacacggcataagcaagcatatatacaccaaatttcatttcctcagagatcaagtgagcaaggggaagatcagacttcaacactgtagaattgagaaacagcttggtgacattatgactaagtccttgaagagtgaaaggtttacggagttgagagagtttttgaatgtcgttagtttgtaattggtttgaatcaaggtgagggtgtagaagtgcatctaaccaatagataagattagttaataaagtctatttgacagatttccaatcctagctatcacattgattttcagttttggatatgctataaatatcaaccttgtgctagagtgtaatataatagaaacaatgagaatatattttctctcactcttctatcctctgttac

SEQ ID NO: 47773 - DNA, 259 bp, Glycine max
gagatccatgaaggataaagcggctgaaggaaccagttttactcccgaatatgacagccaccgttttaggagcgctgagcaccatcagcgcttcaatgccatcaagggatggtcatttctacgggagcgacgcgtccaactcatggacgacgagtataccgacttctaggaggggatagttcgccggcggtggacatcactggttacccgcatggccaagttcgacccagacatatgccttgagtgttatgccaatgct

SEQ ID NO: 47774 - DNA, 390 bp, Glycine max
  unsure (1)..(390): unsure at all n locations
tcttttgtataatcactcatgcacccaacatcttcatgaattgtgtacatagggactcattaagtaggtttgatcttattttttgtttcaatacaaacttatgtgctcatatgggacaccttatgtttgtcataatattttgtaggaataatcaacatgaaaataaagaaaaaggtatgttttattcaattactntacttacactttaaaataatgatcaagggcttcccatggaccctgagagaataatggtcattcctgagtggcctactccaccatgtataagggacataagaggcttcaatgacttatcagacttttacaatatgttngtctcatatttgtctatacctgtagcaccactcattgtattggaaggaactatgtact

SEQ ID NO: 47775 - DNA, 248 bp, Glycine max
atttaatataaatctactatatataggcttttgcagcattttactcatgcagcctagttcaaaaaaacatagtctcacgtcaagaataaaccatgatttgctatccattatcttataccattatactacataagccacgctaaagattcttatattaaataataaataatttttgaaaaattaatgccataaattgatgctataggctgctgaacaaaattcttaaacgtaaatatgctacaatctaa

SEQ ID NO: 47776 - DNA, 187 bp, Glycine max
  unsure (1)..(187): unsure at all n locations
actgtcgtaaacagctgganaaataatagacagagactctttcatattgttttctagtacagagattgatacttatataaaaagttacagggatccaataaaatgaatagcataactaacgttacttatacagggactatattgcaattatcataaaatagtgagtccatttggccaaagcattaat

SEQ ID NO: 47777 - DNA, 301 bp, Glycine max
  unsure (1)..(301): unsure at all n locations
cttgactgtagaacctcttgcctgtagatttgttcccatgcttgctaaagtgagacaatatctggtgcaaatcaaaactccgatatctcatgggtggaatggatgaatgcatgaaggaatgcatataacacagatgtaatctaggaatgcggtggtccggggaatncgtacccttcttatacacaatgtctaagggttgcaaagtgccccaacggaccgttttaataacgagacaccgaccctccgttggtttgatacacagaggatcttacacaacccatatgcgatgcctatgcaaaat

SEQ ID NO: 47778 - DNA, 376 bp, Glycine max
  unsure (1)..(376): unsure at all n locations
caccttctcgtcctcctcatagntgttgcatgagataacatgctctattttcatctcccactccaagtaggcctccggatcattctttcctttaaatggaggaatgttgagtntaataccatcaattcggttttgtctaggaacaccatcattccctcttctcctcctttcttcttcattatgatctctattctccatttgatcctacctctcatggagcgcatcatctcgtcgttcattaacctctccatatgttcatcaaagcttgcatttgaattgcgaatgctccactccttcattacgattagtacctgacatctcacacaaacatatcaaacgtttcatgacacctatatgtgcttgttgaatacctcac

SEQ ID NO: 47779 - DNA, 68 bp, Glycine max
  unsure (1)..(68): unsure at all n locations
agctagggggctacctctctctgctatntccatgaacaatggngttcttgagtgaggggggagttttg

SEQ ID NO: 47780 - DNA, 411 bp, Glycine max
  unsure (1)..(411): unsure at all n locations
agctntnntatttcagcagatgaaaatgaatctgttgtcacctcatggactcctctaaggacaataacatcatttcttgcactgaattgttgggagttggaagccatcttctcaatcaaattcctagcttcagcaggagtcatatcaccaagggctccaccactggcagcatcaatcatactcctctccatgttgctaagtccctcatagaaatattgaagaaggagttgcttataaatctggtggtgagaacagctngcacacaatttcatgaaccattcccagtactcatacaagctctctccataagttgcctgatgcctgaaatgtcctttctgatggcaatggtactagatgcagggaagaatttctccgagaacaccttcttaaggtcatgccagctganaatgg

SEQ ID NO: 47781 - DNA, 490 bp, Glycine max
  unsure (1)..(490): unsure at all n locations
ctcagctcttcagctggaatatttatcctatctctgacagccaatgggtgagttccatccaggtagtcccgaagaanaccggcctcaccgtgatacaaaatgagaaggaggagttgattcctacttgggtgcagaacagttggagagtctgcatcgactatatgaggctgaaccaggttaccaaaaaggaccatttccccctgttattcattgactagatgcttgaacgcctgncaggtaaatctcactactgtttccttgatggttattttggttatatgcaaatcactattgctcctgaggatcaggaaaagaccacattcacctgccccttcgccacttttgcctataggaggatgcctttcggcctgtgcaatgcccctagcaccttccagcggtgcatgatcagtatttttagtgatatgctgcanacatntataatagaccccctcaacagcanaaccaacaacaacanaataattatgatctt

SEQ ID NO: 47782 - DNA, 213 bp, Glycine max
ggggaggggaaaagtggaaggaagagagagaggaagggaggcaaggaaggaggagaggaggaaggacgagagaaagtaaagaagaaagaaagaatggaaggagagaaggaaaggatggaaggaaggaggaagaaagacgcaggaaaggtagagaaaggaagaaaagagggatgaaggggaacgggaagaagagagggaagaggaaggtgaaga

SEQ ID NO: 47783 - DNA, 130 bp, Glycine max
cagatggtcagacttaactaactattcagactctagaagagctacttcgggcgtgtattataaagcaacaacgtagctggtcggatagtatgcaatagagtagattctagtaccacgatcactactctct

SEQ ID NO: 47784 - DNA, 331 bp, Glycine max
  unsure (1)..(331): unsure at all n locations
aagtggacctcggtgctatttgcacccccatttttactaagtacaccccctgcctttttttggtgattcttttttcgtaaagttacggaaacttacgaatttcgtaacgatacttgttttctttccgtaatgttatggaaccttgcgaattacataatcatcccattttttgacttacggaatgttacggaacctcactaattatgcaacgatgcttctattgatttccggtgtgtcacggaaccttacggattgtgcatcaatatttntctttgttntccggcatgtcccggaattcacaaattgctaatgatgggtgccagcacctcac

SEQ ID NO: 47785 - DNA, 451 bp, Glycine max
  unsure (1)..(451): unsure at all n locations
gtaatcgattacataccttgtgtaatcgattacaggcatttaaattcaaattcaaaatttgcaaattgtttcagaaatcaatttagccactggtaatcgattacatcctctggtaatcaattaccagagagcaaatatcatatttttgaaaagataattgttctntaaaaacattttgcanaatatttcctttagccaaacctgtgcagcatcaattaaggaattctttctaagatcctatcaactaagtacatcattcttcttgcattntctgaatttttgacttgaatcgcgctcatctntggcatcatcaaaacttcatatcatatatgcttctacaatctccccctttntgatgatgacaataatntgaaatcaagataaatgatataccattcataatgcgtgctcacaacccttacttccccttaagatgggaaattatgcctag

SEQ ID NO: 47786 - DNA, 332 bp, Glycine max
  unsure (1)..(332): unsure at all n locations
cattacggactataatactaagctcacttacccttgagtgatatgtgacacttganagtcatgtccttcctccagatgatggctttctacttagaaccatgtttcactacggtgaacaaatgttggtgaaaatcataactccgacatctatcatgagtggaatggatgaatgcatgataaaatgcatatgacacacatgctatttatgaataccggagcctcggtaattgtcttctgattaagaaggtggacggaccctccgttgattgtcaagatagggatcaaatcagatccggcgtgtcttatgcaaagcgcacatggatgtcagttga

SEQ ID NO: 47787 - DNA, 450 bp, Glycine max
  unsure (1)..(450): unsure at all n locations
atactagctctaaaaataactctatggatgagatatntagaagttatgatgatgatgatgtatatataactttgttattggacccaacaattgtgaatcatgtgcaatgacaaaattggcagaccatgtgtggaacccaccattagtaaaacaaattaactaacaagataggtctatgattaatcctaagaagctcttttgattatgccgttatttgcatgacatgagaagtcggcataagtatattgaacatataagttggccgaaaagcttgactgagctgtcacaaacatgtcacatttctttgagtgcagagtactccctacgcatgatggtggtggagaaagaccttgccctgtcgtgatcacacattgactaccaccatgctctcacatgttgccaccatgatacatattaagttcccctctcaccttacgccaatctcataat

SEQ ID NO: 47788 - DNA, 417 bp, Glycine max
  unsure (1)..(417): unsure at all n locations
ctccgttgttgttgttcaacagagcaccagcactacaaccactagaactattcctctgagactcagccgccacgaagttcttcaagcgcttcatggctaaggccagagtctcctcggacatgttcgcgaaacacacgcggaaccaccccggctcggtgcaatggcacgaggagcctggcgaaatgttaagcccaacttggtacactatcttcttccacagctccatcttcgccttgaacgtgttcgaatgcaaaagttgtctcatgtctacccaacaaaacaaccccgcattgctgcaaggcatgaaataccggtttcaatagccncgatacgagcattctctgctgtcgtttaagcctctttttgttctcagcgatgtagtctctggtgaacttcttgtccccagcatggctgaga

SEQ ID NO: 47789 - DNA, 165 bp, Glycine max
  unsure (1)..(165): unsure at all n locations
gagaagttgaactttgagttgtgtctcacaagactctcattcatcanagntacaaaagtgttacacatgcttttatttatagactangtggcttccttgagaagctntcttgagaaaaacttctttgagaagttctttgagaaaacttccttgagaaactagagc

SEQ ID NO: 47790 - DNA, 122 bp, Glycine max
tttgtctgtgactcctagcgtcatattcccttgttccttcttggaatatatatatatatatatatatatatatatatatatatataatttatctgaattcaatgtggctactgccgtcccta

SEQ ID NO: 47791 - DNA, 218 bp, Glycine max
  unsure (1)..(218): unsure at all n locations
gacatctgtcgtgaggtagcgaccgatattnttcagccgacattgcaccaattcttttagaaaagctcgctggtcgataatggtctntntacggcagagtaagttttcttgttntggtgttgcataaaaaagttacaatgtacttcggctatggttttcgtgcgagttcaacctgacatttgtttcggccaggaaaacattagcccacctctgcaaaa

SEQ ID NO: 47792 - DNA, 634 bp, Glycine max
  unsure (1)..(634): unsure at all n locations
aggagaactgtagctcttgtagacctcgatcggtcatctntccangccgaggtncagcgtcatntntntcgatccatttctgtgaataatatntnnttgccgagatgggcaatatgccagtttcngncgaatatatgggataatgccagtttcgcccacacgaatagtcngttgggctcgcacataataacctagccgacctacattatataatttttatgcaacaccaaaacaagaaaacttcctgtgccgtaaaaataagaacattacatgacagcgagcgttttgaaaccaaatattgcgcacgtcggctgatatatatattcgtggcttgttcacgaccgatgtcgcgtgttggagtttcaatccaatccgggaacgatattgcactgattncggtcaggaatgttcgatcgcatcatctcggaaggtttttttaggctttatcagcatattcttaccacgtgtctgcattgtgtgataattaagacataatttcttgcgcgggggctatgttgctaaaaatacagcgttctgtcacatacgtgtgacttgccaatactaccgctcatttantttatcatccatcagaactctcgtgtgagaactatcgccggatgttaagatatcttcg

SEQ ID NO: 47793 - DNA, 482 bp, Glycine max
  unsure (1)..(482): unsure at all n locations
gtcatatgtgactggctaatcagctctacacatatacatgtatatataacaagtagtaacaatgtgctntacctggactntatataatgaaacaacttccacaacaacatcaatggacaaaccaagttcaactacaaaaaactaattcagcttcacgtggagttgatataatgagtaatgacattagtagaactcanagccaaaccaatttcaagtacaacanactaattcagctttttctcaaccaaagtatgtcaaaactagtggtggctattaaaagtgttagttattcatgtgacaagcanagagaagtgtacacgatattcttattaaaactggtatgaagtatgcacataattgatacaatgacaacaacatgataccagacactggcagtntgctacaccaagcacatttttcttattgtgttaataattgacattctaatgatagagttattggctcataatccatcaaatctg

SEQ ID NO: 47794 - DNA, 127 bp, Glycine max
ataaattttttatacttgcttgacacaacataatgaccattgaacatattatctactcacatgctgatccattttatacgacaataattgaaggtacctaatctgtcgttcttaaagtgatcatcaa

SEQ ID NO: 47795 - DNA, 139 bp, Glycine max
  unsure (1)..(139): unsure at all n locations
aagatctacagagaccagagcttgagaggaaaccgtcctgagagcttgagatgagtttgtgagtgattgtgaggtcctagaggtggangagacatccncactacttgtatttctacaatctntcatctttctcttctct

SEQ ID NO: 47796 - DNA, 155 bp, Glycine max
  unsure (1)..(155): unsure at all n locations
cactcactcactcactcatgtctatcacnttcctcaccatggctgagtccctacctctctcttttcctcctcacattnccatagcgactcctcatncagtccaacgctgactctgacctcctncgtcgcttcaagactggcgccgagctcctcta

SEQ ID NO: 47797 - DNA, 117 bp, Glycine max
  unsure (1)..(117): unsure at all n locations
atctcttggttgatcaccaaatcattaccatcccttctataaagagcatgcggcttctcatctatcacanaaatgagatctgctgggatgacaccacgctcacggttacctttctct

SEQ ID NO: 47798 - DNA, 211 bp, Glycine max
  unsure (1)..(211): unsure at all n locations
acatggttatatattgctctcaactcagcatcangtgaatatattattcacttatgactctacaacggtctgcatcctaattgttattgacaacanattatttataatgcaaacgacggatatacaataacgaaattcgaaagacaatgacacaatctaatgattaaaaatgcatggngtctataagttggagtgaagctctatacatacc

SEQ ID NO: 47799 - DNA, 658 bp, Glycine max
  unsure (1)..(658): unsure at all n locations
aggaagaactgtactactaagctatcatatatcgacgcgctcgaactgancancagaagctctagagatantcatatggtcatatcttttaactcggatgntccaatcatgcgcatcacatatagagacgctaaaacatgaacaacggaagctctccacatgttaatatggtattgagctttcacactgaagtccgattcaggcttataatatatctgcgcgctcgagattgacaacaggagctctcgagatattcaaatagtcataacgtttaactctgatgtccgattcatgcgcatcacatatagacacgctacagaatgaacatcagaagctctcaacaatatgatatggtcacaacttctgacactgaagtccattcatgctcatatatatcagacgctcaaaactaacatcggaagctctcgagaattcanatggtcgtaactttcactcggatgtccaattatgcgcatacatatcagacgctcaaattaacaaggaactctcagcaatcaaatgcataactttccacgatgtcgancggctacatatatgagacctcaaataacattgaacgtttaaaatcaatggctaacttcctcgatgccatcagccataattcaacctcaatgacacgaactcagaataatgcatn

SEQ ID NO: 47800 - DNA, 294 bp, Glycine max
  unsure (1)..(294): unsure at all n locations
gtgtgctctatcatgcaagaatgcatggtcactatcagccatattctcaattaattccatggcttcttcagggggtcttcaatttattttttccnctgcanaagcatctaaaagctgcttggattgtggccttaacccgctaatgaaaatattgagctggattggtctgaacatccatgagtaggtgtctttcttagtaacccatgagatctttccaaagcctcactcaaggactcatctggaaattgatgaaaggatgagatggcagcttttccttcagcagtcttggactct

SEQ ID NO: 47801 - DNA, 679 bp, Glycine max
  unsure (1)..(679): unsure at all n locations
tggaagatgaactctcangcttgaagataccatgacaggagacacgtcgtcttgaacgaactctantaggggggtttgttgatatgcgtaaaccacgttgaatcaatgcggctcatgagagacatacatgaaggatcgtgtggtgctcacacgattagacccaggatgaagtggttaataattacgcatggataatattgcccaatgttcacagctgattgttatcattaagctagaagatgtgaagaatgccaaagacttggaccttaaganagatctcaactatagagatgcatgcaatggtcaagcttcgccatttanggggtgggccatggcctgtatcgacaagaattatcaagcttcatccaatacgcagtngtattgtaggagcaacggactatcnnttacagtggatggaagctgaccagtaggtagcatgactcaagatagtgtgatcagatcattatacagaatattatctatagagtcgacatacctactgtcatactattgccaacaactatgtcactgatacaagtgactcatccacancngtnngctcagctcgaatcgcncatttatgaccacaaatgacaacgaaacgtagacagagtctgatgatgtatanaaaanntttnnntntccnnnttgggtgaacatacaatatgtacgtggattg

SEQ ID NO: 47802 - DNA, 184 bp, Glycine max
  unsure (1)..(184): unsure at all n locations
ctggagctggcagctngaacatatgaacttgtataacatactgngaatcggtcactacantttttgagctgaaagtntactanattntctagacatctggaccagaattataaaacaaagaaccaagagatttggattaaaggaagaaataagaaaaatcgcacaagttggcagaataatcagt

SEQ ID NO: 47803 - DNA, 315 bp, Glycine max
  unsure (1)..(315): unsure at all n locations
tacactacanataacataattgtcagtggttcatacattanatctaatttccagacgtgtagaagttatggaaatatttgtacatcattaacaggaatacctagtacatttaatggttaccgtaattaaaataatntttgaatgtcaactctaatatntagacgacataacatagcattaaaatattaactcaaataagttaacatttaccaaaatgcttgtgagatccacaatggtgtcanatacaagaaataatataacattatccatatatatatatatatatatatatatatatatatatatatatatata

SEQ ID NO: 47804 - DNA, 295 bp, Glycine max
tattcactctgctagatactaattaccttggttattatattattaacgatgaagcttcgccttctatatcaatgatgaatgagattaatgatgttagcgagagtgtaagctatttggtgttccattcattggattgctatataaagtgtcatgcatctataggctctatagaataattgtggtaatgttcataagcttcttttttattatgaactcttgaaatgcgcaatgactgattaaatatatatcatatgttgtagcaatggttctcagccactgctgagtctgatccaac

SEQ ID NO: 47805 - DNA, 215 bp, Glycine max
  unsure (1)..(215): unsure at all n locations
tcagtcactggtgatcgagtaccattaaggtgtaatcgagtacacatcaatagatgtgactcttcatttannatcttgaaataagacgtctagaagctctagtaatagactacaagtattgtgtaatcgattacacaagttgaanatgttaaacacaagttgtagctcttgaaatttgaaatcttaacgtattataacactggtaatcgattact

SEQ ID NO: 47806 - DNA, 174 bp, Glycine max
  unsure (1)..(174): unsure at all n locations
catctcataatggaactaatgtttcatggatnntatgatttatctgccttcgcataatctacgtaactacctactctcattaaatggaaaaatcgaggagggtagaagtaggtgatgatgactaaagaaagaaattgaatcagagtggtgcattaaccacaatacttatgtgac

SEQ ID NO: 47807 - DNA, 205 bp, Glycine max
  unsure (1)..(205): unsure at all n locations
gagttgtgtctcacaagactcttattcatcanagttacaacaagtgttacacatgcttctatntatagcctacgtagcttccttgagaagcttctttgagaagcttccttgagaagcttctttgagaagcttccttgagaagctaaagcttagctacacacacccttcaaataactaagctcacctccttgagacacttctttga

SEQ ID NO: 47808 - DNA, 263 bp, Glycine max
  unsure (1)..(263): unsure at all n locations
gtatcttggctatattattatggtatttgaacaatntactatctccttatttgcatggtatggtcgaacaaatatgttatttgactatatggatatcatatatcatctatataagattgttgcttcatggttcttacttcatgatatgatcgatgctctctactcttctttgttatgaatgctgaatgaatgtctacgtctatatgcatacttaaatgttgatcgcactttgctttttgttgatgccaagcggataaatggat

SEQ ID NO: 47809 - DNA, 281 bp, Glycine max
  unsure (1)..(281): unsure at all n locations
aattgctctgagcttcaacattcaatttcgagcgtctcgttatatcacgggactcatatgtcaatgatgggagaactaaagtactntctgggattacaaatcaagcaaactcaagaaggtatattcatcaatgaatccaaatactgcaaggaattgatcaaaagaattgggatggatagtgcanaacacatgtctacaccgatgagcactaattgttacttagataaagatgaatctggtcagtctatagacatataacaatatcgaggtatgatcggatc

SEQ ID NO: 47810 - DNA, 667 bp, Glycine max
  unsure (1)..(667): unsure at all n locations
atggatgactgtcatgcttgagccaaatcctgactcaccatanacctngacccagggtgagaatgcacatccttacttctcggtatcnnannaaaagaagagaagganaattccaatcaaagganaaaggagaagganaatttccaatcaaatganagganattctcaatcaaagagtgtgagaaagcacaaagataagaaagaaaattccaatcaaagaatgggagagagaaataaagagaagtaaataagaagatagcttctggtcaaagaaaccagaagaaatgtgccgagaggtccttggactagacgatatctgaacaatacagaattgtcaccatatgaacaatagaaaagatntgaaaccatgacctatangtggtctctncctttgataccaaccanatcctgtcnctagcgactttttnccccgcactaacaataacagtaattgaacaagccacaaataatcatatgccaaacacacaaagccgaaaacccatctaagactcattctcatggaagcctattgatcatgacacgcatgatatttgttngatngacatattgcaagcaagcatactatcattgtcgaatngataacacttcttcacatgaaccttagtgattctcatttgcgacangttcttatgtagtaaatgatctg

SEQ ID NO: 47811 - DNA, 112 bp, Glycine max
  unsure (1)..(112): unsure at all n locations
cattatctccatgacatanatagcaaaatgatgatntggaaacttcatgcanaactggtcatgcatgcacctatgcggacactcaagcgtcaaatttttattgtcatgtgat

SEQ ID NO: 47812 - DNA, 736 bp, Glycine max
  unsure (1)..(736): unsure at all n locations
atttttgtacgttctctatcacgctcatcttgtggggaagctccntcttccatgggctantncnctagtgtatggctcttnctctcacctctnnctccttntcttccactgcatctncatggtggataatcaccattataggacctcatcgaagctcagagatccagcctccatagaagccncacaagcatgtgtncatcaagtggtnatcagagctcaagagctntaactatgtgctccgtaaacctctcattaatttgttgtggtgtaccgtactcgtgccattggtagtatcgtctatattttcctaccatgtatcttactcacactgtctctgtgctgacatggctgctaagcatgaacgattctatatgctatctccncgttataaccgcgctatatacactaagacttgtgtgtgctatggtcacattacatgttctatctcttgacacattgactngntgttagtctaagtncctctgaggatatgtttgtaatgattggtgggcgatatctgtacgcttgaagttctacactaacttgtactctagatgacatatctcataactacgagtgacttgatgacgatgtggtgtaatgttatcgtgtgctgctgaacatataacttcggcgatgacgacngttttagtcatgtgatcactggtttgtgttcatagtctacgaccatgtgtcataangattgaatgtggtatctactatagtattatgcttg

SEQ ID NO: 47813 - DNA, 576 bp, Glycine max
  unsure (1)..(576): unsure at all n locations
taccatatgtatctntgagctatctgcnngctgccccctatgatgccgngaagaancacacaccangngcctatgttatcatgtcatactcattacangcagannctagagggctgctttcatctgcgaaacgctntgacagagtagtcactcatgcgccttactacaatntntattccagcagattcaacaacatgactgctcaacaaaatattgactacataagaaatgaacgagcctcagatcttagtggcgtctctctctcaacgctctgagttgtgtacgcaaagccaaataacctatctattggctnatattttatggacacactaattgattcagcttactagcatccagatatcctactcgacaatattgtgatcacatgtataaggaagaacattatttatggcctaccaatcttttcctgaatcacggtttctttagacttctttcatccagtcctaaagaattctttattcttatctaaaggcttagaacttctaacacaaaaattattgatcgcgataatgttctcgacacttaattaaaataataacatatttacgactacan

SEQ ID NO: 47814 - DNA, 668 bp, Glycine max
  unsure (1)..(668): unsure at all n locations
cacgcatactctnccnctatacctccatannntancntttttctctttcctntataannnnnnnnnnnnnnnaaggctgatgtagtagctgcctattgcanannnntacacnantgtgtatttgattnctcttttctgttttataanacgctcnatgtctgaacccatgttgaagatcatattcatgcgtaaatgtctgtcctctctttttatttncggtatgctctatatgccacaaatcggagttacaatgaagtgatactctatatctcactcttcgttgtactgcatttcacataccaatagttatcatcattacttgggggcaattatcattactctatattcaaantaagtataacactctctttggttcgtcattaatatagcactcgatgtatngaccattctacgccacattactgacgtgaatgacntgttaatgcctaagtaatggagatatcggctgagccgactctgttgatgcccgtaatagaatatactgctctatacaaacatacgttttgaggaatattatcctcagtaatatccattagtcgagagatgtttaccctcccagaaaatcaataatgtgatactgtcctgatgactctcaatattactgcagtacatattgttaatggactgttgtacttgtaccttacgtt

SEQ ID NO: 47815 - DNA, 228 bp, Glycine max
  unsure (1)..(228): unsure at all n locations
tctcacctcttctcattggtcttccgctgcatctncatggtggaanatcaccattaaaggacctcattgaagctcanagatccagccttcatagaagccccacaagcaangcttcatcacaagataccttggacacgcatgtatatggcanaatagctcacaaaatatacgtatggttaggtagcanaatacctcanaanaaaagagagagagcananagagagcgag

SEQ ID NO: 47816 - DNA, 216 bp, Glycine max
atgctgatatataagctctgctctcaactatcaagagatgcacctacatggagtctctgtcactatagaaattgttctcatcgtattatgacttcacacgtttcacgtgtaagacacgtgatgtatcgtacacgttgaaacggtacgaatccaccgtttatacgttgtattatcccaatgttagtgagtacggttacaaacgggttagatttttta

SEQ ID NO: 47817 - DNA, 245 bp, Glycine max
  unsure (1)..(245): unsure at all n locations
ctgagtatgacagncaccgctttaggagcgctgtacaccagcagcgcttcgaggccatcacaggatggtcatttctctgggagcgacgcgtncagctcanggacgatgagtatactgatttccaggaggagataggtcgccggcggtgggcatcacttggctacctcatggccaagttcgatccagaagtagtccttgagttntatgccaatgctctggcaacagaggagggcgtgcgtgacatg

SEQ ID NO: 47818 - DNA, 191 bp, Glycine max
  unsure (1)..(191): unsure at all n locations
gccgacaggactgtgcggacgacattgtctgtganatatatggcatttagcaggagaaatggacccaggactgtaaacttcttataanttattgaatagtcattctcattaatggtaaacttttgcaggatgttgcggaaaaggcacaggccttccagaagcaaaacactgccccccacgtattgtctagt

SEQ ID NO: 47819 - DNA, 167 bp, Glycine max
  unsure (1)..(167): unsure at all n locations
aaagaaagactcgttattgtggagagtatctatangatngaataatatgaccatcgtgtagcttgatcttatgtgctagaataagcagatattgcatgtttctatgtgataggattatgactctccatatgtgtcattcataactcaatattatgactagactcata

SEQ ID NO: 47820 - DNA, 251 bp, Glycine max
  unsure (1)..(251): unsure at all n locations
atatggaagaagatgttgatattggttaatcttccatactagtctgatctagatgttagacattgtatngatgttatgcatatcgagaaaaatgttngtgatagtgttattggcacgcttctaaacattcaaggcaagacanaggacaatntcaatactctccaagatctagttgagataggtatacaagatcagttacatccaaggtctgatggtaacaaaatatacttgccctcaacttgtcatacttt

SEQ ID NO: 47821 - DNA, 228 bp, Glycine max
  unsure (1)..(228): unsure at all n locations
atatagaacactagaggttatgctgatcttctattcatacgcgcagcagcaaagcaagaaattgagagtatatttcttgacttggttgaattagacagaagtaggataaacttctctccatatgtactcatagaagaagaanatgagaaagcaaattgaagtacgtctatagcattagctatgatcaactcacgcacttaacttctgtaggagctatgtctgattaac

SEQ ID NO: 47822 - DNA, 229 bp, Glycine max
tctaaactcaagaaaacgaaatgctcaacagccaagatgaaataatgtggatataactagccaaccgttaatagtccgcactgatgattctcacttctaaccgaaaatattgtatcatatatcaaacagatttatgtattcagtaacagttctggacacttgctaaaacctcggttacatcgaagaaactcgtgtagttaaatggtcttagatcgaatcttagaccagc

SEQ ID NO: 47823 - DNA, 197 bp, Glycine max
  unsure (1)..(197): unsure at all n locations
agtggaactctgaagtatgtctcacaagactctcattcatcanattacaacaagtgtacacatgcttctatntatagactagggtagcttctttgagaagctctcttgagaaaaacttcttgagaagcttctttgagaaaacttccttgagaagctagagcttagctacacacacccctctcataactaagctcacc

SEQ ID NO: 47824 - DNA, 512 bp, Glycine max
  unsure (1)..(512): unsure at all n locations
tggcgcgtatatactaccgaacacgantgtganggtgaacttctgctttttnngtaccacnagtggtcctgagaatgtccgtggtangagacctgtgacgtatgtgggtgtattgtcataccaactgacaatccgacccacccggcatgtcggcagtgaacctgtatgtcctaacagcgactctgcatcacaataaagaaacagaccacacaggagctgtgtggtgccactgtaatttggtaatgtgatgggctctgaatcataccaggtggtatcgatcaggcttaaataaacagagctagatgctctggatcgataccacgggtatcataccagctgaacaggcaaaactatgagctctgatcatacatggtgatcatacagctaaaaggacggagtggaaccttgatcatacactgtatgtacacagaaggacgtatatacacatgattatacctgtattctttagtcggcttttgattcccttgaaaatagttgtatattcatgtccg

SEQ ID NO: 47825 - DNA, 318 bp, Glycine max
  unsure (1)..(318): unsure at all n locations
gcttgtctcagcattatgcgagacggagaccaacatgctagctatcatcttcaagtaccaagaagagttacgtctagccatggcccacgagcatagaatcgcggatgagtatgctcaagtatatgcggaanaagaggctagaggaagggtgatcgactctttacaccaagaggcaaccatgtggatggaccggtttgctcttaccttgaacgggagtcaagaacttccccgcttgttagccaaggccaaggcaatggcagacacctactccacccncgaagagattcatgggcttctcggctattgtcagcatatgat

SEQ ID NO: 47826 - DNA, 238 bp, Glycine max
  unsure (1)..(238): unsure at all n locations
gcatgtagagtccatggtaacttaaattctgagagaggacaactacanatctntntgagtnggaacccgtgaatgctatgccttatgttatgttgtctaacatgcattatgaatctcgganatgggatgatgttgtganaatacgaanggtggtgaaatcaataggaataacanaggagcctgtgatgtagtggatcaagatgaactacagagtgcatacattcatttctgaagatag

SEQ ID NO: 47827 - DNA, 109 bp, Glycine max
aatgcctctaacagcacctttgtcaatgaatttcttcatgcctcttaagtgcaaatgtccaaatctttgatgccatattctgacttcatcttctttggaggatagacat

SEQ ID NO: 47828 - DNA, 400 bp, Glycine max
ggctcgcttgcacggctgtgagtggcgataaccggttaatgtgcttttgtagtgacatattcactgttgtctgcatgttgaaatttgtcaacatgatgatatagcgctaggcattgagattacttctacactctgtttccatgcctctgaggctactcatcgtgccaagttatgattaccagctcgctgtaaggactttgttgttaggtttcaatgaaagtgcctccacaccaataaacgtttacccataaaacggagctctgttgaagtaactagagatcttcctgaatcaagaatagcccagttatttttattgacaagtgctaaatctcggccggggaaactcttacagtaggaacggtgcgctatgtatacacaaaaggagctagtgttttcatcg

SEQ ID NO: 47829 - DNA, 388 bp, Glycine max
  unsure (1)..(388): unsure at all n locations
ctctataattacctcacctctcaatgagctggtgaagaagaatgtggcatntaacttgngtgaaagacaagagcaagtctttgttcttcttaaagaaaagctcaccaaggcacctggtgtagctcttcctgactnttctaaaacatttgagctagaatgtgatgcctctaaagtgtgagttggagcagtattgttacaagggtgggcacctctattgcttattntagtgaaaaaattcatggtgccacccttaactaccccacctatgatanagcactntacgccttaataagagccctncanactnngggaacatactcttgttncaaggaanttgtcattcatagtgatcatgaatcacttaagtacattataaggtaaagcaagt

SEQ ID NO: 47830 - DNA, 56 bp, Glycine max
tctctaggaatgaggtggaaagagacctcatcaagaactcaatcatgctcgagatg

SEQ ID NO: 47831 - DNA, 596 bp, Glycine max
  unsure (1)..(596): unsure at all n locations
atatatgaggtcactgaggctgcagctgangggcgtcncaccattntataganaacactgaggatgcgtctactattattgtgatcatgnctttctccgacattgtaggtgccactctgagtaccaagtctcttcatctntgggcgtatacttagaaagatccgcgccccctgtttgcatatgttctgtagttgcatactatcctgagtcatatcataatagtactgacactgcctaacgaacgcaaccattatgttcttccaagaatggactgangaaggttcctaagttagcttgattaggtgagtngatntancactagttcactctaatattagccgagtcatcaagaatgagagataccaacgagaaaacgcccgattgatattcgctgtatctactagagaggatatattgatatattatatattttcctctgtgttgattcaacgcgttattgatgaccgacggncngattatttaaccgcctcacggatgctcactcaatgatcgaggatattacttatttcgtttcgcagacntgctatctagagatgaacccccacatcggccttgaagcgatgaaacgagntaat

SEQ ID NO: 47832 - DNA, 90 bp, Glycine max
  unsure (1)..(90): unsure at all n locations
cacaccatatgatataatgatngatggctcatatnctcactaanggtaaatcattacttttaaatcgagcgttgcaaacgatcatgacat

SEQ ID NO: 47833 - DNA, 726 bp, Glycine max
  unsure (1)..(726): unsure at all n locations
atggatatgagactatgctagcnatatacctggtgtngcccagttcatatatcttccgtaatactcgccacctctattatatctaataatnttcacaattatgtctaattggctntntactntattctagtagaattctaaggcatccattgcctgagaaatctcaggcagtaagtagacataaccataacgtgaataatcatcaataatggtgataaagtatccttcctttctganataactaacatcaaaaggttcacagatatcagtatgcacaagttcatagaagttaagtgcttcttgtagctcctntctntgtatggtttggttggttcccttaatacaacccacacnaaatattagatccgtaaaatgtagataaggaanaaatntcattctntatttaatctttcatcctctctctaaaaatatgacctananggntatgccacangaaagcagatcgttcattcactaaaactacgttagtgccaacattatgatgcagagtaatacagntntatcatacannactgtcattntcagtgtatatataccatcacaagagtactagtaccattgagatgatgatgctnnaatanantngaaacagtcactaccaaantaanagagtatgcanntacatcatgtttangatatgaaactaaatcctanatatacntngttccgangaagtntccgtaanctaaatgttgcacgtgtcag

SEQ ID NO: 47834 - DNA, 99 bp, Glycine max
  unsure (1)..(99): unsure at all n locations
tcttctccacattcactattgacttgcttcaagcattggttcaattgccaacactatctggattggatgaaagtgggcactacttatggngtccccatg

SEQ ID NO: 47835 - DNA, 586 bp, Glycine max
  unsure (1)..(586): unsure at all n locations
acaagctcttttctgtctctgagctggctcttatatntaaaggcaatgattattctanttngcanatactcctttgtntgatggtgaacttcatagactctcaagatgctcagtagctcatnccatgcaagaatnttntntntatctctngcttcttgaataactatggtctttggttcccagaccttatggaagctatatagttccaaaaatataatcatcanaatanataatattatgactcagaaccacatattagtggatgttatccaaacctctctccatgtgatgtgtgtacaccaaagcttaaaagcttctcttgaagtgtcatgtnganttcgaacctcttagagcatccncaatgagaaatgctacatgaattgttaacntaagaacgtgctaatattgtatggccactatctatataatataaaaatatatagaattactttatataaataattttggtcattggatcctatcaacctatatataaataaaataatacacatttaatatatacataatgtgaaagatatacaaatgtataacatcattctcatttcgatcactgtatattgacata

SEQ ID NO: 47836 - DNA, 731 bp, Glycine max
  unsure (1)..(731): unsure at all n locations
ncccttacctgcgtctcnctntccacctgnttctntatctcctnntttgtcacantnnngtnntngtattttttntnattagttttnaanttttnnnnnnnnnnnnnnnnnnaatcactgcagcgatcttctgagtcgacctgnangcatgcacnncttacangggcttccatggcttataacaagcccaagggagtggtctggcttttctatatctactctactccagnctggtctcgagggaagcacatgtacttcttctctgttcatctacagacatatagaccatactgtctatcttatactctatgtggatgacatcatcatcccatcacaaacacgtctgtctttcttattcagcaactaacttcctaactaaacactaccttctctcttaagcgactgtgtcactctggattatttntcgggactacagatcaaataccttccacatactctatactattgactcacagcacaacacttcgcgatgtacccacctaacttcaatggactgaacacaatcctatctccctcctgtggtngtcaccggaaactgccaacatggngctgatccgttcatgacccactctctcagatcagcgggctgctctgacgatgctactctcctcacaccgatacagctntctgctatacagtctgcaatcatcgctcgtctctgactctcactgtgacngggaagacaactaatgcatctaacggacttctcg

SEQ ID NO: 47837 - DNA, 390 bp, Glycine max
  unsure (1)..(390): unsure at all n locations
tccagtgtctcttctacataactcttcttctactctatactcgaccgctcttcacacctaataacacanatgaacttcttcctctactactagtatgagtgtcagacctcataatgactgcaacanatgcatgttcatgggcaatcgatcgagcactctgcagaacatcatcttatgtaccanagacctacaacacagccccgacaatctattgctgtatacataacatacattcaaccaaatgactcanactaatgaacatgactacctgagaagattaaaagcatctgaacatcaacattaggtgatcacacagcattctgtcatttcataatcatatgacttcttggacatcgagtatatacgtcattgacttcgtcatctaacgat

SEQ ID NO: 47838 - DNA, 470 bp, Glycine max
  unsure (1)..(470): unsure at all n locations
ctgctgagctngatctacatcacttgttccaggaacaatnggcttgatgttaatagctcagcaaagaaacatcacttgttgcaagacatgaggtgtttccatcatagatgttngcatccttatcagtgtcataggagtagctcttggttntcatctcatccaaaactctganatattcttcatgactcacggntccctgatttggattntcatatacatcttggtttaagttaactaattgagaaatagcttcaggaatgtggagtgagctttcactatttgaagcatcatcttcatatggnctaataaaatatgangaagctganangtgcaagaatggtgttttgtgtattagtgactagtggtaatatgttgagttaatttctaataacctgacaanatatcttacaagccaccctaagcctaatacatactaataanatatcttcacaataaaccatctgaataac

SEQ ID NO: 47839 - DNA, 158 bp, Glycine max
  unsure (1)..(158): unsure at all n locations
atccaagagaaacgtcgatgattttcgctttatttactaaaggtatttttgatattatatattatntacctctttttattccacgggtacgacgacgacggcggaattatttaaccgaataacggtgatcaattaacgacggggaattatttatttta

SEQ ID NO: 47840 - DNA, 333 bp, Glycine max
  unsure (1)..(333): unsure at all n locations
gctcacgtgactcttacgcttcaaaggtnctttatgatgactctacactctctaacctcatcgacacgaagaattacagcctcaacttggatntctacaaccgctcanaaccccacaccacgtggctccaactacaaccgcgtggatntctattccatganttttccacttttggaggaagagtncgtgtcgttgcattcgatgatcttcttagtggattaggtaaattagagaaggtggagaaattcctaaacttcacatcctctntgtcaaaatccccanaccttgttcacattctctcaattacttcttctcaagtcaatgacaacgtct

SEQ ID NO: 47841 - DNA, 189 bp, Glycine max
  unsure (1)..(189): unsure at all n locations
tagagcaagcttatgcgcatatnttcctatgaacgttcacttgcacaagacatcctattaactaagaaaaatgcacccatatacaatcaagggagcttcattacctagaatatntacatagtacttcaaggtgtatnnntgtattacatcacacacgccttcttggctaaattacatacatgcatactc

SEQ ID NO: 47842 - DNA, 123 bp, Glycine max
  unsure (1)..(123): unsure at all n locations
caccaagaagcatgtgataagctaanaacgaattatatcataagcttacacacactcttcttgtctacttcattgtaattgtagaacgttcatccctgagttatatcaaatatcatacattac

SEQ ID NO: 47843 - DNA, 140 bp, Glycine max
  unsure (1)..(140): unsure at all n locations
atttgaggctactntgtgtgtgacatgataatggcctaacaccttctgcaattaactgttgcataagtgagagcctcatcactgattangctactntgtgtgtgacatgataatggcctagcaccttctacagttgacta

SEQ ID NO: 47844 - DNA, 235 bp, Glycine max
  unsure (1)..(235): unsure at all n locations
taactcgcctatgcnttttcttccatgccatatgtagcanagtgcgtgatcctgtcaagtttgatgagctgganaatgaggctacaattatattgtgccagctggagaatgtatttccccatgccttctttgacatcatgattcacttcattgtgcatctcatcagagaaatcaaatggtgtggtcctatttatctgtggtggatgtacccggtttatcgatacatgaagatctt

SEQ ID NO: 47845 - DNA, 121 bp, Glycine max
  unsure (1)..(121): unsure at all n locations
atgaccctanggctgcanactcgtcaatcccgtgggtatggcttttgaaaggggcggaaaagnaagttttgaatgcaaaaacgcccctcctttcgtcattcttataatttggtgcacgggt

SEQ ID NO: 47846 - DNA, 283 bp, Glycine max
  unsure (1)..(283): unsure at all n locations
tagtaccaagaagagttacgtctagccatggcccacgagcatagaatcgcggatgagtatgctcaagtatatgcggaanaagaggctagaggaagggtgatcgactctttacaccaagaggcnaaccatgtggatggaccggttgctcttaccttgaacgggagtcaagaacttccccgcttgttagccaaggccaaggcaatggcagaacacctactccaccccgaagagattcatgggcttctcggctattgtcagcatatgatagacttaatggcccaca

SEQ ID NO: 47847 - DNA, 217 bp, Glycine max
  unsure (1)..(217): unsure at all n locations
ttaaattctgagagaggacaactacanatctntntgagtnggaacccgtgaatgctatgccttatgttatgttgtctaacatgcattatgaatctcgganatgggatgatgttgtganaatacgaaggttggtgaaatcaataggaataacanatgagcctggatgtagttggatcaagatgaactacagagtgcatacattcatttctgaagatag

SEQ ID NO: 47848 - DNA, 157 bp, Glycine max
  unsure (1)..(157): unsure at all n locations
cctctcaatgagctggtgaagaagaatgtggcatctacctggcggtgaaaacaagagcaagtccttgctttgctcaaagaaaagcttactaaggcacctgttctagctcttcctgactnttctaaaacttctgagctagaatgtgatgcctctggag

SEQ ID NO: 47849 - DNA, 632 bp, Glycine max
  unsure (1)..(632): unsure at all n locations
aaactgcgttgatctgacgcntgcaagctngntaaaatatggacatgtgcatatcatttctaagctgtgttttatcaggcgcacatctatatactgaagagagcaatgtgcaacaactatatactgtagaaagcagagtgcaacaactatatactgatatncaaggccgtaatgttgagggggctatacaaaangtangtactcttgaacgggagcatgtcantaatgtaatntctgtctccattcatcaaacagactgtctgagataagtggatgctgttggtgtacttgctgngctcatcctanctctcttgacgaaactatcttgtgtaactacactcacagatgatcacataatatctcttgttcatgatgatgaggaacaacctaccacgaatatgtactgtagtgaatgtgtacacagactagacatgttcctgacgagaaaactagttcgatcattctattctgacagagagaatagacagtgcatagaagatactanctaacatacttgcactgctggcgctgttacagctgctcntgccgcttctgctttattcattgcacatagagtattagctcatctctttagatgtgagtggatgataacagctactacttataattct

SEQ ID NO: 47850 - DNA, 175 bp, Glycine max
  unsure (1)..(175): unsure at all n locations
tagcaccgccgctgcactatgtgatgagaagtacaaagcatgcctcttcatttacnatatattaatctgcgaagctggagaggttgttaaagatacttggttctacctgaagctacataaacactaatcggcgagctaaagggctgtatagaatcttgtctctgttatgtgatat

SEQ ID NO: 47851 - DNA, 262 bp, Glycine max
  unsure (1)..(262): unsure at all n locations
ccatgttcaattatttttaaagtgaaatgggtttatgatcccaacatgtgtggctcgtggtgcctaacacatganactaagaatgtagtgtgaagtttcacgccttccccttttttgtttttgtttgtagaggaaaacgcaaggatgagcaaacatganaacaaatggtatgctaatttgcagatcanaaagtttgttgaacgcatacgcatgatgatgccatgactcatgcanaatgtgaggctggaatatgataacggac

SEQ ID NO: 47852 - DNA, 107 bp, Glycine max
  unsure (1)..(107): unsure at all n locations
gtcatcttctcaatcaaattcctagcctcagcaggggtcatatcaccatgagctccaccactggcagcatcaatcatactcctctncatgttgctaagtccctcata

SEQ ID NO: 47853 - DNA, 300 bp, Glycine max
  unsure (1)..(300): unsure at all n locations
actgagctgcaactaaaatttatatgataatatttgattgtacacatgtcaatataaangcaataanggaaaacgagactatactaatacataaaaatcttactacacgtgacccccccacgcctattagaggctaatacttaatgaatctactcanattattattattatttataaaacattggattagtcctttaaacttcttgaaataaccaacacgtgcattcagatacatatatgtatattaactcctttgaatatgcaaaacaagagatatcctagagttgatatccacaatct

SEQ ID NO: 47854 - DNA, 256 bp, Glycine max
  unsure (1)..(256): unsure at all n locations
gcacctgangctgcagcttctttcttattntattggccttatcctctgtggtttgcgccttgataaatgtccccctcttctcttttttccaggtatgctccattctaatacatacaataattattccttccaaatatatctatgaccgatgattgttaataggaggtaacctttttctctccatgcataaggtgtangttttgtgattcacgtatttgttaatattggtacctatgccgctctttcttataatata

SEQ ID NO: 47855 - DNA, 198 bp, Glycine max
  unsure (1)..(198): unsure at all n locations
ccgagacaganacacgacagttntcggtcggaggtatagtcctcaagcctacccttatggntttcctccggacttcacccnccgtaccgctccagacgaattgagccaagcccctaccttcgaggggcaactccctcctcatgccgactatcctctgcaagaagatgatgaaggagatgcccatctangccctctact

SEQ ID NO: 47856 - DNA, 247 bp, Glycine max
  unsure (1)..(247): unsure at all n locations
cacacctttaggaaattcgacgagatcccagatgtngntgtcttgcatagacttcatctcatccttcatgacantcaatccaatttgagagttagaactgcacatagttttagaatttgattggatattcccctattaaaccaatgtcatccacatgtttttggataaagataatataatcattttggattacacttctcctctctctaatggatcttcttaatgacatttcttgangggtgtctat

SEQ ID NO: 47857 - DNA, 411 bp, Glycine max
  unsure (1)..(411): unsure at all n locations
ccttcttcctagcagctagtgcctcaatcatcttcttggtagctccagacatagacctttgtgtccacanctactttgcactcatgttactcaacacanatcttactcaacataaatgtatccctcanttggttattatcatcaatgaanatatctaaatngactttatcttctctcttagtttaggtagaatgataagagtggtgatagaacatntatcttgcgcctatcatccattgttngagaatttgcttagagtctaagctttatgtccttactggattgtgtacagntaaactttatctctacagtattnacatattaatgtatatacagttctattatcagaactatatgactcattgctaatgcttctgatgactacatgcttctttctgtntatgccttcta

SEQ ID NO: 47858 - DNA, 253 bp, Glycine max
  unsure (1)..(253): unsure at all n locations
aacatagggggagtatgatatgagtgaacgcaatatatcttgcatatacatttcttgtatcttgatttcaggaattanattgtcattatcanaaaggggagatggtagaagcaaagactctgccttngatgttttcatgatgccatatgatcatgatantttgatgctntatgaacatgagcttctcaagtntaaattcaagacaaanatccaagaatacaagatacaacatcaagaatatttctagtgttct

SEQ ID NO: 47859 - DNA, 469 bp, Glycine max
  unsure (1)..(469): unsure at all n locations
ggagactggtaactaactgctgaccccgcatttgactaaaagctaactaatctctatgcttgtgaggatatctacctctgagccggaaaaactaagactgggatanataataaaactaattaatagcttaaatttattggagtttggttgaagtataatntgataactgtatatatctatataaagctacaatactaaggatgagaagtcagtgttatatgctttacagtccatggaggggttcgaaacttggcattgcagagtgaacaggattctttatctttatacagtcttatatctactccaatgccattgcgaaatatacgtcactgctatacccagtaaacataagacagtctacagaagtatattgaacgtaattaatgttattgtatatcaaatcctttatcaggatattcacggcttgaacattgatattccctttgatagcccccagacccaggaggcn

SEQ ID NO: 47860 - DNA, 278 bp, Glycine max
  unsure (1)..(278): unsure at all n locations
taaatatgcgtttaaatntagctaaacatattcacaagaatgataaccanaatcaccaactctctatacaggacattctagtggtgatgacctanaaaaaaaatagaaaacactcagatccaaccttgcattacaaanataacatggtctctttacacatcanaccttctcaagaacacaaggtttgcttcctcagcatttccctcaacctactcaaagatattcatcctagntgagtcaagtcatntttataagcagtcacactcagctctctctat

SEQ ID NO: 47861 - DNA, 139 bp, Glycine max
  unsure (1)..(139): unsure at all n locations
gcacatgttagctctgctctgatgtaacttggtagctatacctttanggtgttagtgtgtttgctctgtaagtggtaagcatgtgtgcgcttctcctaatggtcacatatccaatgtcttgatgtnttcagcatttcaa

SEQ ID NO: 47862 - DNA, 219 bp, Glycine max
  unsure (1)..(219): unsure at all n locations
cttataagaactagttatntatntgagcataacatagtcngtctctntctcccccacaattaagaactttcttgtgtntacttcacataactntctatgatcaaatgaatatcgcttcataatggtgataactatgtttcttcacagtggctcaactgtccaaaacaggcagatgtttaacatcatctgtgagctnntccgaaactgtgctagaacact

SEQ ID NO: 47863 - DNA, 261 bp, Glycine max
  unsure (1)..(261): unsure at all n locations
taagattcaccaagaagcatgtgataagctaanacgaatntatatcataagctcacacacactctccttgtctacttcattgtaattgtagaatgctcatccctgagttatatcaaatatcatacattacagatnttcgtagttctaatggctggattgtgtacatgattntcattntattcgctcttcttttgatatgatataaccaggcacaaagccccatttcttcatctttgattctattgaccagcagccaatata

SEQ ID NO: 47864 - DNA, 222 bp, Glycine max
  unsure (1)..(222): unsure at all n locations
atcttctttagttnncctgtgganacttcagcttgaccgcttagttgtgggtgatattntgaggctactntgtgtgtgacatgataatggcctaacaccttctgcaattaactcgtgcataagtgagagcctcatcacttgatangctactttgtgtgtgacatgataatggtctagcaccttctacagntgactattgcacaagtgagagcctcatcattg

SEQ ID NO: 47865 - DNA, 315 bp, Glycine max
  unsure (1)..(315): unsure at all n locations
gctgtagttgctgcacatgatgtccaacgttatgtcaaagaataagatcgggctgcacaatgcacaaggcaagatatagtgtcaaatgaagaaatgaagctgcaggattcacgatgtcggatataatgtccacgacatcctgcctgaaaatactggaattgctaaaagcattgaagctgcaggatccacgatgtcngatacaatgtccaggacatcctgccccgaaatactnggagtgctaaaagcattgaagttgcaggatccacgatgtcggatacgatgtccaggacatcttgcccanaatacctgacatat

SEQ ID NO: 47866 - DNA, 670 bp, Glycine max
  unsure (1)..(670): unsure at all n locations
atggataatatcatgctntgagccnnaatcctgactcaccatanacctngcncagggtgagaatgtcaatccttactctctgtagtcanaagaatagaaggganattccaatcaaagaaagganagaaggaagattccaatcaaagagaaagcatataaagataagaatgaatattcccaatcaaagagtgngagaaagcatanagaaaagaaagaaaattcccaatcaaagaatgggagaaagtaatataagaagaagatggaggatagatagcctctgatcggngatctaanggaaaacagaatgaatatgcagagaggtctttggatcggacaatatcttgacaatacagaattgtcaccanatgaacgaaaaatgaaaggagggaaccacgacctaaatagtcttcttttttgataccaaccaatatccgtcnctagtactnnttttctcgtccgcctatacataacagaatagaaaaaccagataatcaaagccaaacacataaagccgaaaccatcagattaccattccaagggagtctatgatcatgacacgctgtatttngattgatggaatatttgcaagtcagtctgacttctatgtcgaatatgataacactactgtcagatgatcctttagtgntcttcattttgcgacccgtgtctn

SEQ ID NO: 47867 - DNA, 167 bp, Glycine max
  unsure (1)..(167): unsure at all n locations
atggcgcctcctctcacctcttctgctttgtcttccactgcatctccatggtggaacatcaccatagaaggaccttattgaagctcaaagatccagcctncatagaagctccacatgcaagctgtcatcaagtgggatcagagcacaagagcttcaagtatgtgctc

SEQ ID NO: 47868 - DNA, 242 bp, Glycine max
  unsure (1)..(242): unsure at all n locations
ttctatctcactntcaatgcaagttatanattcccttaanaatgaactcttaaataatgattcanatagaacaatctgaatataaatataacgcaataataaataaaagagttcaagggagaagaaagtgcacactcggatntatactgtgtcgtgcacacncttgtgcctacgtccagtccccaagcaacccgcttgagagtccactatcttgtaaatctctttacaagttctacacacac

SEQ ID NO: 47869 - DNA, 236 bp, Glycine max
  unsure (1)..(236): unsure at all n locations
acaccatggagatgcagcggaaggcanaggagaagaggagagggaacgcaccatccactatggaataagtcaaggaagaatgagccttcccaccaagaactgccttggataagaagcttgaagaggatgctntaatggacgagaagatcaagagaacgcgggagcacgaaattgaacgaataaaagagagagagaagtgaaactttgaagtgtatctcataagactttcattcatc

SEQ ID NO: 47870 - DNA, 700 bp, Glycine max
  unsure (1)..(700): unsure at all n locations
ngggagactagttgctagctnanatngctgnncngnnnnaannggcnnatagcggatcatggcngaaggccttttttnctctntatatacataccattggcacctatgtcaccaccatggcatgacctccttcacaaatngtctatggcagntgngaaaatatncgccatgccattccaccatgccagtcccatggcctctanttaatagcactgtanggtagtctaacaacattntccaagcttaatgacattctatcttaataagcatagaagagtgatacactngtcttcttgttaaactaacacacactagtcatgtgagacacattcaaagccgtgtaaacgctccagcatatatatngagcataaccatcatattgcatggccataactcaccaatatngatataaggacgacgaatcgatcctttatctgcaaacatacagaattattataatataataaataactcagatcctactagtaaacagacgaagtctcgtgctgagaatgccactcgctatatccatcacttctactatcatctagtgtgtagggggaggaagtctctcagtacgatggcangtcatgcctgcatngatagtctatctatactgacatcgatttatcttgatagtgattatatacatatataatggttggcatgcanactaagactgcattgattactaatgccg

SEQ ID NO: 47871 - DNA, 739 bp, Glycine max
  unsure (1)..(739): unsure at all n locations
tctcacatcagcttctctnnctcgatctactcttcccctttnnanttgatttttttnnntntnnntntgnnntnntnnttgtttnnttnnttttntnnnnnnnnnnnnnnnnaatgcccggcgcgatgctctagagccganctgcangcatgcaanctnnaggttgctcattgactccagactgctgcaaagaatgacatagatctgtatggtgtatctgacaanaacatacaccacagactcttgcgacaggtgcagatctctgattcatggcacgctcgagtactaggttgagcaatgcatcaagctntccctcangctttatatattgactagatgaagatgagtctgtggccacctcatggactcctttaaggacaataacatcatttcttgcactgtattgctgggagtcngaagccatcctctcattctaattcctcagcctgacaggggtcatatcaccaagaagctcaccattggtaccatcaatcatactcctcctcgatgttgctcagtccctcatanaaatctctangaacgagctcgccagaaatatgatgtgtacgtctgctagacataatcttctgaattttgccagactcatcaagctctctcactacgtgctngtgctagaatggctttcagatggcgtgtcccatagcatggcattattctccaacaactcttcttatgtctttcagctgacattgcctggacgcacgtcataccactttcg

SEQ ID NO: 47872 - DNA, 321 bp, Glycine max
  unsure (1)..(321): unsure at all n locations
aacagccacccttatacaggtcatcacttaanaaaattgggcggattatacacatcattgcacttaattgggaaattaccacatctgtcaattttgaaacttatgtctcattatacacatttgaagtcttgactatacaaacaattgaaaattacctcctcaattgagatatcttttctaatacagattagcttatatcttgagatataatttgagattataattcagattctctttatactatctcgtaagattatcatagcagatcttggacaataaacttacacatttcttcataacaaaactggagtctttttataa

SEQ ID NO: 47873 - DNA, 310 bp, Glycine max
  unsure (1)..(310): unsure at all n locations
cctttgtgtgcgtccggacgttaactaactttatggttgtctgttatcactcgaaatcggcgatcatcctctagtcatcacttattacagcgagcaactccgggcgaaggcgaccttactggcttaatatataccgccccctgcgcttacntatgatttgggattatctcagcttcgccactggaaccatactcacggctgttatctggtgtgcgtcgcttaagctcttcctgtcgtataatctcgctcggataaacggcgacataaccgcttcttgtctctttaaccacttcgaactctcctcgcggcg

SEQ ID NO: 47874 - DNA, 191 bp, Glycine max
tgaatattacgacgtgtctgagaggttgtattagaatctaaatctggctgccccatgaggaatactctgcacctatgtagcatggacaatacctttcaacagtatgtatatatatgaatacatatagcatgacaatgccttgcataatatgaatatatatagcatgaagtgccttacaaagtgttggatgg

SEQ ID NO: 47875 - DNA, 339 bp, Glycine max
  unsure (1)..(339): unsure at all n locations
ttctntgccttctcttcatttgtgtttcttaattttctccatgtatctcctcacatgtcttgttctanatgtngntaacatgattctntagagtttccaccgattaaacttgctatagaagttagaattgattntctatggttcanatntcttggtcttgttcttgaaccatgaatngtgttgagtttaaggttcctttgagttntgtcttgggtatttttgtggctganacctannaccataaattcttacaanaatattaaagtagaagaaaacctcatanatctagagtgaccttgtcacctatngtagttntgtcatagaagtcatgtctagtca

SEQ ID NO: 47876 - DNA, 199 bp, Glycine max
  unsure (1)..(199): unsure at all n locations
ctatccaatggccatgaaagaagacagatcagctgcacaacanatcggaatgaatacctgcatgaccatntgcagaagatgcatgccagtaaattgagcttgatagccacccactggtngcacaaatatcaatcatggcctgaaatacgcgtatactctgatctaatactgatttcaagtctgtgacatatgcactaat

SEQ ID NO: 47877 - DNA, 610 bp, Glycine max
  unsure (1)..(610): unsure at all n locations
actacactactacctcttacttctcaaatgnttgtgttntctccacanntnttttttnnnnnnnnnnaaagattattgatactcagcgttttcttnttntttcttctgtggaggatgnaatttatttttgtttncatncgacttaatattcagacgtgcatattatatgcacacgctgctcctctgtcccatcaaatgcccgaaaaagcatccttctttgtatgctgttagatctacctcatcggttcttcacatagtagacaaatacgacagtgctgtcctattgtcatctacaattaatataatacttatacgtcgatacttacttattcacaacatttacttatgaaaaatggacataatgatactgcatctgtcacacaatatcaaataatgtaactgcaaaagtatctcatcgtgtcaaaaatcaccataaaaaacgtaatacatatatatatatatatatctatatatatatatatatatactcatatctacatagtagccactgagccttctattgcagacagagacaccaattctatctaatttctccactaagtcatcacaacgtattgtcctctgtactatagatcgcaacgtcccttcg

SEQ ID NO: 47878 - DNA, 288 bp, Glycine max
gcacgagctgcactaatttggtaatgtggtgtctgacgtcttacttatggttcatcatcctttttgtctacgtcggataattggggacttggttcaagtaatgccctttgatcatgtgtggaatgtattggtcactacccaaattggtgtcctgacgtctctcttgtgcaacaacccaaaacataagcttatttttctacaaacaaagatagattatacacaatgcatggagggtctgacctcttactgattgcttcatcatctttttttttgtctcgttctggataa

SEQ ID NO: 47879 - DNA, 107 bp, Glycine max
  unsure (1)..(107): unsure at all n locations
catggatatgaatgtgttaactgattgacangngtaccanaagtctaaataataaaaactcgaaagttcnagtgtcgatttccacangggacttgnnttgactagtg

SEQ ID NO: 47880 - DNA, 467 bp, Glycine max
  unsure (1)..(467): unsure at all n locations
gctcgcgcacactccagacatcttgtctaagatcccaacggtcagatcatgtacaggtgtcttgtgaagctgcagaccannattcgtgacgatccaacggttaacgaaggatnnggcagtgttttaccgaggaagctcatttagcttcctcaagaagtttcattaagaggcttcctcaagaagcttcctctggcttctttgagaagttntctcaagaggcttctttgagaagctagatccttatctacccatacncttctattaactaaatcaacctccttgaanataattacggataaaataacaacacanatataatcaaacatcaaacataattattaataatatatagatatatatcangggtgtacataaggtgtnccacatgagcacctangtttgcattgaaacannaaataagaacaaacctacctaatgagtccctatgtacacanatcatgaagatg

SEQ ID NO: 47881 - DNA, 212 bp, Glycine max
  unsure (1)..(212): unsure at all n locations
tctcacctcttctcctttgtcttccgctgcatctccatggtggaanatcaccattaaaggacctcattgaagctcanagatccagcctccatagaagccncacaaccaagcttccatcaacgtgattgtcctcggaccatggtataattttcacacaagtcgaattgaataaataagatgttttattattaatataatatgggtatatatat

SEQ ID NO: 47882 - DNA, 276 bp, Glycine max
  unsure (1)..(276): unsure at all n locations
agacctaacgatgaggccgttcgacacttaccttgaaattttgtatgcatccgatatactacttatcatgcgaacaacaccgctctacgttccactattgtatatagagtccgtgcgcctcgccaatcaaagtatgtcaattataagcatccgcgactggatcaaaccaccgatgggagcttacntggcggagaaaagggaggtcttacatgttccttgttaaccgggaatggcaccttctccaatacaaacggatatcaccgggccctcatctcc

SEQ ID NO: 47883 - DNA, 271 bp, Glycine max
  unsure (1)..(271): unsure at all n locations
agagtatgatgaactaanggacgtcaatatggccacagctgaagctttggaacgagaaaccaagaacgcccgataggaagaacacgaccaaagcatagttttgaggggctttatagggcagcaatagtgagctcaagctccgaagaggtgaaaggaatcatcacgggtcaaaggcatgatcttgaaggacgagctaaaggttctgcttatgtcgaaaagaaatctgtcccaacagctaagcgagactgaagggaatatgtgggccatcatc

SEQ ID NO: 47884 - DNA, 670 bp, Glycine max
  unsure (1)..(670): unsure at all n locations
tggagaactgtagctgtctnatctacatngatgttgatntatgggaggaggtngtatgccantntnntgtttaatgagtagcgtcccactggtaaaactaactntccanatctttgccttcgcaggaaatggccncgaggaagctngcctcanagaggtccaggaaggacaaggcagccgaaggaactagttccgctccggagtatgacagtcaccgctttaggagcgctgtacaccagcagcgcttcgaggccatcaagggatggtcgtntctccgggagcgacgcgtncagctcanggacgacgagtatacctgattccaggatgatatatggcgccgacggtnggcatcactggnntactccatggccaaagttgatccagaaatagttctttgagtttatgccantgctttggcaacagaggagggcgtgcgtgacatgagatcctgcgtaaggcgcagtggatccngtctgatgcnactctatctgcaacttctggatattctttgtgtggaaaggccangatgtcacttggcagagaggatctgctatgagtcatacgaggctcctcaattataattactggcatgtgttcccggctgttatggacgtagtgaacatctctctctcgcaccgtgacatatggtgcggtagctataaactagctt

SEQ ID NO: 47885 - DNA, 333 bp, Glycine max
  unsure (1)..(333): unsure at all n locations
gctgagttctntactgtaattttcacattatatgcatgcataagatatggtgatattattgaaaagggaaactaaaatgaaatattgctcatgacatctgaatgaataacggaaaaaaggtagtaataataacacaacacattcctccatggntagatcaaatccatctgtaacaggacatgagctccacatatagagatccacgctaaatataaacaatatctaccagaaacaatacttntataaacttactttntccataatagaanactcatttagaaactacgagcatgattgatgtctgattaatgtagcatgtaactggtggaatat

SEQ ID NO: 47886 - DNA, 281 bp, Glycine max
  unsure (1)..(281): unsure at all n locations
caataactggagccacctctcanactatgggcannatatanatccttccatccttcttcttggttacaagcaattgtanggtaagattctctgtctgatagttatcatatctgtcttttgccatcataaaagacttagcatacacattgtattcatcaagcatatctnttaacttcgacacaagttctgaatcaagtatatttggccttgcacanatacagaatatgtcatgagtgatataaactaaataattgngtccattcattacctgtgtgacaact

SEQ ID NO: 47887 - DNA, 227 bp, Glycine max
  unsure (1)..(227): unsure at all n locations
accttggtggaagaataaataagggacaaccaaaattatatattatagaaataaanaggagaacatgggtgaagagaagaaatgtatgtaaatatatgaatacatgattctgatgatgntaaagaagaatcaaacaagattgtttcagaggataaacattacttcaagattaatacaaggttgtttcaacaaacaaagtcttgcttcaagagtaactcaagatcaag

SEQ ID NO: 47888 - DNA, 209 bp, Glycine max
ctacttcttcttctttgctacacttttcagattactcacagacacaaaagcgataaatgctacaacttccacatacattattgattgagtgcgtataatattaagtggataaattctatctattctacacattgcattcaacaggatgtggaagatgccatttgcactatgcttgcccacttatggcaccccttgggctttacatatat

SEQ ID NO: 47889 - DNA, 145 bp, Glycine max
aaactttgatggtgttctcacgcatggaaatgtgattctatgctagcaacggagtggtgaattgtggtctgcactctgcacacacaattgtgggtgcactaccacataacctgcactcgtctgccatattattttctctcacaat

SEQ ID NO: 47890 - DNA, 638 bp, Glycine max
  unsure (1)..(638): unsure at all n locations
nggactgaaatcagtaaagctgagtcantgagccaagagtagagggtgtctgtagtcatatatccgaactttgtgtttatgtcagctcgattatagtgttgacaacagactcatgaagctntcttgcaatnggtcggacgagatatctggcatgttgcatatgtgatggaataccgaaccatgcattccttcgtgaagaatgctacaaggacacaaattaaggaagatgagcttcaaggaagtatttgaaggcatggttctgtctaatattaatattacaaatataaccgtctctaatgtttcttactgtatagaacaatttaaaattatggtaatagtatatggttcaacacgaccgcttacatagttataacacttattaacgtcatataaactctcttctatattatcatatggtatcgttgatctacacttctaaaatctgtgcatcactcatatcgatttattatgtactcgggtagtgtctcacgaaataaagttatatacatgttaaacagtggtgtgtcgtttcattcatgtaacttattatagtgtaatcacccaaacctcatttcaaatattgtgtcgacgtaactttataacctgcaactatttaagaaatattatatatatatttg

SEQ ID NO: 47891 - DNA, 247 bp, Glycine max
  unsure (1)..(247): unsure at all n locations
gctatgctgcnacatctacacagacctcctaacctagctganaattatccacaacagaataattataacctctccagaaataggtacaatcccgaatggaggaatcatcccaaccttagatggtcgaatccttcacaacaacagcagcaacaacaacaaccttattttcaaaatgatgctggcccaagcagaccatacgttccttcaccaatccaacagcaacaacaacaacagccccagaaacaac

SEQ ID NO: 47892 - DNA, 658 bp, Glycine max
  unsure (1)..(658): unsure at all n locations
nggattcgattcgtaagctntctntctctctanaatataaggggtnttctgctatggttcacgcttctctttntataactatctctaaccaacctatgtntatgtntntcattcaatatattattttaactttatctcatggatcttgaaagtgtaaccaatgaagcaaggttggctcactggactacggacccatttgagttattccaggtggtttgaggatgaagcaatctcggttctccacacacattggagttgctccgaatgatccaatgagttaagacagtatgtggatggntcattaaccatcccaataatatattgactcantctatccaatccattatcttgtattctttataattggatagttagttggattacttatgatgaactgtaagtatggataacagaccaatgcttccctcactttgagagtaatgctnactacatctcactatggagacatcttcacgcatacacattgattgaatatatcaattgatagtcactaactgagtgatgatccaaatcccactttaaatcctcttaatatttcaacgacactcactacatagaatgtaagctactatggattgtagtcacaacctacggttcttctgctatgtatatctacatcacaactgttctatctacg

SEQ ID NO: 47893 - DNA, 345 bp, Glycine max
  unsure (1)..(345): unsure at all n locations
acaacaagtttccacatccacaaatcgcgcataaacccaccatcccgtgttgcccacctncaactgagctcacgtactcccacgtagcccatatcctcgtttctctcaacaccgggtcctcatcaattcttccaagcttncncaacatccaagtaattcaacatccaaatcatcacaaactaacaaaccaagaataacagggcaaaggaagagatactctgccaaaacacaactcataatcacagcttttcacatacanatacctcagtaacattctctttcgtacaantcgttagcggtgggatcgactctaactttactggaagctctagacataatctacat

SEQ ID NO: 47894 - DNA, 537 bp, Glycine max
  unsure (1)..(537): unsure at all n locations
aaatacgattctagctgctgncatgcncagtatgatggccagtgtgttgggagtggtactatctctgtatgngttangcaaggacaatggcggataactgcctgataacgccaacgaatcgtggaagttggttangtatnacccactcggcagatgtaagagaacattgtgaaggaaatcggaagcaagtccggtgaacaagaagcaaggaacccacctgccatagtagacttatagccgtgctagggacaagcaagtatacaattcaagatatgtccagtgcttgattggtcgacgtcgctcctgattcactagaattgcaagggagacgccggacattaccacagcgtatatcacacaggccttatgactatcctggaccccttgactatctaaacagcaacgagatacgaatcagattggactcacgatatcggtatcgtatagacaaaatggctctaacaacgacttaactgcactgtggtaagaaaaaatgtctgaatccgctcctcattaatctgtaataccaaacttctg

SEQ ID NO: 47895 - DNA, 123 bp, Glycine max
  unsure (1)..(123): unsure at all n locations
acttactcatgatgatgcataatgcacaaaagatatgatatggactaagatacattcaatataacaaccaatactaaagccactcatgggaattgggcatgtaaaagacanaacatcttcatg

SEQ ID NO: 47896 - DNA, 230 bp, Glycine max
  unsure (1)..(230): unsure at all n locations
tctcttcccaacanacacagtatcctcaagttttgcacccacgtagtacttcttatcataagatgttaaagagacaccacagtcagcaatattgtgctctatgttnttcaactatgtgttgctatgaatggtacanatganatctttaccggaggattgaacatcaacatccatagaataagtatggcccaacggatcaacataagctgcagtacactcagattgaatac

SEQ ID NO: 47897 - DNA, 423 bp, Glycine max
  unsure (1)..(423): unsure at all n locations
aaatggcatattgacgatggcttcgtgaaacaagctcgtcattgaaaaaagaagggatatgcatacgttagtctgaatgaagaaaaatacattcagcaagcatcacaataattttattgagactcgtgatgtacacatatccttacaattaagtggttgtactatatatagatactacttaatatgtagatctattntctaatcattctcttgagactgtaacatgtagctttgaatatttgatttaaacttagtgcccagccatgggacatgntcactccganatgaaattgcaagtatgtgcttataaagtctctcattttacgtctaatgttaccatacatctttcaatcttaacgatatcatctatatatgctttacttcacctggacatctttatgttcttatttgatatatgcttta

SEQ ID NO: 47898 - DNA, 260 bp, Glycine max
  unsure (1)..(260): unsure at all n locations
gtttacaggtgannatcatcaataaacataggatgtacctctggttgctatttgattctggnttaatatacttgcatatatttgctcgcacaagtngtatcttgtttgatgctntccatanacccttcttaggatagaatctctgtgttgcttgtcggntaaacactcaatgcatagcttcattggatccttgagtgaaggcagcccgtttaccattataaaatagtgttctcaatcccttacagcttaagttaccattc

SEQ ID NO: 47899 - DNA, 245 bp, Glycine max
  unsure (1)..(245): unsure at all n locations
gagtgtaaaaaatggatagagatgatgaagaataattgtgtattttntcattcagaatcatagagacaatatatacacaaatacatatctctaattagatgattctgctnttataactcagcgatctattcctacaatcaagtcattctaatatgactatactattatcatattaatacaagaatcatgagatacaatcaactctcataataataagaatcataagatattgactnntttaacac

SEQ ID NO: 47900 - DNA, 587 bp, Glycine max
  unsure (1)..(587): unsure at all n locations
naatattagctgctcagatctcacgcccacatcctaatcgatagtactgtgtctactcatatatctcgttcgtactgacaatattctgctgttaaatcctgacacactaagatctacacaantatagcttttatagtgacacactctcgcctcttaccactctaatagcgctngacctcataggctagtcaagagaatattgccacaacacagaacacatcaccaatatatgttaggtagtctagacaatgaaatcgtcaccaaatataggctctctatgttatatcacaaataatgatataaattcagaattacgaatcatgtacattcatcatgcaccatatattccttaagagtcgttttttaagtttcaacatgaacatcagccaatatattttttttaattactatacgaatctgctcttctctgttcttatacataagacaaacgccatctatcattgttccctcataaatattgattaatgtattatgcaacaataatatgattcctaattcacaatgagtttccttacttactcttctaatataactatgtcagcgaatgatactattactctgatact

SEQ ID NO: 47901 - DNA, 275 bp, Glycine max
  unsure (1)..(275): unsure at all n locations
gatgtgaacctttccttacncatgagtacttaaactagaatcaattcanagaaatacaagtcagaactcataatacatataaactaaactatcacaaagccaaataagaaggtaaaggtatactccaacttcacacatttatagtttaccaataacaaaatntcaacttcatattacaaaagtttcacaagggaaataaanatcgcctttgctggatccagatatggtcgcatacatagtaaaagaataagctngataacatgtgaacaaaccca

SEQ ID NO: 47902 - DNA, 630 bp, Glycine max
  unsure (1)..(630): unsure at all n locations
tggattactgttctgtactgtncatcactggatatcangcccctnatcaccattcctttctctcgcttctttcttttttttggtgcagangcacntaggcctcgaagtacaagtcataacancgagaatagaatgagtgtatgagtggctctcaagtcatcttcatgattgtacacattctttacgaatgtgtaagaaactttcttacatgatgcgagactagtctttcgctatatacctcctctatagtgctcatgagtatagttaggggtgncgatcaattaatggtattcatcacttatatgaatgactgacttgtcgtgattgaatacaatgctatatcaggtgcatatctgaaaatatagactggacacgtatcttcactgtgtgcacaagtagagtggtctcttcatatctctcacctatcatccatatatctggatattcgatagacttcactacagtcatctatttattctatcggtatcttcttattagttgctcatatatgctgcgttgtgcgatattcttcatatctatgctctatttctttgtagctaagttgataagtagcattcatcttgttcgcctttacatttgcgtatatcatgattgtattctctcgtcttg

SEQ ID NO: 47903 - DNA, 634 bp, Glycine max
  unsure (1)..(634): unsure at all n locations
cactacctgtctancnntcancgcacacnttcgacgcgngnttngtagcttatcntttcnncctcannctnntttcntnntnnnnnnnnnnnnnaatgcacaatgtcgctgcatctgcaacttcgagcatctcgantnnttcgacaaactctgcactctcggtatttctgttgttattgaattgnacgagctccttctcaattgaaggcacacatattactcgactaatcatacatccgattacaactattgagcactaccagctcaagcatcttctcgatttgagctatgacatcttcggactattctgcgtcgagaatagctattgtgtaaagtccacagctccgcataattcaacttctcgataactcgactatcggcatctaatagaatttgatacgactgctatacattgatctaataactattccactcttatgaatacttacactcaaaataaatcattgtttctagactccgtcaccttgcattacattacggtaccaccccgatcagattttgcaggcgtgcacgttccgtgtcttagcccagtaaagctctgcacatgccatagttgcctactgcatcatcatacatatttggcacgattggcactacacttaataacttgccc

SEQ ID NO: 47904 - DNA, 264 bp, Glycine max
  unsure (1)..(264): unsure at all n locations
gtgtggcttagtgtaaacaatacttgtgtgtcttccaagaatggtaggtcagaatacttgttntgtaatcaaattntgattagtaaaaccctctactcaacagtaaaggagaactggacatagctcaggttgagtgaaccggtataaaccaattgtttcttctttatggtttattaagcattccactaaaactctntgtcacttgtttaataccaagtgtttaatttgaaaatggtttaaaaggactctctgtactaagtcttt

SEQ ID NO: 47905 - DNA, 266 bp, Glycine max
  unsure (1)..(266): unsure at all n locations
tcttnctctttttcactcctctnntcacttcaccgatcaanatccagataaacttcatcatatggcagagccatcatagaagagatagggatcatcctccaccgctaccgctgctgcccatcgccgtcacggcccatccggagcacccacagcacctattcctccttctttgtcatctccaagatcatcaacattggtttcatccgatgatcaacgtctacnggtaccttctcagttntcttctagaataatcttagaccctaagt

SEQ ID NO: 47906 - DNA, 694 bp, Glycine max
  unsure (1)..(694): unsure at all n locations
aggggaatgacgactctnagtcaacctggtctgtcnctntggcaacatcaaatagcctatgatctcggatatcatctcagtattacatatgagtagcaagatatatgtgtcagagtattnaatacaataagccaaactcatatacaagatataatctaaccagaattcanattacatanaatgtcgacaaccacanaacatccaatgactgagatttaaaacacatgataaatatgcatagtacttagcataataatgtagattctaagacactaatagcctacatacacggcttataaaagataaataatcagaacctaatatctaataagacggaggtcgtggttgatgattgaaactcttacgaatgtatgcgacatcctcttcatgctgtgtaagacgaatgttcataccgtcgaagcatgaatctaacgagtcgtagcgggcaccaacatactaactaagaccttgtatatctgagaggacttcattcatgagtgctggatcctcactcttatgaagatgtggaagagtcgttcatcgtattgatggagagcatctcttctaccattgtcatactatcttacatatctaagagggacctctcacaccaatgcaatgactctgattgacatcggttactcatcggtgatgaatgntcatatatatatcatagtggtatgaatagcgtcgn

SEQ ID NO: 47907 - DNA, 607 bp, Glycine max
  unsure (1)..(607): unsure at all n locations
gcacccacttctcctccgcggtntannttttttggntgnttnattttataattttnntatgattattttgtnnnnnnnnnnnnnaatcccctaggacgtctgagcactgcagcatgcaacctatattcttcattnttgagtttattggatgatatatttttatttcttatgcgcnctcgacagcgacncntattcttaggtgtacacctaacacgcaactatcangcaaccagtagtcaaaattgatgaagcctgttttcagctactgcggagtctgcatatactggaacctgcagaactggctatggactcacacacctattgatgaggatggaatggccagtcggctaacgcatggcaatatgagctttctcaacaacattgcatgatgtagaactctaaactcaatttgtgcataaatattattcaatgggcactgcctaaacctatttctgctttggagatattgcagccatgatgagattcgatacaatatggacaaaggagtgcctgcttcagacttgcatttagcctggaaaggggcactgatgtaaacatcgatcactctgtgcattctgggatcatgacctactgactacacacatcg

SEQ ID NO: 47908 - DNA, 713 bp, Glycine max
  unsure (1)..(713): unsure at all n locations
catccttacgtctcacccactctctcttacagatncnttntggggcnnnnnnnttctatttttttntttttntnnnnnnnnnnnnnaagcagttgtatactaagctntactcctatntggggttatanngctatatanaataacgatagcactntaatttatattaatantataanananananatatatacatatatatatatatcgtatatcaaggataactatacctctacacaccatactgggagtcataggaatatcaattactatatgcatatagttgacgggatcgtcaacaacgaatataatcatanaataagaagattgcgatagaactgataatgattatcaactgtatatgatgtgtataataatataactataagacatgggcagttgtattacactagcaagactagtaatagcacggtgataactgggtgcttgaaactcgatagatacactccacaagagcatatactacacttgcactatgaattatgggtgatatcataaattcgatgtcaccacgtcttgcataataaactactattttatattatcagttgatacaaacgaatattatataaagcgggaagaatattatatataatatggtataaggctccacgtgatattctaatatgagtgagatatagataaaggatgttcctcccgtaaaaataaaagatatactgtgggatttatgggg

SEQ ID NO: 47909 - DNA, 283 bp, Glycine max
  unsure (1)..(283): unsure at all n locations
agatggatcgagtntacatggcttctttggctactggcaacacatgattgagctaaataatntacaaaacanaactagggactatngatatccatgttntattctangtgcaagagaaaatgaatgctgacatgaangtcatgaaagagcaaatgaccacaatgatggaagccatgatgagtatgagaaaattgatggaggttagcacggctacagtcgttgtcgcaagtaccgccactgaggtggacccgactcacccatttggcctcaatcaagtaaatca

SEQ ID NO: 47910 - DNA, 168 bp, Glycine max
  unsure (1)..(168): unsure at all n locations
cttctctttatatctacctgagtgngcttatagcctataccatacttnccacgaattccttnggcatntatcangctagttatgccgcccgtgtctttgcctaaacccattccgggttcgtaaccgttccncaacataactcgngccctcattactgctgcatcggac

SEQ ID NO: 47911 - DNA, 242 bp, Glycine max
  unsure (1)..(242): unsure at all n locations
tctcgctggacctaatacagaccctcttgcacaatctccanagcgggttccacttgatacctcanataagaaaagccatggcaccaccatgagaactcttgctgccatngcaggttcagtttccgggttccttttgctctcctttattgctatcctcatcaaacgcaggaagaatgtcgctgtcaatgacagttcacataataaagagggaacttctcgggacaatggctcactatctgtac

SEQ ID NO: 47912 - DNA, 338 bp, Glycine max
  unsure (1)..(338): unsure at all n locations
atctcactccatcattatgcattaaccncatatataaaaaagcacaataattatgaatactattattttcatgagttactaagagcattagtaatatattntctgaattatgctgagtgaacatatcacataccaccaacgtttgaagttgaaggagtcttcttaccttatacattcagacacgtctctctgcaagctccctcactcgtgccgaatacagcggtctcgcacgtgccacccatntatattatacctcatcacatactcctctcttcctctgcatctcaacacaacacacacactgtgttgtgaactcctctacacacaatacanaacac

SEQ ID NO: 47913 - DNA, 294 bp, Glycine max
  unsure (1)..(294): unsure at all n locations
cgcgggttcnggagacanangtcaagcgttcgcgatatgcgtagatgatattccgagtactctggatgtggtacgaccatgcnctcctgatttccagctgggagaatggcgagtggagggacgccccggcatttacgcaacaagcataatgtaaacctttacggtntaaaagctctatagttgggcctaggctttagagttcttccttttgtaaggctctgtgtctcttggttttaaatttataatacaagggatcttcttcatctgntcctggtctctacccattctcattca

SEQ ID NO: 47914 - DNA, 190 bp, Glycine max
  unsure (1)..(190): unsure at all n locations
ctcaagagggcttcttgagaagctagatccttatntacccacacncttctattaagctaaataacctcctttgaaataatacgggataaaataacacaatagataatcgaacatcanacatanatactaataatatatagagatatatatatcaggggtgtacaccttgattgcatcatgcatctcttca

SEQ ID NO: 47915 - DNA, 307 bp, Glycine max
  unsure (1)..(307): unsure at all n locations
attgatgccattcaataccatgtgcaatgggaacccttaactacgaagaatgtaacaccctaatntctcanaatgtaattataccttaattantttatntctntattntatanagaatattgatgaatntaagttcacaattatataaacttgngannatagtgaaccggaatttatggcgtaatanataannacaacttcatatttcaaaagganagcataatgcagttntacttagaagcttacttcttcaatntaaagtggaatagaagaaatggaacatatctaaattacanaatataaatat

SEQ ID NO: 47916 - DNA, 313 bp, Glycine max
  unsure (1)..(313): unsure at all n locations
caattccttgaagatacacaaacagctaatggctcatggtatggaagttggngagttngctacatttatggcacttggttngcacttcgtggtcttgcagcggcgggtaaaacatacactaattgtgctgccattcgcacaggcgttaaatatctactttcaacacagaaagaggatggtgggtggggagaaaagtatctctcatgcccaanacaggtttgtaattgaatggccatggtcaatacttaatgttcttcactttcactangaanttataataatagtagtaataatgtcttactaaatgaaaaca

SEQ ID NO: 47917 - DNA, 206 bp, Glycine max
  unsure (1)..(206): unsure at all n locations
atggtgtggataccctgtgcacaatcccatactntntaagcaaggcatgcattganttngtgcanaaatgggttccttgatcactaacgatngctntaggtactccaaacctgcaaaacagattagatctaacacaatctacaacaaccttagcatcattagttctagtaggcttagcttctacccattttgaaacataatcaact

SEQ ID NO: 47918 - DNA, 300 bp, Glycine max
  unsure (1)..(300): unsure at all n locations
tactcatgtttggtggcatacctcaccgtgtntatntctttangaatntcatcataactaagtgtcgcaacctacccttcggcgggagggcgacgcgagactcgctggatgcgtgttcatgnaggaatacccggatcgcaccacgttattgagaaactcgaaaccgataaccatctcactttaatgaagtcgagtgattacccggaagatacaccctactccgccaaggacgagccttatcgatggcaacatactttatttttatgttccttntatgctctatgccttatacnctttata

SEQ ID NO: 47919 - DNA, 107 bp, Glycine max
atcgctcacccaatactacgaccagcctttgagatgcttcacgttcggagatttccaattagtaccaaccattgaagaatttgaggaaattctaggatgtcctctcg

SEQ ID NO: 47920 - DNA, 142 bp, Glycine max
  unsure (1)..(142): unsure at all n locations
tacctcacncactcaagtgtatcactacaatatcgtgtntctctaatgaaacactctnngcctttaccactctaattcctcttgagttcttatgtaatncaagagattatggccacaacatagaacaattcaccaatatgtg

SEQ ID NO: 47921 - DNA, 340 bp, Glycine max
  unsure (1)..(340): unsure at all n locations
ctgcagctatatcaattgtgcanaatacacacacctccttcgaacgaaaattacaacatcctccttcgttgnttcctttggtgccactaccacctccttcaatgagcgaaaattctcanattcctcctcatttcattccctatntgccactccctccaccaccagtaacttataatcaatcctcttctaccgaanattctcaaagatctcaaacttttcttcaatgtcacaaaacacctctatcgcatttcataagcctcccaatagttatattcgtgcacaaactccttcaaatgaggaagttgatattacaatagaggaaggaggagggagttctaca

SEQ ID NO: 47922 - DNA, 672 bp, Glycine max
  unsure (1)..(672): unsure at all n locations
atgaagacgtcatgctctanggtgcgtgcnncaccatctttatagtagagtatcgataatgtgtctaccatcactattatcgtctccctnntccatcattggggtaccacttatgccgctagatcccntccacctttgagtgtagtcttcgaaagatccgtcccnncttntgcaaatagtttgtagttgcatcctatccagaaccatatcanaattgtactaatactgtctaacanaggcaaccattatgtccttccaagaatggactcgggaagggttccaagtagtgtaccangtaacagctactccagtaagactctcatggaaggaatgtatcagcaattcctcatctnttgcgtattctcccatcttctgacaatacatctntagaatggtcttgggacaagtagtcctctcgacttgtcaagtccancaccttgacntgngatgggtgatgatataggactaagaacactctttaagtagcaatgcataatttacctcctcaatggcctgagccttcctctatccattctgcatacatacgatttataccctgtgaatgtangggtgggttgtggaacatgagggcctctaagtgttagcaggttacaccactgctgcctcacacatatcgagcatgctaagttgatatctgcgggaatatgttcg

SEQ ID NO: 47923 - DNA, 259 bp, Glycine max
  unsure (1)..(259): unsure at all n locations
ataaagacattaatgagaaaattgtagcacaagtgtggcacagntccttacctttaatanttntgtcaattgcatttgcaagaccagaattgagaggatacaaagtatcatctagatctgaaaaataatggtagctgtagcagcatgcacaaattaatatgaaattttcaattangtacttagaaaatgttctggctacaaggcttaccanatagaaggcaatcattatttggtctctgagcctgtngtgtgatctgat

SEQ ID NO: 47924 - DNA, 682 bp, Glycine max
  unsure (1)..(682): unsure at all n locations
atgcatgactgagctctatcanatagacttaccttgacttaanntccttgatagcccttntgagcctngtntctctttccttgtttngangtncactacaagccttaagtgagaaaccatgatatcaccatatctctaatgaatntnggagcnnttggaattgtttgggaataagtgtgcgggttcttgcttcattggataacatgtntcgttggccatgccttatgatatatattgagccatactcgatgtacatcgcatattggttaaatagtgacatgctgaatatgatgttgtatctctaaggctacagagttaaaaatatttatatatatatatattacaataaatcctataagaatatgaacacgactaatttggtgagtaagacataactgacnaagaatattagactcttggtttactttcatgataaatgtaactttacatcttgtatgtcttagtgatctattatgcactattacccatagctctctaatccttcggaatagtcactatacgtatatnctcatacttggtactgggccatacaacatgatagacatatgatcatatttgctaggtnactggttactagcacattatgactcatgctaatctatcggggtctgtctngtgtgcatatggttaatagacncaacactcgtaattatagggtatg

SEQ ID NO: 47925 - DNA, 627 bp, Glycine max
  unsure (1)..(627): unsure at all n locations
aacaccagagcacctcangctgcaagctaacgctaagttatatattatatatatcatagataataagtttatattctaatatacttacgttnacaacgtatgttgtcgttaatatatatatatatatatatatatatatatatatatatatatatatatatatatatatatatatatatctgtgaatataacatatctatatatatnctatgtgtttataagcctcgaagacacacagtgtgtgtgattattattatcacacactattatataactgctaagtatatcttcgcattagctaaagcgtgagatgttacactgcacacacgacatactggtgtgaatgagtgcgtgantgatatntgaagtgatataccttgctctgtgagctatgagatatacaccaaccccaccacgcgttatcttgagagaacttttatgcgcacngtaatacgaaatagacagactcccacttccgatcctgccgggtcaaactgtaccgcactctcgtaatatgtttacatacaaagtgccggcgtgcgtattattcactcatgcactcgcgcggcgcgtcacagacaatactatttacaccgctagnccccgtctctctatgcgtctcgcccg

SEQ ID NO: 47926 - DNA, 324 bp, Glycine max
  unsure (1)..(324): unsure at all n locations
ataaagatcacactttgctagaggacaataactgtagatcttaagaggctacagtgtgtaatgcatgctatgaacatgtatatggngaggactgtgattttacatctctgctttaagcatgctgactaacagatgaatgtgatcaactatttggattgtcttcggcttggcccttataaaaacaaatcctaatatttggactataaaataccctagagattaattgttaatcataaatgataacataatgatcactattactatactccagccaaacattgcaattacattgattgacattttatttcaacaaatatatatgac

SEQ ID NO: 47927 - DNA, 121 bp, Glycine max
  unsure (1)..(121): unsure at all n locations
tgatgcatattaatgtgtgtagntgatgtgtcattattctcttctatatcttaaccctctttatcatcactctaattactaattagccttaattgtcaaaataattatgcagttttatcat

SEQ ID NO: 47928 - DNA, 234 bp, Glycine max
  unsure (1)..(234): unsure at all n locations
acctactatatgtngatntgaccaacgctngtatcggtatgtngctgcaatccttcaataccttaattatacattctgagaggggtcgtgtcatgtggtcatatcgacgtncttctttatcataagccatggtccactnttcctttganatgcgatcaatccatgttgctatggctggactcagttgacagaatntatctatattctgatcatcaaatatgttgcaaggagtat

SEQ ID NO: 47929 - DNA, 217 bp, Glycine max
  unsure (1)..(217): unsure at all n locations
gatgaagagggtgagaatgagggagaagccgtgctgtgactgccattcctatacagccaagtttcccaccaacccaacaatgtcattactcagccaataacaaactcttctcttacccaccacccagttatccataaaggcaatccctaaatcaaccacaaagtctgtctaccgcacttncaatggacgaacaccgctttagcacaaaccanaaaca

SEQ ID NO: 47930 - DNA, 246 bp, Glycine max
  unsure (1)..(246): unsure at all n locations
atgccccacattatttccatgacacanatgcagaaatgatgaattggaaattntatgcanaactggtcatgcatgcacctatgtggacgctcaactgtcaaatttctatggtcatgtgatactanggctcacgattcattttctcttattttagtcaacccaatgtttccaaaatatgtccttttatcaatctgtgcattcatacgagtacatntcgggcgtctggngaaattntcacagcattca

SEQ ID NO: 47931 - DNA, 221 bp, Glycine max
  unsure (1)..(221): unsure at all n locations
cacagatgatagntgtcatgtcatgacagttaacaacgtcattatgaggaacctttctgatgacaattctaaactaaaatcaaaatggtgattctaatgttagctgagaaaatgattcaaacttgaagtagatccttctgatgaagttcacagggtcattttgaagtggcaaaacttcatcaatcttaacacatcttcatagcacaaaacattatgaagta

SEQ ID NO: 47932 - DNA, 102 bp, Glycine max
  unsure (1)..(102): unsure at all n locations
tatgtacatgtgtatgttcaaggtcttgagtcaagttctctcctggatcactctccagcatgctctgctngagcacttgaacatggccccttctcaactcca

SEQ ID NO: 47933 - DNA, 532 bp, Glycine max
  unsure (1)..(532): unsure at all n locations
agatttctcctctctcccntntaacctntnncnntnnctntcttttttctctnannnnnnnnnnnttgctgtgattctagctttatgcctcanatactgatgcacctcactaatgattattagttttttggaanctcgacaatacagaggagtgaccgaagcatgtaactcctaataactttcgtgtttcatgacatacgtctatagactacagtcattgaatacgctctaagaatgccctcagcttctgagaatgatactagatcatggtaagaaatcttgtggagttgcacatcctcaacttgtgctcaatcagactctcttatttgggatatttggaacacatcacccactctaattagtgactattgaaattagaggtctgcctcgctgcagcgcgcgccattttacttgactcatactttatgatataatggcaaatatgtgatctgtaacctactctgttgaaaggtgcactccgcttgatttgcgctctttcattttatgtagctaacctgtgcgttctggtttt

SEQ ID NO: 47934 - DNA, 322 bp, Glycine max
  unsure (1)..(322): unsure at all n locations
gcttattantcattatttntcgaggtatgtatctatntttataactggtgtgcttattacatgcttggtcatatcanaatattanttgatattactagatttggttgcattntgagtgaaccctagtttcttcgttaagattcaatacattggataatacgaatagttctgattaatcaatgtattgaatcttgaattgtctgcttggatagttngngaggacatcttttatagtngattcacacgtatagctaaattctctcttccatgattnggagatgtntcagtatattgcatttcacattgttcttctggtgcatac

SEQ ID NO: 47935 - DNA, 176 bp, Glycine max
  unsure (1)..(176): unsure at all n locations
atacagacctttgctcttccatgcagcaacctggagtaattgagcagcctggagcttatgctgcannacattacaatagacctcctcaacctcagcagcanaatcaaccacaacagaacaattatgacctctccagcacagatacaaccctggatggaggaatcactctaatctca

SEQ ID NO: 47936 - DNA, 248 bp, Glycine max
  unsure (1)..(248): unsure at all n locations
tttcaatagtccacgcacctgcatgcatatcaatgaattaatagataagaatgctgctgcgtatggactatggaccatgaatgaagtaactcattntcacgtctataataatgtgtatcaatatcagcacacaagattgaagatgtaagtttcgacaaccaaggtaaactcttcttttttaattctttactgtaggtgccgacagtattaggcattgccagaaagattgcagccagttgatgcacagc

SEQ ID NO: 47937 - DNA, 389 bp, Glycine max
  unsure (1)..(389): unsure at all n locations
cctaactacatgactacaaatagataagaagaaaatatgatgaatagatgatgagatatggtatgaagccatggatggcaagtagaacttccagctgcacctaaaccctaatagtccncacccactttctttattatatattgggctaaaatagtcaaccgttgcactgcgtttgtgtaatgagtgtcacttgcatgcctgcttgtgacagcatcaaagtgactgttaagtgctgaactgacctanggccgtaacctaaggtcctgacctacagttgacttcagcggaaattcttgaaagctgaataatccacaccatgcttttctcttattctcacaaataataaataatgaaacaacataatattaacttctatatctactatatat

SEQ ID NO: 47938 - DNA, 231 bp, Glycine max
atatcttgaagattagttgaagcattccatttaaagaaacttgagcttggtctttgtgtcaaaaatctacattttctattattaccctctctggtgagaatgaccaacttatgtattgaactcgtgatttgtgatagatcttagataaaagtaagaaactatattttcctaagtggtaatcctctatgaggtgaaaatttgtgtttgtgcaatctgaaaacacagaaaccc

SEQ ID NO: 47939 - DNA, 405 bp, Glycine max
  unsure (1)..(405): unsure at all n locations
ttcaatcaatagacctccaatctttaatggagagggttaccactaccggaaaacccgaatgcagatgtttattgaggcaatagacttaaatatttgggaagccatagaaatagggccttatatacccaccacagtagaaagaatacaatagatggaagcacatcaagtgaaagcataacaatagaaaaacctagagataaatggtctaaagaggatagaagacgagtacaatacaatttaaaagccaaaaacataataacatctaccctgngaatggatgaatatttcagtgtttcaaaatgtaagagtgctaaggaaatgtgggacactctacaattaanacatgaaggaactacagatgttaaaagatctangataaacacattaactcatgaatatgaacta

SEQ ID NO: 47940 - DNA, 211 bp, Glycine max
  unsure (1)..(211): unsure at all n locations
gtcaacatcagaccacctccagtgtgcaggaactactttcatggacttgatggtttctatgcaagttgaaagccttggaggaaaaaagtatgcctatattgttgtggatgatttctccagaattacctgagtcaactntatcagagagaaatcagattcctttggaggtttctaagagttgagttaaaacttcataaagaaataactgggg

SEQ ID NO: 47941 - DNA, 403 bp, Glycine max
  unsure (1)..(403): unsure at all n locations
gctgattagttntcgcttactagaggatcatagtgtgttctaaaagaggtaaatttaatcatcctgcttagacgaatgagaaaacttgagcaaatgaagagggtgagaatgagggagaaacccatgctgtgactgccattcctatacggccaagtttcccaccaatccaacaatgtcattactcagccaataacaacccttctccttacctaccacccagttatccacaaaggtcatccctaaatcaaccacaaaacccaccttccacacgaccaatgctaaacaccacctttagcacgaaccaaaacaccaacgaaggaaggatatttgcagcgaataagcctatataattcaccctaattccggtgtcctattgctgacttgctccatatctacttgataa

SEQ ID NO: 47942 - DNA, 176 bp, Glycine max
cttatgaagactggagaacaaccatcatgatgagttgggggttgaaagagtctagatgacacatcgggtgaaagagatggtattctttcattaaacactctttgagcatatgtgttttgactcacatgggcggtgtaaatttacatgggggccttttgacccttttcagccctttt

SEQ ID NO: 47943 - DNA, 398 bp, Glycine max
  unsure (1)..(398): unsure at all n locations
tcacttaatttattaaatattgtctgaaataaaataaaaaggccatagtggagtaaaggaaagttagtgatctctcaaacaaaaccacagaaatatcctttcattaacgggtttataattaaaagctctagctaatataatcagtcgctagctaaaaaaggaggtttctgtggtagtatattgatctagcacaagatctcactgcaatattcataatacaacatgcacctgcagtctataaatgatcttactgcaatactttgaggtgcttcctatatacatagtattttatatatatgctgatcatcatatacattatataatntatatatgagatggcctatactagaaacagacncaatatagtcttatagaagctataagtttatattatatct

SEQ ID NO: 47944 - DNA, 483 bp, Glycine max
  unsure (1)..(483): unsure at all n locations
acacactaaaactcagctcagcattgctgtgattataaagaggaccagctcattgttctaaattatagacactttccttcgntnacgntaggaaaaaatccaagcttctttactaacctctttactaaaaaatagacactttcatcaagcatgttgnctttgtacgttacattttatacattaattttttctctaattgttagagggttctggcgagttacactttgtacgtacatgggggttaatttgggattatcggtattatttcaatatgactgcaaatctctttgtccagggatggagtacatgaatcatagatagaaataaagatttcattttctaatattattatattacaataagataataatttattgagagttgatatgaaatagatattagtaaatgatatcaaacaacctatacatggctgaatttcaacaaagttacttcttatataaatatttggatcatctaacatta

SEQ ID NO: 47945 - DNA, 406 bp, Glycine max
gcttcatacaattaatatagaacctattctctatatcacatcctatcagagcgttgtgttcccgtgtcctctagcatgagattcttcatagtcatccacctatttatctgctcccccgaacacaagttcaagatcatcacaggatccaaacacaacaacacacaaggggtgagttatcacattcctagctaatagagaaacaagacaattaaatatacatattatataaatgagataccacttgcttaaacatagctcacgtaacttcaccacttcatcattcaaaattcacttttcaattatcaatcacattacacaagaatcccacacttcgatcaagatataataacacatcaattagcaagcatatgcaatagttatgctaagactcaatcctatatgcaat

SEQ ID NO: 47946 - DNA, 499 bp, Glycine max
  unsure (1)..(499): unsure at all n locations
cgggaagaagtgaacttgagctgganccaagaatctgaggaccgacgctcaacagggccccttttaatcttgatgagacactagtggtctactataaaggatcaagaccagctatattaaaatgtctacgctgcnnctctagagcgctactttaacgtctttagctggaccccttatgacttgacggacaccgaccgtatactttgcgtacctttggctatggacttgggtgcctattggtcggccatgtgtcgtaggcaacgctctaacctttgtatggatgagctgaggtgaactctaaaggtgcgggcggcgtgttattgctgctacgccatccaatgctggtgggtgcctcccctgccccgcctggggggcagacttcttgatgaagctcgatggtaagtggctgagacttgctggggcaaagaactcctatactgacgagacctattagactgcactcaaacctgtgactctcggtcctggtgctgcagccaag

SEQ ID NO: 47947 - DNA, 358 bp, Glycine max
ctcggccatcctcttccttgcgagccctattggtttcttgttcaagggctcttgcggttgctgaattttcttctcgtaacccgacacactctttccggacgtctgtagcaaccaacttgtaattttctttggcaagtcttgcttttcctagtttggtttttagagcccggacttcttcatcctcttccggagcttcgaagctctcctcgtttgataatttcaacttggaaagccaatctaaccctcgtgtacgaactttcagccattcatgataaccaccgttgatgccattacggatgcccctaagttctttatctttccttaacggggccttccacgccttatgtactctttgtat

SEQ ID NO: 47948 - DNA, 200 bp, Glycine max
actaagctgtgaaaagagttgttgttcaccgtctctttatgccttttcgaaggcttagagagcatccgctaagcgcaacactcattggctatgcgctagctagaatctggaagaagatgagctgtgcatgttcactaagcacatcgcttcatctcactaagcgcactgcttcagttcatcctgttatcgagataagcacg

SEQ ID NO: 47949 - DNA, 419 bp, Glycine max
  unsure (1)..(419): unsure at all n locations
ttatttccagaaggaaattcaatcaatagacctccaatctttaatggagagggttaccactaccggaaaacccgaatgcaaatttttattgaggcaatagacttaaatatttgggaagccatagaaatagggccttatatacccaccacagtagaaagaattacaatagatggaagcacatcaagtgaaagcataacaatagaaaaacctagagataaatggtctaaagaggatagaagacgagtacaatacaatntaaaagccaaaaacataataacatctaccctgggaatggatgaatatttcagtgtttcaaattgtaagagtgctaaggaaatgtgggacactctacaantataacatgaaggaactacagatgttaaaagatctatgataacacattaactatgatatgacta

SEQ ID NO: 47950 - DNA, 207 bp, Glycine max
  unsure (1)..(207): unsure at all n locations
gacacaagaaactaagctagaacaaactagacccaaagccttgtaagtgtctntagcatgagctgaggcagcctttccaccaccatatgttgacacaaatacatctttgacacgctctataaaagccatgggtaactgtcttccaatggattcatctgctacaacacaatatgctgcaaagttccaaaagttcgatatttcaaaaca

SEQ ID NO: 47951 - DNA, 399 bp, Glycine max
ttaagtcacctgcggcatgcaagcttgttatcccagctgatgtacccattatcatggcctccccagaaggcaccagcatgcttggccaggccaggagcagtagcaagcttaaggtacgatgaatttccagttgcaaagtacatccatgcgcctccccaaacatactcatcccagtaactggtagaattgtaaaatatagaagcttccgaactccctgcactgtacctgcctctctgctccctagaaaacttgaacagcgtggtagcaccatgaactagtttcttcgaataggccttgttgtccttgaaaacaatggaagcagatgccaaggcagcagccatctcagctgcaagatcagaacaactatggcattcagtcacagggcggtcatagtccatg

SEQ ID NO: 47952 - DNA, 432 bp, Glycine max
  unsure (1)..(432): unsure at all n locations
gagcgctgtgagcaaattcaaacgacganaacntttttactcgaatgtccgattgngncccgnaggatatcgagacgctcgtaattgtaaacggaagctctgatgaaaatctaaagaccataacttttaactcgggtggccgatcgagccctgttatatagtcagacactcggaattgataacagaaggtctgagctatttcaacgaccattacctttggattttgggtgcccatatggggcccgttggatatgaaacgctcaaaattgaaaaccgaggcttgagataaatcaaacacaataatttaactcgatgccgatgtagccgaatatatgagaactcgaattgaaactagacctgacaattgaaacacaactttgatcgatgtcgatggcccgagatacagacctctaatgaacggagccgagattt

SEQ ID NO: 47953 - DNA, 378 bp, Glycine max
  unsure (1)..(378): unsure at all n locations
agcttcagttntcaattattatcgtctttatatattacgggactcaatcagacatccgagtcaaaagttattgtcatttgacatttcatagagcttccattttcaattccgagcgtctcgatatattaaagggctcaatcggacattcgagttaaaagttattgtcgtttgatttttctaagagcttccgttttcaattccgagcgtctcgatatcctatgggacacaatcggacatccgattcaaaagttattgtcgtttgaatttgctcagagcttcacgtttcaattacgagcgtctggatatattacgggactcaatcagacatccgaataaatagtattgcatttgactttcatagagcttccgtttcaattt

SEQ ID NO: 47954 - DNA, 333 bp, Glycine max
agcttgaggagactctaaatcagttcatgtagatgtccatgtccaactataggagcacgaaagcctccatcaagaacctggagatacaactaggacaattagtcaaacaaatggctaaaagactcattagcagctttggagccaacacagagaaaaacccatagaaggaatgcagggcagtaatgaccagaagccagatgatagtgcaagaagaagaagagaaagctgaagaagaccagtctgaggaaggaagggcagacaaagaaggagagaaggagggagaagataataatgaagaagagaaagaaggagagaataatgtcttaatctcta

SEQ ID NO: 47955 - DNA, 193 bp, Glycine max
  unsure (1)..(193): unsure at all n locations
tcaagagagntctacactatcttagagttctacaggtctttctaganacttctacactcttctagatagctctagaagtttctacaacctgtccaataatgagggatcccaacatatatgtatcgccaatttctggatgcaaagagatctgttgttgcccatgtttttgttttctccctccgtgctttactct

SEQ ID NO: 47956 - DNA, 248 bp, Glycine max
  unsure (1)..(248): unsure at all n locations
gagcgaaccctaatgtgcttctcaaatccgaagagattgcacaaacaacgcaaagtacccaacaaaaatctacaacacccatgcaattatccagataagacaaaaagaaccaagattttcggctcaatcggtccccaaatgtggggaacagagtgagaaaacgagcaaacccagaaacacacgagcgacggcgaaattggaaggcattccanaagggtttcaataaatcgattgcgaatagtgaaatt

SEQ ID NO: 47957 - DNA, 393 bp, Glycine max
  unsure (1)..(393): unsure at all n locations
tttatagttgctggagtggactagggcctgcacactcatgctaaacctgtgctgctcgcttagcgcgggtgcctattatcgcgcataacactagtgctagattacacgctgtgtgctgcgcatgacttgtgtngggcacttcctcacgcttagcctgtgcttctcgctgagtgggttgcacgctgagcaagctcttctcgctaagcctaatgccacaatcgttcttttcatatttttgtatattttgcatctgtttgactttaatccttcattttatagatgcagccatacaaagaaaaacattaattttaataattggcataataactgctaataaatattnttacgctatttcattatatttattataaaaaatgtcatattagtagtatc

SEQ ID NO: 47958 - DNA, 402 bp, Glycine max
  unsure (1)..(402): unsure at all n locations
acctgaggcatgcaagctngcattcctctcttcccttaaacttcntttatttatngctatnnatctntggctntaaagaagtttattatgaattgtcttttgagtaattcatgttaagggtgcattgttaatccgaaaagagagagtgaaagtttaattggggaatagtctttatatcttaattcaacccccctttttcttaaggtaactgaggctatntgtccaacatcctattcttgataactcacttctctctaaaaagacagactttccggaatgaggtcacatgaacgtcttgaaaacacagtcaatcaaatgctctttntttttaaatttatttatttttttaaccccttttttttatttggaacttatttgttttggactttactcngttgttta

SEQ ID NO: 47959 - DNA, 363 bp, Glycine max
  unsure (1)..(363): unsure at all n locations
tcctcacatctcaggctatgcgcatgtggaagcaatgccttccaatgctatcntgatgatgtcaaagaatcaagagttaagcaaattccaaagattcaagaatcaagttgtcaagaatcaagattcatgaatgatcaggatcaatattcaagactcaagattcaagagtcaagagaagactcagtcatgattatgtctgaaaaagttattcaaaatgttgagatcacaagaagttttcacaagatcattaccaaagagtattactctctgataatcgattaccagaacgtagtaattcggtaccaatagccagcagttgttttccaaactgagttacaaaagtgtaatctgattaccatgagc

SEQ ID NO: 47960 - DNA, 256 bp, Glycine max
agcttgctattaagttggtaaaaagttataaactgacttcttttgaacaggtgttcatcgcaatgctggtggataactttctttatcccgtatcggcattccgctctcatttatctcaatctatcaactgcacaggtattccgtactatctgatacatggaagaaccactgtggtgaggctcatgaaacataccgatgtaatcccatctaacataacactcaagatactcggtatcttgtttatatacgacaacat

SEQ ID NO: 47961 - DNA, 423 bp, Glycine max
  unsure (1)..(423): unsure at all n locations
aaactcagcttataagtgcgggtctgggagacgaaagtcaagaggtttcgatatgttaagatgttgttccaagaactctggatttggtccgaccatgccctcctgatttccagctgggaaataggcgggtggaggaacgccccggcatttacacaacaagcataatgtaaacctttacgggtttaaaagctctatagttgggcctaggctttagaaggttcattttgggaaagggcttggagccttttgccttggaggttataatacaaagatctttcttatctgttcctggnctctacccattctcattcatttgcatgtttacttctttttctgaaacggcagatccgatgacgagtcccccgatggtactaatacctgngacccgtctatcaatttcgagcaagaaatgaaccaaacgga

SEQ ID NO: 47962 - DNA, 366 bp, Glycine max
  unsure (1)..(366): unsure at all n locations
acctgaggcatgcaagccttgagccaaaatcctgactcaccattaccttgtcccattgtgagaatgncaatccttaccctcggaagcaaaaaagaatagaaggaaaatttccaatcaaaaaagaatagaaggaaaatttccaatgaaagcaaaaaaagaaaagaaggaaaattccccaatcaaagagtgggagaaagcaaaaagaaaagaaaggaaattcccaatcaaagaatgggagaaagtaaaaaaggaagaagaagaaggaaagaaagctcctgatcagggatcgaaggaaaaacagaagatatgtgcagagaggtctntagaccagacaatatctgaacaatacagaattgtcaccaaatg

SEQ ID NO: 47963 - DNA, 252 bp, Glycine max
  unsure (1)..(252): unsure at all n locations
tgaatctaaattgggaatgaaatcataattaagacccacaaattttagnttctctctctattatcttgtctcttgtaatcacactgangaggtccatcgagttattgaggttccaatgaatgctaaatctgccacttgggcatgacacctcagtttgctatcaaggctacaatcatcattntctttattaatgaatttaattaatacctacagggtaatcaagtagggccaagtggaatcaaactacattga

SEQ ID NO: 47964 - DNA, 379 bp, Glycine max
  unsure (1)..(379): unsure at all n locations
catgcattggatgttggtctcatcctttgtcacgggaagccggaaggtccatatcaccttcttaattgtacacatggggcactacgccccanatgcgcaagtaagaagagatgattttccgggctctcgtgtccgtaaaatgcattcatatcatgcaccacataagcatctcttcataacatcataatggacatatcctgcatttgtccgttatcatattctagcctcacattttgcatgagtcatggcatcatcatgcatatgcgttcaacaaactttttgatctgcaaaattgcataccatttgttgtcatgtttgctcatccttgcgtttcctctacaaacanaacaaagangggggagcgtgaacttacactaca

SEQ ID NO: 47965 - DNA, 271 bp, Glycine max
  unsure (1)..(271): unsure at all n locations
ttcttaagataacttccttgagaagctatatcttagtttcacacacccatctaanaactaagctcaccttcttgacaaaatacatgaaaatacaaaaaaaaagtccctactacaaagactactcaaaatgccctgaaatacaaagctaaaaccttatactacaagaatggccaaaatacaaggcccaaaagaaagaataacctattctaatattttcaaataagaatggggtcccaccctggatccatgggctcaaaaattaaccctaaag

SEQ ID NO: 47966 - DNA, 342 bp, Glycine max
  unsure (1)..(342): unsure at all n locations
agcttgttagaactatcatcacatgactctttattggcacanaataagtaactttctaagcaactntagattntaacagaaacacttggtaagttgccaactaaactgtctattggtcatcctacacagtcttctattttgcaggttacaggttgtaccacctgtggtgaggctcatgaaacagaccgatgtattcccattgaagaaaacactcaagaaattcattatatgggaaatcaacaacgacaagggtatactcaaggaggattttcaggcttctagcagggtccttataatcaacaaggacagtggaggtcacacactggcaatcagttcaacaaa

SEQ ID NO: 47967 - DNA, 136 bp, Glycine max
tagcttaaaaaaatgactccgcgctctgccactcatctgagtcctgttgtatttattaccattctggcgataggagcctcacaacgggatgaagacctgtatccccagtgtcttacaccttgtctgctagtttaaa

SEQ ID NO: 47968 - DNA, 123 bp, Glycine max
  unsure (1)..(123): unsure at all n locations
ttctaacattacggntaaagtgtggatgcacttctcggattaaaaaaaacaacctctatgcgatgtcagctgttgttatccgttgaaatcttgtctatttacgaacaagatatattcacattt

SEQ ID NO: 47969 - DNA, 452 bp, Glycine max
  unsure (1)..(452): unsure at all n locations
canacaaggagaggagngggaangcgggaacagaaaaacacatgaccgangagagaannaganaaaagaancccccggataaccccgggacgctgaanngagggagacagacaaagggnnatncgcgaaaggacccggggccggagcaatacttgaacctaccagtctctttcaaatctttagatagttatcggaagttgaaagataacagtcganattaaaggatctgacgcttttattaatggaaaaatgctgaaaagtgtcaaatggagcaaaacataagctgaatgaatgacatgcagtccaggcttggtggctaattcgctaccaaatctgctaatgctctaatgagtttacgatatacagatggtgaatgttctattgtttatgccaaacactacttactctgtttggtaaaaatagattttcttctctcgagaaacaattaagcg

SEQ ID NO: 47970 - DNA, 388 bp, Glycine max
  unsure (1)..(388): unsure at all n locations
atccttaagtcacctgcggcatgcaagcttcagggtgaggtgaagaatggttatgactgtttgcgaagggagaaaaaaggtggaatagtacatattctctttntttgcaccttttaacagttattaacttattattattattatttcggggaagtttatacatatggcaaaaaaaagaagattgtctggttttgggttntttgactatggtactgcttcagcaggcgattntgccttctcttgtctttcttgttacagaactgttgagatttatatcttaatttatttgtctgaaaggtttattatcaatatgatcataaatttagactagtgttctcgagaatgtggaatgtggactgtggagtgtatctcttttcaatgatgcatg

SEQ ID NO: 47971 - DNA, 331 bp, Glycine max
  unsure (1)..(331): unsure at all n locations
ttgagccaaaatcctgacttatcatattctttgaccctattgtgagaatgccaatccttaccttctaaagcaaattatgaaatgaaagataattccccaatccaagaatgggagaaatgctattaaaggaaaagaaagataattccccaattcaagagtgggagaaatgctaaagaaaagaaaggaatatttccaatccaagaatgggtgaataggtnaaatgggaaaattattagggaaagattgctcctgatcaaggatcgaaagataccataaataattgtgcacagaggtctttggaccagacaatatctgaacagtacagaattgt

SEQ ID NO: 47972 - DNA, 281 bp, Glycine max
  unsure (1)..(281): unsure at all n locations
actcacaacaataaggtataaatcatactaaaacttttgctctttgtgctcgtctaaaggcaattcacatttttctatcctttgttgctcatcatggcatgatgttgtatcaaatggacataaaaagcatattccttaatggacttatcaaggaagaagtcaatgtggaaaacccccctaggtttgagagttctatctaccttcatcatgttttcaaacttaacaaggctntgtatggtttaaaaccagttcctcgagcttggtatgaaaagttaagttca

SEQ ID NO: 47973 - DNA, 400 bp, Glycine max
  unsure (1)..(400): unsure at all n locations
attcatgttgtaatctatatgcattccactggacatgcatagcacatttacatacactgctgaatgataaactgtttgacctcactatcaaagctgttaatgatctttaatggtntccactttttgatagggggcaagttgaatgggatgcctttgaatggatgcatgttgagtgctttcctaatttgatacagctggcttgcttgttacctcagaaagaagataatttaggaagttaaaattcaaaggtcacttgtctatctcttgaagttttaatttaattattttatgacttctgatcatagtttgttcggagctttngcttgcataagtcatataaacacnagttttgttatctgtttctgaatgtttgggattctacgtgacatcacaatgcttc

SEQ ID NO: 47974 - DNA, 411 bp, Glycine max
  unsure (1)..(411): unsure at all n locations
acctgaggcacgcaagcttgtgtngtaaactctcacctcatttcagcattttccctgagtagatgatccaactgcatggaaatatgggacttccaagatttgagatcacttgcnacctttgtctgcaagggcaacaaatcatttgcaaaatgaattaaatgtagaataataatggttttcatataattaaatacaattaatgccaacaatatccaggatagatttcacatactatagcatcctgccggtcaacgagattcctaatgccatctttgatattctgtataagtatatcttttcctcccatgtctntgctgtactctntgaaaatattgacatatctnagaattaagtcctccatataccgctccaaagcaaacaaatttaagtctagagtgcgaactttctgca

SEQ ID NO: 47975 - DNA, 386 bp, Glycine max
  unsure (1)..(386): unsure at all n locations
taagcacctgagctgcagctgaaccttggatgacagcaatttgatccttcccatgaatagngnagaggccaagattcccaccattcgaaccacccagagcttccccaatgtgtgaaacagatgactcagttttctggtaagccttcaataataatgtcaacatgctctcgaatagtaataggatcaccaatagcactaaaagaatcaacaaggttctgaatctcaatcaaaatactacaaccttcaagagtgagttggcgcagctccgtacgaagttgccttgccttctcgtttgtgtgagcatgaaaagtagtgtggatcttgtcccggagaagccacgaactagtgcagccgatgaactttcttagcatgggagcagaaatgga

SEQ ID NO: 47976 - DNA, 432 bp, Glycine max
  unsure (1)..(432): unsure at all n locations
cccagagaaggaatccatggattatatgcttaccacctcgaaagactggaaagcggtttctaatgactcctctgcggcctccacataaggcatagaggatgggcagctcaccaagatgtcttcctcacctgatacgatgaccagatgcccttccactacgaatttcaacttttggtggagtgtagagggaacaagtcccaccgagtggatccacggacgccccaacagatagctgtagggggggttaatatccattatttggaaggtaacttgacaggtgtaagggcctatctgtactangaggtcgatctctcccctaacctctcggcgggtgccgtcgaaggcacgaaccaccattgaactcggctttaggtgggaaagcatgaatggaaattcttcaaagtgctcttaggcatcacgtttaaactggaa

SEQ ID NO: 47977 - DNA, 127 bp, Glycine max
ctctacttctctgcttttccttccgatgcatcgccatggtgtaaaatcaccattgaagtaccccactgaagctcaacgatccagcctccatagaagccccacaagcaagcttccatcaagtgatatc

SEQ ID NO: 47978 - DNA, 541 bp, Glycine max
  unsure (1)..(541): unsure at all n locations
cacatgcatatgagccctgagatcttgacgaccnangagacaccngcaggcatgcaagcttcttatccaaagctcatcntggtatataatctctctcttccatggcnnannccccagaggatggcgcctcctctcacctcttcttctttgtcttccgctgcatctccgtggtggaaaatcaccactaaggatcgtcattatgctcaccgatccagccttcatagaagccccacaaacagagttccatcaaatgatctctcggaatcgattaccatgtgtgtgtaaccgattacgatgtgtccctgcacctatatattcaaatttcaaattctgaaacctgcaacctttcactctctcgagaccctcaccccagattttctttagccatatctactcaatcttggccaataatccccgcaagcccaacttcattttttcatctctttcattatctgatgaaatcaaaaaaactctaatggtgaaccataaaaacgaaagacctcagtcaatcgcgcatttggcacagagcccattctctcat

SEQ ID NO: 47979 - DNA, 469 bp, Glycine max
  unsure (1)..(469): unsure at all n locations
agaccagccangacngagacctcgtgaacacgacggcacacacctctctttacacaattgtctacatcttgaactcctatctagacataatgactaaagaagccagtgcttatcgtcacataccagtgtaatacctaagataacctccatgagatgaggagcatgagcttaacatcaccccccctatctgagatgagccctccctaggacaacaaacatggagagtcaactggtagtgcacatgcgacatgagctactatattacgtggtcagatacgatgcctatacgagtccaaacctgtcctatctctactaataacagcttgctcgtacgggaacatacgcttgtctttctcgctgcagttagagagacacactcggacttcccttggaactgtagacatcatctctggtttgattcgcacacgccctacgcgacgatgtatcatcatgtcgcctctagagatag

SEQ ID NO: 47980 - DNA, 355 bp, Glycine max
  unsure (1)..(355): unsure at all n locations
tcatcaaaagggggagaatgtgaatgtatgtatacatgatttcgatgatgtcaaagaagaatctaacaaggctgcttcaaatgataagcatttgcttcaagaataattcaagattgcttcaacaaacaaagtcttgtttcaagattcactaaagaccaagccttgccttataacaaagtgctttcaagacatgcaaggctctggtaatcgattaccaggaagtgtaatcgattaccagaagacagggttgagaaatagctgntgaaaaaggttttgaatttgaattttcaacatgtaatcgtataccatatgtctgtaatcgattacccagcacgaaaccttggaaattcaaatt

SEQ ID NO: 47981 - DNA, 116 bp, Glycine max
  unsure (1)..(116): unsure at all n locations
gactcaggagtcgcaaagcgattncagagcttcagaatcccaaacttgttctgcttcgccttccaaaactttttcatcattatccgaaggaacatcctctgtggccttaccaccgc

SEQ ID NO: 47982 - DNA, 273 bp, Glycine max
taccgaaaatatggattgcaccattagataacccatgaatcataaattcatcactgaaagactctaagtacataaataatcccaaaaatagacaaattacaaagcgcgtagcaagaatttctttaacttggaagaacaacaaggagagggagagagaaatggaaggttgaaaacacatcgatgaaaaaatcatatcagaataaagagagaatatgagagcaaagtcacaataaatcagtcactctaataaaagtattaaggagccaaactaac

SEQ ID NO: 47983 - DNA, 687 bp, Glycine max
  unsure (1)..(687): unsure at all n locations
aactaagcttccntcacaaaaaggagagagcgaatttggagatcttataagataaaccaaaaagcgtaccctaaaatgtccaagatactaaaataatcttccttaccaaacaaccctaaacgttaaaggttttgaaaattcaatatttcattgatagcgactcagtgtgtctctagagaattgaaatatagaagagaaaaatccgataaaaactgtggaattttattggtatgtgagaggacattatttttttctcctattaaaagaaaaactctttcctaatagcatgagatgaggaagaattccttncatttttatatttattaaaatgaataccttttaacatattttcttataaattgggtaacaaaaatatctaaaaaattttttggttgttaggctctactaagatttaccacctattaatatcttacatttaataattaaaatataattatttattttaatataaaagcaatatgttggccttaataccggtaaataattttttttcggctggaaaacattaatttatgggattgttttaaacaaattcccactttttatatgagggaaaatattggggcaaggggttttaaaaaaaaatttttttttttttttatcccggggttttttccttttgggtggccacgagaaaaaatctaagtgggggggngtttttttttt

SEQ ID NO: 47984 - DNA, 294 bp, Glycine max
  unsure (1)..(294): unsure at all n locations
agcttcttaggaggggttctagnnanatattgtgngnngagctaagntgtcataccctaatttcgtccggggattattacttgatgacatgcgatctttgattagccgctttgagatacttggcgtcctttgttgcacaaatgaagtcccgagacgtctcanaaatctaagggaagcaggcttgcgcaatccgtgaaattccgcaatgtggcggaagtcaaaagaggtgtttttgcgcaatccgtaagtttccgtgacttcttcgaaaggtaaaaaaggagtaaatacataatc

SEQ ID NO: 47985 - DNA, 320 bp, Glycine max
  unsure (1)..(320): unsure at all n locations
ttaagtcacctgcngctgcaagctgatcaaacaatatctaatcatctcatccactcaaatcatacaattgcttattcaaatcattctcaaacattcatttcatgcaaaacaatccactgcatatcattttcaatcaattcactattcaaacacgctntaggtacaagcaaacaactcanagtgctgaaatttaaataactgaaattaaaataactgaaatatgacaacgaaatcagctggaaatataaggtgtttaaccttcaccaaaacatcttcaatgactccatatggccttgtgatggagccggcaactaactgga

SEQ ID NO: 47986 - DNA, 193 bp, Glycine max
  unsure (1)..(193): unsure at all n locations
taccggtcttcctcttaatctttagcatatagatncattctcacatttcttttcttgataagggcactctccagcggtctaatattaatctcaaccatgagcaccattagggtgctcattgtttgttgagaaatatttattttataatttaaaatttataaaatatattatttatatcaatattatttgtatt

SEQ ID NO: 47987 - DNA, 362 bp, Glycine max
  unsure (1)..(362): unsure at all n locations
agctagaacacttttgtttcttgaccatgatacttgacacccttcaggttgagtcatacatatcgtcttctctaaatcgtcattcagaaaagatgttttcacatccattggatgaatgactaacttatgaatgacaacttatgctatcaaaactcggataaaggagattctagtaataggggcaacgtatcatatgcctctgtgcttgcgcacaccgacatcatagtcactccacaccaacgttgttatatacacttgggtccaatgagagagacacaaacgctgangctgacaccagcctcgctgtcatggtgtgaaaggctagcatacattcttcatcaatcttaaacacaacatctttg

SEQ ID NO: 47988 - DNA, 275 bp, Glycine max
  unsure (1)..(275): unsure at all n locations
gcttctccttcctntcctataatgtgtgaggtgtgatttcttaaatgttcaaccctcctggtatctgagattcgcttaaaattagtgagaaaaattgtttccgtgaagagaatccgagccgaggcgcttccgtaacgcttccgtgacgtttccgtgggtgatttcgcgaagaattttcaaccgtctctcgcgntctttcgtttctctttgttgttcttcgggcttcaaccgggtagttccggaaatcgaacttttcaattcattctatgtaccct

SEQ ID NO: 47989 - DNA, 150 bp, Glycine max
gtgccctgcggcatccaagctgtgggtattcgcctgtgccgcctgggacgcagactcctgataaacccattatttggggcctgatgccctgctggggtgacaggactccgagaactgcagagaccctgattagagctggcaatctcaaaa

SEQ ID NO: 47990 - DNA, 139 bp, Glycine max
attggctgaataaagacattgttgggttggtgggaaacttggtcgtacaagaatggcagtcacaacatgggtttctccctcatcctcaccctctttatttgccccagttttctcattcgtccaagcaggatgattaaat

SEQ ID NO: 47991 - DNA, 193 bp, Glycine max
  unsure (1)..(193): unsure at all n locations
acacctgaaactcaccttaagttgctagatagcaacttgntttaagccaactttcttcctgtgatgaattttccaatangctncttttggttgggatgtgtgctctatcactcaagattgcatggtcactagcagccgtattctcaattaattccatggcttcttcaggggtcttcaattttattttttcccc

SEQ ID NO: 47992 - DNA, 374 bp, Glycine max
  unsure (1)..(374): unsure at all n locations
agctngaatagatgaggattatcctaattatatgaatgtgctatcacgaaaaacttcttctgttgatgccagttaaggtcatgagggataatctcagctaccttgaagttagcaatggctagtaactcttgtttagtggtagcaaagttcatatgtgcatcattntggactttactggcatagtaaattgagtgaagcatcttatttgcctctgtcctagcactgcaccaacaacgtagtcactagcaccacacattatttcaaactcttggctccaatttggggccacaatcactgnggctgacaccagcctccctttcagggtgtgaaaggctagcatacattcttcatcaaacttaaacacaacatctttg

SEQ ID NO: 47993 - DNA, 129 bp, Glycine max
taattccgaacattttgatatttataagaacaaaaaaaatatttttacccttgttttattgtttaaaaaaaaaaagagagaaatgctacttacattttctttaacacacttcttcatacacactttctc

SEQ ID NO: 47994 - DNA, 388 bp, Glycine max
  unsure (1)..(388): unsure at all n locations
gctgggttatagatcattaatgtttgcatnatacgcatatcctgcttcatgtaggaaaaccactatgnatggctntcgtgttgatcactataacaaanatcagtccttttagtccaagtagatctatcaccggaaaacacatcttttgatgttgtttggaaacttttagaacttaaacttcatttattcttcataggattcgacaaatcctgaaagaatgtcttgtgagacaatttctgcgaaatgaacctcagacacaaagtactaaatgaagtcttaaatgtcatctttaatatnttatcagatcatgacttattcatanttctgtctgaaatatcaaacagaagatcatgaagcataatctgatatcacataagacnaaacttta

SEQ ID NO: 47995 - DNA, 386 bp, Glycine max
  unsure (1)..(386): unsure at all n locations
gcaacgataatgctgtattgtggttggttcattttgtttccacaccgattagacaaagaatactatggatggataatgcaatagacattttggaaagatcttatatcgcgatattcgcgaagggacatgttaaagatactcaaactttgaacatagaattggctncatttaaaaaagtgatacatctatcacaaacttatttactaaattgcacattatttgngatgaactngagatgtatatgccaaatcctttttgcacttatgtgcatcagtgtgcttgcaattctttactgatgtantgcaaagaaaaatcaagatangtatgcaattctataggattgatgacaatatagatgtagactatatctatatgatcttgctcat

SEQ ID NO: 47996 - DNA, 208 bp, Glycine max
ttctgaagaagtttatctttacccgcatacagatgcccctctattttacgacggtttcgtctgggtggtttcatactaatttgaacccctccctttgttttgtagcccagtacactacatgtctttcgataattggccttctatatctcttcagggcgattatcgcatcgttgcttatttaaatttcactatatgttcgccaaccgat

SEQ ID NO: 47997 - DNA, 144 bp, Glycine max
ctgcccactgccagcgagcagttgtcttcaagctcacctctgaggcagggcctggtctttgtccccttttctaagtcacccctgctctttggaattcgttttcggaaagttatgggatcgtacgaatttcgaactatacttgtt

SEQ ID NO: 47998 - DNA, 446 bp, Glycine max
  unsure (1)..(446): unsure at all n locations
gtcacctgacgcatgcaagcttctaaactntgtcaataataaagttactgtttagaagtggcctcagaaatcttaaagctctgataccacttgttggacaagtggcctcagaaatcttaagaaggagggggttgaattaagaatttacaaactattcctgaattaaaatttctatatagattntgacccaagtcctaagattccttttaaaatgaatttctaaataataattcaaattaaacttactgaatagaaataataagcaacaataaataaaagagtttgagggaagagagaatgcaaacacagttttatactggtttggcaaagtccattgcttacgtccagtccccaagaaacccgcttgggagtccaatatctcacaaatccttacanattctgaaacacacaaggacaacccttcctttgtgttcagatgctttaca

SEQ ID NO: 47999 - DNA, 210 bp, Glycine max
  unsure (1)..(210): unsure at all n locations
gacacaacaaactaagcttccacaacatccaagcaaaacaacannctttcagcattatctatcacagccaagcaaaacagagcaaaggcagaaaactctgccaatacaccaaccaaaaatcacagcttttcccactcaaagaccccagtaacaattccttcgatccaatttgttaaccggtggatcgactccaaagattttctggaagtc

SEQ ID NO: 48000 - DNA, 341 bp, Glycine max
  unsure (1)..(341): unsure at all n locations
agctngcaaccattagaatataaagaatttgtgattagaagtatgactganaatgttagtcatgttgtcagattgatggcgaagaaatgcattgatcgtatcctggtgagagtgtgatccttaaattttgagagaaacgactatcatttagtactaattnttgcatgaatctctgaagtatggactgaatgcatgaattgaggatgatgaaggccatgctttgattgtgatagctacttagccaaaaagctgaccttgtgcttgaatgatttatcccttgcacccagtttgagttgaatgaattattgattgattgaaccttgagcctatacagtgttatc

SEQ ID NO: 48001 - DNA, 201 bp, Glycine max
  unsure (1)..(201): unsure at all n locations
agaagtgaggaagagtggaagaggagagacttcctacttttattcgttgtccacagagcagngcctagaatacagaagatgcaacaacaatcaagttaacaatattctttagacatgcatgacacagttgatagccacagaataaataagattggggaagagagattgcaaacacagttttatactggtttagccacatcc

SEQ ID NO: 48002 - DNA, 353 bp, Glycine max
  unsure (1)..(353): unsure at all n locations
agctngagctatcagattttcgcttttcatttattgctaancnatctaccttgacagtttagtcagtttaagatctcttatcattgtaaaaaggagatgtctattaatgagctcatttcatactgtgtgcaagaagagcaaagcataggctgaagcaagaaaggactaaaagtgctcatgttgtaagtacctctaaagacaagagcataagagaaaaaaagaactaacagcccaagaatgaagctgctaagggtccaacacacaagaaacaaaatcaaggtgacaacnttgttctttgcaagaagcctagacatgtaaaaaagaaatgtaccaaatatcatgcttggcatgca

SEQ ID NO: 48003 - DNA, 399 bp, Glycine max
  unsure (1)..(399): unsure at all n locations
tatcaacatcaaactagaganagagntcttgggtctatacatgataagcaancaagnataatggtacttccttcactatagcggtgatctatctccacacatattntatcaatagcaacataaaaaatctttgcacgggaatgatgaagattagtgatagtcctcccttctgctcttgaacgaccccgaaccggtatttncgcattccaattttggtacccggaaaatctttacctaccaaaatcccttgacatcggcaaaaaaattattccagccactctctctcattgtgcccaaccgagccttgacaacatcaactaattccatggcattcacaatattaagatcttttctttgaatacatttgaaagctcgtttgtgataccaaacaactttaac

SEQ ID NO: 48004 - DNA, 340 bp, Glycine max
  unsure (1)..(340): unsure at all n locations
agcttggtgttttaagggtatacggaatatagttctnganatntanaaattcaatgattgcccncacgtattgtctcgtaggggttatgaacatattgacaagaaacttatggacgagaagaggaagcgtcgagatcagcaagatgagtttactgaaaacccaacactcaacctcgaccctccatccccagtgtcgagacacctgaagtggaagatggcccgcacaaagcgttatggccaaatgacttctgaagcggcacaacaaattgcaaacaaaattgtgagttcatgtcttcttcacttacagtgattgtcaaataatcgttagctaacatttaac

SEQ ID NO: 48005 - DNA, 409 bp, Glycine max
  unsure (1)..(409): unsure at all n locations
agctttatgtttgtaacattgtttttgtgcaagttntttttgtttctaaatctatgaaatgttgatacataagtgtccagtaacataatataagttggaaaatatgtcaagtacttccttccattcatggttattttcatattggcattagatgttcctctaatcaactgaatttcttgtgcttgattggaagtggcttgcaaatttaagaggcactttagttgcatctagaagttagaggcgtcttcatgaaaagctagaggtatatntgctatattntataacttcttggctactatatcattatatcctcatgttctccaaaccttgtanggttatactttgtacttcatagntatgttctctaaaanatgttccctaatttcaaattttctctctattttactta

SEQ ID NO: 48006 - DNA, 251 bp, Glycine max
  unsure (1)..(251): unsure at all n locations
tgcgataaagacttgaccagatgtgtcggccaagcaaggaaggtctaaattgcctaccccacttatgaaacctcatgagtgggtacaagaacttgaacatctgcatttataaccttctcccaccttacctttattttgccagccaacaaaggaggtgttatgacaatagtggatccctcataaactctccccanagcaaccaggcgggcaagatctacttcgatgtacaagccgcacctatctgagtcacc

SEQ ID NO: 48007 - DNA, 408 bp, Glycine max
  unsure (1)..(408): unsure at all n locations
agcttgccacccatctcgcccatgcgatcatatgttgcttcctccanaagcaacaaccttctggatgaatcttctggagggcccaagtgggtctggttgctatttgcacacccctttntactaaatgcaccccccttctattcttttgtaattctttttccgtaacgttacgaaactntacgaatttcgtaacgatacttattttccttccgcaaggttacgaatccttacggattatgtatttactctttnttagctttcaaagaagttacggaaactcacggattgcgcaaaaacacctcttttcgatttccaccacattacgaaatttcacggatcgcgcgagcctgcttccttttgatntctgagaacgtctcggacttcatttatngcatgtcatcaagtaat

SEQ ID NO: 48008 - DNA, 267 bp, Glycine max
  unsure (1)..(267): unsure at all n locations
cacaaaataacagccattgtatcctatccacaccaaggaaaaacatattacaaacaaagacaatatagagttaaaagttctgagcaacatcagtgtgagttattctgcataagaactcagaccaacaatcatggagaacagcaaattcttcgtgatacgactggtataatcatnttctttattataagaaaaattacaaacggtcagcaatggttgatagaatacatagtgtcacaagataaccccatgcaatatccaaaacagaat

SEQ ID NO: 48009 - DNA, 336 bp, Glycine max
  unsure (1)..(336): unsure at all n locations
agcttcaacatcagaccacttccagggttctggaactatcttacatggacttgatggggcctatgcaagttgaaagccttggaggaaagaggtatgcctatgttgttgtggatgatttctccagatttacctgngtcaactntatcagagagaaatcagacacctttgaagtattcaaagagttgagtctaagacttcaaagagaaaaagactgtgtcatcaagagaattaggagtgaccatggcagagagtttgaaaacaacaagtttactgaattctgcacatctgaaggcatcactcatgagttctctgcagccatcacaccacaacaaaatg

SEQ ID NO: 48010 - DNA, 338 bp, Glycine max
  unsure (1)..(338): unsure at all n locations
accttaaactcaagcttataccgttatttaagtcatnttctcaaccaagaatttataaaatgaannnctttcgancattagagnnggaatcncagttaatcatttgtaaaacaaaatcttatcgatcgttcacgctataatcccggttaaaccaaaaaaagaaagattataatgaaattatcaaataatcttgaataaaatagatttcagaataatcaagagaaattcattcgaccgtttttctctgaaaggttccctggagtgatttgactaattacccatagtgaaactaaagctaaaatcaactcacaaatcaagctttgtccgcaaaaatcact

SEQ ID NO: 48011 - DNA, 372 bp, Glycine max
  unsure (1)..(372): unsure at all n locations
agcttanacaacttgttataataaatttttccggattatgtgttgctagtgtatctcattacctacattctagcaccaaggtccaacaatcatgcttaagttattgacgacgacttgtaaatcttatatgagccgaaataatgtatttaaatgaattgggtacttttgattgaagatattatgttaaagagttgtcgactagtggattatgaattctcatacattgtcttagcttctagattcattggttacatcaatatcgatgtctctaacgagatagttgattagaccaaagcctaaaatgagataaccgaaagacatctaaagaagcatgggatgggatatgttgatcatgaatgggttatagctgga

SEQ ID NO: 48012 - DNA, 377 bp, Glycine max
  unsure (1)..(377): unsure at all n locations
ttntattntcagcagatgaagatgaatctgaggccacttcatggactcctctaaggacaataacatcatttcttgcactgaattgatgggagttggaagccatcttctcaatcaaattcctatcctcaacaggagtcatatcaccaatggctccaccactggcagcatcaatcatactcctctccatgttgctaagtccctcatagatattatgaaaaaagaaatggtctataaattttggggcgagggcaacttgacccaatgtcttgaatctttcccagactcatacaagctctctccactaaattgcctgatgcctaatatggcttttctgatggcagtggtcctatactcattgaataattnctccaaaacac

SEQ ID NO: 48013 - DNA, 326 bp, Glycine max
  unsure (1)..(326): unsure at all n locations
cgcaagcttgcctcanagaggtccaggaaggataaagcggtttaaggaaccagttctgctccggagtattacagccaccgctntaggagcgttgaacaccagcagtgcttcgaggccatcaaggggtggtcatttctccgggagcgacgcgtccaactcagggacaagttcgccggcggtgggcatcactggttacccccatggccaagttccacccagacatagtcctcgaattttatgccaatgcttggcctacggaggagggcgtgcgagatatgagatcctgngtgaggggtcagtggatcccgttcgatgcagatgctatc

SEQ ID NO: 48014 - DNA, 423 bp, Glycine max
  unsure (1)..(423): unsure at all n locations
gctaatggcgctgaaatgattgcctgccgccttgctacttattattctttatttgcagnaagnnnctctctttgtttttgtgcctctttgttctgtcattgtggcctacttttcctttacttacattatttggcttctccggacagaggcttgctttgcttgaagaacgtcttggtaaactaatcacagatgaaccttctgttgtggaggcatcccttgcacacgatggggagctctggttttccatataggagcagtgtccttcacaggtaattttttggggagaaggagggggtcatggtttgactatagctcagttttggccctatgtgtcctgaaattatttcaaatagctcanatctactatcttatatttggacaaatgctaaccaatgcccttgaagaagaaatgtagaattttta

SEQ ID NO: 48015 - DNA, 245 bp, Glycine max
  unsure (1)..(245): unsure at all n locations
atgagacaanaagaaaaaaatgaaagacctcgaagtcggcatgttatggtcataggaagcataaatcattaaaagctctactactaggggtgggtaaacgggttcagatccatggactgacctgcggngcctgtggtccgtgagggttgcggaccaatnnttttaaatgttccatggtgatgtcatattntntggccagccccgcttaacccgcggactatgcgggtttggcccacggngtccgc

SEQ ID NO: 48016 - DNA, 459 bp, Glycine max
  unsure (1)..(459): unsure at all n locations
tcgtggcttctttgagaagctagattcttatctacccacacccctctatgatttaaattaacttccttgaaaataattacggataaaataacacaacacaataatcaaacatcaaatataattactaatatatatatatatatatatatatatatatatatatatatatatatatatcagggtgttacaatattgctggccatgttgaaatccaaaatatccacctgcattaaagtttggtcttggttggttctccatgtaactcacttcatgtgttgtatcttctgtgggaatgcaacagccagaatcatatgctcgaccacatataacacaatctgcaacctgcaaacagaaaagatgaatgttgtcaatatgcattgagtggcaactactattgtgcaggtaagctcaagttcttgatacacttgtttggccacaaacgtctgtatgaaactcacn

SEQ ID NO: 48017 - DNA, 296 bp, Glycine max
  unsure (1)..(296): unsure at all n locations
catcgntcgcatgtatgacatccactccacaaggttcgaagtagaggagaccttcaatcctattacgcaacgtggcagacaaaagtgggcagttaacttgaatggtcattattgtcaatgcggaaggtattctgcgcttcactatccatgttcacatattattgcatcttgtggttacgtgaggctgaactactatcaatatatagatgttgttatacaaataagcacatcttaaaagcttaattcccacaatggtggcctcttatgaatgaagcgactattcctccttctaatga

SEQ ID NO: 48018 - DNA, 621 bp, Glycine max
  unsure (1)..(621): unsure at all n locations
agaagagtattaaagatctgccggaatgtcaattttctctaataggtttgtcaancaaattgagcaaattcttgttggactgtttctgggaatatctcttggattggtccaatgaatttccaccattgcatataccaattgggaatattgtgaatcgtataggtcttgaaatatatcatccttgaatgctctaagcgggtattttggtgccaaacaccttttgtccagcttcaacttagtccctataggataacctttcatatcgatggaacttgataatcttttcccttttcaggtcaacccaaaagtcctggtgaatactttaatctttgtatgggaaaggggttaatgtgttcttttggctttgaatgttgatgatcttgattgatttccaaaacaatttaatagtcttgtttagatggtgtgtttgatgaatctctggaaacctgccgtgctgaagatttgccaatatagtcttttcaacaatcaatatttataattaatgtttgtggagggtaaactgctaagtttcctttgttgttctttaatttgtcctttttctctgtttttattttttattatctcatacttttgttttgtggttccctattttatcgtttt

SEQ ID NO: 48019 - DNA, 334 bp, Glycine max
  unsure (1)..(334): unsure at all n locations
agcttctacttatgnggcttggcgggctttcttcactttcttgnctccaatgcgagctctgaccactgttcttccttcccgcgatgcttctttacatgtccgcctgagtgggcttatagcctaaaccatacttcccacgatttccttgggtttttatcaggctagatatgccgccattgtctttgcctaaacccatcccgggttcataaccgttccccaacataactcgggccatcattactgccgcatcagacagacaaggttgcccaaaaagggagtccacggaggaaatgctgaccacctcaaaagactggaaagcggtttctaacgattc

SEQ ID NO: 48020 - DNA, 209 bp, Glycine max
  unsure (1)..(209): unsure at all n locations
tgccttatatatgcatgtatgttaacaaaaaaatacttcacaaaatatatatatatgtatgtntaggcagaaagataccttggatatgcatgtatatagcataaataccttacaaatcatatataggtatgtttaggtagcaagataccttggatatgcgttgatatagcaaaaatacctcacaataatatacacatgtttaggtagca

SEQ ID NO: 48021 - DNA, 519 bp, Glycine max
  unsure (1)..(519): unsure at all n locations
gacctatgaaactcagcttaagagattaagataatggccatgagatttggaagattttgagaaactcacctagacctccaagaacttaatccctcaacaatggagaaagaggagaagaagaagaaacaaaagcaatggtctcccttctctctcttggtcgtggaaaatgagcaaaaaaagggaaattgcttctctttttttatagagggaaggggttagtatatgtgagagactcacatatgtgggcccttaagtttnccctctttgttttcaaactaactacacttatggacataagctctcaattagtccctaattaattctaacttctaaactaattgttgaggcataaattcaattattaatctcttctatttaatctaattaanaataattaaagaggatgagatattaattctccttttcctaatcattanactaatagtactcacatctagaacatacatgtctaaaatccataatcttctaatcttatgctcgctaaatctcatacaactg

SEQ ID NO: 48022 - DNA, 370 bp, Glycine max
  unsure (1)..(370): unsure at all n locations
agctngncttctacaaattttataaaatcttttttttgatctttgaggggccattattntctcctatttcttaaccctttttgcaccattntaagtactgattaattttaattgtcaaattaattaggcagttttattatttgggcccattaagctaatttgatgttcttaatctaatttcagaaattaatgaagcattgggcttgaatccagaattgggcttggatttgaagaggacaaactattttattctacaaaattagatcttatcttatcttatctagatattatttagatttgatctcatctagatattatttcagctagatcttatcttatcttatctagatttgatttgattttatttatg

SEQ ID NO: 48023 - DNA, 360 bp, Glycine max
cactcggaagtctgattgagtcctgtaatatatcgtgacgctcgaattttaaaaccgaagctcgtagctaattcgaacgacaataacatttcactcggaagtcctattgagtcccgtaatatatcgagacgctcgaaatttaaaaccgaagctcgtagcaaattcgaacgacaataacatttcactcggaagtcctattgagtcccgtaatatatcgtgacgctcgaatattaaaaccgaagctcgtagcaaatttgaacgacaataacatttcactcggaagtcctattgagtcccgtaatatatcgtgacgctctgaaattaaaccaaagctcgtagcaattctaacgacaataacat

SEQ ID NO: 48024 - DNA, 414 bp, Glycine max
  unsure (1)..(414): unsure at all n locations
tgtgctgagtgagtataattctggtacatatatgattattagtnagctcttttggctgtcatagcccataaccctggtaaaatccatgatgatgctctagcttacttttgtggcaaactgttgcatcatttcttggtaaatttccatatctgtgactttatttttggaattattcttttgatgttaggcatgtctccatatcattttgaatagacaaggtggggctgcttctttttggaaaaaactcatgccacgagaggaaataattttggttatatactttggttttgttaccaattgaactatttccttgcttctctgattgattgccattagaaatttctttcatgatggtgaatccaattgggggggttatcactggatctctcttgtacaacaccaccaatctattga

SEQ ID NO: 48025 - DNA, 411 bp, Glycine max
  unsure (1)..(411): unsure at all n locations
agcttattacgtattcatgantatgacttatatatatgnntatgaattgttaaaataaattaagaattaatatttcaaataataaaattaaattaaaggaaattaatatattaagattcaacgataaatactttgaatgcaattttagtttaattatttattaactnttttttagttgaaaataatataatttgatttaatatatgcatgttttgtgccatgtaaatattaatattgtgtgatgtgcatatgattcatgcggtgtgataacatgttgcttttggattataacattgtgattgagattangtgaattgataaattgagtatgcgttgaatngtaaaatacatgtgtattgagaattttgacgcattgagttgtgagtatgaactgtacaatcaaacaactgt

SEQ ID NO: 48026 - DNA, 324 bp, Glycine max
  unsure (1)..(324): unsure at all n locations
gtcatggaaaaggaggtagctctagtccttcacagagccaaccgggagcatgagtacttagcacccatgaatatcttggcatcttggttttgcaacccctatcttttaatcatttgttcccttcacgctcttggntgctgtcgttctagtcagcttattcatataccctttgcaatcgattatgtctttgattgatgtttacatttcacagaccactctctctatatacattatctctctccgatcatgataatcatacttcaattcttaccttaattataatctataaagggccgagatattgctactatacacttagtcatg

SEQ ID NO: 48027 - DNA, 332 bp, Glycine max
  unsure (1)..(332): unsure at all n locations
gcttaacctcatcgnctctcacagnctatatanttatgagccaatccaatccttgggtccggactctcagccacttatgatagccgccgatgatcccattactgcttcccctaagctctctgtcctttcttcacactgcatcacatgcctcgcgaactccttggagtacccttgcattgaggtcactgaaaccccgtgtaatgaaaggtgtgaagctttcgactaatggcgctcctctcatggggtagccaagctgtcttatggcgaggacaggattataatttatacaaccccttgttcccattaagggaacatttggaaatccttcgcat

SEQ ID NO: 48028 - DNA, 146 bp, Glycine max
  unsure (1)..(146): unsure at all n locations
gaagaatttttccatgaacaccctataaggtcatcccagctgataatagacctgngagcaaagtagtatagccaatcttttaccactccgctcagagaatgaggaaaagcctttagaaagtcatgatcctcttggacatcaagggg

SEQ ID NO: 48029 - DNA, 234 bp, Glycine max
  unsure (1)..(234): unsure at all n locations
cttatgagccttanggtatattttgggcccatgggctaagtaccaacccacttatctttgtaaatattagattaaggtttcatattnttgggccttgtatttagggctccataatgtaggtagggtaccctaaaaatataggatttttcagcccttgtattttagggcacctagactagtttttgtattaagggtatgtttgtaatttcacatgcactaagtggatatttgatg

SEQ ID NO: 48030 - DNA, 64 bp, Glycine max
ccatctaatctatctaattaaaccaattacacaaaataaagcccaaactcgtagcccaattatt

SEQ ID NO: 48031 - DNA, 198 bp, Glycine max
tctcatgtatacgatctcctctctcttttatatatttaggtgcttaaggcattgcaaacaatgattattacattgtctatgcttttggcaaaagcatatatatataactcaagctatttggttaagaactagtaacagatactatatatgcagcttcagttgtattttgaattgcactttcttagtttctctgaaaat

SEQ ID NO: 48032 - DNA, 418 bp, Glycine max
  unsure (1)..(418): unsure at all n locations
gagacctaagcttgactcacaatctcccccttntntatgatgacaacttttgttatctagattcacacacacacactntttcctagtcgatcactcgcataaatgtccattctccccctttgtttttgaatttatgcttctcttaaaattaagttgattactcatgtgagttcttgatttaatccttatttcttatataagcaaggcttcatggngaatcttactcacagggtttttgtggtatccctttttgacaccaaaagatgatgacaaaggtgatgaacatatagctcaagatcaaagaacaactcaaatgaatcatgaacaagtcaagagttcaagaatcaagaggaattcaagactcaagaagaaagcctagaatcaagatttaagattcaagatctcaagaatcaagatc

SEQ ID NO: 48033 - DNA, 149 bp, Glycine max
  unsure (1)..(149): unsure at all n locations
agcacctgangctgcagctgctttacaagtcaccnaattgttttttttctcnnngagcaatggaaattgattgaggcaatctttcagaggagagaatgatagactgccaaagcagggcaggatcactgangactgatgactatacaggc

SEQ ID NO: 48034 - DNA, 512 bp, Glycine max
  unsure (1)..(512): unsure at all n locations
agacacanagaatactcagctttgtggtgcctagcccaccagtctttcatagtagtgtatcgataatgagtctaccatcacgatcatcggctccctttccatcattgtgggtaccacctgggccgccagatccctccaccttttgggcgtgttctttgaataatccgtccccctttttgcaaatgttctatagttgcatcctatcccgaaccatatcaaaaattgtactgatactgccttactaaagccacccattagggctttccaagattggactccggaagaatcccaaggtagtgtaccatgtaacagctaccccagtaagactttctggaaggaattgatancaattcctcatcttttgcgattcgcccatttctgcaatacactttaatggttctggacaagaagcncttgacttgcaatgccacaccttgaactggatggtgatatattggttctagacactctttaggtacaaagatatcttacctcttattgcctgaccttct

SEQ ID NO: 48035 - DNA, 315 bp, Glycine max
  unsure (1)..(315): unsure at all n locations
caataaaataaanaagataagggaagagagaattgcaaactcgatttatactggtttggccacttcccgtgcctacgtccaatcctcaagcaacccacttgagatttttcactatatctgtaaatcctttacagactttgaacaaaccttgngatccctcacccttgtgttcaagattctccaagagacaacccgtttcttgattacaattctcacaatccaagagacaactagtctcttgattacaactgactttntgagatgaacaaaanaatttttctcctttagagtggatgaatacaaattaagaatcta

SEQ ID NO: 48036 - DNA, 300 bp, Glycine max
  unsure (1)..(300): unsure at all n locations
gacacaagatactcagcttactagtgncanantacatgtgaggttttgtggctttatccaagtttgctctgacattggctccagagccaaatatttggcccttgctagtgatcaacacagagtgtatcaagccagngctaatttgggaaacatggagagctctcaaagaatctaagattctaagttttaatactttatcatataccctcgtattcaggaatctgagctggctaatccctttaggccaaacctatcctgaaagtatccgtctctggacccgggctaccatcaacattactt

SEQ ID NO: 48037 - DNA, 293 bp, Glycine max
  unsure (1)..(293): unsure at all n locations
tctagcaatggcggcgcctctntagatttacttcgttcctacaagcgaaatgcctcatccatggatatagatttggaacctctgtgagtctcgctctcaaagagaagagaacatcacaataaagagaacaaggttgcagtgcgtcactatcttagactcgaaaccttttggtgtttgaagattgccgacaacaactaccttaaagccattggaagcctatggattgaagggttggaggaattgtttggattatataatgtattgttaaatatttcatttattattataattct

SEQ ID NO: 48038 - DNA, 318 bp, Glycine max
  unsure (1)..(318): unsure at all n locations
tccttgataagattcctaaagaagctagttcttatttacacacaccttnctaatagctaagctcaccttcttgagatgagaaactagaacttagctacacaccccctataatagctaagctcacccccatgacaaaatacatgaaaatacaaaaaaagtccctactacaaagactactcaaaatgcctcgaaatacaagggtaaaaccctattcttctaaaatggcccaattccaaggcctaaacgaggaaaaaacctattcaatatttacaagatagcggctcatactagccatgggctaaattacctaggctatga

SEQ ID NO: 48039 - DNA, 306 bp, Glycine max
  unsure (1)..(306): unsure at all n locations
ctctcnngcatagctaagatccaatggtcatcaattatggcttctttcaaattttaggttcaatcgaagaaacaataaccatattattgcacatatctttgagagagtgtctagttgttacccctttagatatatcaccgataatctcgtcaacaggatggtatctagaagtttccactctcttggaagacagcatttgttcttgttcatgaatgtgaaaatcttcatcattgtcctctcctttgcctttggatttcaccatgaatatgcatttcttctaagattctaanatatcatctagtatat

SEQ ID NO: 48040 - DNA, 322 bp, Glycine max
  unsure (1)..(322): unsure at all n locations
ntgctgatttatgtttcgccgaagaaagtgttctaagttgttctaatatgacgcaaancagatcatcatgctttgataaatacaaaataactagggcaaatgaagatggtgagaataatggagaaacccatgttgtgactgccattcctatacagccaagtttcccaccaacccaacaatgtcattactcagcccataactaacgcttttctttcccagcaacccgagatatcttaaaggccttcctaaataaccaaatacctgttaccgacttcaatgacgaacaccaccttacacaaccaaaacccaccaaaaataattt

SEQ ID NO: 48041 - DNA, 343 bp, Glycine max
  unsure (1)..(343): unsure at all n locations
ttcgacttcgaccaagggctgtttttggcttttctnattcagancnannnccggccaatctcgaccatgactattttcaacctacctcagccgggatagtttttggatgaacttgataaggtttatgttcgaccattattagccaggattatttttttaccaatttcggctaaagttgttttctttcaacctcagacaaaggtatgttctatattaaaccttggcccaaacctattttggttgaccttatccgaggtattttnggtcgacctcggtagggcttttttccctgacctcattcaggttgtttttggcgacttgacaggttcttttggttgaccac

SEQ ID NO: 48042 - DNA, 443 bp, Glycine max
  unsure (1)..(443): unsure at all n locations
cacctgcggcatgcaagctgctgaatgactttatgcattaatttatcaagattatattatgttcagcagatcaagagtaaatgtagtgcttaatgtacaagagcttttctcaccttgataatatgcttagcagatctgacaacaatctcactattacaaagatcccacagatgaggtagatgtttagtccccccagccacctttacagaaaagtgggcatatcagaagtaatataagaattatcaaaagtatgcaagcaaaccaacatatattaaacggagtgtaattcacttgatcagcatcgaanagaataattacaacagtactttaattgaccaaaatacacagtgcttactctgccaatataacgaacattaattccatgagcatgcaatgcttcagttaatgtctggccatccattggcgaaacttcaagtgtacat

SEQ ID NO: 48043 - DNA, 201 bp, Glycine max
gaacccaaacagtgggataaaatttatgatactttcataaattatgagaatctattactaatgaagtaacgagaatgagaatatttaaaaatgtctcgttcaaaataatatttaacataaggaggatgataaaaacaagatcaatatatggttcatatttcagctttgcttatgatgagtaattgagctcatataaaataa

SEQ ID NO: 48044 - DNA, 308 bp, Glycine max
  unsure (1)..(308): unsure at all n locations
tcagatttaanagancggtttcggtttaggnaatctttctggagagngnctgcaatgtgcgaacattgtgcgtgatttcgctcgtgaggttatctgaggattagttgattagtgagggtggaacaattgccaatggttttatcagatattggaagatttgatgttgatgtgggacctgattatcttttatgagttcactgaaaggaaggggggaattaaattgggctttttccctgcctatgtaactggatttgtacaaccttaagttgggtaggattttgtcaatgaggaatgtttttggtgattga

SEQ ID NO: 48045 - DNA, 281 bp, Glycine max
  unsure (1)..(281): unsure at all n locations
agagagagagaagaagatctgactaatcatgctcgagctccatacggtgtacggagaagtgtccataatgaggtgtcctaagagggcacctacttctatttacatcacacttctatatttcctgagcctgttttataggacactggcagtacattatactctngtgtcttgttggtggtatggttaatgggtaagctaatacgttccttccctcctggcttagaagatgcattgccataccatatcattcccgctatggcaatggtcatgcccagaatcac

SEQ ID NO: 48046 - DNA, 81 bp, Glycine max
  unsure (1)..(81): unsure at all n locations
gcttcttccgganacattccggatgactttcttcctgatagtgtctngcgagttttccggaagacacagattattcttccg

SEQ ID NO: 48047 - DNA, 296 bp, Glycine max
  unsure (1)..(296): unsure at all n locations
acataaaaangcataaagatataactngaatatttcctaatgagtcaagagtagcgataacaaatagcataatatgggttcacatatcaccaaaacccaaattacattagatcttgggaattatttcctgccacccacttttttgtttcatgcacttccaaaaaaatcccaacggacaaaaatactcctatctctcctaagcaagtcccacctccacccaaccacctaataccaccactgcagccatccaacatcacacatgcaccacaatcgcaaccagcccacaacaaacacca

SEQ ID NO: 48048 - DNA, 279 bp, Glycine max
  unsure (1)..(279): unsure at all n locations
tattgtatctattaattattcatctaataaatcataatcccttttaaacaactaatgtttgaccaatcaagcacgtttacatccttgtaatgcatatataaaaaagnatttgtttgaggtgctatacttatttttgagaatttaattaataaaaatttaaaatataaatattttcaaaaaggtaattaaaaatttaagttttaatttagggtataaaaattggaatggtataaaaaaatgctttgaatacataatcattttattaataagttgggattg

SEQ ID NO: 48049 - DNA, 292 bp, Glycine max
  unsure (1)..(292): unsure at all n locations
gcaatacaagcactactttntgagcaaaacaacttacagcaaanataatacactttatctaaatcctttgaatacactagccattntttatcatatntttctccatatnggcattacttttggtagtaaaatgaagaanaatgtctattattttcatcttttggatactgcatatcattatatctaattggatcataaatatttttagaaacttcatttgatgtactattgagctccttatttgtttctaaacaatcttcttataaaatttcattatcctcttngtcttgac

SEQ ID NO: 48050 - DNA, 345 bp, Glycine max
  unsure (1)..(345): unsure at all n locations
ttccttgagaagctagaggggggctactcacacccatgtctattatttgaaanacaangggaagcttccttgagaatctagatgggggctactcacacccctccaatagctaagctcacccccatgccaaaatacatgaaaataaaaaaaaaggtgcctactacaaagactactcaaaatgccctgaaacacaagcctataccccattcatactaagaacccttaaacttggccccctaattttggggggacgctacaaacctaaattggcaaaatacaaggccaaaagaaggagaactattctatattttcaaagaaaatggacccaacctggcccatggctca

SEQ ID NO: 48051 - DNA, 381 bp, Glycine max
  unsure (1)..(381): unsure at all n locations
taagtcacctgcggcatgcaagcttctaactgaggcagccaacanaattaatgcaatataaagttctttcctgaagagacgaattttcttcgtcttcccagttntttttgacaattctagtttgcttagttcctcaatgcctgaatctgaggatgatctatgaagactattagatcgcattagaggctcagcttctttctcanaggcaaccaaatcagtctcagacgatcttcccaacttttttgtaaccacccactcgtaagaacttccaaagcgaagtaatccagatatcatggcattaaatttagttaccgacatagtgttctcaaatagaaggtaaggaactataaacggaaatgaccgtggagctggtagaacact

SEQ ID NO: 48052 - DNA, 128 bp, Glycine max
  unsure (1)..(128): unsure at all n locations
accatggagatgcagcggaagacaaaggagaagatgtgagaggaggcgccatccactaaggaataagccatggaagaaagagctncaccaccaagatgagccttggataagaagcttggagaggatgc

SEQ ID NO: 48053 - DNA, 271 bp, Glycine max
gatggaacacgatgcctttatctgaaactgaatctgagagacagaaattatattgtactactttacatatcgtatatatggttaattttctgcgatcacaagctgcaggaaataaatatgtttcatgattataatcatatgaccattgttcaatggaatattaaacaagtggtgtgtattattatttcaagttattggggacaacaatgcatttttttttccactgaataaatttatacatgcataaaactgaagataacaagcatggatc

SEQ ID NO: 48054 - DNA, 236 bp, Glycine max
aacgaggatatgggctacgtgggagtacgtgagctcagttggaggtgggcaacaggggatggtgggtttatgcgcgcattgtggatgaggaaagcttgttgtgcaccatcgcccgaccgccacctaataccacatgtgatgggtaccccataatcctacaagcttgagatgatgaagtgttgaatggtgaaacttcctgcttttattgttgaccacagagtggtacctggagatat

SEQ ID NO: 48055 - DNA, 237 bp, Glycine max
  unsure (1)..(237): unsure at all n locations
aagcttctctgctttctttcccaaggcttgttcccgtatcacaactntctcctccgcgtgagtgatttcagcctccttcttttccacttccaccaatttattcttcaatccatcttcaaaggattttctnttctcatccaattccacctcaaactcctgcttcttcacatcaagaaatagtatttgttcatcaagaagtttctgcatctcaacctgcatagtgtccaatctgaattc

SEQ ID NO: 48056 - DNA, 210 bp, Glycine max
  unsure (1)..(210): unsure at all n locations
nctctcctctcaatnccaacatggaggtgttttaagtttgtgtgagcgcgagngcgagagcgagnttctccctggacttatttgtccccctcgctccatctttttcctcccctcactccatcttcttccttgtgggctttgatttccccatgtctgcaagtggcagttcttctgcattttctggtaaaaccattcgtcaatgccaccatg

SEQ ID NO: 48057 - DNA, 313 bp, Glycine max
  unsure (1)..(313): unsure at all n locations
agcgagtgttggaattagtagttaaatgcctttcagatacaggtacactattcttgtacctagaatataccgtgcatgtactaaggaactagaatcatcattaatctccttataaacacaaaacagtgtatataaatactagatcagctgaataactcattcaagctattagaaaagtcattctcgtaatccctaaaaattcctcatgtaataacattcaaccttccaacaaatgcatatggaggatttcacattctcaattcattgatcttcattcaagtgctactaaatctcanaatatnataaatttatg

SEQ ID NO: 48058 - DNA, 299 bp, Glycine max
  unsure (1)..(299): unsure at all n locations
acactacacaanactcaatgctttttcaatcttctgtaaaggagaagagttcttanaatatgacgatgtcnagngtacactgggtttctaccatgtttcagttgtatgtagcttgtgtcttcttcacagatggggcatgcaagatgacccttagcactgtaaccgctgagattcccatatgctggaaagtcattaatggtacaaaatagcattgcacgcattngaaaagtctccctgggaaaaccctaaaaacttaaaacccccttatccacaactttttagggcttcatcaccggact

SEQ ID NO: 48059 - DNA, 415 bp, Glycine max
  unsure (1)..(415): unsure at all n locations
atccttaagtcacctgcggcatgcaagcttcacaagaaatactctctatctttatgtgtctaggctactatntaccctcaaagcacccatgaaagcaaacaccacataaacttggcaagattctaaanatgacaatcaacccataaacacgagcacatgaggatcaaaaggtcttttaaggttgtaatggggccaaggacaaggtatggagaaatatggaataagtggctaaatcccaaaggaatagaggagcaaaggggaataagtgcatattaagaaaaaaataaaaagaagtaaagataaaaattaaacatgaagagtagaaccaagagtttcatcattcttatgccatntaagatcttattcactcaactnnntattctttctttttctttttttttccaagttttttttt

SEQ ID NO: 48060 - DNA, 357 bp, Glycine max
  unsure (1)..(357): unsure at all n locations
tatngaatatatgnggccattcctagttttgggatgtttcnatcataannnncggacaattatcatgtagcatgtatcttttcttcttttttgcgtgatagtttgattgggttttttcatttaagcaatatgcaagactgctaataatattgcaaaaccaataattgatgagcaaataccgaaatataaaattgattcctgtgaggttgaaaaactcactatgggccttttcgcccccatctttcagggttagttatttagatgtgggtaattattaaataaaaactttttactggttggcacaaatattatatatataaccaatgtgtaaactatgatataacctaaattcactcg

SEQ ID NO: 48061 - DNA, 328 bp, Glycine max
  unsure (1)..(328): unsure at all n locations
attatatatnttcattacacttacttataattaagatgtaatcacatttatttgtaataattgttcgactttatcggtgtaattatgtctatacaatagtgttattacacacttcaagacatgtgttgtttttatttctatgattattatttaactaacaattttttcaatataaataatataatgtcaagttacagaataatatgtacaaattatcatcactaacttattatttatttctaacttactaaatatataatttgtaaatttatttaacttatttggtgagatttatatattaattatagttgataaaaagtacaaattt

SEQ ID NO: 48062 - DNA, 232 bp, Glycine max
  unsure (1)..(232): unsure at all n locations
gatatgngcgagaacctcacctgtgggccctgctactaatgcgtcaattacacaacagttggcaaagcctgcaatatggagagtctacactagaagaaataggaaggggagcagggaattatcgctgatgtgcaagagagagagagagagagatagagagagatggcgattgctgttcgggaatactgctataatggaatttgtggtagtgtgaggggggagagaaaatgat

SEQ ID NO: 48063 - DNA, 207 bp, Glycine max
  unsure (1)..(207): unsure at all n locations
gctgaagtgtgtacccaccttttcatatatttcactgaaatgtgncactatcattggatcatntcttctctgtcatgagggaaccacttgggctaccgatctctccacctttggcggtttctttaaaagatccgtgcccctttgtgacatgtactgtagtagcatcctatctggagccatatcagaattgtactgataccgcctaac

SEQ ID NO: 48064 - DNA, 198 bp, Glycine max
  unsure (1)..(198): unsure at all n locations
gccctcgtccgctcatantactattccggcggtaaaactagcagttaaggccccaataactggttataaagatattcccagcttaccttcattcaattatttgaaaattattaaacactccgggcactggaaaacactaatggcttataaatatttgnnnnatttgtattgcctttcccttttgaaaatcagctccct

SEQ ID NO: 48065 - DNA, 186 bp, Glycine max
  unsure (1)..(186): unsure at all n locations
aactcagctgaatatgaaggtgaaggggaactcctgctttattgttaccacagagnggnacctggagatatgtcgcgggggtcaagagaccttggggacgtcaggtggggtgctattgcccaaaaccaagcttgaccaatcccgacccaacccgggcatagtcggtcagtgagaacctgtgatgta

SEQ ID NO: 48066 - DNA, 342 bp, Glycine max
  unsure (1)..(342): unsure at all n locations
agcttgaataatgaataacataacattatatcctttcacgaatcccaaggctgctatntaaaaagagtcactcaaagtcactgggccctattacaatactctggcccaaaacgaaataaacattgaaccacataaaataaaattgcgaaatttcctaattagaaattaactaaggtaagcgctgctttatttgccctcttcaagtccacaaccaaaatccggattaagcccaatgtttcattaattcctgaaattagattaaaaacatcaaattagctaaatgagcccaattaataaaactgcctaattaattgacaattaagaccaatcagtaattaaaat

SEQ ID NO: 48067 - DNA, 402 bp, Glycine max
  unsure (1)..(402): unsure at all n locations
tcaagaatcaagatcaagattcaatcatgataagtatttaaaagttntttcaaaaactgagtagcacatgaattttttctcaaaaccttttaccaaaaagtttttactctttggtaatcgattaccagattattgtaatcgactaccagtagcaaaatggttttcaaaaaaaaatttcaaactataattacaacattccaattaatttcaaaatgttggaaacgagttcacaggttttgggtatcgattccagtgtgtttgaacgttgaaattcaaattaattgtgagaagcacatcttttcacaaaatgctttgtgtatttgataccatgattnggaatcgatactagtgataagtttgaataaaaatcaaagatgaactcttccaaggttcaagttttct

SEQ ID NO: 48068 - DNA, 475 bp, Glycine max
  unsure (1)..(475): unsure at all n locations
ggcagccgncacttgttatactattatttaaccttcccgggtccattcctggaaggacctaatggttgccttcattagatagtattagtacaattctgatatggctccggatagaatgcagctacagaacatgtgtaagagggagcatgaatctttcaaagaatacgcccaaaggtggagggatctggcagctcaagtagtgcccccaatgatggagaaggagatgataacaatgatagtggacacgttatcggggttctactatgagaagatggtgggttaaatgccttcaagctntatagatttagtgtttgctggcaagaggatcgaaatgggtctgagaagagggcaaattgattattgccgcttgatgaataagaagcctacggcanatggagagaataagaagagggagaaacctatatgtgactntcgttctacatggctaacttccactagctaacaatataatact

SEQ ID NO: 48069 - DNA, 223 bp, Glycine max
  unsure (1)..(223): unsure at all n locations
tatccttatggcctgcctccggacttcacccnccgttctcccccggaagatttaagcccagcccctacttttgatgggcaactcccaccttatgaagactatcccgggcaagacgatggggaaggagatagccatcnttcccccctgctccacctcatatgatctgtccccgcatgaactaccccaaccggacatagtccggcaatccccgggcctatccccc

SEQ ID NO: 48070 - DNA, 375 bp, Glycine max
  unsure (1)..(375): unsure at all n locations
agcttgtgactctnggcatntctttattactagttagttaaaaagctgcgactttngaaagaatcttcagaaacaagtcacttgaagaattgtgactttnggaaatgtattntttgaaatcagtgactggtaatcgattaccattaaggtgtaatcgattacacatcaatagatgtgactcttcattttgaattttgaaaattaaaatgtttagaaacaccagtaatcgattacaagtattgtgtaatcgattacacaagttaaaaatgtttaaacacaaatggtaactctttgaaattgaaatcttaacattttaaaacactggtaatcgattactaccttctgggtatcgatcaccagcgaagtaaactcttt

SEQ ID NO: 48071 - DNA, 490 bp, Glycine max
  unsure (1)..(490): unsure at all n locations
agcattcggaattgcgaaagccccactccatcatagtgttagtacttgacancncaaacaaacaaatcaaacgtaacaagacaattattgttgctgtttgaatacctcacccactcaagtgtatcacacaacttatggcttttctctaatgaaacactcttgccttttaccactcttattccccttgagtcctatgcgattcaagaaattttggccgcaccaagaacaattccccattatttgaaggaagggtagacaggaaaaggtaaccaagaaaaagctaacatgttttggcacaatgaggaaataaatcagatttagaatcaagaacaatcttatgcaccatatatacctaagggttttttttagtcttcagctgacatcacccaattttttttttaatttgtatacaaattgcgtctttttttgttttacaaaaaacaaaagttactttgaaggtcgccctaaaaattttttatataagggttta

SEQ ID NO: 48072 - DNA, 194 bp, Glycine max
  unsure (1)..(194): unsure at all n locations
ggatctgaanagagggcaaattaatcatcctgcttagacgaatgagaaaactggggcaaataaagagggtgaggatgagggagaaacccatgatgtgactgccattcctatacggccaagtttcccaccaaacccaacaatgtcattactcagtcaataacaaaccaccttcttacccaccacccagttattca

SEQ ID NO: 48073 - DNA, 206 bp, Glycine max
  unsure (1)..(206): unsure at all n locations
agaagcctaaagaagagctngaagaaattttttagtttttttggctnttacatgtccaactctctagagtggcatttgtattggttgttatcttgagtgttgcatcttattacatttgatatttgtattgcatcatgcatcatcatggtttgtgtgaaaaaagtttctaagttaaaaacatttcttcagaggtaaaaattctctat

SEQ ID NO: 48074 - DNA, 68 bp, Glycine max
tagcgtgtcctcgtcaacgtagcggcaaggaattaccaccatagaagagacccaccgaagaaactacc

SEQ ID NO: 48075 - DNA, 309 bp, Glycine max
tcataagatcatgtcatatttgccccatcaagataacctgacggtcaatggggattggaattctgtgtggcaaagatagctacaagagtcaagctgatgttatggagggctaccttctagaagcaacatggggatgcgaggagtccaacgtcccttaatttgcacattctgtgaaacaaatgtagaaacatgtcatatcttactgacttcccatttgaattggaatgcacgaaagaagctaagatggaatcaaaacttctgcaatgcattgatgttgtgacatagacggacatatagaatatagatgct

SEQ ID NO: 48076 - DNA, 433 bp, Glycine max
  unsure (1)..(433): unsure at all n locations
cttgatctaccaccatcgcttgtcccattatctaagttttctatnatnnntaatattactagtactttgttttctagtcgtgtatttggctatattatgacattttggataatttagtatttctttatttgcatggtttgattgaacaattatgaattatgttatatgactatgtggtttttatatttgatctattcatgtttcttgcttcatgattggnttatattcttcaaagtgtttgcttgagattgattaatagtatatgattggcatatacttgttacgcacttgggctntntgttgatgccaaagggggagagaaataggaattaaatcaagaactcacataagtaattaacttaatttcaagtgaagcatanattaataaacanagggggagactggaaaataagtgagtgtcgactaggaaaag

SEQ ID NO: 48077 - DNA, 237 bp, Glycine max
  unsure (1)..(237): unsure at all n locations
agagcctgggtagtcgaagagaagttcaagtccatagccatcaaagtctgaaaagagtatgatgaactaagggatgtcaatatggccaccgatgaagccttggaatgagaaaccaagaaggcccgaaaggaagaacacgaccaaagcaaagttttgaggggctntatagggcagcaatagtgagctcaagctccgaagaggtgaaaggaatcatcacgggtcanaggcatgatcttg

SEQ ID NO: 48078 - DNA, 304 bp, Glycine max
  unsure (1)..(304): unsure at all n locations
atttaatgtgacaacaaatttgatatatttatttaaatatttcaaaatattctatctttattggtaaaaataaaataaatatatatagagcatcgcaaaatttttattgtataaattaaatattaggtaataggattaatcataggagaaaaactattcacccgagattccatttttattgggtttaaggatgagatttcagtaagatttattttaacaaattgttgcttcgatttcggaagactaagtacgccggattaaataatatttaatacaatncatcatttagtcatattcatatatt

SEQ ID NO: 48079 - DNA, 368 bp, Glycine max
  unsure (1)..(368): unsure at all n locations
agctntgacggcgacgacagttntatttaaactgatgttgagtattttatttcaacatcatttttgttaaaatcgtctttaaatagacgtttcaaagacggttttcacaaaaccgtatttgaaaagttgggattatttataaaaaagccacaacattntttaacacatcatttttgtagtagtgttataccggtataatttgattcctccttatataaataactactaattgaatacaatttcaaattattttagttattacttaattntgattgtaacgatattataatattgccacaaatcatatatctttatatatataanaggagataggtgaggtggtcatggaagaaaaacaaaataataat

SEQ ID NO: 48080 - DNA, 349 bp, Glycine max
  unsure (1)..(349): unsure at all n locations
tatcatgagaaagatgttctatcctattatgccaaactttgcatttagaggaaggaatagtattgatgttacaagtataggaaaacttagttggtgaggaagacaagatgtatagcccaactctcaattcagctgctccaaccatcctcaatgaggatgggtcctatatagagcacccagtagggtgaaaattcatggaacaatggaaattanntaagagattttagatttggaactcangttaaaagtgaaagatggaataaacaagacatcagtaaggtaaaactgggcattaaaatgtatagggcctgctaaattggtttgaatttgaagccatcacggaattaac

SEQ ID NO: 48081 - DNA, 387 bp, Glycine max
  unsure (1)..(387): unsure at all n locations
agcttgntatattatacttgtcttgtatcagagnggaanaattatggcatgaagtgaaagtaaatatgtttcttccttttacatatgtctctcaattcagcaaagcttaattaacaacttaatctgacgcgtcatctcttattntgttgcagaatctggtgaatntaaagaatgttaaactccgttggtgtgtattgctgaatgagcttccagacttctcaaaatccacaaatctcaaggtactggatgttagttgttccagtgggttgactagtgtgcatccatctattttctctctacacaagcttgagaaattggaccttagtggatgcagttccctcatcaaattttcaagtgatgaatggtcattaagctccctactttatc

SEQ ID NO: 48082 - DNA, 462 bp, Glycine max
  unsure (1)..(462): unsure at all n locations
cggagattaagcacttggatcgttctancaccactcatgctagccgactgaagctanccactgatgctatcgctanaaagccatagcgaagttcatatgtgcgctaacacaaagctccgctagcgcaatcacgtgaaataacctctgacctattaggaggagaacaaaggaagactacgatctcaaactctctatgaagaatcaagttgacctctcctagggaacctcttcttagcatctcatctctacatagcatcatccttcttataccttgaggaaagcttctgctatgaagtaaccccttgtgagcagagcaaacctgtatgactgtctcttatatatgcattcaattatgtctttctgattgtgtaagttgttggctctgcttatttaggtatatggaaggatgcaagacggatacttacatgatacagaaaggactgggctcgtcatnaactagtg

SEQ ID NO: 48083 - DNA, 198 bp, Glycine max
tatcttctaatgaaacacaatggattaatgcgacttacaatgccattttttaaactttatttgagaagaaaccatcatgatatgaaacgaaagatcctttacatttttctcctccaatctaagtttctaaatctttacttctacagaatactttgtctacattgaactttcaactcccaacttggactcatctggatg

SEQ ID NO: 48084 - DNA, 472 bp, Glycine max
  unsure (1)..(472): unsure at all n locations
tggggnnnnnaagcagatacactagcttgaggaacatgacgtttacattaaatntgaattcacattcaggacactggtatcgatacganacatgtatcgatacagcctttgaaatattggacgtgtaattcgttgaaacttntcaactcattgctctggtatcgatacacactatgtatcgataccaggagtaaaacttttgtaaaggtntgcaaaactatgtctattcaagttgaaatntttaatcttatctgatgagcttnttcatctgaactgactgatctgatgtagttctctgagctgatctctgatctgactttactttctgatcactgaatgtcttgatactgatgtcttatactgatgtcttacttgactttgtcatactgcacatttgtgccatgatataacactgatattatatatacttgtccagctacaagacaggttcatataacagactgtcaaatan

SEQ ID NO: 48085 - DNA, 227 bp, Glycine max
aacaattgtaaatcctattatatcaatgtgtaaaacatctaataacgaagactaggtagctttttttttttaaatgaagcccacaaacaaacgcgctaatacgtggaacatcttaactgactataactactgcccactgatacatacacagatgtacaaatattgatgcgctacagaaaatgcatgcactctaataatatctactccaatgatgtgaatcccaaata

SEQ ID NO: 48086 - DNA, 588 bp, Glycine max
  unsure (1)..(588): unsure at all n locations
nnttgtgtgggataatgatactcttgcangngacctcaagctactgaggatgcagctcattacgtatctgatatgacacatattatgttatgaaatgtataataanatanganattaatattcaaataataaaaataacattaaggganattatatattaagattcaacgatanatacttcgaatggcantttagtntaattatttattaacctttntctagatgaaaataaataatttgattaatatatgcatggtttgtgccatgtaaatactaatattgtgtgatgtgcatatgaatcatgcggtgtgataacatgttgcttttggatataacattgtgattgagatacgtgaaatgataaattgagtatgcgttgaaatggacaatacatgtgtattgagaatttgacgcattgagtngtgagtatgaactgacattcaacaactgtatgaccttntagggtgacangtaatgacnacattattgngatgaatcactgttgactcgacagtgaacacttgagcgcacgagttgaatgattgaaataatgtggttggtgtatgatagtcaactcagcaccatttg

SEQ ID NO: 48087 - DNA, 462 bp, Glycine max
  unsure (1)..(462): unsure at all n locations
ccttgctgtggatatgagtccttgtaggactcaagcacgcgcttcgcttatttatattgtccgggggcccattgttatgttttatctgttattactttatccccttgacggctaccattattaagcttctccttacaaaataataattcccgacgttgatgatatcgtacttcgtgaatgaatcgacgtcggcgtgcgtaccacgttggaatcaaaaagaggtaaatattatatataataaaaaagatcctttagtaagaaagcgaaatcatcggacgttcttttggattcctgatctaaatgatgctatactaagtgaataggctaaataactcactatcagctcgctcaaataggttgaagctatatcagttctactataaaggacatttaggtcacgctaaatgacacctaagaaagatattgtctgctagaaactcgangtgatcttcaagagtcgaa

SEQ ID NO: 48088 - DNA, 557 bp, Glycine max
  unsure (1)..(557): unsure at all n locations
nncctgagcgggcaatcnccgatcgagantccatctcagctgtnggcgctctatgggctgatcttgttcttaatgaggtccttatggtgttttccaccatggagatgcagcgaaagacaaagtagaagaggtaagaggaggcgccatccactatggaataagccatggaagaatgagcttcaccaccaagatgagccttggattagaagcttggaaagatgcttcaatggaggaaaagaaatatggagagaaagagagatgggggagcacgaatatgaaggaataaaagaagggagagaaagtggaactttgaagtgtctcacaagactctcattcatcanagtaaacaagtgtacacatgttctattatagactangtacttcttagaagctttttgaaaacttctgaaagctctttagaaacttctgagagctgagctagcacaccaccctctataactactacttctgaaagctctagagatctaagactgactactccacgctttatactactactctgaatagactgagtactccacccatatatactacct

SEQ ID NO: 48089 - DNA, 585 bp, Glycine max
  unsure (1)..(585): unsure at all n locations
tgccccnnnnnnaagaaccataccgnnttgncgggnnnnccntttagttcgcntcgcattantcacncanactcagcnngnggccanangacanggacgaannnannnatannnnaananangagaaattatctaagtattaagttcaagctcttaatctatattaatcactcttatatttttccttttatatttaaccagtttagaatattattcacaatggatcacattttcaggtggtgcattcttatttattttgctatttcccttcgcatttgagttcaaacttncttttactttccaaacanactaacctttntcagtacgtaacaccctaaccctatcttaaggaagaatcaatcgctgattttgcgtttgtatttaattcaatatattctatcagagaaatctttcttagtccatccgtgcgactggtctcctaagagaacatacatntgtctctcggaatatatagaatatcttaaaaaaatatgatcagtgatcagattaaattttaattaagctgagttatattactaacataatgacataaatatcttatctaaatatctatcggaaagaaat

SEQ ID NO: 48090 - DNA, 251 bp, Glycine max
tagcgaacccgagccaagaatcccaacaaggttggccaccatgttagaaacttaaggacgacacagaaacactaccgacctcctctttcctaccggtaggccttactcgggaaggtggtgtctaagaaaataccactcttaccctactcaagttttcaactaaaaaaagaaaacaggacttagaccagtgagcactttacttcctgaccatgcacacctggaggacgatagtcttcaaaaatcgacccact

SEQ ID NO: 48091 - DNA, 431 bp, Glycine max
  unsure (1)..(431): unsure at all n locations
tggtacnnnaagatcgtatctgnctggctgggcactgatactgtattgctcnggcngtcctnatttttctagatggaggacgatcgtctgacgacatcagatggaaggcagagacgagctctgttcaaagcaatatttacataactgtaaggaaagtgtatgatacttggaccaaaacatttcttcgggagaaaagtgtcagtgacagatcaaagaaganagatggttttgacacgatccattttgtaaaagttaaaagtaggaaatcctgangagaccttgatctgcttgatgcgccaagcgtgaggttcgcaggctattttactactgcnaagaactgatgggctgtctgtgaatgtgttatcgaaatcactgtccttatctctttccctcagtgtctgccgtttgaactatcatgttatacgtcacag

SEQ ID NO: 48092 - DNA, 271 bp, Glycine max
  unsure (1)..(271): unsure at all n locations
ctctttaacactttctgtgcattcagtttatttcttcacatanattcgtctcaacatatttgtctcatgataatgaagctagctcacgtgttcttgagacaaccagtctttgagtcatatactataatctgtcagttcttcatatacctaattgtgtatattctctgctaggctgataatgctctgcctaattatgtcatcttaatgacattatataatgtgatggtgctatccaaatgatgctatgtaattcctagtattattaggtgat

SEQ ID NO: 48093 - DNA, 449 bp, Glycine max
  unsure (1)..(449): unsure at all n locations
nactgacctgagcttgagacncanttcnnantntcnncnttngaaangccgnacggaaatgaaattttgttgcagnatgttttgctgcataataatcccgttagcttctattaaaaaattggtatagctctatatattgtttatgcaggatcggttgttctatattgtattctaaacatatgctatctttacacctgactatgggagctatataaattctgctatatattgaactaattgaagaagataatattgtcgatcacttgttcaacttatatataattgaaaatgcggatacaaatgaactgtatagcgtgcaatattatgctctatataaaagtgatgattatggtctgatatgtactcgcaatgcgcgtaacacaatggagtgcggagactgttatatgnatcacttgggacaaaaaaaaccgtatctataacaataagta

SEQ ID NO: 48094 - DNA, 226 bp, Glycine max
cgactgaggtctacttctctggctgaggtctgattactgacactgaccatcttgtgactgactttgctcacttgctctttgttctcaacatttatcatctgatatctgacctgtgacatggaatatgacttgtaaaatcaacttgctaaaggaacccgtcacttaacctcaaattgtcaagattgaactgtgatctaatccagcaactgtcaacagacaaagagtg

SEQ ID NO: 48095 - DNA, 565 bp, Glycine max
  unsure (1)..(565): unsure at all n locations
ggggnttttnaggatggagatgagntcgtgtgnaaacccttngacgcttgtctgacagagatctctagcattgtttcgagaattcaaaggccatgttgaaagtagctgtaaacatgaataagaactgganggctgaacaagagaaacanaagaagccttggtgaatgaatgatgaacanacttctacttcaacttagcctgcacatgattcatncangccctaanggaaaagttccttcanataaccattgaagttgatcagcctcnngatagaacacaaagaagaagaagaagaagtctttatttctttcannagtgaatgttctttgccagaaaaaacgcatcaacccagtgaatgtaatcttcacagaaggagtcactaagtaccaatctaattctgaacacttgtgtatggtgcccatgtgatattgtataagtctttggtgaggagaaatagacattatgatattatgggatctcttatatcatattcatcttagtccaatccatctaagaaagccanagctacttagaccttcttacatttggctacttagtatgaatn

SEQ ID NO: 48096 - DNA, 380 bp, Glycine max
cagtccttagcttaaccctaacctgaccccgccaaattctatattaaaaatccttgctattttggagaccccttactatgttcacaatgtacatatgttcttgatacaaaaatacttgttcatatgactatcattcaacactgattgagatctttcagaaaagtctgatcactgacttattatttatacactggccttgcgaattccatcaccaacagagattcttggcggaacagtatttggctgtgccagatctctttattaaaagttattcaatgagcgtcatttttattttattttatcatgtatttgaaatagtctgaaatatgtcttgatgtactgattgtgctgtcaagagtttctggttatcatactgaata

SEQ ID NO: 48097 - DNA, 184 bp, Glycine max
aatagttattttggctgttaggctctagagaggacctaaattagatttagctgtttaggccaatatttgtaggattgattcagctatgaataggggtgaaatatatgaaccacatattaggggactgtctacatgaaattctttctcttgtttgcttacacactagattgatactgtagtacta

SEQ ID NO: 48098 - DNA, 550 bp, Glycine max
  unsure (1)..(550): unsure at all n locations
tgctgcngnnnnnactgattacccttgcacgagaccntcagagncaccngcggattggagctnttgcttnctctctanananaggggaaggagggaagaacannaatgttctaccctcctggatctgagattcacttaaattgtgagataaatggntccgngaagaanatccangctgaggcgcttccgtgacatttccatgggtgatttcgcgaagattntcaacccgtcttcatcgctcgttgtcgttcttcgcgtcttcagcttacaggaagttccgaattgaacttcgatcattctatgaccctagtggtctcattgttcgcggctttatttcattcatcactttcgtcccnctttgacggcttaagcattatttaagcatttctcgctaaccaaaataaataaattcaccgatcatcgatttgacatccttatttctgtaaatgatccgaccgtcgcatgcgtgactcgttaaacaaaagaggcaatatatatatataaaattcttagtaataatcaaaaatcatgacctcttggattccttcag

SEQ ID NO: 48099 - DNA, 509 bp, Glycine max
  unsure (1)..(509): unsure at all n locations
nccagctagnnctgggangccatganantcnntnganntcttganacacancgacanaactgatgtttcttccggtggcctaggacaattatgtgacctctatgctatcatgtggctggaagataggtggatggtagctctaagtntgttgaattttaaattgatgaatcattgaaggttttttttgggacttattataattatatatgtgtgaggaattggtgagcaaaatagtatcacatggaaaagtgcatcaagatatgctcatgacaaataagatgtgcangggctagttatctcattactcatgtagtatagacatagatanggactttgtcttgtttttccaagatgttagaagataacacctcattgctgtggaagatacatacactatatgtgcatgtgctgcatccatatgacctttacatgtgacattaataggagcacatctctgctgtgatcttgagtgaataggtgcttgtaacaagaataaaggacaatcgttt

SEQ ID NO: 48100 - DNA, 548 bp, Glycine max
  unsure (1)..(548): unsure at all n locations
nggcagattagactgangccattgacagnccnataaaccgctgcagaacncgtacngcatactctnctttgctagccctctggnnctctggtcatttgctttngcnggaatngcattctctntccgtaatccggcacattccttccggatgtgtgagcggttactngacttctcatggcaagttcgcctttctaactcgtnttgagagcgtggacttcttcgtcttctttcggtgcttcgaaactggcttcgctgacgaactttaactntgcaagccaatctaaacctcgtatatgaactntcagccgntcatgataaccaccaatgatgcccgtacgaatgcccctaaagtctttgatcttcttaacgggggttccatgcttatggatntttgatagcctgaatttgcgcgcgaatcctacangaaggagactgcttctcaccgtgctcctatgggacctagtgctatacagccggatgagtatcaacctctctatacgatgttggacttactgaaagatctcttctctcatgggacatgtgtactn

SEQ ID NO: 48101 - DNA, 449 bp, Glycine max
  unsure (1)..(449): unsure at all n locations
aggagattgagcttcgtgctcttgannntcncacnacacacatacaacttacgngctttatacacgctcattngcatntatcatatcgtatcggggaattctgattggttggtttgatggttttttgcaaaataaatgatcaacgcgtgagtcactttccatctgcgttgaactaaggcgcgctgcctgatatcgatgaattacatcttcttaatgaatattttcattccaaaggaaaccacctctcctgattggggattgacaataatctgttgttcccttgtaaatgtttgccaactgattacgatgattaataacggattgcgtacggattactacactaccactggtgaacctagctttctcacggtgtatgtagtatgcccactcatattttattaatggggtgatgtatgaatgacgtctttctctgactgcggttcatgctn

SEQ ID NO: 48102 - DNA, 275 bp, Glycine max
ttgtttatattacacatttctacgatatttacatgtttgaaaaaatataattatatacttacatgaaatactcgttactgtaacatagaattctatcatatatagaatttggtactttatatcactgtggttacttttatcctcacggaagagaatataaaactttatcctaagatataacatttcattatattaaagtattctattaattctaatgattatctataaatataaaataactctatttaataaatatgcatgctcttattatctct

SEQ ID NO: 48103 - DNA, 614 bp, Glycine max
  unsure (1)..(614): unsure at all n locations
nnaagatgtggnnnnttcggggtaccttttgcacgngaccctcanagncaccnganggcttgtaagctcgattggaaactgcatgcctggntcaacctagtaactanctnggtcttgaataananatctgcacatggtacaagagnttgtgggtctatgtcttctgcagatcatcatacagatctttggtccttcttgcatcaatctggagtcaatgagaaacctgaagcctatgctgcannacattataatagacctnctcagcggcaaacccaccacagcgaaataattattgactttcaagcaatagatacactccagaattggaggaatcattcanatctganatggacaagtgcataccctaatttcgtccgggacccattgttgttgcatgcaacnttggttgaccgcttcgaggactttgcacctcttgctgcacatacttgaagttcgaacatgccgaaatcaaaggaacattgtacgcatccgtgaattccgtacatgccggaataaaaggaagatcatacgcaatccgtgagttcgtaacatctgaagctaaaaagagtantacatgacctgangggtccgtatcttactgaatgaaacatgtt

SEQ ID NO: 48104 - DNA, 419 bp, Glycine max
  unsure (1)..(419): unsure at all n locations
naattgcttagcatgaaactatctccttgacccttaaatgattgctattcgctaggcacaagatttgaattataactgtgtaatcagccaggcaaatgacactggatactatccttttctaaggacttgagttaacaacctttgaatgcttttaattatctaacattactcataattatacacatacacagctgtagcattttgctctgataggtagttattatacccacaactcaataataatctgaacgagcttcagaaactgacattgaaagtaatctgtaaattctgacgctgctttcttctgtggacaattttttctatgcaacaaactagtattatgggcttgagactgctatgttcatgtattctttacaccacagtgggagaagagaaccactatgttgatcactgtactt

SEQ ID NO: 48105 - DNA, 599 bp, Glycine max
  unsure (1)..(599): unsure at all n locations
actgcggcnntctcgtcgtctctttgcacgnngacccccanagncacncgangctgtcngccttgcttctctccctcgcannctttntaagcctattnaaatnaagtattttcaatangacnatatgtatatatatatatatatatctatatactaaccagacgctaattggtaataacaatcttctacactcaatgatgagaaaaggtcatctcatataccttagtatctgcagcacaagagctctttgatttggagatgctgatgacttgacattctgactattcactacgctctagctatcatcgggtgtaactgganagagaagcgtgggtacattaatacaacttctgattattactgtaatcgcaacataccacataaaatgatacttcttgaatggttcttacgagtcggatcttagttctcaagaatcacgaataattagtagaatactcttcacacgtattgaatgctgaatatatactgtgtaagaaaataccgaacttattctntattaatatatttctattgatgggaccccaccatgagagatgacctatatatggcactcaccgtcatcttatttctgctgaccg

SEQ ID NO: 48106 - DNA, 177 bp, Glycine max
  unsure (1)..(177): unsure at all n locations
aaggacacaatatctgcctataataattacgcccgcgctgcactcatggagaactgtgaattcataacattttgcgactgagcatcacaacgatgtgaactgatcgccgcggatacacctgtgcctgcttatattgcctgagaacgngcaatagttcatttgcacgttaataactgn

SEQ ID NO: 48107 - DNA, 138 bp, Glycine max
actattctcggactaataacgataatagatatgacagtagctacatagtcgtctttatcaactgacgtttctttctgtaagaggtagttaatatatacataagtattacagacataacgaactgctatacggtaattg

SEQ ID NO: 48108 - DNA, 262 bp, Glycine max
atttggcgtcaccgatgtagctttccgcgtctacgatagcagatcggagtggagttaccctgcattaaactgcgagaacgatcagtggtaaaaagaagacccctcctataactttatcgttggacaagatcctttacaaatcaacctgatgcactctcattcacgaaagcagggacccttccaactagaactcgtaacttttgcagtaattttgagttgcttgtataacagaatttgctcctctttctgtgttttttaacga

SEQ ID NO: 48109 - DNA, 604 bp, Glycine max
  unsure (1)..(604): unsure at all n locations
attttnnnnnnnaatggctcctatatctcatgctcatgatgactcaagatttttcnnagcagtttgatgatcacagagatgatgaccaaaagcttcttagtcaaaaacacttcatgataacaaagatgatgatctcaagaatcaaagaatgagttcaagattgaatcangtacacttcaaggatcaagaggaaagttgaattcaagaatcaagaatcaagtttcaagattcaagttccaagaatcaagatccagattcctgactcaagattcaagaatcaagagaagactatatcaagatangtattgaaaagccttttcanaaactgagtagcacatgaatttttctcanaagaacaaaggactaaccacctgaattcttttgtggctccttcntccntgtcaaagattcaaaacgacatagtctgagaattcttttgatcttcctttnccataaacaaagattcaaagactaaccgctgagattctttgttccccttccaaagtcaaggctaccgttggacttgctaaccatgaggtcatcttgtgtcagtgaggtctctactggtgtggctggacacaaggtctcttttgtcgtctatggg

SEQ ID NO: 48110 - DNA, 487 bp, Glycine max
  unsure (1)..(487): unsure at all n locations
caagttagatgaggcattcaccncctggtgantcttgagannccncgncnanccangacntctttttgtgtctatccaacgtgtgtactcgatgtcatattcatgttgcgtataagctaccgagtatagaactacctgtgaagattcaaatgttaacttgagaccgatctgacatgaatgcacggctgatacgtgtgacatatgacctgaggtttgcgttcaaacaaaggaccagtacaccgactcagagttttgttgttccggtattgcataccggatgtgagtgctatgtgataagcgttcgaccgcggtcatatgttcgtggacaaaacatggagtgaaggctcactgaagcagtggccacctggcaatgatggtgagaatcttataacaagcatcgctgcgtgaacacgcatcatttactgaattactcctcatgctctatgtttgtctgctttgcttcttctatgctgctagcatgtcttan

SEQ ID NO: 48111 - DNA, 151 bp, Glycine max
gaaaaaaatattgccaaaggaaatattataaaattcttacaaatggatcattcctcctctatcttctcagaaagaaaagaaagaagtacgacttgcttttaaaggagtgatataagatagacgctggactgaaacaatgcgagctccctca

SEQ ID NO: 48112 - DNA, 648 bp, Glycine max
  unsure (1)..(648): unsure at all n locations
ncacatgggcanngttgatgcaccgttgnannnanactnccaggggntgcanngannganntcngggnannntntananngnngncctacgnggcggncgggcganggngctcttcatgtntnncacatcacattgtgcgcatanacncaccattcactgttgccgacctcaactgagctcacgtacttccacgtagnccatatcctcggttctctcaacaacagggtcncatcaatcctctcaagcttccacaacattcaagcagaacaacattcatacagcataagctatcacagccaagctaaagcagagcataggcagaanactctggtcatacaccaaccataatcacagcttgtctcacttaaagaccacacgtacaatatccttcgattcaattcgtgaagcgtgggatcgacnntcaaattttactggaagtctatagtgcataagcctacattgtgaccggtgggatctactagcanagatcatgaactcattctggactactctnntcacagccaaccacacacaagcattttctgcacaagcttaaattctgctgcactaattttgcagcnnnaatctgcntaagtgcagaatcaaagatcacacttcccctcatcaatcttgctaaatagatcctg

SEQ ID NO: 48113 - DNA, 220 bp, Glycine max
  unsure (1)..(220): unsure at all n locations
agcacncacccactctctgaaggcgctcttttttcttcattttttcactcaaacaagatcttgttgaaatcagctcactcatgacttcacaaactacttaaatttgttgccgtcatgtagttttaaatatatttactatgggaggatattatgggagatatatattgcttatagactggtgctgaactggagggattagctaatgatgtggggggggtgg

SEQ ID NO: 48114 - DNA, 648 bp, Glycine max
  unsure (1)..(648): unsure at all n locations
ncggacgatatcgattgangctccnttgctancggacanctggatnaccctttgaanngaccacncnacaanangctccacaatgtttacanatagaggcgaaagaaaaattataatcctacattcaaatnattatccgtagatgaacaatcatgaatccatctccaagacanaaaggattgtgatggcgagattccttttttacgtaagatcttatgccaagataatgatngcaagttagttcggaagaaagataacactccgttaatagtcatgtttcctaaatttgaggggatccacatgggttcatctatgatctcctctaaaggaataatacaaaactgaatgtcttccgctagctatgaaaagatagtgtgaactcttgaggatgcacccnanncattattcctattaagcccctcaccatgngcttgaatgagattctagtcaactctagactatttagagtgattgttgtcgattcctcaagccatttatcanccagaaggagatgtaataagatctncgactagccacaccgtatgttcttaacactccananaaaatccttgatcccctgtcaatagaagagagatatacgattctccagagtacgaacttcagatatcttaattgctcanaagcctt

SEQ ID NO: 48115 - DNA, 157 bp, Glycine max
cctttaatatgcaaacctttaattctagatactaaccaggaatattagggaaacagaaacatattgctcagaccgacgaaaatcgtgcctgagagatcgatttcataagggatgccgttcatcaagcatcaaaaaaaatagtgggagaaaatcaaaa

SEQ ID NO: 48116 - DNA, 222 bp, Glycine max
aaggaagtacatttgaatcgtacctgttatataaatgtagtactcagtacttggattcgttgcgaaagatgatcgctacaagcagtcattctcatgggccacacacaaacctatatgccagaaagagaactaccaccccgccacggtaaccccattcaattccccatcccatttatcaccgatcttcctataagaccccgaaaaccgcccccgtcacgtctg

SEQ ID NO: 48117 - DNA, 163 bp, Glycine max
  unsure (1)..(163): unsure at all n locations
tcacgcccgcctgcactcatcgcagactgtgtattaataacattctgcacatgtagccatacaacggcatgagaacctgaatgccncggcatagcacttgtcgcttggtatatattgccatgggaaacngtgcgagaagtgtctatggccactttaataaacg

SEQ ID NO: 48118 - DNA, 174 bp, Glycine max
tttttcatagagatagacattgctttgtatggctttttaacaaatatttatcataagagttgtatggtcaaaagttgcagtttggaactttaatggctaagataattaattgaaactatgtatagctggttttgatttgtgaagtaatgtacttgtgcctttgactacttcttt

SEQ ID NO: 48119 - DNA, 77 bp, Glycine max
aaatgtagattatatctataataataatggtctatatattacatatatatatacttttagggccaatagacaattga

SEQ ID NO: 48120 - DNA, 296 bp, Glycine max
  unsure (1)..(296): unsure at all n locations
cacaattattatgctgtaggccatgaccatactaacttaattcatgaggatttaagtcatgtgatatgctgatgtggtgtaatgaataaacattgatgaactggtaaactaacctacatgcattatcttattcagaagtattattatgtgtgtatatttctatgtagtagtagaatatctattataaaatatactttatattatattctgataaanctacacttgtacatatatagctatagtttctctaaatagtgttaatatatactcatttacagcctgaaattgtactatct

SEQ ID NO: 48121 - DNA, 444 bp, Glycine max
  unsure (1)..(444): unsure at all n locations
naagatganattgatcccactgatgcccactggaaacattanggcacaagagagagggggagcacattattgaggaagaaaacggaagaagttacttgagtgtgtctacaacggacatctggaattctacccaaatttggaacaagatttgaagattattatatttatagcttattcatgatatgctattgtctgataaatagatatggggcaattgcggtagctattatgagagaatctactgcngtatggtaatctatgataataaagttcgttgctggctanagtatgaaccacttgacatgctggttatctacgttgatctatgtacttgaacacccacgtgcaaaccggacgacaaaacgatcaccagagattacgtcaagcaattttcttgtgtaatgccatcaagaagggcttttcctcatgatggcagttataaat

SEQ ID NO: 48122 - DNA, 454 bp, Glycine max
acccagctctttgtcatggacccagatcttaagcacctgggctgcagctatcttatccaaagagggataaaatacttatgatttatgaaagatgacttaccttttgtaaaggttacctgttctgaaatagagaaatcaagagacaaattttacctatagaagacaaagattcatctctactccaaatgcttgtatgcaatcacctgacatctgcgttgtatggcaatctccacaaagaaggagaatttgaaagataagttagtgaaagaagagagaaggctacttcatggatgacagattgaatatatgtgattacacattaaaataactgtgctatgctaaagtatgaagcatgaaagtacatctcaatacaactatctttctttatgatacaagagattctgttgctaaaatcacaactgtagttgttattctagaacattcattaaaagat

SEQ ID NO: 48123 - DNA, 153 bp, Glycine max
taccgcttgacaccatgcaaaatcgatcctacaagcacaatttttattagtaactattcttaagcgccaagttatgggaaacaataacaacaatcaatgtaatttatctggcaaaagtactcttgacgtggtatatactctatcaatgttgtc

SEQ ID NO: 48124 - DNA, 444 bp, Glycine max
  unsure (1)..(444): unsure at all n locations
ttgaccccgatcttaagtcacctgccgcatgcaagcttattctatgggaattaccaagcacacaatgatcattaaattcaagtttatctagtttatcaccacctaacagatnttgtttctcaagttcatgtaatcctctttcactaacatgacctaatctcaaatgccaaagttttgttttatcaatcaatgtattactagctaccgatgcatgtccaacaatggtggaaccttcaagaataaacaagccattacttttattcttgttacccttagctatgattaaagatccatttgaaatattaagaacaccatttaaaattctagttgaatatcctagatcatcaaacatgtttatggaaataatatttcttttgagttctggaatgtaccttacatttntcagtagatactctctattatcaaacatcttcaatctcacag

SEQ ID NO: 48125 - DNA, 511 bp, Glycine max
  unsure (1)..(511): unsure at all n locations
aactaaattggatgnactgtgcanttatataacaagctacccagacctcgtgaggtacaacatcaagaagaacgtggaaaancattctataagctagtggtggngacgncaacatactatatgccgttacgatcgctagtcctcccaccacgtaactaactacatgtataaaagccacgcacaaacccgggagaggattctgcgaataatcatctcactgtgcatctatatactccgcatcacctcaaattgttctgaaacagctcacaacgcagacagctagctctacagaggtggatcagtgagtctctactcatggctacgctcacttcccaacaaacttgatcgatggaagatctaaagaaatctcccatctccatacccaaatctgacaactcttaaaatggtccgaataaagactcccttctaatacagaatcactggttgaaggatagacactttgggatagaactttttatgttgagaggctaatttgcccctgatgtgatac

SEQ ID NO: 48126 - DNA, 369 bp, Glycine max
  unsure (1)..(369): unsure at all n locations
gccagagtgtgtggccaatacttgctaaccagttggaagcctaacaactattggatcaatctatttataggaggtgtaaaaaattagggattatgaaacatgattagtttcttctgagtctaaaattcaggttgtacttagttctttattaatgttgcaggtaagatgaaggatattacctacaatagatggaaaaataccaatttgattgacatgaggtgtagttgatgctgaagctccattgcttgattgtgatctcaaagccagcaaagcttcatattgttgtgaagtgaaacacatctcatgaaaggtttctggttnttgttatgttgaacataattgatctcggtgacattcccatcactagtc

SEQ ID NO: 48127 - DNA, 183 bp, Glycine max
aagagaaaagacaacagccttattgtggttgaaactgaagttattgtatatgacaaagtcccttgcaaatcggttatgctcgaagcaacaactgtacaccttcaagatgacagagtcaagaacagccactaaacaattggttgctttcaacaagaattttgatgatttggaaaatattgaagt

SEQ ID NO: 48128 - DNA, 322 bp, Glycine max
  unsure (1)..(322): unsure at all n locations
gacatacttgatagataagtatttctcttaatttatcatgtattcatgtattagatatnnganncgtgttagataaaaaaatatttgtcacaggattaatcttttaaatgaattttaatatttcaaatgagtattctttgattttcacccagagatactttaattaaaaaaataatgcacctccctttttatattttcctttctttatatgtctcgacaagttgaaatgcgtgccttcatactattaaattaactgaattagttacatgaataaaatatatacttgaaacggtccttacatatatgtattcatgacattgtg

SEQ ID NO: 48129 - DNA, 580 bp, Glycine max
  unsure (1)..(580): unsure at all n locations
taaacctatgtgatccctgtacccccgtgaataacgcgatctttagagtganctgcngcatgcaagcttatanatgggtaaaggctcatattcactntcttctacatcatattcaaacttgtnccaataaataataaagtcatctcgactcaaagaaggtcatctaagtctcatacaattaatatggaacctatattctaatgtcacattctatcagagccgtgtgttcctgtgttctctancatgaggttctttatagtcattcacttattcatcttgctccccgaacacaaagttcaagatcatcacatggaacaacaanaccggagtgaggtattacatttctaactactatagagagacacacaacatatagttgcccaatacaatttacttaacatatctcacatttattcatcactttgtcattcatcaatcacgactttcatccatcaatcacacctttcaatcatcaatcactatacacaggaatcacacactccgatcaagacataataacaccatcaattcatanataacaatttagcaagcgtatgcgacagttatgctaagactcacn

SEQ ID NO: 48130 - DNA, 409 bp, Glycine max
  unsure (1)..(409): unsure at all n locations
ggctggagttctaaactgagtgattcaacattaattctcanaatgggagtatctactgtataaaatcaaactgaacatgaaaatatgtacaattcctacanaaagaaccataaattggaggaaagatgctaatntcatgaaactattcaatacaaaagttagtcgtaaataacgactagcattggctcatgtgagaagcatttgtgcagaagaaggcaatggtggacaagcgacgatgccgtggcaacaagagagtaacgatgcatagtaaagggttcgagagagagagaagttcaagtaagctcgaggcgttccagagtaagggatcatntggaattattatcanagtgttaacattgatttttgataaccgttgttaatgtatctcaaacaacaccgattctataaa

SEQ ID NO: 48131 - DNA, 172 bp, Glycine max
  unsure (1)..(172): unsure at all n locations
aggccgtacaaccaagcgttaangggaccnataacttgcttaaaaaattacgccccgccctgcactcatcgcagactggtgaattcaataacattctgcgacatggacgcatcacaaacggatgatgaacttgaatgtcgccgtattacaacttggctgcttgctataattg

SEQ ID NO: 48132 - DNA, 345 bp, Glycine max
  unsure (1)..(345): unsure at all n locations
agctnttaaagtgaactcaatttatgtttcanatcttattttgttcttttcttgctcttgatgctctaaattctgactgtgatgtaatttaaatgttgttgtctctcctatcatgtgttattcagagtctattttcttatcatggatctgatgactacatataattgtagttatgtagtatctccataattttaaatttatttgatagggatctgaagactggcttgatgagcttgaatacattgttattatgatgaacttagttcatatatgcaaccaattntagatctgttgataaggtagtgtcataccctaatttcgtccggcgacctttgcttgatgaca

SEQ ID NO: 48133 - DNA, 323 bp, Glycine max
gacaacaaaagatgatgacgaaggtaatgaacaaaaagctcaaaagatcaaagaacaactcaagtgaatcaagaacaagtcaagagttcaagaatcaagaagaattcaagactcaagaagaaagtctgcaataaagaatcaagattcaagattcaagatctcaagaatcaagatcaagattcaagactcaagattcaagaatgaagaaaagactcaatcaagataagtattaaaaagttttttcaaaactttgaatagcacatgagtgtttgacaaaacctctaccaaagagttctactctctggtaatcgatcaccatattg

SEQ ID NO: 48134 - DNA, 169 bp, Glycine max
  unsure (1)..(169): unsure at all n locations
catgcaccctntngttacatatgtaaaatagatacacaacanaatcaatattttatttattannattttatgtttggactcgtgttactttttagtanaacaaactatacatctatatctatgggtattgttacggaaaaataaaataattatttttataagctaaatt

SEQ ID NO: 48135 - DNA, 326 bp, Glycine max
taaagcaacttgcattctaacattgtacatgattttaattctctgaaaaagagttaaatagaaacttttgaaaagatatcatcacgatattttatgacatcatgctcatataagtgggagtacagatgaagtatctttatgctaaccacctaacaactaaatgggtattacctgagagtcaaagaaagagatattgagcactgattgtgtgaaactcctgtgaactctgactgggtggagactctcagattaatcatgtctcagaattctatattagaccacctaaaaatttcataaatttcatctataattaattgctaacttta

SEQ ID NO: 48136 - DNA, 353 bp, Glycine max
  unsure (1)..(353): unsure at all n locations
agctcggaagagctctacatgggattctgttatgttcaagaggaggtcaagggaagcaaaagccacagcattgattcatgtataagtgagttaatgcatttgaataaactaacaactttgaatgtgcagatagaagatacttcagattttccaagagactatcttggctttgggagactagaaagctacaagattntgattggggaaggatgggaatggtctggggtggagtctgggaattacgaaacttcaaaacttcttaagctcaatttaggtgctgatacaagcattctaatggattaccgtataaagatgttgatggcaaaagctgaagagttgtatttggctgaact

SEQ ID NO: 48137 - DNA, 98 bp, Glycine max
  unsure (1)..(98): unsure at all n locations
agctattaatctatataaatcactcttatatttttctatatatattaaacagngttagataatatatcacaatgtaacacatcttcatgcggtgcatt

SEQ ID NO: 48138 - DNA, 187 bp, Glycine max
gaattggctactaacactcaggtctaattatctaacccctctgtattaatgtaaatgctctacagtctagttttcaatacagtgacccacacagcccctcaacatatccaatcttatatagaataaaggaaaaatctatttcaattagagaatttaccacgattggtttgggaaaaaaggcttggaa

SEQ ID NO: 48139 - DNA, 518 bp, Glycine max
  unsure (1)..(518): unsure at all n locations
nggcgtctatatgctttgtattgatnttctttgcananagcanacnanngaaancacaagcccccgagcaattcanaaggccataacttaggactctgtggncttagnatggttttanaanagcgaaaagcccgagatggaatattggaagctctttgcatatttcattttgcttaactttttactgtgaggtgtatattgttgctcattatatattgagacgttctattttgatcatagtcgtttttggattattatatggtctttctttcactgtggagtgcgatctttctcatcctttctgtttgcttttaatgtacatgcgttgttgtatattctattgtcatatttatttcttggtgttctattttgcgaatttattttatttcttgaaattttatctgtttcttatttttttatatgcctatattccttttgtgtttttcgagtgttattttcatttttgaattttattgggtttatctttttatgttttagtttctttggttgttcgtatt

SEQ ID NO: 48140 - DNA, 350 bp, Glycine max
  unsure (1)..(350): unsure at all n locations
gctactcttaaaacgaaaatggcatacaacctcctncaatanacacaaacattaatgtaaatttagagcaaactcatgcacatacttgcttacgaacattcactcgcacaagatattcttctaactaagaaaaatgcacncatgcacaatcaaggcaccttcgttacctagatcacttatatgtacttccaaggtgtatttgctacctacatcacatgcattttctttgcttaaattacatacatgcatactcaaagcactttggctaccaaaaagtgcatacgtgcacattctggtattctaatacctatacatacacaaacttcgtgatgaatcttggctatctacac

SEQ ID NO: 48141 - DNA, 556 bp, Glycine max
  unsure (1)..(556): unsure at all n locations
ccattgaaccccattacncctttgcantgcgncanctgccgcatgcaagnnctatctttagaaaatctatcttctcagagaagttcttttctggtgctctangttctacagaanatttttgcagaaaggtacccactttctggaaaactcaacagtttcttggagaacttctaaggtgaacatgggagcttccttcatcaaaacataacatgagattttggtagcagggtaaatccaggcccagaatgaagaaccagtgtggctgtaactaagaggaggttcccttgattgtatccacagtagtgacaatgatatctatngggagaaagcatatngnngctngtctctggttcanacctgcatngcangttctagacatttagcaataattttatattcaactctttataaatgcagaatcaatcctgtcatacccgtctattcttaagaaatatgagtagtcatgaataaagaacaatagatcatgaacttgtatgatcatatatgaacccaagtatttctatatggtacttgtgcaagcttgctctggagtaan

SEQ ID NO: 48142 - DNA, 452 bp, Glycine max
  unsure (1)..(452): unsure at all n locations
tgccgcatgcaagctcgccacccagctcgcccaggcgagcagggttgcttcctccagaagttacagccttctggaggaatcttctggagggcccaagtgggcctggttgctatntgcacccccatttttactaagtacaccccctgccttttttggtgattcttttttcgtaaagttacggaaacttatgaatttcgtaacgatacttgttttctttccgtaatgttacagaaccttgcggattacataatcatccctttttttgacttacggaatgttacggaacctcactaattgtgcaatgatgncttcatttgattttcggtgtgtcacggaaccttacggattgtgcatcaatatntatcttttgtttccggcatgtcccggaaattcacacatngcctaatgatgggtgccaagcacctcacaaggaccaaacanaagtttacatg

SEQ ID NO: 48143 - DNA, 396 bp, Glycine max
  unsure (1)..(396): unsure at all n locations
actcgagattacacttatcaaaggatctaaaagctttgtgatcataaaagaaaccatacacaagaccctanttttntgctagacaaaccatctcaatgcaatagtacgacaacacgctagaagcgataaattntcatcacaatgagatgacaaactgtcgcaacctacccttcggcgggagggcgacgtgagactcacgggtgcatcttccaaggaaggaaaatacccggagtcgccaccaacgtttattcgaggaaaacagtctgaaaaccggaaaaggcgtggtctacgaactttaagtgtaaaaggttcaggagttgtatttacgcatggggaaggtattagcaccccacgcgcccgtcacaaaggacaacagcctttaatcaagtgtgcaaa

SEQ ID NO: 48144 - DNA, 330 bp, Glycine max
  unsure (1)..(330): unsure at all n locations
atgcaagctctagacctcatgtctctcacagtctttagaattgtgagccaatccttttcttgtttctggactcttagccacttatgatagccgccgatgatcccattactgcttccnctaagctctctgtcctttcttcacgccgcatcccatgccttgcgaactccttggagtaccctcgcgttgtggtcactgaaaccccgtgcgatgaaaggcgtgatgctttcgcctgatggcactcctctcatggggtagccaaacggtcttatggcgaggacgggattataattaatacaaccccttgttcccatcaagggaacatttggacat

SEQ ID NO: 48145 - DNA, 350 bp, Glycine max
  unsure (1)..(350): unsure at all n locations
gctttgtcactccacccatatctggccttcacattatttatacttaanaccgctgacaacaacgtcaaggaattcttgcaccctagatacaaaggcttctttgaagcagtttgcaatgtatcatacataggggcatgttcttattgaaaagtctcttgtccaagatcacaaatcatatcctccaagcaatctcccatttctacatcaaacggtttacgttgggacccaccttgcatgtctgtcaattcaccatgccatattcacattgtataattcttcttaatcccatcacacaacagatgctcttgtatgtcngtgagtatttgtcatctccttttcaacaaattatg

SEQ ID NO: 48146 - DNA, 295 bp, Glycine max
  unsure (1)..(295): unsure at all n locations
ctatattatgacatcccgataatctagtatttctttatttgcatggtttgattgaacaattatgaattatgttatatgactatgtggtttttatatatttgatctattcatgtntcttgcttcatgattggtttaaattcttcactgtatgtcttggaatgattatagtatatgatttggttatacttctttacgcactntggcttttttgttgatgccaaagggggagagaaatatgaattatatcatgaactcacataagtaatcaactcaatttcaagttaagcataaactc

SEQ ID NO: 48147 - DNA, 477 bp, Glycine max
  unsure (1)..(477): unsure at all n locations
acctcccctttttcctgaaacactcgangcgttgagaacgtgatctctgagtcacctgcggcatgcagctgccacccactcgccaggttatanggnntttcctcagaacaacagctttggaggaatctttggagggcccagtgggctantttctattgcacccccattttactaagacaccccctaccttttttggtgattttttttcgtaaggtacggaaattacngaattcgaacgatacttgtttctttccgaatgtaccgaaccttgggattacaaatcatcccttttgactacgaatgtaccgaacctactaatggcacangcttcattgattccgtggtacgaactacgatgtgataatattttttgtntcggccgtccgaattaaaatgctaagagggcagcactaaggacaacaagtgatgataagcaagcccgacaataggatgacaagatcttaagatgacaacagg

SEQ ID NO: 48148 - DNA, 270 bp, Glycine max
tttgtgctaaatgaatcggctcaatgtgatggcttaaaaaatgggttgccttcgaaaaatgttttttttttttagattgttgattgcttgatttgatgccatgttaacaaaagtttgggttaatggaactcgtggccaaaatatgttgttccctcaatggtttattccttcctttgatggtttgatgcaacgaaaattatcattaggaattgatatgtatcatatctcatagatacattttgtacttttgtagccagtcatggtctttta

SEQ ID NO: 48149 - DNA, 185 bp, Glycine max
  unsure (1)..(185): unsure at all n locations
atctctcgagtcacctgcggcatgcaagcttaaatatatcgatacgctcgttattaacatttgatactctttttaaanncaaanagncataactnttcacacggatgtccgattcgggcgcataatatgtcgagaggctcgaaattgaacaacgcaagctcttgagaaattatactggtattact

SEQ ID NO: 48150 - DNA, 452 bp, Glycine max
  unsure (1)..(452): unsure at all n locations
tcttaagtcacctgcggcatgcaagcttgtaggaatatggngtacccatcacatgtggtattatgtggcggtcgggcgatggtgcacaacanngtttttcacatccacaatgcgcgcataaacccaccatcctctggtgcccacctncaactgagctcacgtactcccacgtagcccatatcctcgtttctctcaacaccgggtccccatcaatcctcccaagcttccacaacatccaagcaaaacaacattcacatagcacaagctatcacagccaagcaaaacagagcaaaggcagaaaactctgccaaaacaccaaccaaaaatcacagcttttaccactcaaagaccccagtaacaattccttctttccaattcgttaaccggtggatcgactccaaattttactggaagtctctaatacataagcctacattttgaccgtgggatct

SEQ ID NO: 48151 - DNA, 368 bp, Glycine max
  unsure (1)..(368): unsure at all n locations
catgtaacctaccatcttctcatagtagaacactctataattattactatcattgntatcatctccctctccatcattgggggtgctacttgagctgccaaatccctccacctttgggcgtattctntgaaagattcatgctctctttttacacatgctttgtagttgcatcctatccggagccatatctgaatngtactcgtactgcctaatgaaagccaccattatgtcccttcaagaattggacccggaaggttctagattagtataccaagtgatggctgccctagtaagactttcttgatagaaatgcatcaacaatttttcatctatgtgtgcggccccatcttctgactagtcatctttag

SEQ ID NO: 48152 - DNA, 440 bp, Glycine max
  unsure (1)..(440): unsure at all n locations
caccacttaacctgtgacctgacacggatcttaagcactcggctgcagctgaagagaatgtgaagtgaacttcttcnttattgtganacagagtgtacctggagatatgtccggggtcaagagccttgngacgtaggtggggtgctattgcccaaaccaagcttgacaatcccgaccaacccggcatgtctgtcaggaaacctggatgtactaacaggcgagctctgcagtaacagataaggaaacaagacccaagcaggagcttgggtggtgccactgtaatttgtgtatatgggatgggcttggaatcataccaagtagtaatcatacatgttaaatgagacggagctaaaggcttggcatcactccaagtggatcatacctttttaacatcagaattatgatccttgaacgtcacttctgctaacatcacatattct

SEQ ID NO: 48153 - DNA, 394 bp, Glycine max
  unsure (1)..(394): unsure at all n locations
cgtagaatggctagacataatacatggcggggtgtggtctggttcatttgatttagggatgccccacattatttccatgacacaaatgcaaagatgatgatttgcgaaatttatgcaaaactggtcatgcatgcacctatgcggacactcaagtgtncaaattttatggtcatgtgatgctagggctcaggattcatttcctctattttaaatcaacccaatgtttccaaaatatgttcttttatcaatntgtgcattcatccgagtcccatttgggtactcgggaaaatttacagcattcacccttcaggtgatacacatnttttcaaaaactagttatgatcagtgagatttttcaaagaaaagttggaagtcatctcttttcaaaagcatg

SEQ ID NO: 48154 - DNA, 366 bp, Glycine max
  unsure (1)..(366): unsure at all n locations
ctcgttgaacagtgaaatgattgaatcatgtgtcagngggttgnntttatgaaatgagtgtgcgngaatgacttgaatgagaaaatgtatgaacatgtgcctcgaagtatgactaagaatgttagtcagtttgtcagattgatggtgaaggaatgcattgaccgtatctcggtgagagagtgatccttaaattctgagagaaacgactatcatttagtactgagttttgcatgaatctctgatgtatggactgaatgcatgaattgaggatgatgaaggccatgtttgattgtgatagccacttagccaaaaagctaaccacgtgcttgaatgatttattccttgcatccagtttgagttgaatga

SEQ ID NO: 48155 - DNA, 147 bp, Glycine max
  unsure (1)..(147): unsure at all n locations
ggcctagatggggaagtgctcanatatgtaggcaatttggtttgtttcttgcttgatgggtgaatgagggtttgttgatatggcctaggcctatatgcatttggacaatgggcatgcccattgtccccattctctgctttatgccta

SEQ ID NO: 48156 - DNA, 578 bp, Glycine max
  unsure (1)..(578): unsure at all n locations
ctcttgaaccccattacnccngatgacagcgctacctgccgcatgcaagctctgagccanaatcctgactcaccatanaccttgattaggngagtttgtcattttaccctcgaaagcaaaaaaaaagaagagaaggaaaatttcctatccaaggaaaaaggagaaggagaattttcaatcaaagaggaagcaaaaataggagagaaggaaaatttccaatcaaaggaaaaaagagaggaaagggaaattcccaatccaagagtgggagaaagcaaaaagaaaagaaagaatattctctatccaagaatgggagaaagaaaaaaagagaagctaaaaataagaaagcttctggtcaaagaaaccataagaaatgtgcccagagggtcttggaccggaccatatctgaacaatacaaaattgtcaccaaatgaacaaaaagaaggaagggaaaccacgacctaaaatggtcttcctcctntaattgcaaccaaaatcttgtccgtagctgactttttcacccgcactataacaaaaacagaaaggaanaagcctacctacaatataagccanatacacct

SEQ ID NO: 48157 - DNA, 221 bp, Glycine max
  unsure (1)..(221): unsure at all n locations
nncgccgggctgtnancattcttatgtttgacagttatcatcaattttggcatcatctcttatatgactattaggcgtacaccaggcgtttaggcaccactactgcttaaaaaatactcccgcctgcactattcagtgtgttgaatattacgttctgcacgtgatgcatctaacgctgataaacgatcgctcggataaacttgctcctcttaaatagcctg

SEQ ID NO: 48158 - DNA, 519 bp, Glycine max
  unsure (1)..(519): unsure at all n locations
nnttataatctcgctagcttgactgcttgncannnngcacgnnagnncccgtggnaagttgaacattacacatgttttttctttatgttttcaaggnagagacgnagatttattgcgatttttcaatagctaaggatatcgcaggcagatatcgtctaatgaaacacaatggatttatgcgacttacaatgcctttgcttggaccttatctgataagacacctccccgatatgtaacgacatatcctttacattcttcttcttcaattctagctttgagatctatattaattaatttcttttgtaccatttactttcatactccaattgtacttttcttgatggtgcaatggaaatttatgtctcttctatcctcgcctatctcgagtaatttatctttcttctttattctcagaatcgtgtatgtcctactttagttttcttcaatcgtcttttcagactgttactcgcaccgtggactctgtactgatatgttctcgtttactttgctgtcgggctt

SEQ ID NO: 48159 - DNA, 552 bp, Glycine max
  unsure (1)..(552): unsure at all n locations
cttgaccccttgtgacccgtctcaactcacctgcggcatgcaagctggtttcaatccataaatcaacctctttagtttacttactaagttcttattaccactaatacaaaaacctttaggaaaagtttagaagcatgtatactatctgactcaaatcaccattcagaagaagtgtattcacatccatttggcgcaactccaaatcaaagtgagctataagggccacaatgattctaaaggaatcctttgtcgatacaggggaaaacatctctttaaagtcaacacccttcttctgtgtaaaatcctttgccaccagtctaaaacatctctttaaagtcaacaccctccttctgtgtaaatcctttccaccagttagccttaaatctctcaatgtatcatttgagtccatctttgtcttgaagacccatttacaaccaattgccttataattctcaagcaactcaactaactctcatacgacattaagtgacatagaatgcatcttttcattcattgtgtgantcaatccctacccccgacggaagtggatat

SEQ ID NO: 48160 - DNA, 392 bp, Glycine max
  unsure (1)..(392): unsure at all n locations
tacttgacgatgctaattnttgttattatcccttatgagcatagcatctccaaatgaatntggtgaaggatttcttaagtaaaaaaataatttcttataaattttttttattggaataaatctatgtgacatgaagagttgttataaaataagaattttatctttcataaaatattatttcttaataataaaataatatttgtttaacacataacaacatcataattaagtgaaaataaaaaagatataaaaatgaatttttgaagtttcttattattgaaacaaaaatatatataaatttcttataatcatataacactctctagatcagaacaatattatataaactatataaaataacttaacaaatttatttaatacattctctatta

SEQ ID NO: 48161 - DNA, 166 bp, Glycine max
  unsure (1)..(166): unsure at all n locations
gacactgatatggannaactctggtttcatttttatcnggaaaggngctcgatgaaatgagaaaggattttcatcggagatggaagaagagaaataaagagagtctgaaaacctcgacaatggcgatgagaagaagtccctaagctgaccctgcggcgtcgtggtg

SEQ ID NO: 48162 - DNA, 296 bp, Glycine max
  unsure (1)..(296): unsure at all n locations
cgcgatagacaaagggtgcagaagacgacgtttgtctcngtangtctatcatgcgttgactgttagcgatagcaaaagaatgtttatactaataaccacttgggtatttctgccggccccctaacttcacgacttaataccgacagagtttgtaagcgtggaagacgacgtaaatctccgcatgtgaacgagctngttggccgcgattgacaaagggtgcataagacgacattagtttttcatggtatcatgccttgagtctatagatagcaaagaatgttttagggataccactt

SEQ ID NO: 48163 - DNA, 81 bp, Glycine max
ggcatcagcctgggaaaatgatctacaacagcatgacaaatagcttgtagagaacaaattatgccgctattgaatcttgaa

SEQ ID NO: 48164 - DNA, 179 bp, Glycine max
  unsure (1)..(179): unsure at all n locations
caccagaaactaagcccgctactangatatgataaagagtaaatcttttgcacatttcatttatcccctncncacctcaggccatggtctattagggaaagaatcctctctgacacaaccgcatgccaagagctaggcaagatacacgacgagaatcggagatgatcgagaagcaacca

SEQ ID NO: 48165 - DNA, 455 bp, Glycine max
  unsure (1)..(455): unsure at all n locations
gtcacctgcggcatgcaagctntaaaaaaataaggaaattatttattattatattctacaagttagtattatatatatatatgaccttaatagccaaaaaagaaaaagcaaattaaccacttattttttggagcaagtgtgctacaaatccaagctgaaattgcttgcatcaatgccaaatggaatcaaaagtatatgctaattccaatgggagttacttgacattcaattaagcaataaaagtatatgcttataagttccaaatgaagttttctaacttttgtgttcttatcaagttcaaatagggttacttttataatntgtaaaaagaaaaaatatttaaagttggagctcaattattgaaaatggtatatctatattctttacactatacggtctaataaaantagttattatatcggacatagtaatactttatatcaatactataatta

SEQ ID NO: 48166 - DNA, 400 bp, Glycine max
  unsure (1)..(400): unsure at all n locations
caatgatcaaacggttatcaaatntttatatcatagttntactaagacatgtntgagtgttcatganaaagagagggttttgaaaggcgggaaggaaaaacgaatttgagagcatgatagagcgtaaagacatatggtaaatgtaaaactgacctagtatatctctatttcgaactattatactctcaacctattatttactctatttttctttattatatnnatttataaaaataaactatattttactcccaatcaaatgaataaattaaatattcattttattttataagaacatataattatnttatttaccttaaaatcattattctaaataataaaaatatcttttcttatttattaattacgaaaatctattaatttcctaaaactctattta

SEQ ID NO: 48167 - DNA, 476 bp, Glycine max
  unsure (1)..(476): unsure at all n locations
cggtgtctcaacatggtctttcaccgaacgtgcccgattntgatatttggtgcataacaaattcatgtgctagagtgtcagttntgggttgaactcccatattatttccacgaggcgcacgtaacaatgatgatttggaaacaacgcgcaaaattagtcatgcatacaactaggtgggtactcaagcatccaacttatggcattatgatactaaggctngagatttatgcaagtagacccaacgtttccaaattatgttctttcattggttcaacgaatccatccattcttatcttggttattttggaaaataaactcttagcgtcagtttcttgtttccaaaagatatgtttgctctctacgaatgatttattcttcctatgaccataacacgctgaccttgaaggtctttctntctcttttcttttggttcaaatttttctatgcatgtttgcaaaaaactatacatcatcgta

SEQ ID NO: 48168 - DNA, 268 bp, Glycine max
ggacgacggtgcaagttgactctccacatccacaaatcacacataaatccatcatccccagttgcccaccttcaactgagctcacgtactcccacgtagccccttatactcgtttctctcaacaccgggttcccatcaatccctccaagcttccacaacattcaagcaattcaacattcaaacatcatgaactatcaaaaaccaataaaacagggcagaggcagaaaactctgtcgaaaacacattccaataccacaactttctctac

SEQ ID NO: 48169 - DNA, 324 bp, Glycine max
  unsure (1)..(324): unsure at all n locations
agcttgtagttatatatttcaatatatttatatggtttatttatgtagatgtttatattttgataaatgaatagttntaggtagtataagataacacatttgtatagtttaagttgaattggtaatgttatatatgccagaatattttttgataaatgaatagttttaggtagtataagaataataatttgtataatttattttggaatggtaatggtatatatgccagaatatatttngatanatgaatagttttacgtagtataagaataataatttgtatagtttagttttgactattaatggtatatggtagaatagatt

SEQ ID NO: 48170 - DNA, 409 bp, Glycine max
  unsure (1)..(409): unsure at all n locations
ttggcatcacatntaaacttgaaccattatcttttagtaccttagcgacgacatggtccatgcatctgacagacacatgtatggctttgttgtgccttctcccctcaaccggaatcttctcctctacgaacgcgaggtagttattggtagttatgtgattaacaatgccttcaaagccctcgactgagatgtcgtgtgctacatgggcttctgtgaggacctttattaatagtgcatgatgaggctcaaagctcatgagcagntcgagcaaggagatccttgctggagttttattcaattgttcaaccaccttaaactcactctgttggatgagacgaatgaactcatgagccttctccaatgtcaccgccctcgttctgagatcatccttcttgtcaacctcccttac

SEQ ID NO: 48171 - DNA, 299 bp, Glycine max
  unsure (1)..(299): unsure at all n locations
atgatagaaaaagtactaccggatntgctatttttatgggtgattgtgtttttacatggagttctaagaagcaaggcattgtgacactttctacttgtgaagccgagtatgtagctgcaacttcttgcacatgtcatgccatttgtctaagaaaattgttggaggaactttagttgttgcaaaaggaaagcacatagatctatcactactaaaaaaaaggccttttacatcggttctaatggcctttttacatcggctatgacgcgtggtggtaacccgggatcattgaatcacaacat

SEQ ID NO: 48172 - DNA, 209 bp, Glycine max
cattattgaaaattaaacacaattagcctaactatttacctcatacacaagaattaacaagaagtgtaaaagcacactatgtaacacatggaaaagacacgtaaggctagaaatcccaggttgcctcccagtaagcgcttctttaatgtcactagcttgacataatacaccttcatgggtcttggaggtggatgatggtggccaatctc

SEQ ID NO: 48173 - DNA, 198 bp, Glycine max
gctagtgccgtaatgcgctagcgcactttaatatttaaaatataatgatgtggtgcttagcgcatcttttctcactaagcccagctttgaagctcaacttatagaatgaatctggtgcttacggcaggatggcgcacttagtgcaactataaaaaaatttcacagagaggaagtggcgcttaatgcatcatccacact

SEQ ID NO: 48174 - DNA, 288 bp, Glycine max
  unsure (1)..(288): unsure at all n locations
tgcaagctataagtatgaaacaaaagtcatgtattcgtcngtttatgaaatcgatacaataaacttaaaaggaatatacttattgaattacattataaagcataagctgggtataaatggtacatatgccnggtaaggtaaagccaacgagtatgtattacctgagacacagagtgatgatatgcagccttccaagcatacacaggcagctgacacaatatagacacagcacacacagagcacaaactgattttcatcatgtaaatgtgatcggttatacatataaaa

SEQ ID NO: 48175 - DNA, 263 bp, Glycine max
atcttcatggatccatctaaagtactctggacatgatgtattagatgaatcatcatcaaactcaagttttgttggatagtatgatggacatgttgatgctgactttccattggtgccaattaatgggaattgaggttgttgattattgaatactataattgtcttgagaatagtagtgcttgtaattctagactgaaaaaaaaaagataacatgattatatacatagacattattggatatgtattgtcattgttaaacatat

SEQ ID NO: 48176 - DNA, 422 bp, Glycine max
  unsure (1)..(422): unsure at all n locations
gcttcggtattcactctcgatcgtctcgangnnatacttgtactcaatttatatctgtttaaaaacgttattgtcgtttggaattgctgagagcttctaacattcaattcgagcatctcgatatattacgggactcaatcagacatccgagtaaaaagttattgtccgttgaatgttctgagagcttcaacattcaatctcgagcgtctcgatgtattatgggactctatcagacatctgagtaaaaaagttattgtcgtttgaatttgctcagagcttcaacattcaatcttcagcgttttgatgttttacgggattcaatcagacatccagtaaaaagctatttgcgcttgaattagctttgagcttcacaacttaatttcgagcgtctcaatatatgactggactcaatcagacatctg

SEQ ID NO: 48177 - DNA, 173 bp, Glycine max
atcaaacgtaacaagacaattatagttgctgttagaatacctcacccactcaagtgtatcacacaattatggtttttctctaatgaaacactctttgcctttaccactctaattccccttgagttcttatgcaattcaagagattatggccacaacaaataacaattcaccaa

SEQ ID NO: 48178 - DNA, 230 bp, Glycine max
gataacagaatatgaaaaagatgaaaatgtattgcaaagaaatcaaatacgtacactcataagttagaagtttggtatttataccacaactaaaaaaataattataccaatattttctatatcaatctcttttcatcatacatgagacttctatctctttccttctttctttttctcttggtatctctttaattggaaaatattttgtacaacaggtcttacaaataaca

SEQ ID NO: 48179 - DNA, 496 bp, Glycine max
  unsure (1)..(496): unsure at all n locations
aagaactatatctcctgtattcgtgcanatggtattntcaacgctccccntgtgggcttctatggaggctggatctatgagcttccatgagttctctntaatggtgattatccaccatggagatgcagcggaagacacaagataagatgtgagaggaggcaccatccattgtggaataagccatagaaggatgagcttcaccaccgagatgagccttggatataaactaggaacgatgctcgatggatgaaataataaggatagactatagaggggatccgaaatcaacgattaataggggagaagggaacttcgagatgtttacaaactccactcataattcaacactttaccctgctttattttacatgtacttctgagaaatatctgaaatctctgtataaatttaaaacctcatatatttacgttctctcaccatttaatctaactctcaattacgttgtataagacatgattatcgtttgtccccttctcg

SEQ ID NO: 48180 - DNA, 359 bp, Glycine max
  unsure (1)..(359): unsure at all n locations
atctccgagtcacctgcggcatgaagcttaatccttcttcaatctcttattctcatgattactctagcacaacaaccaaataaaatttggaggaatattagagaaccgctagagaggttgctatgctgctagattatacacgcccncgcttacagataagagatgagtttatcacaattggtgttaaagtgaatattcttatgaatccttacaggatcaaattaacattaattgtggagtgttctatattattaaccaaatgaataactgaatgattatatgccttaaatgttagaagattgctattgcatgatatatatatatatatatatatatatatatatatatatatatatatg

SEQ ID NO: 48181 - DNA, 384 bp, Glycine max
  unsure (1)..(384): unsure at all n locations
gctcgctaacaacactcataactgacttgattgactaagtttatatgtttctctgttngggctntgtttatggcctatccaaacttagttagaacttagaagggtaacttgcccatataatataaaaaatctcttgcatatgtggtttgggcaaaagtgccaaaattcaaacctggccctagataaaatacttaatgaaaacttcataataagtataaacctgttcttntccagtccaattaggaagccagcttcagctatggctgccaagaggcttcctgtcccancatcttttccagtcactgcatactcacttacaaaagcctgtaaagtgtccacacaatagaattcatacaaatggatatgccaataactaataaaaca

SEQ ID NO: 48182 - DNA, 227 bp, Glycine max
  unsure (1)..(227): unsure at all n locations
atctctgagtcacctgcggcatgcaagcttaacaatcagtgtcatactattgatcaaaacanatcatgtataaatatgcaatactagactcaaaatatgcaacaaacactagacctaaatcagtgtcacagaaattggaagaaaatattntatcccagcacaaacttcaagccttattccatgtattggggggaagttatggctggccatatgggtagaggtgtcat

SEQ ID NO: 48183 - DNA, 417 bp, Glycine max
  unsure (1)..(417): unsure at all n locations
gctcctaaactntatacaagaatgaagctctgataccacttgtttgacaattggtctcagatatcnnaagaaggggggggtggaattaagatatcccaaactactctccacaattaaaaatttatttcactttcttttcaagttatagattcccttaacaatgaacttcctaaatattaattcaaataaaacaatntgaatatgaatgtaaagcaataataaacaaaggagggttacggaagaganagtgcaaactcagatttatattggttcggccacacccttgtgcctacgtgcagtccccaagcatatccgcttgagagttctactatcttgtaaatttcttttacaagttcttaacacacaaggacacatccttctttgtgttagaattctttacacaagagaccacagtct

SEQ ID NO: 48184 - DNA, 283 bp, Glycine max
  unsure (1)..(283): unsure at all n locations
agcttccattgttcaatttcgagcgtctcgatatattatgtctccttattctgacctccgagntaaaagttatgaccatttgaattgctcaagagcttccattgttcaatttcgagcgtctcgatatattatgcgcctgaatccgacctccgagtcacaagttatgaccatttgaatttctcaagagcttccattcttcaatttcgagcgtctcgatatattatgcgccccaatcggacctccgagttagaagttatgaccatttgaattgctcaaaagcttc

SEQ ID NO: 48185 - DNA, 390 bp, Glycine max
  unsure (1)..(390): unsure at all n locations
caaaccctcagctctaagaaactcatgaagctgctcggtagaactctgccacttttgtttccgtggatcttctcgaaattggtttgaacttacaagacacntaccatgattaaccgtggtatctttgaaaaattctggagtggctagaagcttccttcccgagagcatctcttattaagcatttcacctttgtctcttgagcttagaaaaatgcatttcttctttttcttcttccatatccattttaaagtccaatacttttccatacccacatcacattgccacccaaaccatattgtctcattgaaacccaccggaggacccttcaccgagcagaattcaacttggttgcggttcggagaaacgaaacctatctgtctttcttttttc

SEQ ID NO: 48186 - DNA, 330 bp, Glycine max
  unsure (1)..(330): unsure at all n locations
agcttgccaggaagaactgacaatgttataaagaattattggaggactcacttcaagaaaaagataagggctcacttcagctaaagatatgaagaagactccagaatacaagtggactatgatgtnagtatttctggttataagtagacaactatcattacctcgtgtacccctataaactgtctacattatatataatcatgatatatagtttgggacatctaatctcccctgccaattaatccaattctatgattaggaaacatgacaaaattaattaaaatctattcatctaacctactctaaaatgagatgcaaaattgactataa

SEQ ID NO: 48187 - DNA, 549 bp, Glycine max
  unsure (1)..(549): unsure at all n locations
nnnccggatgagcatgagactgatcancatgaacanncacgaacactcaagcttctggaagctagaagaattccctctctctcagaaagtgctatgtattgcattaataaagcgcaagacactcaagagggagggaacttcgaatcaacagaaagacagacggaagcaccatggaagcgcggaaatgaccagcatacagtgacgtgacctaaaccaggatatataggtggggcaaaaagccatggggagcgaactgactgcgaactacacagaagagaggagatcaccggtgcctgagaaagacatctaaacactggaggccgcagaggcatatgattcatgattacacaaaatgagtatgtcaaaggcgcgtgggcatctttaacagtcactatccgcagcctccgggaggagataagtctactgaagtgacaaccacacggcgataacgtaccatgaacatgtaagatggttcccaaaatagaaggggggtggcagagaggttttcgtggagcgaactgcgagaaacgggctctccacgtatacacc

SEQ ID NO: 48188 - DNA, 160 bp, Glycine max
ttacagtcaaaagatggaaaatcatcatgtgatgaacgcaactggacaattacctcagtgcaaacaaatggcgaacacctctatttggctaaacctcaacattcgtccatggaggtacacgtagaatacatagagctctgcggcattttcatcagatata

SEQ ID NO: 48189 - DNA, 306 bp, Glycine max
  unsure (1)..(306): unsure at all n locations
gctataatatatctatacgctcgaatataaacatttgnatactcnntcggaaatcanatagtcataactttttacacggatgtccgattcnggcgcataatatgtcgagaggctcgaatatgaacaacgcaagctcttgagaaattaaaatggtattactttttacaccggagctctcgtgaaagtcatatggtcataacttttcacactgatgtacgactgaagcttataatatatctatacgctcgaaanttaacatccgaaactctctataaagtcaaatggttataacgcttcacacggatg

SEQ ID NO: 48190 - DNA, 493 bp, Glycine max
  unsure (1)..(493): unsure at all n locations
agaatcggacatccgtgagaaagatcgagttnaggattgtcaatagctatcgctggagagcttccaacgtctaaacatatgatgcaccagaatcagacatccgtgtgaggagatatgagcgaaagaatatcaccagaggaatctatggagaacttccagcgtatagatataagctgacccagaatcggagcgccgtatgaaaacttatgagcaataggatatgaccagagcaattctgtgagaacttccgatgtcaatgtatgtgcatgcgcccaattggacatcccgaataaaagatctgaccgataagatatgtccatagcattcgctgaagaagttcgagcgtctaaatatgagcgtctccataattggactcccggatgagacatctgacgaaaagatttgccagtggtattcttggaatttcgacgttagtcaaactgtccccatatggaacccgtgtagagtctgcgcaatgatttgccataggttn

SEQ ID NO: 48191 - DNA, 267 bp, Glycine max
atttgagcgtctcgatatatgactagactacattatacatccgagtaaaagttataagtcgttggaattgctcagagcttcaacattcaatttcgagcgtctcgctatattacgggactcaatcagacatccgagtaaaaagttggttggttgaattggttgagagcctcaacatataattattagcgtctcgatatattgtgggggtctttcagacatcctcgtaaaaagatattgtgcgttgaatatgctcacagcatcgacatt
